United States Patent Application Publication US 2011/0296543 A1 - sequence listing, part 22

SEQ ID NO: 97731 - protein, 283 aa, Unknown
  Obtained from environmental sample
  misc_feature (1)..(283): Xaa is any amino acid
VRYFAIDSGDKNSAGINDAVDWLLGKINKKNARAKLMSTIGVTAGALIAACAIAASVFFAVRVTAPSVRSGIAWTHRVSTETRWYTSNINATSYTVSTAEELAGLARIVNGNWRLVSGGPKRDNFYGKTVKLAGDIDLSTYENWVPIGYHAANADNVFSGVFDGCGHVIRGLKIDRPDIDFQGLFGNISGGRVENLGLDSVDIRGRDRVGGVAAIINGSRIVNCHTVGKINARAMVGGLAGVVSGNSNVSGSYSGATLSGDSNVGGVAGQVISNSNIVNCYST

SEQ ID NO: 97732 - protein, 78 aa, Unknown
  Obtained from environmental sample
  misc_feature (1)..(78): Xaa is any amino acid
MEAGINRQQAWELLRQYNKDSFHLQHALTVEGVMKWFAADQGFAGEEDFWGIVGLLHDIDFEQYPDQHCVKAPELLRN

SEQ ID NO: 97733 - protein, 117 aa, Unknown
  Obtained from environmental sample
  misc_feature (1)..(117): Xaa is any amino acid
SLRWKNANDLAIRSYYRAREDYVQNIAPKIRFIEAINCLGAVGNSEAAFVLGLQLGLINERTERRGGYDADITFAIIQALGNIGSKTVFDHLIYVNNLSYPDYIKIAAREAVARIKW

SEQ ID NO: 97734 - protein, 238 aa, Unknown
  Obtained from environmental sample
  DOMAIN (18)...(238): Ribosomal RNA adenine dimethylase
  misc_feature (1)..(238): Xaa is any amino acid
MINYNSASALRTFLEKEGLGMRKKFGQNFLINPAIRKALVEALGCKSAEEVWEIGPGLGAMTALLLEMGLKVSAFEIDKGFIRVLTQIFAAEENFTLIEGDVMKTWNAQKPVRFLLGNLPYNIAAALIADFIENGFLFDRMVVTVQKETALRMAARAGSPDYSSFSVLCASVYKVKPLMTIHPSSFYPQPNVDSMGVLFENKTHDAYPPVFYPLIRALFASKRKTIKNNLTNFAASKD

SEQ ID NO: 97735 - protein, 253 aa, Unknown
  Obtained from environmental sample
  DOMAIN (5)...(253): C-5 cytosine-specific DNA methylase
  misc_feature (1)..(253): Xaa is any amino acid
MKKTFNVVDMFCGAGGESSGIMQAALEQEMKVNLFAINHWEVAMETHAANHPYANHLCESVQNIDPTKIIKSGKLDLLWASPECTHHSVARGGRPRSDQSRASSWLILKWLQELYVDRVIIENVPEFLSWGPLDRNGKPIQNQKGKIFQAFVQSLQSFGYKVDWRILCAADYGAPTTRRRLFIQAVRGRKKILWPEITHIDGGSSCHQPWKSAREIIDWTIPGTSIFNRKKPLADATIRRIAAGIESIGAIMR

SEQ ID NO: 97736 - protein, 122 aa, Unknown
  Obtained from environmental sample
  DOMAIN (5)...(64): Iron dependent repressor, N-terminal DNA binding domain
  misc_feature (1)..(122): Xaa is any amino acid
MGNQESAEMYLETIHVLSLKGNRVRSIDIVNELEYSKPSVSVAMKNLKTKGYVIVDSEGYISLTAKGLKIAETMYERHVAISEWLMFLGVDKKTAVHDACKMEHAMSEKSFLAIKKHITENK

SEQ ID NO: 97737 - protein, 266 aa, Unknown
  Obtained from environmental sample
  misc_feature (1)..(266): Xaa is any amino acid
MNSLGMVDRSSFTDNYDQYLAKIASGRVLGFHDQAWHIKQAEDSLNTQGMYNRTYAPLPVVFDESIRPHYRTLPAPSAGSGLGISIKAKDPVRIIRFLDAQLDEEAQRVFSWGFEGEDYQYDENGQPYRTAEQRRQQEDNVWALHNRAELWTSHNPKISGSFSDGFPTSLGDIASERAATEKPEDKELWAAYGIDNYPDLMDKDPPPNSIWFPAWEIQFAGSSDAKIAWQRAESVYRKYLPRIIMAPPEQFEELWAEYIAELHKCG

SEQ ID NO: 97738 - protein, 139 aa, Unknown
  Obtained from environmental sample
  misc_feature (1)..(139): Xaa is any amino acid
GIVGVTFVWKDVGWNTIIYLAAMAGIDPALYEASEIDGCNRYQKMWHITLPGIKATIMILLIMSIGRLLDAGFELQYLLRNGMIQDVAETIDIYVVTYGLENFNYSLATAAGMFKNVINICLIFFANWLAKRMGEERLV

SEQ ID NO: 97739 - protein, 152 aa, Unknown
  Obtained from environmental sample
  misc_feature (1)..(152): Xaa is any amino acid
MGIGLLKAHLEAFDAIGAGIKDERREGYDKQYEYANAIKGAYGVFFFQHPSMLEYQERLKKKNERSNAENILLVNKIPSSNRITRLLDDINSEMFAPVFEQGLETAQRHKGLDQYLVLGGRYRLITLDGVWFYQSENIKCGHCLRQQLKDGQ

SEQ ID NO: 97740 - protein, 280 aa, Unknown
  Obtained from environmental sample
  DOMAIN (1)...(170): DHH family
  misc_feature (1)..(280): Xaa is any amino acid
EKVLVFGDRDVDGITGTSLLSGFLDSIGMDIRWRLPEGDEPYGLSIKVVEEFAASLGTLIITVDCGISNMAEIKRAGELGIDVIVTDHHNPQEEVPDALAIVNPKLPESKYPFRDLAGCGVAYKLVSALRFALSSSLYGQPMCLLNTRPVNDAWIVEIAKLRNLALIATLTETLVPDPQGGRSVVSIGNTRLPAFLEAQQILVWDAPLQKRSLKKIFGSSVEINMLDIAPEIGKEIPASAGKSLLRIKELSRIAKYTEKEAGELDVFISLFTSFIKKKEK

SEQ ID NO: 97741 - protein, 305 aa, Unknown
  Obtained from environmental sample
  DOMAIN (117)...(305): ATPase family associated with various cellular activities (AAA)
  misc_feature (1)..(305): Xaa is any amino acid
SLYDEERCYCAYFLRKAGVKRLELLQMLSYSFGNENIFSSGKDDQNGKFPKHQADSGIPDEEQSDGQRARANKKSALERYAIDITALARENKLEPVIGREEELDRTVQVLCRRLKNNPIHVGDSGVGKTAITEGLAQKIVAGNVPPLLKGFSIFSLDMGALVAGTKYRGDFEDRVKRVVEEMLKKEKAILFIDEIHTLVGAGSVSGGALDASNLLKPALTSGRLRCIGSTTHEEYGKFFEKDRALSRRFQKIDINEPSEEVAIDIVNGLKSRYENYHHVHYSDEVVKTAVRLSAQFITERRLPDK

SEQ ID NO: 97742 - protein, 144 aa, Unknown
  Obtained from environmental sample
  DOMAIN (10)...(144): TraB family
  misc_feature (1)..(144): Xaa is any amino acid
VNGNNVRISLDNKEIALIGTAHVSQESIEEVKKIISEEKPGMICVELDQGRYNSITQKENWESLNLTRVFKERKGFLLIANLALSSFQRRLGKELGVKPGDEMKAAVEAAAELGIPHSLCDREVQVTLRRAWACCGLWGKCKLL

SEQ ID NO: 97743 - protein, 164 aa, Unknown
  Obtained from environmental sample
  misc_feature (1)..(164): Xaa is any amino acid
VQGIIAARDAGLRIPILWNSSAYESPLALELLKDHVDIYLPDLKTLDSELSSKFCNAPDYPQAATAAILKMMDMAAMRHAEVIIRHLILPGYLESTRSVLRWFAEHAKGRALLSLMTQYTPIRTKKNPGRYLKEQEYETVLGWLAEFGIDDGFCQELVTGNDWL

SEQ ID NO: 97744 - protein, 73 aa, Unknown
  Obtained from environmental sample
  misc_feature (1)..(73): Xaa is any amino acid
MIVLQQLINGISLGSIYALIALGYTMVYGIVLLINFAHGDILMVGAYAAFFVLGAIGAGPLGMLLAFAFSWPS

SEQ ID NO: 97745 - protein, 169 aa, Unknown
  Obtained from environmental sample
  misc_feature (1)..(169): Xaa is any amino acid
MRKLILTTAAVAAAIAGAFAAETAFGTFTDTRDGQTYKTVKIGKQTWMAENLNYQTKGGSWCYDNADSNCVKYGRLYDWDAAITACPAGYHLPSEKDLDRLGHDVGGKRRDYKGPSTDWFGAGKVLKAKRGWNDHKGKNGNGTDEFGFSALPGGYRNNNGDFHGAGGYG

SEQ ID NO: 97746 - protein, 68 aa, Unknown
  Obtained from environmental sample
  misc_feature (1)..(68): Xaa is any amino acid
VNGGLKADVDEAGYIITDQNMASSVPGLFAAGDVRACPFRQVITAAGDGAVAAHSAALYIDSLKGESY

SEQ ID NO: 97747 - protein, 171 aa, Unknown
  Obtained from environmental sample
  misc_feature (1)..(171): Xaa is any amino acid
LLIILLPSIFPCSLFALSFSDSGDPADLAFRMTAEMTDEQALAQTFMLGWVGAEPSPLIVNWIRDRNIGGVKIFGWNTGNTRKLAETVGDLQKAALATRFGIPLLVATDQEGGLVRHVKGDTSETPGNMAIGASGRPMDAYWSGYYIGKELSLLGINMNFAPTVDLYTNRN

SEQ ID NO: 97748 - protein, 283 aa, Unknown
  Obtained from environmental sample
  misc_feature (1)..(283): Xaa is any amino acid
LRGGSRGISTILPEIPWYRVLNPELFTRTIYGDFLSIGSVTAVLPFDFEPGFDKYWIAPNSDSVLINKKGKSLFLFLLGENQYNNLALPHIMLPQGEGSINVLWPTFGPLTIVSSLKKEITVWRFEIDGKSAKTLTPVNIPVSSNGVLSPDGTKALFWGDKGLELWDYTGWRPIQKLSESQVLSCAWINNREFVTGNTRFIETVSATGTYTRRKICLSGADEFGFEDSLRNQRIFARTGSEWFENTGHSVWMPINNPIIRNISLSTDRFRVFLESPTSGPFKN

SEQ ID NO: 97749 - protein, 232 aa, Unknown
  Obtained from environmental sample
  DOMAIN (1)...(127): Aminomethyltransferase folate-binding domain
  misc_feature (1)..(232): Xaa is any amino acid
GGASFEDLSDSYGQIALQGPASVSILASLSETIPEKYYTFIEKGKAAGFNCIVSRTGYTGETGFELYCKSEDTEGLWKALLEAGKEQGLIPCGLGARDTLRLEAAMPLYGHEMDENVNPFEAALSFAVKMDKPDFIGKAALEPLASGDNLKRIRTGLRVTGKGIIREQCPIYCQGSSIGITTSGTFAPHLKQAIAMAMLKTEFASPGTKVEADVRGKMLEAETCALPFYKKS

SEQ ID NO: 97750 - protein, 266 aa, Unknown
  Obtained from environmental sample
  misc_feature (1)..(266): Xaa is any amino acid
TEGDWRADPNGNGVVITEYKGKDTAVQIPSQIDGKPVTGIGEKVFLRKGISSVTIPDGVTSIGAKAFADNQLSSITIPDSVTVIGEEAFIRSQLSSVSIGGGVISIGKAAFALNQLSEIKIPFSVTSIGPEAFRKNLLASLSIGDGVTSIGEGAFAGNQLAEITIPNSVKTIGRDAFADNQLKKVIIMQSDIANVAIAGPSPFGKAEVLTEEAHKFERDEGANYTDKKDFDVRKVDGGVEIARYKGTDTEVRIPRLINGGRVVKIS

SEQ ID NO: 97751 - protein, 96 aa, Unknown
  Obtained from environmental sample
  misc_feature (1)..(96): Xaa is any amino acid
FSLIARLAVGDKKLDDKTFLPYLKLVEKYATDERNFVRKAVNWALRQIGKRSMALREKAVALSEKLAASSDKTARWIGKDALRELQSEKIMARIKR

SEQ ID NO: 97752 - protein, 186 aa, Unknown
  Obtained from environmental sample
  misc_feature (1)..(186): Xaa is any amino acid
MKHFTTLLFLAAALCATSCAQQRNSNNAGLEADFANPPEAAKPWVLWYWMNAAVSREGITADLEAMQQAGIAGAYLLPIQGKKNPPIIEPAVEQMSPLWWDMVRHAMREADRLGLKIAMHGCDGFALAGGPWITPELSMQKVVWTEARVEGGKTFCDTLPQPESYQGYYRDIAVYAYPTPDGAELS

SEQ ID NO: 97753 - protein, 287 aa, Unknown
  Obtained from environmental sample
  misc_feature (1)..(287): Xaa is any amino acid
MIGLPLESADVSERFLHDLRQTVAELVVDIFYTTMAKNARKTGCLFSAECVAPTMTSDGMAHYQKVDIPMGEFWLNSPTHDKPNDMLDAISAAHVYGKNIVQAEGFTELRMAWNEHPAMLKSLGDRAYANGINRMAYHVFTHNPFVDKKPGVTLNGVGLYFQRDQTWWKLGRAWVEYAQRCQLLLQQGKPVVDIAVFTGEELPSRSVLPERLAATLPGIFGQEMLEFEAQRMANVGEPLQEKPAGVVSSANTADPADYADVLRGYKHDSFNKDALVRLAQVENRRIT

SEQ ID NO: 97754 - protein, 251 aa, Unknown
  Obtained from environmental sample
  misc_feature (1)..(251): Xaa is any amino acid
MREGSVITGNTYSTIGTTSIGDSMPQSKGGGVYVDTGGSFTMSGGKISGNTASASSASAGIINPISYGGGVYNKGTFTMSSGEISGNTASTSSNNYDSSSYGGGVFNTGTFTMSGGKISGNTCSATKSSYSSYDNSPTSCGGGVCSMGGSSFTMSGGEISGNTCSSSSKPGTYGGGPQGGGVYGIITKTGGTIYGYTSGNANSNAVKVGSTVTSSLGHAVYVNDTKRRETTAGTTVNLDWSIEGSAGGWEN

SEQ ID NO: 97755 - protein, 113 aa, Unknown
  Obtained from environmental sample
  misc_feature (1)..(113): Xaa is any amino acid
DRVSENYFNAITGLSGSGPAFVCLFIEALADGGVLAGLPRDKALCYAAQTVMGSAAMVLETGKHPSELKDMVASPGGTTIAGIAALESSAFRSATIQAVTAAWKRAIELQPSP

SEQ ID NO: 97756 - protein, 134 aa, Unknown
  Obtained from environmental sample
  misc_feature (1)..(134): Xaa is any amino acid
NGYYNRLLDILENQRSRLPLLLPNDRPEYLDLAERLMMARNNAGVANQMLAARTGSRVYQSRAMSLYSESERAWDSLTREPRSMVRSSSTSLPFLNIRNILYPRQNYEPQMFMRIDREASESSRWEQLAPAFRD

SEQ ID NO: 97757 - protein, 286 aa, Unknown
  Obtained from environmental sample
  misc_feature (1)..(286): Xaa is any amino acid
MGFGGFHMHVRTGMATEYLSDEYMDIAAACVEKARKEKMLAWLYDEDRWPSGAAGGIVTKDPRYRIRHLLLTRRPYGSLDVNAPEKHHRADSGRCENGELIACFDVTLDKKGDLENYSVIGEKDSASGFKLYAYAETALPSPWFNNQTYVNTLDTASIQEFIRVTYNAYEKHFEKDFGGVIPAIFTDEPQFTRMGNLNFAREEKDITLPWTSDIEDTFKAAYNGESLISSLPELLWDLPEGRVSVIRYHYHDHIAERFTKAFADQCGLWCREHGIMLTGHMMEEQT

SEQ ID NO: 97758 - protein, 278 aa, Unknown
  Obtained from environmental sample
  misc_feature (1)..(278): Xaa is any amino acid
EGDVIRLRVKGEWDATLYDTISGEIVPASANRQDGWTTIIRPFYEHDSLLFKLESVRTNLSPIISHGDTKHTEDTEKNKEITKNPSKYSPCSLCREPQVRCGLREMSSGNGLVPITLEESNVLLLDMAEYALDAGEWRPKEEILRLDNKLRAELKWPSRGDAWAQPWVERDASTPFTLRLRFSFESEIAVTGTELALENAASARVALNGEAAGVVKGWYVDKCIGKVSLPAIKAGANVLEVSFPYGRKVDVEAMYLLGDFGVNVAGSSCVITRPVRSL

SEQ ID NO: 97759 - protein, 152 aa, Unknown
  Obtained from environmental sample
  misc_feature (1)..(152): Xaa is any amino acid
VGLPVMERELGLSAVMLGWIPLSLMMPMAAASAPGARLADIRGRRRTTLLALLLSIIGLAASALAAGPASLLGGRAVTGLGLAMVFTNFMAMATSVHPPQERGRVLGYTVAAVYIGLSLGPAVCGYLVTWLGWRSIFWLNAIGFLPPLVLLG

SEQ ID NO: 97760 - protein, 144 aa, Unknown
  Obtained from environmental sample
  DOMAIN (1)...(104): Acetyl co-enzyme A carboxylase carboxyltransferase alpha subunit
  misc_feature (1)..(144): Xaa is any amino acid
MTKKTVKAENASWEATLVARNPHRPYFSDYAKGTFTDFVELHGDRRFSDDKAISGGFARLDGKPVMLIGHNKGGIDVHQKAEHRFGMALPDGYRKALRLMELAHKFNTPIITLIDTSGAYPGIEGEERGQAEAIARNLVEMAKL

SEQ ID NO: 97761 - protein, 269 aa, Unknown
  Obtained from environmental sample
  misc_feature (1)..(269): Xaa is any amino acid
DISSVKVRPASKNITPTLNGKNISFNISQAGQYSVEYNNDNKNAILIFANPVEKFSGTQVLQGGVIHSGTYSVGAGQTLYLEAGAVLRGKVILNSGGKIVGRGIIDGSNIESWMNIGWQTTLPIETYGGSDLEINGITIFDPNAWCVQLQNASNVTINNLKIISSRANSDGISIQSSNGVKIKNSFVRSWDDGITIKNYTDRNSHDIIVENCVLWTDLAQSMEVGVETNKAGANGLYNDSPHIYDVIFDNIDVIHAMHKAPISIHNGDH

SEQ ID NO: 97762 - protein, 85 aa, Unknown
  Obtained from environmental sample
  DOMAIN (5)...(84): Plasmid encoded toxin Txe
  misc_feature (1)..(85): Xaa is any amino acid
MDVAFTGEAFASFLEWQETDKQVFKKIKALITDACREPFTGLGKPEPLKHDLSGYWSRRITDEHRLVYTVEQDTIKIISCKYHYK

SEQ ID NO: 97763 - protein, 268 aa, Unknown
  Obtained from environmental sample
  misc_feature (1)..(268): Xaa is any amino acid
RGLDPAAFVPNGGNIIPIQVKGTFDDCQRLVNETIGDRKFSARYSITSANAINPGRLLRQTFYYLYAFIKIKKRVPGALVFSTPCGNFGNLMAGLYAWKFGMPVNGFIAAMNSNNSLGEFIKGGSFTPGQLVSTNSPALDVRIPSNLSRLASFYKEAPSVMRNMVCPASVNDELTVETISHVRRKYGVYIDPHTAVAFAAARQLAQEPDWKGVHTVVLSTGHYTKAAGLIREATGESVAIPEDLISLQKMTDPIAIIPPNLDAFENVI

SEQ ID NO: 97764 - protein, 240 aa, Unknown
  Obtained from environmental sample
  misc_feature (1)..(240): Xaa is any amino acid
MPEKRGISYRSFCNYYFALVEKIFQFSEKSRREGILALEEELEYMSEDFFKMGIRFVVDGTDGPVIRELLTLKIEREHDYYIKKLMEIAMEGVISVWKGERLWRIGIMFAAMVEIKNNPLDVACAKYLNGDSDAFDDIDFKSAILEEVEREEITFIRRAIQISEMARGGDWFEIEKLLDKDGIAAKDVFEYGLPMAVDNWDWKDIDKELTILTDRETDPVRKNLALAKKDALRMILEGYN

SEQ ID NO: 97765 - protein, 215 aa, Unknown
  Obtained from environmental sample
  misc_feature (1)..(215): Xaa is any amino acid
WWENYDVNVIVPKSDYDERLLEYRKALLKENGIEIRQKNIAGWNQILQFTASSIMAGNPAAQVVVLQPNWALSLHRQNLLYPVSDNGQVDLKKTNIVDWNKTVNEVFTFNNKIYAFTPGYGGSFHATIIVWNKRLFRETGLDPNLPYDLQKNGEWTWDKYLEICKKLTRDINNDGQIDIYAMPSDLSTEILDAFVGSNGAQYVDRDPKTGKLVNA

SEQ ID NO: 97766 - protein, 300 aa, Unknown
  Obtained from environmental sample
  misc_feature (1)..(300): Xaa is any amino acid
TAEEDGIFGRSPFNGIAFGDGTYVAVGSVGKMAYSMENGKTADSGKTADSGGKTAESKSGDDGGWTSTDVGGIFGSNTIMAIASGKNKFVAVGDRGTMATSSDGVTWTAVTSDVFDFTVGKNTVKALIASITFGKDKFVAAGGRGKIAYSADGVTWTAVKDSPFNDNGNVFAIAFGNNKFVAGNEEGTMATSPDGITWTAVKDSTFGASAITKIVFGRNKFVAVGNEGKMATSPDGITWTAVTDNKLGNTYIYAITYGNNKFIAGDMEGRMAAFTDGINWNAVDVSGIFGKYSIMAIAFG

SEQ ID NO: 97767 - protein, 267 aa, Unknown
  Obtained from environmental sample
  misc_feature (1)..(267): Xaa is any amino acid
AANSGKRPFNFIITAGGDGTSLEVMSALCGADENGDENIKEDFAVLRLPMGTANDGADSFFLDEALNLIIEPPALVKQRAISLRTASGKGPFLAFNILSVGLDAFVTHMTNKMKGKLPGDSYKLWVDVSALFYDKIYKVGVMNVSSQDEQAITLNEKLLLIAVGESGKRCYGSQRWILPDDRNVCAIRQMPLLRKLALKGLFSSGTHADKKEAILWSASRVEFKSQYPLLAQMDGETVLLENNDFPAVIELTKPAINILRKRDRRPS

SEQ ID NO: 97768 - protein, 283 aa, Unknown
  Obtained from environmental sample
  misc_feature (1)..(283): Xaa is any amino acid
SVGSLKNQFIAGAIGPLSEAFKTLTGAVLDNMPAIKELGAKFGAWLGDTVKRLPDIIERVKEFGTWVKETATKVVDFAGGFKNLAKILMGLAVAPTLISGMKTAFSFGNLLHEAWKHLPDILGKLGLKATGVFGSISTAILPIIGIIAGVALVIYTVVKNFDTLKSYALDCINRIKAAFGGGTGEMATDWKAVGETIKSVLGAIIGILEGGVLLAIKTAMNAITSAIQIVVGAFRVLWNVAKLIFWPLATVIKVITGLFTGGLSGAIDALKGQFGELGKIFGG

SEQ ID NO: 97769 - protein, 293 aa, Unknown
  Obtained from environmental sample
  DOMAIN (59)...(183): Polysaccharide biosynthesis/export protein
  misc_feature (1)..(293): Xaa is any amino acid
IDTIPIDSLPLYNDIEEVRKTTPDGKKRIVLRKKRVPKDASVLSRYESTFFKTANPSIFSGVTSGVGGDYPIKPGDELVLTIWGAVEKENRLRVNNQGKINVESVGLVSLNGTTLAEAESILRIKLSKVYSGIRSGQTFINLRFESLSPVKVFLLGEVEKPGAYVFYGNTTIFQALYMSGGPNPNGSVRSVQIARKDSIFNVDLYDYLMHGKNTTRATLLDGDIVFLPRAKILAEVDGAVGRPAIYELKEGEGVAQLLSFAGSINPDAAEQSMVLTRIYPNGKKDYETISKPN

SEQ ID NO: 97770 - protein, 262 aa, Unknown
  Obtained from environmental sample
  misc_feature (1)..(262): Xaa is any amino acid
MPRNKEEGIRNKIKMRRGFAATVNTKRALRVLTAFLIPYSLFLIPCALHSAELFDVKEPIQDGLNVFDVSNTFADIFEKLDSVEWGGKDIRVAIESLEKIDRDAHIAATDQRVVFVWRDTIIGNWPRPADRDWKEFGQITTAMILKLRAQKPSFRKLSESGLYEAVVGALMQGIDENGRYVYSKKLQILEDGRLLTSAGIEGARDERGNFRITGVFKGGIADGAGIRAGDLILEVNGRPMPEMDAGEVAAAFAGFYSGTIKI

SEQ ID NO: 97771 - protein, 286 aa, Unknown
  Obtained from environmental sample
  misc_feature (1)..(286): Xaa is any amino acid
MVITLFSGELLKLSSKAKLLNISLLSVAVMYFMMACSIRPATFIALDFLSAVPLMLVSSLLSLFMADFSKDVGISRLNGRYSLWINAGALFAPVIAMYMAGHFGVRSPFFAVALFNILALIYFRWFGIIQPDKKLHAISPAKTLKSVWKTTAAYFKRPGLTRAYLINFGQYAIYAIRALYVPIMVIEAGFGKDILGWVLTAGIVPYVLLAEPLGRLAKKTGIRIWVALGFLSFAAFSIWASFATGWTLLMIFVLWQISGALIEPLTDIFFFDAAKGRDRERFLESQ

SEQ ID NO: 97772 - protein, 118 aa, Unknown
  Obtained from environmental sample
  misc_feature (1)..(118): Xaa is any amino acid
MLDARQISLQMGIRAPERAPERIHDAQRQQQPVGLSFKDMLAKAESDAVFPQTGSLQFSRHAQKRLASRNIELSPTDLERIEEAVGTLRRKGARDSLVLMGDLALVVSVKNNTVITAV

SEQ ID NO: 97773 - protein, 77 aa, Unknown
  Obtained from environmental sample
  misc_feature (1)..(77): Xaa is any amino acid
DDGYLRIDIEDIAKRAKVSECEISDALAILHRLDPPGVGARDLRECLMLQLRAKGMDGTLAMDIVSKRWELFEKMKI

SEQ ID NO: 97774 - protein, 176 aa, Unknown
  Obtained from environmental sample
  misc_feature (1)..(176): Xaa is any amino acid
VKVLLSYKKGDELSIEKIEKDLGLKSGNGNQALSWLAAKGLVSEIRRETAVFYELTGLGRQWKEKGSPEERILELIRKGIERKAALKRLPEIAQELSMENKDIGSAFGSLSKLGILAMDGDKNVIITIPLEQLDDPSKNPLLARFRLVRGLLEKAMQSEDSLISEGSLSAEEKASL

SEQ ID NO: 97775 - protein, 278 aa, Unknown
  Obtained from environmental sample
  DOMAIN (152)...(251): Methyltransferase domain
  misc_feature (1)..(278): Xaa is any amino acid
DRKEEWGNIVEMGYYVADEYQSNGYATEAGKAMIWWAFEKAGQDVLSAFAKPENKASRRVIEKLGFIFGETRMLPHNDEDCAFDYFRLYHTDYLPGPEWDVYNLYKPEPMSAFFDTRANGYNNVMFASSGGEEDYQKLGACFPKADDAIQILDVGCGTGIELKYLWEQMPNSHITCVDVSRGMLDLLLKNHPDSHECITIVEASYIDWLYPENAFDIVVSNMTMHHLWPEEKVNVYRKILSTLKPGGEYIEGDFIVKDDLMAEQYKRRHEIITANLPN

SEQ ID NO: 97776 - protein, 259 aa, Unknown
  Obtained from environmental sample
  misc_feature (1)..(259): Xaa is any amino acid
MGTAFACELGKRLGLKYTCSYNYVEFYLNGEYQGLYIFTEHMRADPAGIGAPGRPKVDLDEGWLVEIDFHYDEEPLFRTERYNLPVMIKSPDFEPASMKNSLYYFVRNDWNELTNLMFSKDFPENGYRELIEMDTFIKYFMVQIITNNSDFNVLTYNSQTEPGSIFFYKDKGAKICAGPLWDFDRTFGFNIELAADTLPYPNYPFFKRFFEDPVFLARWKVVWNNYYNDILSMRNFIDDTASKIREAAIKDLRIWYNTE

SEQ ID NO: 97777 - protein, 285 aa, Unknown
  Obtained from environmental sample
  DOMAIN (16)...(281): Alpha-2-macroglobulin family N-terminal region
  misc_feature (1)..(285): Xaa is any amino acid
VYLIEGMKGKEAGYTIAMISDLSLISRHAADTAVYYANNRLTGKGESAKLTLFRPAETREAGAVPNPALFSLNANAEGYARHQSNQWLDGRVYVFAEGASGVCMHDATFYANSSFGVSSTKAYIYTERPIYQPGQTVYFRAAFRDYEAGYRLTRLGGEGGKLPVELYSPSGKLIAKTEAQIGSFSTVSGEWVIPENAEQGIWRVVVVHAENRYEAPFKIEYYVKPPFEVTVATDKAIYSFGDEVQGKVNARYFFGDAVRDAAVQYVVYRAERVASYNNVGVPFGW

SEQ ID NO: 97778 - protein, 237 aa, Unknown
  Obtained from environmental sample
  DOMAIN (125)...(237): AICARFT/IMPCHase bienzyme
  misc_feature (1)..(237): Xaa is any amino acid
VFYKDGILELATFLTGSGWEILSTGGTSKYLQENKIPVTDVSSVTGFPECLDGRVKTLHPAIHAGILARRDVQTHVDTLKDLNLGFIDLVCVNLYPFFEKVQAGLSLQETIEFIDIGGPSMLRSAAKNFRDVIVLTDPADYPQVIEGLKAGNVPLEFKKQLAGKVFDLTSAYDAAIARYLLEEEYPKYLPLSLEKGQHLRYGENGHQSAALYLHTDSTGVLKGMEQLHGKELGYNNI

SEQ ID NO: 97779 - protein, 136 aa, Unknown
  Obtained from environmental sample
  misc_feature (1)..(136): Xaa is any amino acid
MRFNILEYGKLLAEHNISMIYSGPLWAEGIDGMAEFLQKRLDMDDMPLSASQAVFSVFVEQMNNMLMYSAEKEKHERAETKPAETSNGIFVMGSHDKSYYVQTGNVIRNSSVGLLKERIDYLNTLDKKELRQFYKE

SEQ ID NO: 97780 - protein, 297 aa, Unknown
  Obtained from environmental sample
  misc_feature (1)..(297): Xaa is any amino acid
IVTLLAGFSAAAFLSVFKAGGKQINAIAAVISIALIPWVGRFLIAMPRFFIPDRSDAPAILFDSMLLNLDRNNFVSLFPYYWSAVTTFFAVRSRKLLRAAVIADVSILLFIFSIARTGGIEIYRWPIVMILIFAGIVFFQALALLFSMPPETKLQVKEKLLSVAALLAIIVTGGFIFIKPIQEQAAQMGGGLLEPKFFSFDFSKLLKLDPEISVKNDLILIVKKENDDNILLRRAVLSGYSKRNGFYKIEELDEKTHPQKLPGRQVSFNPPVFKDAHLSAQEYFLVNVESTAVYRHE

SEQ ID NO: 97781 - protein, 152 aa, Unknown
  Obtained from environmental sample
  DOMAIN (76)...(152): HRDC domain
  misc_feature (1)..(152): Xaa is any amino acid
MRGYLVKTRDEYPVIKLGEGAEDILRGSAAVQMKLSQGTPKREGFEGREDHGGHEGRRERRERSERAVRQRGGGSVDMQLFETLRELRSQIAKEQKVPAYIVFSDATLSDMCAKVPRTEDEFLGVAGVGAVKLERYGEQFLEAIAGYVGNQG

SEQ ID NO: 97782 - protein, 142 aa, Unknown
  Obtained from environmental sample
  DOMAIN (71)...(119): HNH endonuclease
  misc_feature (1)..(142): Xaa is any amino acid
TTCVAAQQLGRKWIGIDIEKQAVKILVERLSDDAGLFKDFVNTTIVPQRTDIQIIEPTKSVKERLYKEQNGLCNGCKTQFEIRNLEIDHIIPKSKGGGDYYENYQLLCSACNRMKGDRPMEYLRMKRSKEEELLKDKIIFGE

SEQ ID NO: 97783 - protein, 246 aa, Unknown
  Obtained from environmental sample
  DOMAIN (27)...(162): Type I restriction modification DNA specificity domain
  misc_feature (1)..(246): Xaa is any amino acid
MKIIKDNWDKVLFGEYVSHIEQTEYDTEIRKISRYVSVEHIIPNCFKVKSWTNEEMPTFFRKFLKGQILFAKRRAYQRKVAIADFDGICSPHIWALECKKGIEQRFLPYIMSTDSFYNYVNANSAGTMSPYVKWTQLSNYSFLLPPLSEQRQIVSLFQNLENCIEQAEQQEKNLKVLFKKLVDDLTQIQPKFGNLLKVKNYKSVTFGEISDCIEKHDKQKNGIRHVIGLENIEPENLKIFTGTILI

SEQ ID NO: 97784 - protein, 218 aa, Unknown
  Obtained from environmental sample
  misc_feature (1)..(218): Xaa is any amino acid
MLSITSEILQKELSPVQYEAALAVDGPMLILAGAGSGKTRTIAYKIAHLISYHNVEARRIVAVTFTNKAAKEMKDRIAKILEYPHIRLDWMGTFHSLSVKILRVCLENSALAESLKWKYTKNFSIYDDDDQKKLLKLIAVPKEGDLANAARIKKIAGTISYWKNRGISPEEAQTESIFEDQKILANYYEEYQIQLMNSNAMDFDDLLLRAAEILRKVP

SEQ ID NO: 97785 - protein, 293 aa, Unknown
  Obtained from environmental sample
  misc_feature (1)..(293): Xaa is any amino acid
ARSYEEQGGVALSGETGADFKPPTDTDGEFFYYVVLTHENPNLNGRKTASVKSASATVTVNDPDNAPYPVIKTQPAGDTLAWRPDIELPTLEVEVEPFTVTPPYTEVPSDEIRYQWYVTDTMTNVRGTLIEGATSPAIIPPVALPGQEAKAGLINGPGSYYYFVVITNFYFNAKGRRESSVASVPVRILIEGSKIAETPVLTVQPVSALYFTSEAVRPLTVQAPPPEDGGTLLYQWYLTTSNTANKVTKPAPDPEDPNSDPEWICEGTPIPGAVSASFAPPISNAEAGTYFYY

SEQ ID NO: 97786 - protein, 266 aa, Unknown
  Obtained from environmental sample
  DOMAIN (68)...(101): Tetratricopeptide repeat
  misc_feature (1)..(266): Xaa is any amino acid
GQLINIENTYRYRTSAINVKTAVRASVTRLDIKNDTATKRMITALTNQKTTVKVAKYGVSEDRTPQTAGTFLDRGISFAKEGKYEEALSNFNEAIRLDPNMAAAYFNRGLIFMRKTGVMYALTYYIEKSPAGYNETDIEKALADFNEAIRLDPNGDFVYFCRAEIYGNKRDYAKAIADMTQAFRLSPRPPLVYGEYIALMYQAIGNRAKEIEELTHIIKSIDPRIDDPLLTRYSVYRGEAYMALKDYDKAIDDFSRVIKLNPDFGR

SEQ ID NO: 97787 - protein, 269 aa, Unknown
  Obtained from environmental sample
  DOMAIN (4)...(91): Quinolinate phosphoribosyl transferase, N-terminal domain
  misc_feature (1)..(269): Xaa is any amino acid
KEDVPYIDLTSWSLGIQDKRGSIGYFTREESVVCGTEEVRMIFERFNIKTEKLTPSGTNVKPGDELISGNGRGCDIFMAWKVGQNILEHCSGIATKTMQLVKLVKEINPNVTILTTRKGFPGTKALSVKAVMAGGAVPHRLGLSETVLIFKQHVDYIGGFDALLSRMPTLKKECCEKKIIVETNDYNEAKKLCEAGADGIQFDKIPAVNLKDIAEKLKNEYPKIVLLAAGGVNEKNAAEYARSNIDGIVTTSLYTAQPIDIGVKIKDKK

SEQ ID NO: 97788 - protein, 237 aa, Unknown
  Obtained from environmental sample
  misc_feature (1)..(237): Xaa is any amino acid
MKLLFNRVFDGADEMYAIAEKTVNETLAELGASAPVKLPDTAYLLANIQTYLAKKVTTMGELAACLPEIRAWLADDNTRANHRLADAFRAGYATFMAAEAIEACKYAKDPKPYGGEYWGHMSDAEVRELGVPLVTGDIPGFVVIIGPAPSDEEAVDLIKGYQSRAIFVFLIGGIIDQAKRKNLSMGFPVRIVPTGPDIWAVTHIISLVNRAAMIFGAVQPGDRYAFDQYSFHRIRAF

SEQ ID NO: 97789 - protein, 66 aa, Unknown
  Obtained from environmental sample
  misc_feature (1)..(66): Xaa is any amino acid
MEGMSPETEALALGDLLRDHRGADVLVLDLREMNAWTDFFVIATSSSDTHMDGLDRHIKDFAMSAE

SEQ ID NO: 97790 - protein, 286 aa, Unknown
  Obtained from environmental sample
  misc_feature (1)..(286): Xaa is any amino acid
CSYNLPAFTSFGKEQNLNGPVGKAAAFGYTTAVNYLLSRPSQRLRLGAATVVCWAERNSPLENSLFSLISGPATEAGANVDTTAAKERADILRRLGQGLPITQTWPELDPEVFLFVLALKPNAARLSVGFFLHGPARNFLDRVREYYANLAIARRFDNEPDFPTVWQIARAVLGPHKDADDVQRLGEDLLKAALSDQAYPAYLLPMCLQRLRSGDDITSVRAGLIKAMLLRNYAHKEELMSLNPDHPSPAYQLGRLFALLAGVQRKAIGQHINTDIRDNITARLQQ

SEQ ID NO: 97791 - protein, 148 aa, Unknown
  Obtained from environmental sample
  misc_feature (1)..(148): Xaa is any amino acid
MGMGEERFEQLLKMLPEGWEAKAKELGAFERARVIQTPADLLWLILLYLTEGKSFAGTSAIGMLTGEAAMNKVAVFKRIMHSAAWLQWLCENICRQGGLIVEKPQWLQDKNVKLVDGSEVIKCGVRRQLHMLHYSLDLFTLTVCEFAV

SEQ ID NO: 97792 - protein, 196 aa, Unknown
  Obtained from environmental sample
  misc_feature (1)..(196): Xaa is any amino acid
MTAYNDTLHFSLFTGFLPTLYLAYPNKRYATTFRCQAPYALTLDKKPCYNGNMGREENRIERLLKLLPEGWEAKAGELKAFQRAREIKSPRELLKMILLYLTKGKSFRGTSAVARLSGETEMSDVAILKRMRNSAAWLQWLSQNICRCAGLIVEKPEWLKDKSVLLVDGTEDVKCGVRRQCYMLHYSLDLFTLAAR

SEQ ID NO: 97793 - protein, 191 aa, Unknown
  Obtained from environmental sample
  DOMAIN (24)...(178): Transposase DDE domain
  misc_feature (1)..(191): Xaa is any amino acid
TPDENEQIKNGVIPEGWQPNKLRQKDVDAQWSQKGGVRHYGYKNEPKVDVDSKLITDYAVVPANVHDITEFEGLIDPLKDSVVYGDSAFVSAEIAANITAKAKKKNRKITLKIIEKGFRYKKLTDKQKLSNRRKSAVRCRVEHVFGFMVNSMNGKNLRSKGIWRARLNIGLTNLIYNMCRYVFLNRQALVC

SEQ ID NO: 97794 - protein, 272 aa, Unknown
  Obtained from environmental sample
  misc_feature (1)..(272): Xaa is any amino acid
VGNVGEGFVDYSSTSGNKLKAISNLWEIVSNIDVNPDYPGNRFAGTDDYGFSALPGGYYDNGFQNAGRNAFWWSVNAPVNNSGYYWTVGWNYSYLSRGSNWRSVLFSVRCVKGNSAAPATPSSSSVATAPATPSSSSVAIAPVTPSNQTFTDTRDKQTYKSVTIGTQTWMAENLNYEAEGSLCYGNDFDNCKKYGRLYNWAMANALPAECNGNLSCASQITAKHKGICPDKWHIPSKDEWQALVDFIASKNSCKKPGYDIWDNTNCPSIGLE

SEQ ID NO: 97795 - protein, 277 aa, Unknown
  Obtained from environmental sample
  misc_feature (1)..(277): Xaa is any amino acid
GRLGAMIFGSPDRERIQLNEESIWSGPYRDRNNPAAKDALARVRRFINEKRFREAEELCLESFSGIPQNQRVYQSAGDLLVSFSPDGEFGHPWSGTRCGSLLNDIRNYRRELDIERAVHMLSFEYNGMVFIRECIISQPAGLFVLRFSAASLDGKPLTGKISFRADLDRGVFSDRKGNTEGGAFLSRDSDIPFIVMIKAVQKGGTQRRSGGFITVEQADEALLFLDIRTGFRDADYAAACAANINRAACAGDITQTWEKLLAEHVAEYALWYGRLKL

SEQ ID NO: 97796 - protein, 160 aa, Unknown
  Obtained from environmental sample
  DOMAIN (23)...(109): RNA polymerase Rpb3/Rpb11 dimerisation domain
  misc_feature (1)..(160): Xaa is any amino acid
MARKNLMKGFKRPKSNFEQVEHNSSYGKFIAAPFEPGFGTTIGNTLRRLLLSSIQGYAITAVKIVSYDSHGTAHNVSSEFETIPNIVEDTIEVINSLKQIRLRLPDDVEQDILLYEWSGKREITSDDFSRPGQVDVLSSGQHIMTLMDDARNGFEIQIDL

SEQ ID NO: 97797 - protein, 78 aa, Unknown
  Obtained from environmental sample
  DOMAIN (2)...(78): Magnesium chelatase, subunit ChlI
  misc_feature (1)..(78): Xaa is any amino acid
IKRALLVAAAGGHNILMVGPPGSGKTMLARRLPTILPDLSLDEALETTKIHSVAGMLEPSTPLLAVRPYRAPHHTISD

SEQ ID NO: 97798 - protein, 85 aa, Unknown
  Obtained from environmental sample
  misc_feature (1)..(85): Xaa is any amino acid
MILIGNGKIVTRDKACAFIENGAVLVDGKNIREIGETSALRAKYPDAEFIDAKGKLVMPGFINTHMHYYSTFARGISLGGKPATT

SEQ ID NO: 97799 - protein, 281 aa, Unknown
  Obtained from environmental sample
  misc_feature (1)..(281): Xaa is any amino acid
EQASEPKPEPAQEQKPEPAETKPEQKAKPEPKQKPESKPKREPKPKREPKPKPEPKPKPEPKPKPEPKPKPEPKPKPEPKPKPEPKPKPEPKPKPEPKPKPEPKPKPAPMEERAGAVAPVAKPESEPHKPYLRLSLGAGALASSNMGGGVRWEQTDGEAAMPYSMAGAHIFFDADYAVIYAAYSAGGGKWESRNATDFKMPDMRRACVNGGVFGKYPVAASKTLEIFPLIGMEYERSVSGKLIAADGGELLSLDGADGRPDPEDLSAFWFKAGAGVKVDIR

SEQ ID NO: 97800 - protein, 283 aa, Unknown
  Obtained from environmental sample
  misc_feature (1)..(283): Xaa is any amino acid
VVQGYREQGLVGEALFPRVPVTSSGGRILAFGKESFQRYNTLRAPGAATKRITFGYLDKPYALSIHSIEALVPREMQRDAKEVPNIDLASRSTKLVMSVLLKELEAEQAKLASDPNSYDDDHKKALTGEEKWSEPTSKPTEDIEDAKEAIRKAVGIRPNVMLLSPEAYRALKLHPAIIERYKYTTHEVMTTSLLQAHFEIPKIVVGDGIWADAKGKFKDTWSNCAILAYVPPIPNSMEEPSYGYTYTMEGHPLTEEPYYEDNIKSHVYGVSFECSPVIAGMQA

SEQ ID NO: 97801 - protein, 278 aa, Unknown
  Obtained from environmental sample
  DOMAIN (1)...(184): MukB N-terminal
  misc_feature (1)..(278): Xaa is any amino acid
MAAFVTALIPDLTLLHFRNTTEAGATSGSRDKGLHGKLKAGVCYSMLDTINSRHQRVVVGVRLQQVAGRDRKVDIKPFAIQGLPMSVQPTQLVTETLNERQARVLPLNELKDKLEAMEGVQFKQFNSITDYHSLMFDLGIIARRLRSASDRSKFYRLIEASLYGGISSAITRSLRDYLLPENSGVRKAFQDMEAALRENRMTLEAIRVTQSDRDLFKHLISEATNYVAADYMRHANERRVHLDKALEFRRELHTSRQQLAAEQYKHVDMARELAEHNG

SEQ ID NO: 97802 - protein, 279 aa, Unknown
  Obtained from environmental sample
  DOMAIN (1)...(87): SRP54-type protein, helical bundle domain
  misc_feature (1)..(279): Xaa is any amino acid
MFEDLSARFDSIFKRLRGRGKLSADNIAEAVRDVKRALLEADVHYKVVKKFAAVVQEKAMGSAVIDSITPGQQFVKLVHDELTAIMGTAARTCKFHTNRVNVVVLAGLQGSGKTTACAKLALHFRKQGHKPLMAACDMYRPAAVDQIETLGKALGVPVYADRSAKPVAIAKAAVEAAKHDGQSLVIVDTAGRLHVDKEMMAELKEICATVKPDETFFVADAMTGQDAVNVAAEFHKEVGFTGAILTKMDGDARGGAALSILDVTGVAVQFVGVGEKPDG

SEQ ID NO: 97803 - protein, 158 aa, Unknown
  Obtained from environmental sample
  DOMAIN (11)...(158): tRNA (Guanine-1)-methyltransferase
  misc_feature (1)..(158): Xaa is any amino acid
MFEGAFSDSIIKRAVEKGLVSIGIHNIRDYSDDPRHQTVDDYPYGGDAGMLMKPEPLAGAIAAAKERLAGSDPVVVYMTPAGRLLDQDIVKELAGRESLILLCGRYKGIDQRIVDNYVDIELSIGDYVLSGGEIPAMAVVDAVTRLIPGVLGNMDSAE

SEQ ID NO: 97804 - protein, 293 aa, Unknown
  Obtained from environmental sample
  DOMAIN (80)...(145): HAMP domain
  misc_feature (1)..(293): Xaa is any amino acid
ENFSVIGDEEDTSSYDDAFRKAWTSGKTEYGNLTKQEGWGYLVSFYIPLINSAGKTVGIAACDYDGEDLHNTIITNIRRQLVIGCISVVICIVLIFIISKPIQKLTKVVAEIGAGNLDTIIEGSYNNEYDIIKDSVNSMATEIKKYIEGKLQAERKLAESRISIMLSQIQPHFLYNALAVISRLCDKDPAQAKEATKSFSDYLRGNMNLLERTDTIPFQNELNHTIGFLNLEKAMYGEALNVVYDIQTIEFKLPALSVQPIVENAIKHGIGKKEDGGTVKISTIETESYYFVV

SEQ ID NO: 97805 - protein, 270 aa, Unknown
  Obtained from environmental sample
  DOMAIN (1)...(144): Uncharacterized BCR, COG1636
  misc_feature (1)..(270): Xaa is any amino acid
MIDEYGLRTFLNEIMPEDGGRCIKCYAMRLEKTAFTAARDGYNAFSTTLLVSPYQDHDAIRRTGAEAAAKHGVEFLYRDFRPRFREGQAQARAAGFYMQKYCGCIFSEEESFEQKKGKKQFRSGKNEQPQNENQQPTNTNKKARAVSANNEHIFQRLELITGKEGLEKLSKTKVLVFGLGGVGSWAAEALVRSGIGKIGIIDSDTICASNVNRQLEATALSIGQPKARALKKRLAEINPACEITSWDELFCLEKKDLFDIGSANYVIDAM

SEQ ID NO: 97806 - protein, 235 aa, Unknown
  Obtained from environmental sample
  misc_feature (1)..(235): Xaa is any amino acid
MYSQTAEYQRQIDLMLAGSTRQRVSRKELGKVRVPYFEHAEQTAIAAILSDMDAEIDALTVKLNKVKNIKQGMMSELLTGRIRLVEQEADAKQGTKIIGLPKQAPKGHSQQFDDAVMIAGIVNVLYTDKYPLGRKRVQKCLYLLRRHQDESTTAFKKKAAGPYADEVRYKGGEPIAHNAHYITTTTVTGKGTTFARGSDINKALNYIEIWGKQDGVNWVADKLKFKKTDELELLA

SEQ ID NO: 97807 - protein, 267 aa, Unknown
  Obtained from environmental sample
  misc_feature (1)..(267): Xaa is any amino acid
VTVRPRPAGAPENFGGSVGKFSISASVEPQSVTAGEALTLRISLKGSTRASNVGDPVLPDLPNCDVFTPERQAAVDTGANGLSTRKTYRYLIIPKEEGTLTLGPIAYHYLDPESGTYKTARSDTLRVSVAKGKGVAKEQTRYLTQEEIRQVGSDIRYIKTPKKIANQEERPYRAPYWYLLFPAPFLLFLFALIYKAQTRKSGENQIKAVRQKALGNAVKELNKASKSAADGEFLGKAANVIEKYISNKFSFPATGRTLEELKDELLS

SEQ ID NO: 97808 - protein, 61 aa, Unknown
  Obtained from environmental sample
  misc_feature (1)..(61): Xaa is any amino acid
MNSLVYLDNNATTQVAPEVLEVMQPYFAELYGNASSMYRFGGQVGAAMSAARPAIAAFLGA

SEQ ID NO: 97809 - protein, 290 aa, Unknown
  Obtained from environmental sample
  DOMAIN (9)...(290): Quinolinate synthetase A protein
  misc_feature (1)..(290): Xaa is any amino acid
TGMNADRCAAIEEGRRYFGSRLTIMGHHYQEESVIRHTDRRGDSLELARCTSSVESPYIIFCGVYFMAETTALLARPEQEVHLPEPSAECSMALMSPPALLEKVLENLARRGRRVIPLAYVNSTLEVKAVVGRRHGAVCTSANAEKMLAWAMKEGDAVVFLPDRNLGANIADRLGLPETERVLLDLRDKSGRIPEEAARARLFLWPGFCSIHTRFHLRQIERIRAEHPGIKVVAHPECSPEVAAAADAVGSTAFIIRYVEDLPEGACVAIGTEINLVERLADRHRGRVQV

SEQ ID NO: 97810 - protein, 251 aa, Unknown
  Obtained from environmental sample
  misc_feature (1)..(251): Xaa is any amino acid
SSIRSELTELKKEFASIRNLPAGEEKTDESGGFFSDDEDETLSLTGDELNNILSSGGTMEEGVPETIDDEVTNEKALDDEEDETISLTGDEMDNILNSADFTEESGTEETPEDDSSADVENIDIDIDTNETPEEQTEVDLASDDATLATDDLADISLDDTSSTDLAADDAALATDDLADISDTDLAADETALATDDLADISDTDLAADDAALATDDLADISDTDIAADDTALATDDLADISDTDLAADETA

SEQ ID NO: 97811 - protein, 259 aa, Unknown
  Obtained from environmental sample
  DOMAIN (61)...(258): DEAD/DEAH box helicase
  misc_feature (1)..(259): Xaa is any amino acid
IGEFISKNSVIISPLARGKLKILLTELGFPVQDLAGYIKGEPLDIELRENYTDSGEKFTLRDYQKDAAQIFYASGSEMGGSGVIVLPCGSGKTIIGMAAMALVKAHTLILTPSVTAARQWIREILQKTNLKKEQVKEYSGDLKEIGPVTIATYQILTQRKRKSKKQDEANTAVNTTVNTAANTATNPAVSSPSKQLSEANRLRGEANCCAECESNELELEEFTNFSLFSAQKWGLMIYDEVHLLPAPVFRFSADMQATR

SEQ ID NO: 97812 - protein, 67 aa, Unknown
  Obtained from environmental sample
  misc_feature (1)..(67): Xaa is any amino acid
MIFGEYDREMDIAVNRREAKEEGIEEGREEGRKEKLIIAKNLLTKGSTPEFVHEITGLPLEKIEELK

SEQ ID NO: 97813 - protein, 118 aa, Unknown
  Obtained from environmental sample
  misc_feature (1)..(118): Xaa is any amino acid
GGIAGTFKCFLDRLFFPGLKIPYKVGATVVSLRRTGGITTFHQLNNYFNLAQIIITPGVYWEVIHGNSPEELVEDVEGLQLMEIQGRNMAWLLKALAAGKEKFPPPQQPERKKTNFIH

SEQ ID NO: 97814 - protein, 138 aa, Unknown
  Obtained from environmental sample
  misc_feature (1)..(138): Xaa is any amino acid
MAGTILEVRNLTTYYKTRMNERICSVDNVSFVLEDGKSLGIAGESGCGKSTLAMSVMGYYFPPLYYDSGTITIDGREITGLDPDLIRRTVLGTDIAYIPQAAMNALNPTRKIIHFIEDVLLAHRTDLSKKDITIRPGN

SEQ ID NO: 97815 - protein, 165 aa, Unknown
  Obtained from environmental sample
  misc_feature (1)..(165): Xaa is any amino acid
YRCGGKPVKADLVTLAKSLAGGLPAGAVLAGEKAAGVFEVGDHNSTFGGNPVAAAAGIVVLETVNRPEFLAEISRKGEKIMAAIRGWKHPAIQEVRGRGLMIGIDIDKDAWPVLEKAIARADEKNCGLLILSAGQKTLRLLPPYVISDSEIEEGLEMLYEIINNR

SEQ ID NO: 97816 - protein, 240 aa, Unknown
  Obtained from environmental sample
  misc_feature (1)..(240): Xaa is any amino acid
VDILPALPGFALTAEGAGFTNVEIDIDGTRRRIDLAQNIHDHWYLQLAFSPLVHFLGNPEIELNNRKLLMKNAKIPGGIVKDISIPLDGHGRMLLDWPKEDYAESYSHISFYDFSLLEDIEAELDYYGRAISSFDIYDFARIDNSLMRIPFIANDLSDLFEAVGNYRNAALENCSDDYFEAFVDFRREARELIRELLDIDPITKISNAAQEMIALFPGSADLILDEAEYEISVLNNISIN

SEQ ID NO: 97817 - protein, 80 aa, Unknown
  Obtained from environmental sample
  misc_feature (1)..(80): Xaa is any amino acid
TGMPRFNTAAAQIQTLFYYISREYEVQEASDPRFIPGRSAALVYKGRPIGVFGEIHPEVLENWGVTMPCTAGEFDIEALL

SEQ ID NO: 97818 - protein, 241 aa, Unknown
  Obtained from environmental sample
  misc_feature (1)..(241): Xaa is any amino acid
MAATPWTVAPTTGYASMKVSNDTLYLSGVTADLTVTANYDSITSRQYIVTTKPTTSTITASNDINFYQEGADWVAQVLTGETITLTVTPNAGYVFGEWTGANKPNPATSNTYTLTVNEETRVDWKVIGNNSQLAGLSVTGMELTPAFNPTILTYNAVDTLVKEVVKVTVAEKTKYPYQKVTGAGERTLSVGENALSVVVKAENGDSTVYTINVFRALKSARAELSALAVAGATLSPAFNAA

SEQ ID NO: 97819 - protein, 78 aa, Unknown
  Obtained from environmental sample
  misc_feature (1)..(78): Xaa is any amino acid
MPTTRQLKVGRQLQKDIGEIIQRQGMAAYNGALLTVMGVEVSSDLSFAKVVLSIFPSSKTAEVKARLNEKAIRAELGK

SEQ ID NO: 97820 - protein, 227 aa, Unknown
  Obtained from environmental sample
  DOMAIN (155)...(227): B12 binding domain
  misc_feature (1)..(227): Xaa is any amino acid
MAIVNPADFVPMDGLKKELREAAEDAVLCRNGNGGNYADRLLEMSGKEASGDKEEDQKKKDEWLSRPLEDRITYALVMGIDRYIVEDTLELHNSGKSYIEIVEGPLMRGIEETGRLYGEGGIFLHQMIRSAQVMKKALTALDSCAASGKGIARAGKIVLATVRGDVHDIGKNIVSVILGCNGYEVIDLGVMVNAEKILEAARNTGADCIGLSGLISSSLDEMVFVPK

SEQ ID NO: 97821 - protein, 277 aa, Unknown
  Obtained from environmental sample
  DOMAIN (3)...(94): Alcohol dehydrogenase GroES-like domain
  misc_feature (1)..(277): Xaa is any amino acid
GTLNLGKGNEPIYPVRIGHEWSGVVAEVGKNVTNFKPGDKVISDTGWFCGVCSYCYRGEPNSCPHGRAVGTIGKCWPGAFAEYMLMPAREMFHVPDNIPLDVAALVEPSSVGFYGLTRTPLGPGSNLLVMGTGPISLGGMACAKGIGVGKTILAGRKDAKLAVGKKMGADITVNMEKEDLREVVMRETNGRGADVVLDSTGAASLINLTVSLARSSGYIVTPGFYEQLLDGFAIDNIIVRNCVLIGSGGTPDMQRRVLDMLEYGHVNLAPMITDRYP

SEQ ID NO: 97822 - protein, 74 aa, Unknown
  Obtained from environmental sample
  misc_feature (1)..(74): Xaa is any amino acid
MAKYILSLDQGTTSSRAILFDKEQNIVAVEQKEFTQIYPREGWVEHNPMEIYSSQYGIMMELIARHNIRTEDIA

SEQ ID NO: 97823 - protein, 167 aa, Unknown
  Obtained from environmental sample
  DOMAIN (11)...(167): Malate/L-lactate dehydrogenase
  misc_feature (1)..(167): Xaa is any amino acid
MATSANFDYESFGKMEAFMKDVFIKVGVPPEDAAICADVLIESDKRGIDSHGVGRFKPIYIDRIKDGIQNPVTQFEIVKDHLATAVVDGHDGMGHVIGKRSMQMAIDKAKQHGLGMVVVRNSTHYGIAGYYAGMAAKAGMIGITGTNARPFIAPTFGMKICWEQSLT

SEQ ID NO: 97824 - protein, 129 aa, Unknown
  Obtained from environmental sample
  misc_feature (1)..(129): Xaa is any amino acid
MNTNAEYKNSVFSLLFSDPEAIRELYSAIEGVVLPPDTSIDINTLSGVLYMEQINDLSFIIGNVLVVIMEHQSTINPNMPLRLLIYIAHIYEKIIDRKLLYRSKFEKIPTPEFIVLYNGKEPYPDRSTL

SEQ ID NO: 97825 - protein, 70 aa, Unknown
  Obtained from environmental sample
  misc_feature (1)..(70): Xaa is any amino acid
MTNDWGLKNGNDDTLLKFLCEMFHPIIRSDKTDWQSVLANINELIKEDGYEIYESGKISGRTIYSYRFNL

SEQ ID NO: 97826 - protein, 282 aa, Unknown
  Obtained from environmental sample
  misc_feature (1)..(282): Xaa is any amino acid
TVHVTGMPVIIATVNEAMNADLKLLIPVFILVVLLILCISFRSFTPVVLPLISVVISVIWSVGAMPLFNIKLSVISTVLPVILVAVGSAYGIHIVTHYLLRREMDNSDISPEEHNVLVIEVVNKIKKPVFLAALTTFVSFLSFCFTAVAPCREFGYFSSFGVAVAFLVSILLIPSLLILRRPKKIKTVKSSNTESRGFSGFIADNLFILAMRKKTILFIAFLVVIFSVYGLSKLIIDNVMVEYFRPNTEIYIADKFIRQQFGGSKIVSVVASADSTEIILHP

SEQ ID NO: 97827 - protein, 283 aa, Unknown
  Obtained from environmental sample
  misc_feature (1)..(283): Xaa is any amino acid
SAAGNEREPVRVTPAQALPFVEMAAFHAATRFMTFLSASRVDAVIGNFVRARGLGITNGLDMEHTGTVDKIFTDSIIRVLNLGMVPILPCIGWSPAGKPYNVSSDEIALAVSAALGAIKLFIVSVHGGLRQGNFLIPENIEVRENGSIVRLTPQEADTVVAAFTAQNTGVMPAALRELKLALRASRAGVDRVHIIDGREEGAVLKELFSNLGAGTMIYADAYESIRPFRSGDLPDILRLMEPLMQTGILIRRTAEQIQEKKDDYVVFEIDGSVHACAARMTGR

SEQ ID NO: 97828 - protein, 207 aa, Unknown
  Obtained from environmental sample
  misc_feature (1)..(207): Xaa is any amino acid
IPETLENVKPFINRPAQAMKEAVNSMQKMLKNKYKEEWAYRASDFEVLEEVAKATGSITEFITEYILDPKAETTFKYGVKTAEDVVTLSTIHSAKGLEAKIVHVINVNPFNYPTTHTIRQGKDAIEEERRCFYVALTRAKDKLNLYRFTRSLHTQYLEDGQEENLYFLNKLPKGLVNIIVNGQIKSDFPDYGNLKQVETKFPDFNFE

SEQ ID NO: 97829 - protein, 160 aa, Unknown
  Obtained from environmental sample
  misc_feature (1)..(160): Xaa is any amino acid
MRRKDREIINTDEKLKIIAKCKVCRIGLSENNYPYIVPLNYGFSYDDEKLALYFHCATEGKKIDIIKKNNNACFEIDCDTKLIEGQKACDYSYEFKSIIGFGKIIILNTKDEKINGLNYLMKHQTEKNIKYDYNKGELNNIIVLKLLVDEFTGKQKQIKK

SEQ ID NO: 97830 - protein, 51 aa, Unknown
  Obtained from environmental sample
  misc_feature (1)..(51): Xaa is any amino acid
MGGQRGNLYIKLMVQIPEKLSRRGKELLEELAKIEGQNDNPKPIPLSQLGE

SEQ ID NO: 97831 - protein, 66 aa, Unknown
  Obtained from environmental sample
  DOMAIN (4)...(62): Ribosomal protein L35
  misc_feature (1)..(66): Xaa is any amino acid
MPKMKTKKSAAKRYSFTGTGKVKYKKQNLRHILTKKSSKRKRGLRHSGILSDDNVPVIRKKLLPYG

SEQ ID NO: 97832 - protein, 199 aa, Unknown
  Obtained from environmental sample
  DOMAIN (4)...(197): Phosphomannose isomerase type I
  misc_feature (1)..(199): Xaa is any amino acid
MIKIHKLHNKIKHYEWGSLQILPKFLGLAENEDDPQKPHAEMWLGTHPLAPSHVQVDGSSVSLKEIHGELPFLLKLIAVEKPLSIQVHPNREQARLGFKRESEMGLEIDSPARNYKDENGKNEIICAITPFTLMAGFKETKEIYASLGEVSAEQMNLIKKLNSFYPEDAGVFSPLYLNLITLQPGQGLFIPAGIPHAYI

SEQ ID NO: 97833 - protein, 205 aa, Unknown
  Obtained from environmental sample
  DOMAIN (10)...(205): Formate--tetrahydrofolate ligase
  misc_feature (1)..(205): Xaa is any amino acid
MANLKKFSGTDIEIAQSVFPEHALHIKDVAKKAGISDEYIEYYGKYKAKVNYSFLQNNKDKKDGKLILVTAINPTPAGEGKTTTTVGVADSLSSIGKKAMLALREPSLGPIFGVKGGAAGGGWAQVIPMEDINLHFTGDFHAIAAVNNLLAAMIDNHIFQGNELNIDPRKVVWRRCIDMNDRQLRFITDGLGGRINGFPREDGFD

SEQ ID NO: 97834 - protein, 104 aa, Unknown
  Obtained from environmental sample
  misc_feature (1)..(104): Xaa is any amino acid
MRVEDKERFRNVVMSVAELYDKSVSKNALQIWWKALENFTIEQVEFGISRAIQDPDSGRFMPKPADVIRQIKAREPKQKSPLEAWMIALNAVDNIGYYESFALK

SEQ ID NO: 97835 - protein, 175 aa, Unknown
  Obtained from environmental sample
  misc_feature (1)..(175): Xaa is any amino acid
MKANKHSQSIPADKLEQARTKISEAAELLKPYLIALTPAEKQEIPKMGPKTLNFVEKSHEYAHENPSLVPNYLQMDEFDIDFADAHGLWTLHNRVQQLQEAISDTQMTAGSEAYQAALVFYNSVKVAASQGIHGAKAVYEELKKRFPGKQRDHHQPSLPPKKHRNSHPKGRNFYL

SEQ ID NO: 97836 - protein, 169 aa, Unknown
  Obtained from environmental sample
  misc_feature (1)..(169): Xaa is any amino acid
MGSLPLMAELKSKYGIFKSLEGKLPLPRAITGDIIEALYEYLNILFLIDIRNYNKYTKMIIRYNNDFHSLYKAIGEIDLVLCLLSFRKSLPLFSVPEFHKQNTIEFEELFHPLIPSPVRNTGTLTNDSLITGSNASGKSTFIKALAINGILAQTIYSSTAKKFKTRFSM

SEQ ID NO: 97837 - protein, 276 aa, Unknown
  Obtained from environmental sample
  DOMAIN (1)...(56): HAMP domain
  misc_feature (1)..(276): Xaa is any amino acid
MSMVITRSITRSIQVLEDTTRRIAEGELDLNVVVKGNNEITSLANSLNKMRKDLKEKELSRSRLIMGISHDLKTPLALIKGYAEAIEDGVAEDPVSRSGATGIIIEKADQLEDMINDLINFVRMETGEWREQLHEINIANFLKKFTRAIKIDVEVFNHDFISDISLPENLNVLMNEKLTQRAMQNIIGNAVRYSPKGSVIRLSAVLAGKAVQLTISDNGPGIDKEDIPHVFDMFYRGSHSRREQGMGLGLTVVKWVVNYHGWSVSASSEKDHGASF

SEQ ID NO: 97838 - protein, 264 aa, Unknown
  Obtained from environmental sample
  DOMAIN (38)...(260): Domain of unknown function (DUF323)
  misc_feature (1)..(264): Xaa is any amino acid
TLPTAVGSYTVTFDVAAVTGWNAAAGLSAGNLVIQPQIIEGMVYVYGGNFQMGKDLGTDATEDVAPVHTVMLTGFYLSKYPVTQEQYQAVMGSNPSHFTNDPVNGEAQGKRPVDQVSWYDAIEFCNALSEKEGLSLYYTIDKVNKDPNNINESDNLKWTVTVNVGATGYRLPTEAQWEYAAKGGNPNAAGWVGYTYSGSDMVDDVAWYSENSDEKTHEVGKKAPNCLGLYDMSGNIGEWCWDWYGDYKDEGQTNPTGAVSGSYR

SEQ ID NO: 97839 - protein, 278 aa, Unknown
  Obtained from environmental sample
  DOMAIN (98)...(175): Bacterial Ig-like domain (group 2)
  misc_feature (1)..(278): Xaa is any amino acid
SREALSWPDFDISNLTHTIELNGGPGADQSVTVTGSQSVHFTVEPGNWIIFIQAYILGDDGKPIIKAESDRVSINIKPGRNEAITITMHKPSGYGNIPVTDVMLDTNSIRLRVGNHGTLIASVKPENATNKNVTWVSKDPSIATVNNGTVTAVKVGKTVITVTTQDGGMTADCNIEVVSADSKELTGTITINGTAEVGQKLTVNTDNLDKGTYTYQWKRENKDNAIENIGTNNSTYTTVPEDGGKYIWVFVTCTEYVGEVEAKIGPIIIPVTLMEVHP

SEQ ID NO: 97840 - protein, 266 aa, Unknown
  Obtained from environmental sample
  misc_feature (1)..(266): Xaa is any amino acid
SSKDGVLYTRDKTVLVAYPGVKGEYTIPTGVTSIGNYAFGGTNLTSITILDNVTIIGEGAFYGCTNLAGINIPDNVTRIEKSAFRGCTSITSVTIPDSISNTLDYVFYGCKGLTSVTLPTNASSNVGNYTYIGEYTFYGCTGLTSVIIPDCYTNVGNNTFQNCTGLISVILPTNVKFESIGYETFRGCTSLASITIPGGVTTIHQYAFDGCTNLTSVTFEGTIAVANFSSITPFCGDLRAKYIALGIGTYITTVPVTSSSVWTKQQ

SEQ ID NO: 97841 - protein, 89 aa, Unknown
  Obtained from environmental sample
  misc_feature (1)..(89): Xaa is any amino acid
MTARTPTIAVYALTRRGAALAGRLTRGLAGYAPTLCLPRRLADEFGPALQFETLGEALTLNFNAYGGHLLVAATGLVVRLIAPLLKSKT

SEQ ID NO: 97842 - protein, 143 aa, Unknown
  Obtained from environmental sample
  DOMAIN (61)...(138): Sporulation related domain
  misc_feature (1)..(143): Xaa is any amino acid
AVPDIAQISETQRSNERPAAAVVKPAEPAPAAKPAAQPAASKTTTTAKSSTVTKPTTPIKTINDFWVQTGAFSAQVRAEDARELLATKGITSIVENREINGKIWYRVRLGPYTSEREANHWLEIVKLINGFSDSQIRQTVRTN

SEQ ID NO: 97843 - protein, 99 aa, Unknown
  Obtained from environmental sample
  misc_feature (1)..(99): Xaa is any amino acid
CVGFNLTYDEVEQCWKALQTSDIYKMRAYLSEVYRNALAKELKALGYSIENHIDRRGKDCGFEIAGIPESLREKFSQRSHQRDEAIALFVAENGRPPDG

SEQ ID NO: 97844 - protein, 144 aa, Unknown
  Obtained from environmental sample
  misc_feature (1)..(144): Xaa is any amino acid
MATPETVQVKTLSPEQLLLTAMEHIFERVSVAQDYEILTEALQRGRGETSHDDLKETLLALEAHGSILRSGSEIATKQSLDREREMIQLVNNGIGAAKAIDAKRLFIPDKGLNTEHKHAVEFALSSRDQAIAIIGSAGAGKTTC

SEQ ID NO: 97845 - protein, 196 aa, Unknown
  Obtained from environmental sample
  DOMAIN (10)...(196): Ribosomal protein L11 methyltransferase (PrmA)
  misc_feature (1)..(196): Xaa is any amino acid
MNLCYYAIGSCKAECYELESFNLFEAGITTLEEIEAEKDSDVAFKFYANSKEEMSRIVAGFPHLNFECGEEEAKDWDLWWRERQTPVKVSESLWVRPPWINFSAPNSSDIVLALEAKTAFGTGEHSSTALAVQLMEGIDFKGKSLLDIGTGTGILSLFALKKGTKFAVQTEIDHFTISCLVENFEQNGEGEPNAFL

SEQ ID NO: 97846 - protein, 249 aa, Unknown
  Obtained from environmental sample
  DOMAIN (133)...(166): Tetratricopeptide repeat
  misc_feature (1)..(249): Xaa is any amino acid
ATAYNNLQRYDEAIADCNEALRLNSQSSYAYTYRADAYYAKGQYDRARRDYEAAILLYPENYSAYKGMFRLYSFVLQEYDNALNHINEAISLNSDPDDEDSLLNSRAFTYFYLGRLDEALADINRAIELVSYDSYFDTRGTIYRAMGNYGKAIEDYSQAIRISPHYAIFWMNRAIAHLWSGNRSSYEADRDWAVHLDSEDAAQAWIDIGKNQLQTGLYDKAAESFRAALAIYPESDEARKLLARARAGG

SEQ ID NO: 97847 - protein, 254 aa, Unknown
  Obtained from environmental sample
  DOMAIN (8)...(137): GTPase of unknown function
  misc_feature (1)..(254): Xaa is any amino acid
VPDLRRIRNFAIIAHIDHGKSTLADRLIEFCGAVSKREMKEQLLDNMDIERERGITIKAQTVRLDYKADDGEAYELNLIDTPGHVDFSYEVSRSLAACEGSLLVVDASQGVEAQTLANAYHAINSGHEIVPVLNKIDLPAADALAARAQIEDVVGIPVDGAVEISAKTGFGVKDVLEAIVRRLPPPKGDAAAPLAALVFDCWYDAYLAVIALVRVMDGSIAAGDGVRLMSTGAAYKVERLGYFTPKMVDLPRLR

SEQ ID NO: 97848 - protein, 279 aa, Unknown
  Obtained from environmental sample
  DOMAIN (2)...(124): Transglycosylase
  misc_feature (1)..(279): Xaa is any amino acid
GHIGLNPMAMIKAGWETYVKKNRRMGASTITMQLARLRHNLYTRNILGKIAQIFTAIFFEICYSKQEILEAYLNMVPCGGNIEGFPAAAWYYFDKDVKELSLSEILSLVVIPQNPAKRAPLNGRASTELIYSRKILYEAWLEQHPEDTLVETEMDMPPFLANSFPRRLLHLTEYLNTRPLPKANLSPLNRYRTTIDLTLQNMCERELEFFLVRNRGWGIKNGSLLLVDYTSMEVLAAVGSADYFDDKIQGQVNGFASKRSPGSTLKPFIYALALEQGLI

SEQ ID NO: 97849 - protein, 81 aa, Unknown
  Obtained from environmental sample
  misc_feature (1)..(81): Xaa is any amino acid
MKILLDANISWKLIDILKPVYGECVHVDFVGLKVPASDIDIWNYALNNDCIIVTKDNDFVDLLELNDFPPKVVLLKTGNNQ

SEQ ID NO: 97850 - protein, 78 aa, Unknown
  Obtained from environmental sample
  DOMAIN (10)...(67): Protein of unknown function (DUF433)
  misc_feature (1)..(78): Xaa is any amino acid
MEDEVLLHYIGIDQGIRFGKPCIKGTRITVGDILQWLSEGIPVSEILEDYPSLQEIHIRAALAFAARRENIIKVIAVA

SEQ ID NO: 97851 - protein, 188 aa, Unknown
  Obtained from environmental sample
  DOMAIN (1)...(144): Uncharacterized ACR, COG1579
  misc_feature (1)..(188): Xaa is any amino acid
ALDKEIKDAAGMEQEFRNKLQREVRNVSELEDEIKQSQALIDQQEAELDERRKDIEKEVALKESQLKELSQKENDLASDLNDPDVLFKFERIIRNKMGKGIVAIKGGVCMGCHMILPAQFANTVRQGEEIVFCPYCSRILYYEESEQSEEDLFNDEDSGSLSDLDDMEDEDYDEDEEEDEKVSADYDE

SEQ ID NO: 97852 - protein, 72 aa, Unknown
  Obtained from environmental sample
  DOMAIN (4)...(72): Thiamine pyrophosphate enzyme, N-terminal TPP binding domain
  misc_feature (1)..(72): Xaa is any amino acid
MTELTGAQILIECWKKEGVEVIFGYPGATTIDIHHHLAQSGLRFILTRHEQAAVHAAEGYARVTGRPGVVLV

SEQ ID NO: 97853 - protein, 73 aa, Unknown
  Obtained from environmental sample
  misc_feature (1)..(73): Xaa is any amino acid
MDAQEKDLLAKLASENPELAEMVARHQSFESQLEEMNHRHYLSSEEDLERKKIQKAKLAVKDKIQAFLERHRN

SEQ ID NO: 97854 - protein, 258 aa, Unknown
  Obtained from environmental sample
  misc_feature (1)..(258): Xaa is any amino acid
YLNDRADRHYYKYPNYKYTDLQDADKTKKEASAKERYWLRAQNQGRTEDWDVNLNLDLASDPLYLKEFTGEPDGFNKSSRAFSSAYGHTVNEALNPNRTSDLYAQKLDGQDQVRAGLQYTQNLNQENNRDIAQRMPSIQYDLAGRRLGEGEDTYDPLAPRVSLNTRYDHFYRRTDEKSWTTESGHRARFKPTADLSRDLGAATIKLSGGLEANGYAAEGRRLSDPSVPSQRAEAEHKPSYNLLAGSTELELSTTFSRV

SEQ ID NO: 97855 - protein, 261 aa, Unknown
  Obtained from environmental sample
  DOMAIN (26)...(116): ParB-like nuclease domain
  misc_feature (1)..(261): Xaa is any amino acid
MELGMLKNAQSRTGTLDSLDVRLTIKDIPIGDIEIKTNIRSDCSEIQELAKSIRQYGLLQPITVYAGKDGFAVKAGHRRLLAYRLLHQEEPEKYHSIRCIISTAQNIEIVQLIENVQRVDLTQHDLYAALNLLREQGMALRQIAEAIGKSEGYVKSLFVGVNELNRDKELQSMIGDAGITIRDIAETNSVADKGKRLTLLEERKSGKVNREQMREKVRELSAPKPQKKTPVLPIGKEKGKKTHIAIKSFPSLSKIIIYQVK

SEQ ID NO: 97856 - protein, 257 aa, Unknown
  Obtained from environmental sample
  misc_feature (1)..(257): Xaa is any amino acid
MDVNADYADEDDPLTLKSDFVLSLCELIIGGKAGLEPVEKTIIDRCVRLVYRDYLTNPEAENMPILEDLYNLMRKQTEPEAQRIATALEIYVTGSLNVFNHQTNVDITNRLVCFDIKELGKQLKKLGMLILQDQVWGRVTANRAMKKTTWFYQDEFHLLLKEEQTSAYSVEIWKRFRKWGGIPTGLTQNVKDLLASREIENIMENSDFVYMLNQAQGDRQILAKQLGISPHQLSYVTRADSGAGLMFFGKRYNPGFM

SEQ ID NO: 97857 - protein, 119 aa, Unknown
  Obtained from environmental sample
  misc_feature (1)..(119): Xaa is any amino acid
LQPKEKQRMALLSANVRQANASRADAKESKPRRAAAKKPQIKQPCAGTQRAGFLERLFGGKPPQTAQQSIPYREMHRDGLCRVNDKLYTKTVEFGDLNYHLAQADDKTTIFEGYGDFLN

SEQ ID NO: 97858 - protein, 127 aa, Unknown
  Obtained from environmental sample
  misc_feature (1)..(127): Xaa is any amino acid
MSVHSAPPTPRNFTLPLGPVHVALEEPVYFHLTVDGEIIRKVELTSGHVHRGMEALATQRNLFQNTTLTERVCSLCSNSHSFTYCMAVESLLEISIPDRARYLRVLAEEIKRVASHLFNLAIQAHII

SEQ ID NO: 97859 - protein, 279 aa, Unknown
  Obtained from environmental sample
  misc_feature (1)..(279): Xaa is any amino acid
IGSGVTSIKSGSFSYCTGLTGITIPDNVTSIGEEAFFNCTGLNGVTIGNGVTSIGERTFFYCTGLTNITIPNSVTSIKSAVFSYCTNLAAINVDGGNSVYASEDGVLYKKNKNEIIQYPIGKKETTFTIPDSVVKIEERAFANCAGLTGIIIPNGVTGIGERAFFYCTGLTNIIIPSSVISIENEAFAGCTGLTNIIIPNSVTGIKEYTFADCTGLIDITIPDSVIVIKERAFAYCSGLISVTIPDSVTGIGNFTFYGCSDLATVTFQGTIYQRRLFCL

SEQ ID NO: 97860 - protein, 292 aa, Unknown
  Obtained from environmental sample
  DOMAIN (62)...(130): S1 RNA binding domain
  misc_feature (1)..(292): Xaa is any amino acid
NPVFDIDIASASAMNPEAEIGDEILVPLPVDDFSRIAAQSARQIISQELRRIERNIIYNEFIHRQGEMITGYVQREKNGMLFINLGKTEGIMPRSHQSPREKFQIGERIKAYLYSVEEDEKGTKIVLSRGCPEFVRYLFEIEVPEVYDGIVQIKGIVREAGYRTKAAVYSTRDEIDPIGTCVGMKGVRIQTIIREIGGEKIDILKYSSDIREFIRNAMSPAKVSRIHLISEERREALVVVSDREDDTQYSLAIGKNGLNVKLASKLTGWNIDVRKESELEGMDIVEESRQRA

SEQ ID NO: 97861 - protein, 168 aa, Unknown
  Obtained from environmental sample
  misc_feature (1)..(168): Xaa is any amino acid
MLTTSPKRPVRFFNTTGPCNPWDHYMLPPEERLEGAQLHRYIRDKLYWVLHAPRQTGKTTFLQNWMREINSKNEVIACYASLEACQGITGRAEAMITMHKAICESARANEIPIPELPLDNPELLLYETMRKWSELTAPKPLVVLFDEVDVLEGEALISFLRQLRNGFA

SEQ ID NO: 97862 - protein, 275 aa, Unknown
  Obtained from environmental sample
  misc_feature (1)..(275): Xaa is any amino acid
IRDPDDPGPTPPDPPPNIIQPPPYAPYDPPPPPPIVLILDPPVIIPEPPLPPDTPIVVPPNPTPDPKPVVVVTPPRPPLPVYPDIGLPPIDPGTLTPIVIPPSPYVPPSVIPDEIRETFEKNMPIYTGTTPPDIIGQYVANNFTLVSSSLGYDPIGSKNWYDQYIAFIRGSDGKISYKAREGTDNKYSSDDVVIEIVGSNDKFTAYFVLSGISRGIQVKQSTVISGTMTSNGISNFQYAFIMLEKGPDPSGILVPVNTYRVFKDGDGLASKYTWL

SEQ ID NO: 97863 - protein, 119 aa, Unknown
  Obtained from environmental sample
  DOMAIN (1)...(104): Leucyl/phenylalanyl-tRNA protein transferase
  misc_feature (1)..(119): Xaa is any amino acid
QAKRPGQNGTWIDHDIIEAYTELHRLGWAHSAEAYLGGELAGGCYGILMGKVFFGESMFSLKPNASKAAFITLASMLFEKGIRLIDCQQHTAHLGSLGAEDISRTEFIALLKDAVRDRA

SEQ ID NO: 97864 - protein, 289 aa, Unknown
  Obtained from environmental sample
  DOMAIN (1)...(234): Amidohydrolase family
  misc_feature (1)..(289): Xaa is any amino acid
DEKRSERSFADALRFFDDFDGKGGGLIRGFVNPCQIRWTTEDILLRALRFAESKNAPMRLHACEGVGEWDYIRTLGGKTTIEYFEKIGLLSRNLLIPHCIAARDSELETLARHGISVITTPFAEIHWGDALFSFAKYRHYGINMTIGTDAQPLDMIRNMRLARNIDMVCHRRQIFDRYGEDGSVANMFADEPEYRRMTFADFFDAATVSGAKALGRDDIGRLAPGAKADIIVIDLNDIAVGPYEDPIRTMVVSCTGYNVSHTVINGKMLMKDKKLIGVDESALIKKRSR

SEQ ID NO: 97865 - protein, 230 aa, Unknown
  Obtained from environmental sample
  misc_feature (1)..(230): Xaa is any amino acid
YLGREGIGGSPFPRIVGLSTSVKDELAVICRIPDGWNVYWFNASGVLLYLVKIASESIPAYPEWPQAITAVDHVAAAADARKLYIKVDYSRDTFDQLTNTRTGPEPISSIIWILDIEDGNGTYSSSIEVPLFEISENHRSAGFKVFYSMIGVMRGGKVLLYFPVDNGFSILFVDSHSSEQRRGYLNFFIDELRYNDFFLSPDGILCAMFADNFNVKLLWWRTDKFIGVSQ

SEQ ID NO: 97866 - protein, 83 aa, Unknown
  Obtained from environmental sample
  misc_feature (1)..(83): Xaa is any amino acid
LEAIGDPLTHLVRNACDHGIETQAQRDAAGKTDPPTVTLSAYHESGQIHVDVKDNGKGMGHEAIRKKCLEKRLKTEDETRPAN

SEQ ID NO: 97867 - protein, 153 aa, Unknown
  Obtained from environmental sample
  misc_feature (1)..(153): Xaa is any amino acid
LLFRQSDYFWGLATVTDIWKELGWNAIIYVAAITSIDAELYEAAAIDGAGRLSRMWHITLAGIKPTIIILLIFAAGGLLASNFDQTYMLTKQMGNAMLRERADVLATYVLRIGIREMRFSYAAAVGLFSTVVNFALVLGANFLANKTGQSGLF

SEQ ID NO: 97868 - protein, 131 aa, Unknown
  Obtained from environmental sample
  misc_feature (1)..(131): Xaa is any amino acid
MIIKKNFSDYLIDGFIYAFMILLIVLVLYPFFNALAISFNNADDTVRGGIGLWPRKPTIASYRSIFTNPKIWNAYMITIARTALGTLTALFCTGIIAFGLAHKNLTGRRFYSIICIIPMYFGGGLIPYYFL

SEQ ID NO: 97869 - protein, 285 aa, Unknown
  Obtained from environmental sample
  misc_feature (1)..(285): Xaa is any amino acid
YYNILKDQAEYTNIESIKKIIDFINPTDILLFPGRYDTGQIMADLHDFTGKIHIDFHYDIDNILGEADRKIESIILSTSSIFYKNICDGSLDRLLEYFKNYKVRQFLVKENRGGSFCFLAEEKKLYEADSFYIPTMHSVGVGDVYNSIFISTLFGTDMAKRMRLAALCAAKYAETMYYKKFKDNVQIIYGNIDEVNDLLGIRLPWSERKHINIYLAAPDFPEIDTGLLDRLKDSLLYHNFTPRLPIRENGIATKVLNYEEKLNIYRTDIILLNECALLIAVLLNN

SEQ ID NO: 97870 - protein, 50 aa, Unknown
  Obtained from environmental sample
  misc_feature (1)..(50): Xaa is any amino acid
FRQDLGADSLDTYELVYAIEEEMSINIPDEKANEFETVKDAYEFIKSQQK

SEQ ID NO: 97871 - protein, 262 aa, Unknown
  Obtained from environmental sample
  DOMAIN (1)...(262): MreB/Mbl protein
  misc_feature (1)..(262): Xaa is any amino acid
GIVLNQPSVVAVELGTKKVVAVGADAKRMLSKTPGNIRTIRPLRDGVIADLESTEKMIRYFISRVLPRYRFVKPRMVIGIPSCITEVEKRAVEESAYKAGARDVIVIEESLAAAIGADIPIHEPAGHMVCDIGGGTTEISVISLGGMVVTNAIRLGGDEFDEAIIKYVRMVNNLIIGQQMAEHLKIEIGNAVPDKSIMEVEVKGTNAANGLPQRFKIGSDQIREALRDPINQIVDNIKSTLGQTPPELAADIVERGIIMTGG

SEQ ID NO: 97872 - protein, 119 aa, Unknown
  Obtained from environmental sample
  DOMAIN (11)...(119): Pyruvate ferredoxin/flavodoxin oxidoreductase
  misc_feature (1)..(119): Xaa is any amino acid
MKFDVILAGVGGQGVLSVAAIIAQAAVNEGFNVRQSEVHGMAQRGGAVLAHLRISDTTIAGDLVPKGGADIIISMEPLESLRYTDWLAPSGALVTAAEPFVNISNYPELETVIAAIKTT

SEQ ID NO: 97873 - protein, 111 aa, Unknown
  Obtained from environmental sample
  misc_feature (1)..(111): Xaa is any amino acid
ALFTGLFFLVALFFWPVFRIVPIAATFPALIFAGFLMMSPVVEINFKDPTEGIPAFMAIIMMPFTYSIADGIVYGVLTYVTLKVVTRRLKEIHPVTWLFFIVFILKVVLDR

SEQ ID NO: 97874 - protein, 295 aa, Unknown
  Obtained from environmental sample
  misc_feature (1)..(295): Xaa is any amino acid
DKVDSADVIPDAGTDVGASMGSVDTDGAVDAAGYDAFNPDNLTVDTDTGAVADIGADVLPDIGAIDTSADVLPDLSAIDTGTDVISDAGTDISAGIGDIDTDGAVDAASYDAFNPDNLTVDTDTGAVADIGTDLGAIDTSADVLPDLGAIDTSADVLPDLGVIDTSTDVLPDLGTDISAGIGDIDTDGAVDAASYDAFNPDNLTVDTDTGAVADIGTDLGAIDTSADVLPDLSAIDTSADVLPDLSAIDTSTDVLPDLGTDISAGIGDIDTDGAVDAAGYDAFNPDNLTVDTARA

SEQ ID NO: 97875 - protein, 291 aa, Unknown
  Obtained from environmental sample
  DOMAIN (1)...(226): AICARFT/IMPCHase bienzyme
  misc_feature (1)..(291): Xaa is any amino acid
DPSCTEASLATAEQLHGKELSYNNIVDADAALEMIREFSDSNTVAIIKHLNPCGLATGETLSEAFNYAWEGDPVSAYGSVIAVSRKVDLKTAELLKGRFVEILLAPDFDADALEFLKNKSKDIRLLKVGEIKPPVACKVYKHVIGGMLVQDRDIECWEKFECPTIAKFPKEKEALAKFSWLVCKHTKSNAIVMCHEYKIGFFMILGLGPGQPNRIDSNLRLCQPRVADNVKRMNLPESVWGSLVMASDAFFPFADNIDASNSAGIKYIVQPGGSKKDNEVIEACNKFGIAM

SEQ ID NO: 97876 - protein, 239 aa, Unknown
  Obtained from environmental sample
  misc_feature (1)..(239): Xaa is any amino acid
MKELYELVVSRKAKIGAIHTYLEIYGRYFLDLFPNVALVVAEEADADGNLYTGFTTEDTPTIAEATHFSSGLVVAQVKKRSSALPRVDIPGGWVDYVIETGEDFWMQALFTRDPARVSDQQVLMAMMTIKGIYDEYSVASLNHGLGFPTAAVELLLPTYGKELGIEGRACTDWVLNPHPTLIPAIETGIARRVYAFGGEPGMEDYTRARPDVFAIGPDGHMRSNRCAAHIAGLYAIDAF

SEQ ID NO: 97877 - protein, 70 aa, Unknown
  Obtained from environmental sample
  misc_feature (1)..(70): Xaa is any amino acid
MSNEIITLVKDTALARVIMVMEIIRVAETFASTRAIIWPLFYTGAFYLLFVGILTLLFGHIEQKLSYFRA

SEQ ID NO: 97878 - protein, 288 aa, Unknown
  Obtained from environmental sample
  misc_feature (1)..(288): Xaa is any amino acid
RPSPPPVAPPATGAKGGEAKTTGTPTPRTAQGGDADVKTPKKGLLASIKSAVTAAVEKVVDAVKDRVTAVASSVAAAVAATVGSILGLRGKGDHAETEAAEPEKCFCDRDIKVKEFEKIINDLRDAEGIKDRSLFTMGNCDIPSKDKTMQRLTEEFNKTCKKYNIDYCIQKIYFLSQIYHESARFMTALEFDNGERYNPDRRSDAKQYGNTEIGDGPKYKGRGFMQLTWRNIQLEYLNHAKDYIDALKEKTAEEIADRNNNFEKIISDTLFAAMDSAGWYWSKYVIVS

SEQ ID NO: 97879 - protein, 272 aa, Unknown
  Obtained from environmental sample
  DOMAIN (139)...(240): Hpt domain
  misc_feature (1)..(272): Xaa is any amino acid
SKFEKLRTCTEDAGVQESANKCIALVEKIIFQEIKPTDGIAQISDVLTALRRKCQYGDAAAVTDEAADAAALSADGGDIAKDMDFDMDADEGDAKKEPPKPAAQPLKQDAEGFFVDSVNQAKPKVNFKREIAIASLDASLLSEFIAEAQEHFANADSALLRLEAAPADVDIVNELFRVFHTIKGVAGFLALDAIQALSHVTESLMGNAREKTFVLNSAAIDLIFSVVDVLKKEVETLTSALESNGTYVVQDIMDHVIASVDAMKHSFAHNKP

SEQ ID NO: 97880 - protein, 89 aa, Unknown
  Obtained from environmental sample
  misc_feature (1)..(89): Xaa is any amino acid
MVSSEAVPFAKTGGLADMVSALSINLAKLGHEVKIVIPRYYSVDRGSLKHLPGALGVPMGGIEEWGGVYTASMPGTAKKNPVTVYFIDH

SEQ ID NO: 97881 - protein, 269 aa, Unknown
  Obtained from environmental sample
  DOMAIN (26)...(215): haloacid dehalogenase-like hydrolase
  misc_feature (1)..(269): Xaa is any amino acid
HGRHGSGRGKRHTFQGGEALETAHKVNVVVFDKTGTITCGQPEVTGIEGDVLQIAASLERYSEHPIARAVVAAYQGEYLEVEDFKANIGQGVEGVIGGRKVVIGRGVEVFADGERLGQITVSDKPKESSRAAIAKLREMGLETVMITGDNRATAERIAKEIGLGRVLAEVLPGGKADEVKKLQAGGGIVAMVGDGINDAPALAQADVGFAIGTGTDVAMESADVVLMRGDLLAVPTALQLSRRVIRTIRQNLFWAFGYNAVGLPIAAGA

SEQ ID NO: 97882 - protein, 287 aa, Unknown
  Obtained from environmental sample
  misc_feature (1)..(287): Xaa is any amino acid
IDVSANAESANMAMAAYGMESPISHIEPEQNAAELSEFATALRTEKFRMDMAFKLIGVSGMIADKMAENSEAGSATGILQAVNPADLSMSVADTVSAFSNLIREELAASADRVRQIARGQAEMTDLERAAVELGTVKSEILKAALSKAKAGDSTFVKNDPDVKVKVDKTDVNDADVKTEVKADNKIGVNKGINTDAKINVNTVNVKADVNVTVNAGVNTETKVNADTANVKVDVNTTANADVNTSNVKVNVNSGANAAVDTDVNTAAKVNTDTANVKPSVNVTVNTD

SEQ ID NO: 97883 - protein, 296 aa, Unknown
  Obtained from environmental sample
  misc_feature (1)..(296): Xaa is any amino acid
SISLSKQGIENLADQRGAYWQGREDGLFRVARTLANIFGDFEDDPVTQRRDMYNSMMQSVARAETTIYQVYCVWKPNAVDGMDASYIGRPGCTETGQYATAFRMENGQSNLTVTSDVADAMAYLNGPNSRKDRYEHPVARNIDGKDTYYFRMMVPIINRRNNEVVGGVGCLCVIDAIQPTVENTIKVREDIAAAAIYSSNGFIMASYIPERVGKQLIDTDVIYGDYIKDANEAVLNGKEFSCSSYSSVLKSKVEIVLQPFPMGNSGKSWTVMIATTQSYILKEVNQMTRFTIILAA

SEQ ID NO: 97884 - protein, 76 aa, Unknown
  Obtained from environmental sample
  misc_feature (1)..(76): Xaa is any amino acid
MLIAITALGYASCWVEGQVTENSETQEQIAKLLKLPANYIVVAFLPIGVPEKEGKRPLYKAFSERAWYNIYGGFYG

SEQ ID NO: 97885 - protein, 227 aa, Unknown
  Obtained from environmental sample
  misc_feature (1)..(227): Xaa is any amino acid
RRKALEIAADKTLETPVEKYFSTFADSFIEPTENEKIGDLWSWWDKKLDNFDEWDEQDEKDEQDEKDKQDKPKHPDTYKQRLQKIPDESGREHREDERGESKPESDANEENEYMGGSYEDLKWNYAGHGDKYEVHHIPADSASELRRSDGPAIAMDYADHRQTASCGRSSEAEEYRQAQKELIEQGKFWEAFQMDVDDIREKFGDKYDKVIDEAREYAKKLEEEGRV

SEQ ID NO: 97886 - protein, 258 aa, Unknown
  Obtained from environmental sample
  misc_feature (1)..(258): Xaa is any amino acid
MNRIYIPSRTKEGFLEMPTGVRNHLVNSQRVIGIFERIGYTLEELIEDNEAAGYEFEVSLDFFTAELEFTLEGDTLAVNFPSYRLTSSQPDNRIYSLELMKYFGAAGTGETGYIMVPSGSGALIDFNNGRVNEDPYLGTVYGLDPLMNLWMGQQSTPVRLPVLGIKRENAAFLAYIENGAGMASINADISGKNSEYNNAYFTFLYRDSMMQGATVSNTESDMTVIQTQAYDGDVTVKYCFLSGDEADYNGMARAYQRK

SEQ ID NO: 97887 - protein, 72 aa, Unknown
  Obtained from environmental sample
  misc_feature (1)..(72): Xaa is any amino acid
MKKKRKGLTMRQREIVTGFLFISPWIVGVAYFFIRSIAQAVMYSFNSMTVLENGGYSLNPVGLYNYNFALFE

SEQ ID NO: 97888 - protein, 274 aa, Unknown
  Obtained from environmental sample
  DOMAIN (119)...(274): Radical SAM superfamily
  misc_feature (1)..(274): Xaa is any amino acid
MNINRQKMFPTVSDEQWNDWKWQVKHRIETLDELKTLIPLTEAEENGVRESLKTLRMAITPYYLSLIDTKNPHCPIRKQAIPTAAELHKSPADLEDPLHEDEDSPVPGLTHRYPDRVLFLITDQCSMYCRHCTRRRLVGQKDGESPSERINKAIEYIAKTPQVRDVLLSGGDALLVSDAMLESIIQRLRAIPHVEIIRIGTRVPVVCPQRITDDLVNMLKKYHPIWVNTHFNHSNEITPEAAEACAKMANAGIPLGNQSVLLRGVNDCTAVMKK

SEQ ID NO: 97889 - protein, 223 aa, Unknown
  Obtained from environmental sample
  misc_feature (1)..(223): Xaa is any amino acid
VPFIQSIKPFHSVSIVGMAKNTGKTTCLNYVIRRLRDEGKAIALTSIGVDGEERDVLYDTPKPRITLDEGMVFVTSEQDFEQCEFPTEVLTVSERATALGRLITARAKGTGKVVLSGPSDSAWLQSTITAMSSYGVELTLVDGALSRMSLASPAVTDAMILCTGAACSPQLPELIRRTKFRCNLIDLEQADDTMQRNLHPINSGVWTLNETLNEWTKIGNSVL

SEQ ID NO: 97890 - protein, 53 aa, Unknown
  Obtained from environmental sample
  DOMAIN (6)...(53): ATP synthase subunit C
  misc_feature (1)..(53): Xaa is any amino acid
MDLSVLIAIGAGIAVATGIGAGIGIGIATSGLVQAISRQPETAGKITPMFFCR

SEQ ID NO: 97891 - protein, 262 aa, Unknown
  Obtained from environmental sample
  DOMAIN (219)...(252): Tetratricopeptide repeat
  misc_feature (1)..(262): Xaa is any amino acid
VQSESILKDADYVAAIENAPDGYTKSLYEAEAQKISEIQKGILAISNKEAPYDVFICYKETTDGGSRTKDSTIAQDIYYELTNDGYKVFFSRITLEDKLGQQYEPYIFSALNSAKVMLVIGTSKEYFEAVWVKNEWSRFLAIMKKDRSRLLIPCYRDMDAYDIPEELSSLQSQDMSKVGFIQDVIRGVKKVVDAGKTDVKTQSAAGAMVAGATVVAPGVESLTKRGKLFLEDSDWKQADEYFDKALDIDPEYAPAYIGKLCA

SEQ ID NO: 97892 - protein, 255 aa, Unknown
  Obtained from environmental sample
  DOMAIN (85)...(245): Glycosyl transferases group 1
  misc_feature (1)..(255): Xaa is any amino acid
LPFAPGIVFLHDIYCEFFSEDFISLRDKLIRLYNKWQYRLIAKKARRIGTVSYFSKNQIAGTYNINPDRITVIYSSWNHFRNITADYSIINDFPVLSKQFYFSLGSLSKRKNIKWIIEYARKNANSVFAISGVSLPTVKADELDNSTPQNIIMLGYLDDSKVKALMTRCKAFILPSYYEGFGLTPLEALSCGAPIIIAKAASLPEIYGNTAHYIDPFNADVDLDALLREPVEKPDAILAEYSYETSAEKVYNLIK

SEQ ID NO: 97893 - protein, 278 aa, Unknown
  Obtained from environmental sample
  DOMAIN (2)...(177): FGGY family of carbohydrate kinases, N-terminal domain
  misc_feature (1)..(278): Xaa is any amino acid
VIGISNQRETAAAWIRKTSEPLCEAVVWQCGRAAELIRKIDHDGFAAKVRGITGLNLSPYFSGPKFAWMVENCPEVRAALNKENLCCGTIDSWLVFAFTGGRSFKTDYSNASRTQLLDLETLSWSEPLMEAFGIGPENLPEICFSDSLFGETTLDGLFDKPVPIHGVLGDSHAALFANRCLEPYSAKATYGTGSSVMMNAGTVRPKPEEGIAASLAWGMKGSVNYVLEGNINYTGAVIKWLVEEMELIGSPKEAAALAASVKDTGGVYLVPAFTGLGA

SEQ ID NO: 97894 - protein, 215 aa, Unknown
  Obtained from environmental sample
  DOMAIN (2)...(211): Prokaryotic protein of unknown function (DUF849)
  misc_feature (1)..(215): Xaa is any amino acid
MSNKLMLTCAITGAETTREQQPALPITPEEIAAGAFEAWEAGASILHLHVRLDDGTPTQDKAVFKKAIDLVRSKCDMVIETTTGGAVGMTPEERLQPVTLKPEMASLDCGTVNFGDDYIVNTLPIMREFAKAMKDNGVRPTLECFDLGHVYASQMLIKEGLLEEPYHYGLVLNVPGAAKYEVDVLDFMVRKLPKGAFWTAMGIGGKANLDAIYGA

SEQ ID NO: 97895 - protein, 225 aa, Unknown
  Obtained from environmental sample
  misc_feature (1)..(225): Xaa is any amino acid
MRKEEKASQWIPANIPVTSINLDKRNLRIAWMEDPQISQSTLIKLFWENYNVKEVIKSIEAYGFFKHEIPVVIRDSEQDGRYIVVEGNRRLAALKLIQNPDFKFIQPINKKWLSDISTRIKKDIEIIPVFIAPSWESCLPVMVLKHASEDHSSWKTLMQDYLYWSYLQENPKTNIDTAAAHFNMTSVKFNEYVRRYNLFRLIKGVDGLSSDIQNIACNARDIPIT

SEQ ID NO: 97896 - protein, 231 aa, Unknown
  Obtained from environmental sample
  misc_feature (1)..(231): Xaa is any amino acid
MTRFKLYLLLGAFCLVLGCRAKYGSSNYDSAPQAASIAGMVYRDRGLQETYYELDQLDESSAADQEISENDVERKIVMTAHVRVRVENLNEADSFVKDLMKKYNAYASSTDINDNSRNYSIRVPSSAYKAAIDEINSMGRLLGRSENAEDVTLRYYDLEGRLATKKELLKTFQSYLGKAKTIEEILSVEKRISELQYEIEGTGKELRNLTNRIDYATIDLSVLGPIASSPY

SEQ ID NO: 97897 - protein, 211 aa, Unknown
  Obtained from environmental sample
  DOMAIN (19)...(204): Glycoprotease family
  misc_feature (1)..(211): Xaa is any amino acid
MGIESSCDETSVAILRDGCVLSSLTHTQAEHAIYGGVVPEVASRAHLERIDGLAKAAMEQGGIGPKDIDLIAVTDSPGLAGALLVGVSFALGMHAAHGIPITGVNHLEGHICSLFIAPDGISVPTPFIVLLASGGHTAVYKYASFGDCELLGRTVDDAAGEAFDKVGKLLGFPYPAGRAIEQEAAKASNLGRPEITFPIARFSSPDKRYCF

SEQ ID NO: 97898 - protein, 210 aa, Unknown
  Obtained from environmental sample
  misc_feature (1)..(210): Xaa is any amino acid
VRIRGPVSYNDETLESIVGDQLSYRYWPIRQSELSAKIEYEELKETTIDLGDGLKVKTKYLNHPILCLGYRFEYQGKSIVTVFDHEPYRNLFPVDPEDPSYNEEAAIDGEEAAKEENEKILNFCKGADILIHDAQYSAAEFEKHLGWGHSSYDYAMQAADKARVKKLVFFHHDPNYKDKKLESIEEQCKNDAKAKGFEIIMAREGLQIEV

SEQ ID NO: 97899 - protein, 242 aa, Unknown
  Obtained from environmental sample
  DOMAIN (7)...(242): Iron-containing alcohol dehydrogenase
  misc_feature (1)..(242): Xaa is any amino acid
MQWFKVPPKTYFEPNAIQYLADMKGVERVTIVTDKVMSSIGIVDKVLDVLRRRPNKVAVQVLDYVEPEPSVETVISGAERMREHNPDTIIAIGGGSPMDAAKVMWLKYEHPEIDFADLREKFFDVRKRAFQYPQLGQKATLVCIPTSSGTGSEVTPFAVISDHKTGFKYPLADYALTPTVAIVDPELTKTMPAKLVVDSGMDALTHATEAFVSVYANDYTDGLCKQAISLITDNIEKSKNGG

SEQ ID NO: 97900 - protein, 179 aa, Unknown
  Obtained from environmental sample
  DOMAIN (2)...(179): Starch synthase catalytic domain
  misc_feature (1)..(179): Xaa is any amino acid
MKVLMVSSEAVPWAKTGGLADMVSALSINLAKLGHEVKIVIPRYYSIDRDKLKLLPGAMGTPMGGGIEEWSAVYYTDMPGTNKKNPVKIYFIDHEIFFGRNGIYGSHADTDFIDNPRRFSFFCRAAFQLCRKIEWYPDVLHAHDWPAAIAPVYLKFAERVPGGDKGFKKTISILTVHNL

SEQ ID NO: 97901 - protein, 266 aa, Unknown
  Obtained from environmental sample
  DOMAIN (2)...(198): Stage II sporulation protein E (SpoIIE)
  misc_feature (1)..(266): Xaa is any amino acid
DAIIKCDASGKGMPAALIMIQVATMFLNCFKQWKQNPRRMHIEEVVYQINEFIETLAFNGHFAAFTLCLFDSVTGKARFCNAGDNIVHLYDASEERLKTITLSQSPAAGVLPNSMIESTGGYSVQTVMVDNGDILLLYTDGIEEAKRKFRNSSFKEIACTEGPAGTPHENHLCGQTSEEMSNERVEAIINAVMARKVYTLKKYHNPEGDAELQFNFSICNGSAEEVVMAMVSVEKMFRCYKNPNAGEESRVLVDKKVDSFLKNHFC

SEQ ID NO: 97902 - protein, 75 aa, Unknown
  Obtained from environmental sample
  DOMAIN (4)...(74): BMC domain
  misc_feature (1)..(75): Xaa is any amino acid
MAKEALGMVETRGLTAAIEAADAMTKAAEVTLIGTEKIGSGLVTVMVRGDVGAVKAAVESGCAAASRLGELVAAH

SEQ ID NO: 97903 - protein, 192 aa, Unknown
  Obtained from environmental sample
  misc_feature (1)..(192): Xaa is any amino acid
AEKEVVALSSIIDELIHYMVTEQGCYLASKKEQEQLVATVLTGKGLRRECVGRDAKTLLSMIGVHVPDNIRCIIFEGEKEHPLIAEELMMPILGIVRAHSFDNGIENAVWLEHGYRHSAHIHSKNVDNITKYAKAMDTAILVKNGPSYSALGFGGEGFCTFTIASRTGEGLTSAKDFTKRRRCVMSDSLCIR

SEQ ID NO: 97904 - protein, 68 aa, Unknown
  Obtained from environmental sample
  DOMAIN (1)...(67): Protein of unknown function, DUF486
  misc_feature (1)..(68): Xaa is any amino acid
MQVPANRIGFSENGGPFSMWQLKVIQEVISLSVFTILAIFLLGAGAIKWNYAVSFLLIVAAVYFAFMK

SEQ ID NO: 97905 - protein, 91 aa, Unknown
  Obtained from environmental sample
  misc_feature (1)..(91): Xaa is any amino acid
MPTIRSSYTDKLRFFGAHTPQRLTAVHGSPLYVYNEDILRRSCRDMLALSTHPGFRVNYSAKSHSNPALLRIIREESCLADAMSPGELHMN

SEQ ID NO: 97906 - protein, 65 aa, Unknown
  Obtained from environmental sample
  misc_feature (1)..(65): Xaa is any amino acid
MFSKNALNGPFKTYHKDPKGQGKVEESGSYINGKYDGERFQFDKNGKKISKAVYKDGNMEFGERY

SEQ ID NO: 97907 - protein, 276 aa, Unknown
  Obtained from environmental sample
  DOMAIN (1)...(261): Bacterial extracellular solute-binding proteins, family 5 Middle
  misc_feature (1)..(276): Xaa is any amino acid
AFWKKPIGSGPYKVSETHYPDTFTVVRNDDYYGKKAGIKNVLFTSYYTGGDNAAVNAAIAGRLDVEFKAFNDIAVAQNIVKQNNAMAIETYDTGNFRYLGFNLNGSADGKHNTDVLKKEVRQAINLLIDKKAIADFYAGQGTPMTTQIPSSWSAFNTDIPLWQRNVARARQLLTGANFNFSRPLRLLYYYTDQITADTMEVLKQNFAEAGITLEPFLAQGDLATLIYESRNYDILYALWGGFPLDPVATYNNLQPSGSNYDKLYADIETRNRVFTP

SEQ ID NO: 97908 - protein, 262 aa, Unknown
  Obtained from environmental sample
  misc_feature (1)..(262): Xaa is any amino acid
VRLGGLDSKDHSALREEMGDRAIIIPLGEGSRVLAASSKKGRFALDSSLKKFSFEPVAVPKDHTGVPSEMLESLEQQRKRLEKEIEVINLEKEQVRQSEASNIKRLIFSWNTALTIEVIKSKFTATESLYHFSGWTPAETAAVISRDLFKLTGGRVAIKAYSPEELPSVQEGREKVPVAMKHSAFVKGFEGVVFSYAAPLYGTIDPTPLVAVFFTILFGLMFGDVGQGLVLLLAGIFTSASGPKVFSKFKSYSVPLISVGML

SEQ ID NO: 97909 - protein, 144 aa, Unknown
  Obtained from environmental sample
  DOMAIN (1)...(141): short chain dehydrogenase
  misc_feature (1)..(144): Xaa is any amino acid
MKIFITGGTGNIGQYVVLSMVNAGHDALVLSRNPDKYPSLSQKAKLVNGDINDHWSMTEYVKGCDAVIHIALGWGDEPMSMLINDTAATVHLLEAAEQAGVKKFIYTSSTAAMRRMRQTMEESMANLPVDLYGGTKAASEAYVL

SEQ ID NO: 97910 - protein, 158 aa, Unknown
  Obtained from environmental sample
  misc_feature (1)..(158): Xaa is any amino acid
MNKNKKSGRLGLQLKLSSISITFMLLAIVIFSIISIRAIQESSLETAVIMGENKLSSDMVHFTHRMKTEYGQLSIIDGDLIGENGDTLKYNYKLIDELSSDLNIAATVFIRDGEDFRRITTSIIDNAGKRAVDTMLGTGSAAYPSVYSGKNYSGQASC

SEQ ID NO: 97911 - protein, 278 aa, Unknown
  Obtained from environmental sample
  misc_feature (1)..(278): Xaa is any amino acid
VVRAVLLALLGIIIPLYAGAAETSSPGTGASGDVDFSIRFFDRRIYYVEGDPIYIQVTITNNSPATYRFKLADERVFSIEFDVKTVSNRSLEPADILVRKRTQYQQIFFREVAVESGESFSFVEDLRNYVNVKEPGSLVVKAYLYPELFRPGMIKAAALGGSGLAGGLAGSAPLAAAGILESKRLSLSIRPPIVTGPDGTPVEMDIATNAVLVRERLAPDQVVEYMLTARQRSQWEKFFLYLDLEAMLSRDAARQRKWLTESEEGRRRMIDQYRQELR

SEQ ID NO: 97912 - protein, 85 aa, Unknown
  Obtained from environmental sample
  misc_feature (1)..(85): Xaa is any amino acid
FPSVEELPSVSGDSAAVIPDEPIAEAQSSKQEISGIPANLKTELKTVLSYMDQLLEALPDEKIEEFAKSDYYDTYKKLFKELGLA

SEQ ID NO: 97913 - protein, 246 aa, Unknown
  Obtained from environmental sample
  misc_feature (1)..(246): Xaa is any amino acid
VTAGVKDVREVIEAARRRLINSGQETVLFIDEVHRFSKSQQDALLPAVENRLVTLIAATTENPSFSVNSPLLSRSLVLNLQPLADDDVRSLLQRAITDERGLGGIVGINDDALAQLVRMADGDARRSLTILEAAAATALSNDSTDRTNLPEDLATEHCAVTEYSAQDDEVGRVASVGGSAQDDGAEVEPRLITVDIIEQAADVAAVRYDKDGDQHYDVISAFIKSIRGSDPDAALHYLARMIVAGE

SEQ ID NO: 97914 - protein, 237 aa, Unknown
  Obtained from environmental sample
  misc_feature (1)..(237): Xaa is any amino acid
MYTLQAIESGIDPTKDVQEYESVTYIRMHKDFDPLESALGVADVLVEAFACDIPEKVFRVALNQSKLIINLEYLSAEEWVEEYHLFESLLGGGTARKFFFMPGFRETTGGLIINSKLKALREGGGLDRFAVINGVVGDFGISIDPSGDTMVGTVFTYERGFDTLISDLVEFGRDTLLIVFGEKSRLGMAATFGRLLGGASSCEGGVDCRKDPCRVYKNVRVLYAPFLPQHGYDALLC

SEQ ID NO: 97915 - protein, 258 aa, Unknown
  Obtained from environmental sample
  DOMAIN (184)...(250): His Kinase A (phosphoacceptor) domain
  misc_feature (1)..(258): Xaa is any amino acid
MYKGKYVVLGYQYNLHARKMWEMKLADAKDLIELQLAKLNLVVKATKIALWDMEVIHDDPVNPKNAFFWSDEFRRMLGYTDENDFPNILSSWSNLLHPDDKGKTLNAFAEHLFDRTGNTPFDVEFRLMRKTGEYAYYWASGECIRDKDGNALRVAGALMDITENKIILLEKEQQKEAAEAASREKSNFLANMSHELRSPLNVVIGLTNLILENKHLDEQTTENLEKINNAGTSLLRIVNDVLDLSKIESGKIVLSEEE

SEQ ID NO: 97916 - protein, 127 aa, Unknown
  Obtained from environmental sample
  misc_feature (1)..(127): Xaa is any amino acid
MYIKIISYEVPKLVRDKVPYNMNEKGEVPLLCVARNDVEYASFLQQKLLEEFQEFYNKPRECQIEEMGDMLEVIYAIGKFYGLSVDDIDRMRMEKLEKRGGFNQRIILHGKIEKSSGKIINIVPKLI

SEQ ID NO: 97917 - protein, 110 aa, Unknown
  Obtained from environmental sample
  DOMAIN (27)...(109): Glycoprotease family
  misc_feature (1)..(110): Xaa is any amino acid
MILGFNFATENLCLAIADTEKIYHGQTIKAEFLLEYLDELLQASHLTLKDISRIGIAIGPGAFTGLRLSLVTAKTLALELNIPLVPVSTLEALAVQYQAKAQGKNIRVIM

SEQ ID NO: 97918 - protein, 61 aa, Unknown
  Obtained from environmental sample
  misc_feature (1)..(61): Xaa is any amino acid
EAGQRLRVKGKGLVSKKQTGDLYAVLKIVMPPKPDENTAALWQQLADAQSSFDPRKDWGKA

SEQ ID NO: 97919 - protein, 260 aa, Unknown
  Obtained from environmental sample
  misc_feature (1)..(260): Xaa is any amino acid
LLRRFYDALITPDLYRLYYADKDMVLRAAAESVVLNDVVVTGAASQRSKTTFSSPARTVKNEMITEDMPRAAIAKDANTTSTSAETGAGTDDREESVVQQPVQIRTNFNETAFFYPQLKTNENGETVVSFTIPEALTRWKMQGLAWTSDLKVGSITKELVTQKDLMLFPNAPRFFRENDTIYFSVKVSNISDKKIDVKTTVQFFDALTMQPISLTLAGDLPHTTTLAAGENKAVSWKLYIPERLQAVTYRITATGGNFSD

SEQ ID NO: 97920 - protein, 109 aa, Unknown
  Obtained from environmental sample
  misc_feature (1)..(109): Xaa is any amino acid
MKITRYLIAILPLALCLYCDKKAAGDGHEGHNHGTAAAKSHEGHKDHDGNESHKDHEGHEGHDHDQEDDSPLKDIQGARGQVVGPPKELSIWVSAEVVADELSQFCFQP

SEQ ID NO: 97921 - protein, 103 aa, Unknown
  Obtained from environmental sample
  DOMAIN (58)...(93): Sel1 repeat
  misc_feature (1)..(103): Xaa is any amino acid
MNEQNKQEVAERHRLAAERGDADAQCQLGFMYDEGIGVKRDDAEAVRWYRMAAKQGHAGAQFKLGLMYYVGSGIRRNSRTAAGWYLKAAEQGNAEAQNALGLL

SEQ ID NO: 97922 - protein, 271 aa, Unknown
  Obtained from environmental sample
  DOMAIN (34)...(271): RNA polymerase Rpb1, domain 5
  misc_feature (1)..(271): Xaa is any amino acid
VSYADLIEGETYEELYDERSGVTNYVVIEHRRDRKLHPHIQVYDGETRVANMAMPTGCYLQVKEGDKVAAGDILAKMPRESAKSRDITGGLPRVAELFEARRPKDPAVVSEIDGAVSFGDTERGNRKLKISNEHGDVKDYNIPLGKHLRVHEGDRVKAGDRLCEGAIDPHDILRIKGENAVQEYMLNEIQAVYRLQGVTINDKHVEVIVSQMLRKVRIERLGDTDFLEGDEVDRNELRKANEKVLAEGGEPATFKPMLLGITKASITTESS

SEQ ID NO: 97923 - protein, 258 aa, Unknown
  Obtained from environmental sample
  misc_feature (1)..(258): Xaa is any amino acid
IGNSEGFEEFFSKNTEDRQRVTQDFNFQDLSLDNLSLILMKKLRERGLLFDPALKKNFSSYIQERKNDPSCEYKNGWLIEKDVIPSIDKNQQARLERLDSASVTDEDFKTIKAEDLPLKNKSKTIDEILAELDEMTGMTEVKKTVREIANKIQIQKEQEEKDGTKSAGEGNNIVITGNPGTGKTTIVRTLGALFNAIGLLDSDAVIEVNGNDLKGSYLGQSKDKVNEKCDEAMGGILFVDEAYVLADTQRGSGAADEY

SEQ ID NO: 97924 - protein, 95 aa, Unknown
  Obtained from environmental sample
  DOMAIN (8)...(94): Nucleotidyltransferase domain
  misc_feature (1)..(95): Xaa is any amino acid
MRITEHEKNAIIDAVKNADPDARVWLFGSRADDSKKGGDIDIGILSPKVDVMEEIEIRQKICDKIGEQKIDLVASKNGQEAFFKYAVTKGILLYG

SEQ ID NO: 97925 - protein, 282 aa, Unknown
  Obtained from environmental sample
  misc_feature (1)..(282): Xaa is any amino acid
YGTDEESPYSVDAVKAKPRPYLPDLMNSIGEERKQIKEKEAAYTREISRIEGWGDFDPSIVEDISKTIPIYLYEMPVDAFARLNKDFQYIKVKGDKSVIRILVPEKTIPGMTPFQLPQKSLNEYKKEIEEFNVDLQEIDKELESFADRRHALQKEMELVEYDLEFESAVAGLSKVEDIPSDFGLSWLTGYVPAEDLGLVKKVASENGWALSAEEPPETDEFVPTKLKNSKFVQLLTPITGFLDINPGYREVDISPVFLTFFCIFFAMLFGDAAYGLIITTMA

SEQ ID NO: 97926 - protein, 269 aa, Unknown
  Obtained from environmental sample
  DOMAIN (61)...(264): MutS domain V
  misc_feature (1)..(269): Xaa is any amino acid
KNNDILVETRNLEAEIRKILLDLTKQIAGYGGEIKSFHLTVLKMEVLMAKARYSLESSGFFTASDVPGFTLAQARHPLLENAVPIDISMDKSEGVRALIITGPNTGGKTVVLKTVGLLAMMNQIGLAIPAAEGSVLPVFDGVFADIGDEQSISQSLSTFSAHITNVASVIAHSTENSLALLDELGSGTDPQEGGAIAMAVLDRLIEKKTRLLITTHHGILKNYGYTRAEIENASVEFDARTLSPTYRIITGIPGESRALEIAGRNGLPP

SEQ ID NO: 97927 - protein, 254 aa, Unknown
  Obtained from environmental sample
  DOMAIN (1)...(253): DNA topoisomerase
  misc_feature (1)..(254): Xaa is any amino acid
ATLALIVKREESRMAFVSQTFWTLIADFEDSSAHYTGKWLNQKENSQKIWKKEEAENIFKKCEGKRGEVSEESKQVSQKCPPLYDLTFLQRDANNRFGFSAKTTLQIAQSLYEKHKLTTYPRTDSKFLPDDYVATVKKTMGALTGKIAKHAEFALKNNYVYKTPRVFNTAKVSDHHAIIPTGNVPASLSEAEQKIFNLICQRFVAVFYPAAEFLHTTRITTVEGETFISEGKILKEPGWKAVYGKESEDEDVMP

SEQ ID NO: 97928 - protein, 288 aa, Unknown
  Obtained from environmental sample
  misc_feature (1)..(288): Xaa is any amino acid
APTPAKEPQKTIYRSEDTEHNVYRLEVIEKVSGRAAYNPQKGDTYVLTIIYKDTTKGRQTSTGTVEIAGGTLILKPKADTSTTFTITISGGGMKSISGTITFDPEEGKAPETKVIPPSTVITLTVIPLSETDKMDLDLAAKFPNTPATAYSYKLTIDQDEFWDALGIIYKYENKYVKLDLSESTLESFAAWGCKTLVGIIFPNTMTGFFEGWSFMDCINLTSVTLPNSLKIIKDGTFAGCTSLTSITIPDSVTIIEELAFLNTGLTSITIPDSVTSIENMVFFECKNL

SEQ ID NO: 97929 - protein, 289 aa, Unknown
  Obtained from environmental sample
  DOMAIN (2)...(264): Pyridoxal-phosphate dependent enzyme
  misc_feature (1)..(289): Xaa is any amino acid
CLVGKYFPTGCHKVGASFGCLAPRLVTGQFDATAQKAVWPSTGNYCRGGAFNSKLLAVDSVAILPKGMSRERFDWLKTIATEIIATPGTESNVKEIFDKVNELKATRKDVMIFNQFDELGNYLWHYSVTGPAIAEVFENLARSNKELNFSGACFTSGSAGTLASGDFLKQRYVKSRLAVGEALQCPTILNNGFGSHRIEGIGDKHIPWVHNVKNTDMAIAIDDNDCMALLRLFNEEAGKSFLVSEAGLSKDHVDNLALMGISGIANMLCCIKFAKYYELGANDVVATVL

SEQ ID NO: 97930 - protein, 200 aa, Unknown
  Obtained from environmental sample
  misc_feature (1)..(200): Xaa is any amino acid
KNIPNILYQDSRGNEESFRQLNGKKTGLIHLATHGFFLPDIERKYDDRELSSQQRGGVLKPADNPLLRSGILLAGGNHAWTNNPVEGVDSGILTAAKIAGMNLLGAKLIVLSACQTGLGDVKNSEGVFGLQRAFKLAGVETLIMSLWEVDDEATSLLMSTFYNEWLILGKSKQAAFKEAQKKVRDEYETPFYWAAFVMMD

SEQ ID NO: 97931 - protein, 220 aa, Unknown
  Obtained from environmental sample
  DOMAIN (18)...(68): Protein of unknown function (DUF1568)
  misc_feature (1)..(220): Xaa is any amino acid
MLMALQDAKEKYRFRLDNFCVMPTHVHLLIEPGEGASLSKIMQWIKTKSAKSWNCIHGSKDHLWGERYFAREIRNRREYEFVMDYIDQNPVVAGLAETPAVWKASGAYYREKGIPGLVDYDRHGTKSAPPIPDDVSRLIPPKQLEHTLRYYGAYAEAVENLCRIISVIPNTGGAEKAVGQAVYLHYYTETADYFIYEYDGADTMYGTARSTVSRRNGMPK

SEQ ID NO: 97932 - protein, 152 aa, Unknown
  Obtained from environmental sample
  misc_feature (1)..(152): Xaa is any amino acid
MSTQPITQYITEVDKIYRAGNATEHSYRPALKTLFKNLTKGLTITNEPKHIDCGAPDYIITRNSIPVGYIEAKDISVGLDNKLNKEQFDRYCQSLDNLIITDYLTFRYYVDGNYRLSVTVAHENKGVISPEKDQYDSFIELIKLFTSYSGKT

SEQ ID NO: 97933 - protein, 283 aa, Unknown
  Obtained from environmental sample
  DOMAIN (153)...(218): His Kinase A (phosphoacceptor) domain
  misc_feature (1)..(283): Xaa is any amino acid
FEAILCGGMIFMAMVTFVLARTKIRQAVPAALLIISYALLCVLLNWTGEDEGANFLFIYMYPLMTIMLLGMRFGIFLSVILGVLISLEMFIPGIVKEHQYNFDFSIRMLANYFLVFAVMVVIESTRRTKDRRIETQNRKLQELTEEAQTANRIKSNFLASVSHEIRTPMNAIIGMAELLMREKLSDEAYGYAHDIKQAGGSLVSVVNDILDFSKIEAGKLEIVPKKYLLASLVNDSISIIRIRFMEKPLRFYTRIDSSLPNGLVGDETRLRQIFLNLLTNALK

SEQ ID NO: 97934 - protein, 230 aa, Unknown
  Obtained from environmental sample
  DOMAIN (4)...(104): Phosphoribosylglycinamide synthetase, N domain
  misc_feature (1)..(230): Xaa is any amino acid
MEKIDILVIGSGGREHAILSTLKKSKRANKLFCAPGNGGIAEIAECVPVSAMDFEGIAGFLDTHKSVKLTVIAPDDPLANGLADFLWGKGHRCFGPKKNAAIIEASKAFSKDLMKKYGIPTAGYEVFSDFTRARIYIESAKYPLVVKADGLALGKGVIICNDKTEGLAAIKKIMEDKAFGAAGKEVVIEEFLIGPEVSILAFTDGKTVVPMVSSQDHKRALDGDKGLNTG

SEQ ID NO: 97935 - protein, 62 aa, Unknown
  Obtained from environmental sample
  misc_feature (1)..(62): Xaa is any amino acid
VKGATLASDAFFPFSDCVELAEKAGITAIVQPGGSVRDADSVAKADEYGIAMCVTGIRHFKH

SEQ ID NO: 97936 - protein, 260 aa, Unknown
  Obtained from environmental sample
  DOMAIN (134)...(260): AICARFT/IMPCHase bienzyme
  misc_feature (1)..(260): Xaa is any amino acid
MKKRALISVSDKTGIVEFAKELAALGYEIISTGGTHKTLETAGLTVIGISDITGFPECLDGRVKTLHPNVHAGLLAMRANPEHMEQLKKLSINTIDIVIVNLYPFKATIEKPNVALHDAVENIDIGGPTMLRAAAKNYQDVAVLVDPADYAKVLSELKSKTGITLDTKFYLMYKVFAHTAYYDSLISNYFAKKLNIEYPNEVTFAYEKAQDLRYGENPHQSAVFYKEALAVSGSLPCAKQLQGKELSFNNINDAHGAIEL

SEQ ID NO: 97937 - protein, 252 aa, Unknown
  Obtained from environmental sample
  DOMAIN (96)...(252): PEP-utilising enzyme, TIM barrel domain
  misc_feature (1)..(252): Xaa is any amino acid
MVLVVLRTLTPSDILAYDRTKISAVITTSGGKTSHAAILARSYNIPVISGVRNITDHIKSGDEILVDSDKGTVYVHPDKRTVDDYARKTHGEAIFRELRAKWNRPVYTKDGIRVEVLANISLPEDVDEAVANGADGIGLVRTEYLLSNRKDMPPEEAHLAYYEAILKGARGMHCTIRLMDIGGDKIPQFFDMPQEFNPFMGWRAIRIFLERKEIFETQIAAILKAGRGHNYSIMAPMVTTLQEWIEAKTFIR

SEQ ID NO: 97938 - protein, 187 aa, Unknown
  Obtained from environmental sample
  DOMAIN (13)...(156): AIR synthase related protein, N-terminal domain
  misc_feature (1)..(187): Xaa is any amino acid
MAEETESLLANCTSGGCGAKIGPGELSALLGKVQVNRDDRLLVGFDCSDDAAVYALDGERAIVSTVDFFSPMIDDPFVFGQIAAANALSDIYAMGASPFLALNLVCFPEKFPKSILADILAGGADKIAEAGAVLGGGHSIYDKETKYGLAVTGLVERKNIIRNNTPRIGYSLILTKPLGVGNCHGRR

SEQ ID NO: 97939 - protein, 240 aa, Unknown
  Obtained from environmental sample
  DOMAIN (1)...(240): SNF2 family N-terminal domain
  misc_feature (1)..(240): Xaa is any amino acid
CRLGLGGVLADDMGLGKTIEVLSLLLHRQEAAPDAGRPTLLICPTSLLGNWEREIARFAPGLPFFVHHGSNRRPLPTKFAPHTIVLTTYGVVRREEATFRAGKWGMVVVDEAQAIKNSGSIQAKSVRRIRAPFKLALTGTPIENRLSELWSIVSFALPGYLGGEQHFKEFFSTPIEKYRDPYAAQELRSKIGPFILRRLKTDRNIIQDLPRKQEMKVFTQLTREQAALYKARVDRMEQDL

SEQ ID NO: 97940 - protein, 90 aa, Unknown
  Obtained from environmental sample
  DOMAIN (1)...(82): FabA-like domain
  misc_feature (1)..(90): Xaa is any amino acid
VVPGVILVETMAQSGGAGLRKIGAVESDALFFFASVDKVKFRRQVRPGDEVRSEVVNLRVSPNMVKQQGKAYVGDELAVEAEWMCLVGKK

SEQ ID NO: 97941 - protein, 65 aa, Unknown
  Obtained from environmental sample
  DOMAIN (4)...(62): Ribosomal protein L35
  misc_feature (1)..(65): Xaa is any amino acid
MPKMKTNRGAAKRFKISAGGKVIRSKAFKRHILTKKTTKRKRNLRHDAVAAAGDSAKVKAMLPYL

SEQ ID NO: 97942 - protein, 271 aa, Unknown
  Obtained from environmental sample
  DOMAIN (196)...(270): B3/4 domain
  misc_feature (1)..(271): Xaa is any amino acid
MDAPSLAARLTMLGPEVEECRAFGGTLDGLVVAEVIACERHPDSDHLSVCRVRMPGAESVIICGADNVRAGIKVIVATSGTVLPGGVKIKKAKIRGVESNGMICSREELGLEAKSKGIWILPEDAVPGPAGTDILGERDWAFTMAVTANRGDCLSINGLAREAAAAAGKTFTPARPVITEDNTVEAPNISIEADDLCARYAGRILRGVRIGPSPVWMVKRLEGCGMRSINNVVDITNYVLLEFGHPLHAFDLTKLEGRQIRVAARARASGC

SEQ ID NO: 97943 - protein, 217 aa, Unknown
  Obtained from environmental sample
  DOMAIN (80)...(176): PAS fold
  misc_feature (1)..(217): Xaa is any amino acid
MSEKANTNDELTLLKKENRRLQRKIKELEYIISSFEQSAVFQKNIYEMIRRQKSQQDVFLQLFLAYTPDIIFIIDKNRNIILGTKNSLNLIGIDFEDFEGRPLESVATAILPEDDFKRINDAVSWVLENGEIIWHDEYETQLNGTTYYLEFFAVPMKDETGEIISIMLTFHNITEIHEALQSAERSNRAKTNFLAKMSHEIRTPMNAIIGMSELILR

SEQ ID NO: 97944 - protein, 258 aa, Unknown
  Obtained from environmental sample
  DOMAIN (90)...(177): Hpt domain
  misc_feature (1)..(258): Xaa is any amino acid
MQLPIVALTANAVSGMKEMFLENGFQDFIAKPIDIAKLDIILDNLLPHDKREAYVESKEAAAEAPAFKIEGIDVKAGIYMTGGSAKNYLKTLGIFRDDSIKKIKILRGCLDMGDMPLYATHVHALKSAAASIGAARVSNLARSLEAAAKNSDREFVAKNTERFIEELNILLESIRLAVSSALKERKQTGVINSDKVRQCAGALKTALEMLDMERVDSSVAVLRSEVNETEFENLVEDISNNILICEYEKAAELTESLL

SEQ ID NO: 97945 - protein, 263 aa, Unknown
  Obtained from environmental sample
  DOMAIN (1)...(256): Putative glycosyl hydrolase of unknown function (DUF1680)
  misc_feature (1)..(263): Xaa is any amino acid
MYITGSIGQSAYGESFSCDYDLPNDTAYAETCAAIGLAFFARRMASIAPKGTYGDVIEKALFNGIISGMSLDGKSFFYVNPLEAVPEASLKDHGKRHVKIERQKWFGCACCPPNLARIIASLGSYIHSLNENAVYTHLFIGSEAKVKISGADVTVKIETKYPWEEHIDIGFAMSAKTKYKYYFRIPGWCEKYSVRLNGVEQTCAVEEGYALIDREWSGGDKISLVFDMPVNFVRSNPHVRENIGKIAVMRGPVVYCAEEEDNG

SEQ ID NO: 97946 - protein, 77 aa, Unknown
  Obtained from environmental sample
  misc_feature (1)..(77): Xaa is any amino acid
MADVSEKKAVDLAGKYLTFRLADEEYGLEILKVREIIGMMAITSLPRTPPFVRGVINLRGKVIPVIDLRSKFGWTRR

SEQ ID NO: 97947 - protein, 246 aa, Unknown
  Obtained from environmental sample
  misc_feature (1)..(246): Xaa is any amino acid
LGNLINTSALASLAPYIHIEAQAEQWAAEWALRLVSFMDLFAYNIDILQKADCDRPPKTRAEFLAAARAVAKSNPILPDEEPVFPFALGLNDADPVALRRNFYPWIWANGGDIPVIDTSDKKPVLPKVLTDTITFLGQLNSEELLAPETFEKTTAQRLEEFTQGKIAMLTISARDIAFLRRRDVTFGITAMPAAAQGKNRLGLSGIYAGISNNCALPDEAWIFLAFIAGKSQVLAEAMNAVPGSYP

SEQ ID NO: 97948 - protein, 136 aa, Unknown
  Obtained from environmental sample
  misc_feature (1)..(136): Xaa is any amino acid
GSDIKHQGICPQSWHIPSYDDWVELGDNIDSGCSDDCATATKLKAKGEWDSYNGVPSGTDEFGFSALPGGAGGRINGSDGIFFSSIGTDGVWWRATDTGDGEGARARIVGMHSDRESIHGGNGYKNRLYSIRCVQD

SEQ ID NO: 97949 - protein, 260 aa, Unknown
  Obtained from environmental sample
  DOMAIN (81)...(246): DEAD/DEAH box helicase
  misc_feature (1)..(260): Xaa is any amino acid
WENGQAKPSALALDKLRLLQEKLRAESIDPGAGHESLPDAVQTDFSARPDAVKAIVEAERLAFAHTVNPAFATEVSRIDPLPHQRIAVYDAMLRQPRLRFLLADDAGAGKTVMAGLVIREMLARQSIRRVLIVPPAGLVGNWRRELKDLFQMESFIISGQDMARSNPFADTGHDLVIVSLDTLRGDRARTLLAAPDTAPFDLVIFDEAHKLACDQGGDFRIAKSDRYKLAEMLAGATDGASSAWKLPWKAEHLLLLTATP

SEQ ID NO: 97950 - protein, 80 aa, Unknown
  Obtained from environmental sample
  DOMAIN (7)...(80): Histidine kinase-, DNA gyrase B-, and HSP90-like ATPase
  misc_feature (1)..(80): Xaa is any amino acid
MPSRLYGDDLRVKHILYNLLSNAIKYTKKGEITLTVSLSGENVNLEKEICLLFAVKDSGIGIKAEYLEKVFQQYDRGNRQ

SEQ ID NO: 97951 - protein, 256 aa, Unknown
  Obtained from environmental sample
  DOMAIN (35)...(108): Late embryogenesis abundant protein
  misc_feature (1)..(256): Xaa is any amino acid
MKDLNEKINLFSDSVGDKIQQTSEYLAPKAEELKEKTKEKIQQTSEYLAPKAAELKEKAKTKIQQTGEYLVPKAAELKEKAKAKIQKTSEYLAPKAEKLKEKTKATGNKFIKYVIPPVCLLLLLFCILLFFGVFSNSKDLYVISIGVPTYKNHYEMDTPRNQAEAENISEIFQRAKDLFSNVYYETIAEHGMANNSDVEKTINKVYKKAGRNDIVLIYVSSHGKKYENGEYLLLLYDFYRAEIYKTGFKAKNLIKK

SEQ ID NO: 97952 - protein, 260 aa, Unknown
  Obtained from environmental sample
  misc_feature (1)..(260): Xaa is any amino acid
NTLTIGYNSDGGTGPDPSSPTSKVYGMSVTMPANTYTYRGHTFTGWEVTGDGSIAGTYAAGTVVSVAGLSSAIANGNAGIILKARWAPIVNIAAITGVTVPATGGTPVTNITENAQYSGTVTWSPAVPTTFASATAYTATITLKEKDGYTLQGVAANFFTVAGATSVSNNANSGVVTAVFPATAASAVQMVFVSGGTFQMGKELGIGGGSNVTPVHTVTLTGFYIGKYEVTQAQYQAVMGNNPSYFSSNPASGEIQGNRP

SEQ ID NO: 97953 - protein, 153 aa, Unknown
  Obtained from environmental sample
  misc_feature (1)..(153): Xaa is any amino acid
MALTDDIEILKRTMVVFFIIDTSGGMEGANIEAVNSGMKELIGEISELDKESDEARIKIAILSYSSETRWITDSPVEAGKFQWQDLKASGSSNLGAALKALNEKMSIKEFLPALSESYGQAILLISGGKTSDDWENTLELLKKNLMFKYGKKA

SEQ ID NO: 97954 - protein, 283 aa, Unknown
  Obtained from environmental sample
  misc_feature (1)..(283): Xaa is any amino acid
QGIAGNPASINAKTNEKYKNKFTTGEGVFTLKNNEIKKLNIPKDEKILIRPYHDLCDLGRYYINNAPSLNIIYSTKNTCQDINEFPIIKQHLLRFKKIMDERRETKSGSIGWWHLHWPRDEQLWKSNKIISLQMGKRPSFLVSEGASYVSFSTNIFVPNDNSISLYYYVAILNSKLLWYWYLHNAKKRGVGLEINGNVFSKSPIKIIDFNNKEENAIYEHIIEKSKKLHEIQTEISKTQSIKDKNICISMFNKIDDDIDKLIYILYKLNDTEIKYIEKEISDT

SEQ ID NO: 97955 - protein, 260 aa, Unknown
  Obtained from environmental sample
  misc_feature (1)..(260): Xaa is any amino acid
LELEANSVKRFRDTVIVTGDVTDNTIKNVMILDKTSDGERRIIMASQAELKDGGDEGLSLELENAFVQSSKEIVREDYDYASANFLKYWISNEDIIQAVMSVSPREMSSRDVRKAIKEKIIGVDKRANERKIKLVVQAADLENILRRGPSGESWGRKPSSITNFQREAQILALIYEDRSLTIHIIEYYKKFSVPFGAFFFVFLAVSLGLMAKKSGQTVGFIFGNIIAVIYWSMLFIGQTMGLRAGTPPFWSMWLPKYTFS

SEQ ID NO: 97956 - protein, 122 aa, Unknown
  Obtained from environmental sample
  misc_feature (1)..(122): Xaa is any amino acid
DRIAKEEAGEISTSDNVETKPAKIQPPSERREQEKQKQTLVRRFERQEAETLLAMEKLETEKKRLEEELGKPEVYSSGEKARAVKFALDKTAAALEAKSKEWEGIAGELEKARKNLTPQTLL

SEQ ID NO: 97957 - protein, 67 aa, Unknown
  Obtained from environmental sample
  misc_feature (1)..(67): Xaa is any amino acid
MVEEGIGYALTLEGLENKSEESPLCFRPFEPKLEADISLVWKKHQVFSKASEKFLSCVHQALSNLTL

SEQ ID NO: 97958 - protein, 144 aa, Unknown
  Obtained from environmental sample
  misc_feature (1)..(144): Xaa is any amino acid
MEYIKLGSTGLDVSRICLGCMSFGDSTRGGHTWVLNESGTRDMIRRALDLGINFFDTANCYAGGTSEEYTGRALKECNRDEIVVATKVFITMRPGPNGGGLSRKHILAEIDHSLKRLGMNYVDLYIIHRWDYQTPIEETLTALH

SEQ ID NO: 97959 - protein, 289 aa, Unknown
  Obtained from environmental sample
  DOMAIN (143)...(222): Toprim domain
  misc_feature (1)..(289): Xaa is any amino acid
KDLIRKINEFAASWLREQLLKSEFAKKYLEQREISEKTRDLFGLGYAPQVGFLEAAVNNGFKPESVLKAGLAAEKDGKAFDKFRDRLMIPICSLSGAIVGFGGRDLGGNSPAKYMNSPETLIYNKSEILFGLNQSRKAISKENSVILVEGYFDVISMFQSGVENVVAISGTALSETQAKLLARYTKSAFISLDGDAAGQAATERCIEVLLTQSFAIKIVNLTTESGEKADPDSLVRQGGAEAFKKLQERAKNWLNYLADKSPLSSPEEKANFVSRTKRLIASMGHVELK

SEQ ID NO: 97960 - protein, 207 aa, Unknown
  Obtained from environmental sample
  misc_feature (1)..(207): Xaa is any amino acid
MAAESNSDWYESRIVVPQVPSASVPVDIWNRITTALRDNRIITFEYMGAYDAQYVPRRVKPYQLLFETGLWYLYGFAEERKDIRLFSLCRVKNIALTKDRFSLPKDFDYRNSSAGFFGVFTGQKKQRFKIAFYDYSVAWVKDRKWAEDQKIVEDNDGVTITFTSSQFDKVLEWVLSRGCTALPLEPELLVEAWRWNIEEMRKMAGKK

SEQ ID NO: 97961 - protein, 257 aa, Unknown
  Obtained from environmental sample
  misc_feature (1)..(257): Xaa is any amino acid
DAYKEFAHIAKQTGGDANALFASVTALQNKLPEIAKGSGDAAKALDTLGINVTNTDGTFKNMNDLFPEVIKKLQGVSDVTQRNILASEIFGKKSKELASIMGMSGGEMDKLRKEAHDLGLVMGEDGLQAAESFKAGVEKLKEQIAAVGLEIGSKVIPILNETFIPLIQSTLIPALKTAADAVGGLAKVFSALPSELQTVTLGLGGIVTALGPIVLGIGSMAGVVSKAIPVLAGLATTMGAATAGATGLGAALMGLVT

SEQ ID NO: 97962 - protein, 262 aa, Unknown
  Obtained from environmental sample
  DOMAIN (4)...(261): Glycosyl hydrolase family 1
  misc_feature (1)..(262): Xaa is any amino acid
DISKDFIWGAATAAYQVEGAAFEDGKGLGIWDLFCRRPNAVWQGHTGETACDHYHRYLEDVGIMKELGLNAYRMEIAWPRVIPEGTGAVNHKGFNFYDKLIDALLAAGIAPWVTLYHWNLPQSLQQRGGWMNPESPKWFADYAAVVVDKFSDRVTHWMTINEPQVVINHGMFTGVHAPGYKLTIAEALAAGHNLLLAHGRAVSVIRKRTKKPASVGFAPVGWLRRPATLDQRDVDAARTATFEVDPAGLWNSAWWLDPVYLG

SEQ ID NO: 97963 - protein, 234 aa, Unknown
  Obtained from environmental sample
  misc_feature (1)..(234): Xaa is any amino acid
MVIPSEPWEYRNRMQFHAIREAGKKSSGVLWGLKSEKSASIVPVPDCPVADPEIRKLLREGKKTLLTPLEKDRFTVYARGDLFLIECPPAGRGKTRILDQELALDASLFFQSNGAMLEKLAEDLLAIAAEADRSMPMADLFCGVGTFTAFLGKLFPKSALVEENKAAVALARENVAARADFFAQRSEDWVKHNNPHDFGFIIADPPRQGLCQDLSRRLAAEGPPMLAYVSCDPA

SEQ ID NO: 97964 - protein, 197 aa, Unknown
  Obtained from environmental sample
  misc_feature (1)..(197): Xaa is any amino acid
MKKIVLIQVLAVAVLATCCTTAGKKNVSMMEKNPKVVAAVMDSLKARYANLDEVRATKGVAQAASLWYAADGDEKEFVQLCVSSYAHDPAARHELFQKLSDKLELLFGHFNQIDLGLKKPLHEAGGTLIDVDYRLGEFDVTAHFNDDMFSSRLAFVVIVNFPSYSLSEKQQQGGEWSREEWGYARLGDLFTSRVPAE

SEQ ID NO: 97965 - protein, 271 aa, Unknown
  Obtained from environmental sample
  DOMAIN (10)...(87): Helicase conserved C-terminal domain
  misc_feature (1)..(271): Xaa is any amino acid
TLNDTRIMLEHLVPEMTIETAHGQMNGGELEDLMRRVIHGGFQILVSTTIIENGIDIPNVNTIIIDRADMYGISQLYQLRGRVGRSDRVAYAYLFYPRNKALSEIAMKRLQVISDFTELGSGFKIAMKDMEIRGAGNLLGREQSGDIYSVGFDLYLRLLDEAVQKLSNENYEAEIETLLELEYSGFFPESYIDGQQEKMEMYKKIAAVRTREELDGLHLELLDRFGPPPDEAASLLALAEIRIICRDLAVSSLKERNGLVRVEFGKVSKIQ

SEQ ID NO: 97966 - protein, 275 aa, Unknown
  Obtained from environmental sample
  misc_feature (1)..(275): Xaa is any amino acid
YSGSGGAGNNAYNSGEPAGSSEAAAVTDTADISAMAARGKYLTVKIAVSGPGDELYFWWGHIGLIVEDALSGKKLFYDWGVFDFDKENFYRNFAFGRLLYSCSVSPADYANVHYIETNRDLTLYTLDLPPDVKTELLLFAENNVLPENRDYLYHHFRDNCATRVRDIIDRAVGGTFKARYGEAPGRLTLRQHVRRHSWFSPFWDWAFSFLMGRGIDKPTTVWEEMFLPSEIALRCKDFTYTDSSGRERQLVSEVEVLNRAVGRPGTAEIPPPSYR

SEQ ID NO: 97967 - protein, 261 aa, Unknown
  Obtained from environmental sample
  DOMAIN (18)...(88): 2Fe-2S iron-sulfur cluster binding domain
  misc_feature (1)..(261): Xaa is any amino acid
MVTLFILDGISYYEQVKIRLHNSPVVCEAAKGENILFACARSGVIISAPCGGRGRCGKCRVRLLEGQVCGDTPDVDEMVRACMAVPLSDITIACTASGDLDAVGVLPAARERHTHAGIALDIGTTTVSARLVNLDTLLAIDTISELNDQRPFGADVISRIGAAKNGKTGALFSLINRQTERIINSFKEKWNIPKIEKLAVAGNTTMQHLFLNVDPSEMGELPFTPVFLEGKILTGEALSLSVESVTVLPSIAAFVGADISA

SEQ ID NO: 97968 - protein, 171 aa, Unknown
  Obtained from environmental sample
  DOMAIN (36)...(169): DNA methylase
  misc_feature (1)..(171): Xaa is any amino acid
MQYRKIVPPQKIELTESLVLEADSLNALRLLPSNSVQCAITSPPYWGLRDYNINGQIGLEPTLQEFINRLVTVFNELKRVLCENGTLWLNIGDGYTSGNRGYRAADKKNPARAMSLRPDTPEGLKPKDLQGIPWRLAFALQDDGWYLRSDIIWNKPECNARKCKRPAYKIP

SEQ ID NO: 97969 - protein, 244 aa, Unknown
  Obtained from environmental sample
  DOMAIN (4)...(146): DHH family
  misc_feature (1)..(244): Xaa is any amino acid
MDIAFGHTNMDFDCFGSLILIKRLFPGYRLVRSNRIHPAAQVMYDFYKSYFDFLAPKDLSGETVDNIIIVDTCTAGRVSEYFSQIQNSSPAIRIFDHHHTEECDISGAQVEKARLGANVSLLGKMAMEKKIKLESEEATIALTAIYADTGRFVYESVTRDDYEVAAWLLDMGASLRLVKSFLETVREDEQIAVLNQLRPEAHSIQGNVILLSYHELDENVSGLAAVVEKIMEIQNPDAYFAVFF

SEQ ID NO: 97970 - protein, 248 aa, Unknown
  Obtained from environmental sample
  DOMAIN (72)...(224): Peptidase family M20/M25/M40
  misc_feature (1)..(248): Xaa is any amino acid
MDFKLVVARENEALVALRRDLHAHPEPGYQEERTAALVETALLGFGLLAVKRVTKTGVTGLLEGGRPGPVLLLRADMDALPLTEETGLPYASVNQGLMHACGHDGHTAILVSAARILAAHREELAGAVKFVFEPNEEEVGALAMIEAGVLENPRVDAAAGLHLWAPLKLGLMAVDEGGSWAGMDHFRVVVRGRAGHTAAPHRAVDPVLAAAQIIVGAQILQSRELDPFLASSLVFGRLSGGTAANIIP

SEQ ID NO: 97971 - protein, 263 aa, Unknown
  Obtained from environmental sample
  misc_feature (1)..(263): Xaa is any amino acid
WTRYSEVQARLLEAQQLIAIRRYSAALDSLAIFRPPVETADAAMLRLAALKGLVNGGAASYSAEFRLRMSEAMNRYPRDTRSVRLFFSYANYAYSDGREPNSDDIRIIELALERLPYLLPTDPELAWIAAPFINDIERARQLLANYRAGSSKPNPASLVPSLNLGLLNDIDAIEELFAAGNPAAASAQPAAVFVVDKDILVNVWKLLRSEEGRNHLARKLKTFSGTITEDEDHDGYVESRVVYKQGVIEEYHFDADQDRIEDM

SEQ ID NO: 97972 - protein, 121 aa, Unknown
  Obtained from environmental sample
  misc_feature (1)..(121): Xaa is any amino acid
FAEGTLSPAGYDYWVDRKANDNVGIQGNGFGAPAAGQQQYQQPAAKPQQYQPGAAPQQYQPAQTPQQYQPAQTPQQYQPAQTPQQYQPTQPTQAPQPAAKPQQPAPAPQQQYQPAPAPAPQ

SEQ ID NO: 97973 - protein, 247 aa, Unknown
  Obtained from environmental sample
  misc_feature (1)..(247): Xaa is any amino acid
MKSIPWQIKLIASILLIILILWKFPVSEIIANLQNAKIGWLLLAFLLSEFVILSQAFRWHYLLIVPKEQKPEFSALLKYTLAGYFFNLFAPGGLGGDAYRSIALGKAHNVIAGSVASVFVARILGLVALCLLFWLALPYSKQVPEQAIWFMVATSFFLLTFCICVIFNPFNMGKLKAFADKLREYKKYPLRLLAAMFGSLFMQILVVFMQVALFKSVGISVPLAFVFAILPPTILIATIPISFNGIG

SEQ ID NO: 97974 - protein, 289 aa, Unknown
  Obtained from environmental sample
  DOMAIN (58)...(157): HD domain
  misc_feature (1)..(289): Xaa is any amino acid
MENVIKSLPAATPEAAVEEFLNKISEVNPGVSTELIRKAFLFSWDAHSGQRRKSGEPYLVHPVSVAFILAEQRLDAVTIAAGLLHDVLEDTPVTREDIAKLFGDDVALLVDGVTKIRALQMNTRKQHQAETYRKMLLSMAKDLRVIIIKFADRVHNLRTLNYLEPAKIKAIATETLDIYSPLALRLGMAKIRCELEDLAFKHLYPEEYKDIVSKVVASRVEREAVIEAFAAPLRENLGADGIAATIAGRPKHFYSIYNKMKKLGKSYEEIYDVLAIRIIVNTVRECYCV

SEQ ID NO: 97975 - protein, 93 aa, Unknown
  Obtained from environmental sample
  misc_feature (1)..(93): Xaa is any amino acid
MENEEIIRMKFEHRVQKSINEMIAIGYRPQAFITMRVTEGTTVNAIKKLVHSEKIPDGFTRLWELKRLDLSMENIIQENEWHELFTDDDRNKA

SEQ ID NO: 97976 - protein, 169 aa, Unknown
  Obtained from environmental sample
  misc_feature (1)..(169): Xaa is any amino acid
MNPLAAIKSWFTPPAKPAVRHARGGWEAARLTRYMDFYTMLEAAHRERCRDLTALRAHSRDLAKNSAYMRAFVDLIKANVIGPDGVDLENDFTLPNGDTNEKLNDTVEAAWADWGRKVTADGRLSWLGFQHLAAESLAVDGEIFVHLLRGRGPHGLELELIDPDRVDHT

SEQ ID NO: 97977 - protein, 279 aa, Unknown
  Obtained from environmental sample
  DOMAIN (91)...(245): Peptidase family S49
  misc_feature (1)..(279): Xaa is any amino acid
ALSASFALGDHDRGDALAETWIEVVVNASISEQAKEGNILFGAQDSPGFASRLFALYRAAREPSLKLVVVRLCEHSLGYARSEELMEALLVLRRAGKKIIAVLENGGLRNLLIASAADEIYLDPHIQLEIAGPGMTATFYKGFLDKLGIDAELFARDAYKTAPQSYTETEMTREHRESAAHLLDRIRNRVFARIAANRGETPQRVAAWCGKGLMTPEEALREGVVTQLGSHASLGQTIARLALTPRSLGDFLEPPQGFKLSDTIAVITIEGTIVYGASS

SEQ ID NO: 97978 - protein, 272 aa, Unknown
  Obtained from environmental sample
  misc_feature (1)..(272): Xaa is any amino acid
DERARVMLDATPICANLWSRDLHIVDCNQESVRLFELSDKQEYIDKFYALSTEYQPDGRLSSDKAMEYVKKAFEEGYYRFEWMHRKLNGDLIPCEITLVRVKYKDSYIVMGYTRDLREQKTMLANTEMMIKKQADAEAQMNQSKQSLNILTNILNGIDAQIYVVVPHTCEILFINDYMKKQFNLEGDCTGKLCYKLFLKDQNEICDFCPCYKLDKDPQGTVVWEMRNPLTNRIYRNTDRYIEWTDGKIAQIQHTVDITEIIEAKENAEKSSR

SEQ ID NO: 97979 - protein, 291 aa, Unknown
  Obtained from environmental sample
  misc_feature (1)..(291): Xaa is any amino acid
AQTYTGLVPDIIALDGSKTLEKDTDYTITCSANVGTATLTIIGIGNYTGSVTANFTIVAKEITTGMLSTIPPQFYTGSAIEPVVMKDGTILLIANTDYDVEYEDNVEVGTAFVTVTGKGNYTGEIHTTFEIAKWYLKSGTFTDARDSKTYNFVKIGEQVWMAKNLNYNATGSKCYDNDEANCTKYGRLYDWATAMNIESNYNRALYSAAAKHKGICPTGWHLPTTDEWDALINLAGGNSAGKYLKATSGWDNNGNGTNAYGFVALPGGYSLSTLSFDVGARGYWWTASQYR

SEQ ID NO: 97980 - protein, 54 aa, Unknown
  Obtained from environmental sample
  misc_feature (1)..(54): Xaa is any amino acid
MHLKEVKGILSAKNGMNLSRGCTHGCIYCDSRSKCYRIEHDFEDVEIKSNAPAL

SEQ ID NO: 97981 - protein, 89 aa, Unknown
  Obtained from environmental sample
  DOMAIN (4)...(79): Bacterial export proteins, family 3
  misc_feature (1)..(89): Xaa is any amino acid
VSLGEVTMLLRGGIWQVLTLAAPLLLSALAVGLIVAILQATTSIQEQTLTFVPKVITILVVLAVLGGLGFSRLADYTVELFRRIPDMVR

SEQ ID NO: 97982 - protein, 273 aa, Unknown
  Obtained from environmental sample
  DOMAIN (32)...(268): DNA methylase
  misc_feature (1)..(273): Xaa is any amino acid
MWTWQDVNEAYLDALAVKYVQLSKYITVISGLHSKAMAAYLTYMAQRIIEMHRVLKDTGSLYLHCDPTASHYLKILLDEIFGNNNFRNEIVWCYELGGRVSKKFFGKRHDTIFFYTKTENYQFNFDAVLQEWSDEGKAKFKYEDENGRYRLIGRFLKGSPIKGHRDVSPSWEKTHPELVQRYYMKKGKAQVDYWVLDPINQVSRERVGYPTQKPLALLHRIIKASSNEGDIVFDPFCGCATTCVAAQQLGRKWIGIDIEKQAAGILVERLSND

SEQ ID NO: 97983 - protein, 252 aa, Unknown
  Obtained from environmental sample
  misc_feature (1)..(252): Xaa is any amino acid
MDIVQLVSQELSLGRHQVENAMSLFAEGGTVPFIARYRKERTGEMNEIQLRALLERHTYLTELEERKAVILKSIEEQGKLTDDLKIKIENCLQKTELEDLYLPYKPKKRTRATVAREKGLEPLAERIKQLNQPETVTADLEMEAAAFISEESGVADTAAALSGASDILAEEISEKAELRQHLRDYIMNEGFFTSRIKEEYPAGTTKFEMYRDYRIRVKDIAPHNMLALRRGETEGVLTFTIEFDLTTVSAYL

SEQ ID NO: 97984 - protein, 243 aa, Unknown
  Obtained from environmental sample
  misc_feature (1)..(243): Xaa is any amino acid
MNNILSSHVDLIREVFHYQSRFEGSIMVFKIDYPVTEDPGFPGLVKDLALLAKTGFKVIIVPGVKENIDAVFKQHEINSSYTTTSNSTNSASMQDIPVRITTQQAIPFVEMAAFNVAGRFMTFLSGSRVDALIGNFVRARGLGVIDGVDTEHTGTVDKIYADSLSRILNLGMIPILPCIGWSPSGKPYNVPSDEIALAVSTALGAIKLFIISTNDGQEAKNLTLPDNIETRPDGSLIRLTPQQ

SEQ ID NO: 97985 - protein, 221 aa, Unknown
  Obtained from environmental sample
  misc_feature (1)..(221): Xaa is any amino acid
MNFTYGTDLVDASNSVRDALERTRNILPTDADSPLIFKFDPAMIPIMGLMITGNRTPEELKEIAEDTIIPRIEQTPGVATASVYGGREKIIRVEIPRSRLEAYGLTVTQIQQMLRAQNMQTAAGTITEGGLSYILTTMGEYASLDEIKNTVISYKGGGLVGTQVELPRQVYLRDLADVFEGFRDETSTVYVNGQSAIMMMVQKQSGKNSVQTAKDLRARLI

SEQ ID NO: 97986 - protein, 102 aa, Unknown
  Obtained from environmental sample
  misc_feature (1)..(102): Xaa is any amino acid
VGSIYAAAYARWFFGHLCLGAMRLRSSLTAWTLVRLYVGNALLLVCTLGIAYPWVRLRSIGVPLNCIAYRGKPDLDQLLQDTMTAPKRGEGLLEALDIDVAL

SEQ ID NO: 97987 - protein, 292 aa, Unknown
  Obtained from environmental sample
  DOMAIN (17)...(65): S4 domain
  misc_feature (1)..(292): Xaa is any amino acid
MSIASSLEFVHAGPHAGRLDKLAHERIKDRLSREKIKKQILAGQCRVDGMVSLDPARRIRPGQAISLNLPREESLLAPEPGEVVILWQDEHLLVINKPAGLTVHPAPSCPQGTLVQRLLAVCPGLRAHEGWRPGIVHRLDKDTSGLILVAPDEAARLKLSQAFARREVDKTYLALVSGHMQPAEGACLEPLGRDAARKTRMAVIRESAGGRPAHTAWRTLYADPLGRFSLLAIRLHTGRTHQIRVHLAHLGHPLLGDATYAPKAVAALAPRQMLHAWKLRFTHPLSQAPCSF

SEQ ID NO: 97988 - protein, 55 aa, Unknown
  Obtained from environmental sample
  misc_feature (1)..(55): Xaa is any amino acid
MNKIITFGEIMLRLAPEGYYRFVQANTFGATYGGGEANVAISLAGFGMDAALLQN

SEQ ID NO: 97989 - protein, 144 aa, Unknown
  Obtained from environmental sample
  misc_feature (1)..(144): Xaa is any amino acid
MGKNQQDKVRFSIGNKLIIIISIIVILSLGSITALVSWMVREDLKIAAEESNFEANRRAAEEAEEMLTNMRAASAMLMYTINVLSSQQAAAQQVAAQQAAADFFFAQNTRAAAFTYTLKGAQQVAAQQTSVRNVLVNRDYFLSR

SEQ ID NO: 97990 - protein, 94 aa, Unknown
  Obtained from environmental sample
  misc_feature (1)..(94): Xaa is any amino acid
MDTENTEPTVEQVDEAGEVIVKELAKEYLSKGAWATIAFLYQEKDKTGNFGEAKVSLRRYQKNSGVYKQRSKFNVSSKAQAEQIIGVLKKWYEI

SEQ ID NO: 97991 - protein, 253 aa, Unknown
  Obtained from environmental sample
  DOMAIN (1)...(42): Helicase conserved C-terminal domain
  misc_feature (1)..(253): Xaa is any amino acid
MIATNAFGMGIDKPNVRFVIHYNMPKNIESYYQEAGRAGRDGDPADCILLYSGQDVRINEYLITHNDEDAEPNPELQAHNRELLRQMTFYATGNECLRRRLLAYFGEESPAYCGHCSVCLTGHEDADVGLEARKIISCVYRLKERRRSFGKTMIIDILRGSRNEKVTRFGFEDMSVFGIMAGEDPKRIRAILDFLIDRGFLVSEGGEYPVVVLGSGYEEVLNEKQRLVMKLPKTVKSEKLKVKSERKGSREHS

SEQ ID NO: 97992 - protein, 240 aa, Unknown
  Obtained from environmental sample
  misc_feature (1)..(240): Xaa is any amino acid
MIPRPQYLQKLISLRDKHVIKVVTGVRRSGKSTLFRLFREYLRGNGVPPEQIIDLNMEDPAYRELLDWESLYDHVNASLLPDKKNYVFIDEVQNVADFQRAADGLFIKDNVDMYLTGSNSRVQSGKWATMLTGRYIKIQMLPLSFKEYISAVGQDNLPQKFQRYLEFGAFPQCLEFSARDDVRSYLESVYNTIILKDVAESNNFRDISRLERIVKFMADNIGKETSANNIAETMSGDGTK

SEQ ID NO: 97993 - protein, 80 aa, Unknown
  Obtained from environmental sample
  misc_feature (1)..(80): Xaa is any amino acid
FEERKTNEAKYAAVFDRLEPLLQNYILEGYTWKKYNITYEMIIEKNKHIKEASDVIWEFILILLEKAIEKGYLKKEQNNT

SEQ ID NO: 97994 - protein, 192 aa, Unknown
  Obtained from environmental sample
  misc_feature (1)..(192): Xaa is any amino acid
EQTGITAFPDTAPSQNFDTFVKAYFSYIAAATGQSVETVLMLFNNNYSASRATLILTWRIAEQRRWEMDYYVLGPIYEMWLAEEIAAGRVSAPGWQDPRLRAAWTAHRFNGLSMPVIDPVKTMQAAKMALEVSATTLEDTAQEYNDSDFEANCIKNREGYQNLPKPPWNLDGDKKPGRNENEEDSKKDENSA

SEQ ID NO: 97995 - protein, 286 aa, Unknown
  Obtained from environmental sample
  misc_feature (1)..(286): Xaa is any amino acid
VQRSFNIAPKDEKDEDIHVIQRQEDVAAFPDGDYTLKIVLIDQSGNETSVIRNVNLLKARAASEVALINPLPGIVHSGPLVVSGKITGAVIPETVSLMLNKIVHADIEVNRYGIFSYDLPEDAVDIDEPVIFSASFRTPGGEQIVSYENFVKLNKDGPVLVIESHRDGDVIARRPYISGQAFYVLPEEEPAEEDAAETAAEAPADETAAEEEAAPVDEKTRKAAEKAAREAEKAAEKAALEAAKNTPQVRIVEVSLDNGRTFVSAKGGGQWRFRLETGELPPGPLP

SEQ ID NO: 97996 - protein, 98 aa, Unknown
  Obtained from environmental sample
  DOMAIN (1)...(77): Ribosomal Proteins L2, C-terminal domain
  misc_feature (1)..(98): Xaa is any amino acid
MPSGEIRKIHLECSATIGQVGNLQHENVSLGKAGRKIWLGVRPTVRGVAMNPIDHPHGGGEGRTSGGRHPVTPWGQPTRGYKTRRNKRTSKFIIKRIN

SEQ ID NO: 97997 - protein, 95 aa, Unknown
  Obtained from environmental sample
  DOMAIN (3)...(83): Ribosomal protein S19
  misc_feature (1)..(95): Xaa is any amino acid
MARSLKKGPFIDDHLLKKVETAVATMDKKVIKTWSRRSTILPKMIGLTIAVHNGNKFIPVYISDNMVGHKLGEFSMTRSFRGHAGTKSDSKAKGK

SEQ ID NO: 97998 - protein, 92 aa, Unknown
  Obtained from environmental sample
  misc_feature (1)..(92): Xaa is any amino acid
VRGKNKKWFVFSIVLFMFAVTNLIIPIVIFADSSLEYMTTGNANSGNSESSSSSGSGSGSGSSLEYMTTGNVNGSGSGSGSGTGSGSGTGSG

SEQ ID NO: 97999 - protein, 240 aa, Unknown
  Obtained from environmental sample
  DOMAIN (13)...(240): HMGL-like
  misc_feature (1)..(240): Xaa is any amino acid
MSKDITIYDTTLRDGNQAAGVGLSLRDKLKIAEKLDDFGVDYVEGGWPNATNQIDTAFYREVKKLRLKNSKIAAFGSTKRPRTNIDEDTFIGDLVAADTGIATIYGKSWRLHVTEIIRCSPQENLDMIAESVEYLLQYKDEVIFDAEHFFDGYKDDAEYAVKVLETAKSAGAKYLVLCDTNGGILPSEFERIFKNVSQKIDAHIGVHLHNDSGCAEANSILGVEMGAVQIQGTINGMGER

SEQ ID NO: 98000 - protein, 268 aa, Unknown
  Obtained from environmental sample
  misc_feature (1)..(268): Xaa is any amino acid
FLRHDLPALITSIIFFFFSLWEPTEGAHFALQELSPNSLLSLCILARALIVIARVFPTLKSVRDIFANTHTQPARAILFGFAALIMAGSVLLSLPQASAEGVRIPFIDALFMATSSVCVTGLSICDVTANFSTFGQIILLLLIQIGGLGIMTIAVSIGLAFRGRISLNEQNTTFDQLDVFKPATAQELIRDIIRLTLSIELTGTFLIFLWHYFFAAEPGMPPGAILFTSVFQAVSAFCSCGITLNARSLIPNAGDPVIVSIIIALSTL

SEQ ID NO: 98001 - protein, 160 aa, Unknown
  Obtained from environmental sample
  DOMAIN (2)...(159): Elongation factor Tu GTP binding domain
  misc_feature (1)..(160): Xaa is any amino acid
HIGTIGHVDHGKTTLTAAICTTLAAKGLASAKKFDDIDNAPEEKARGITINTSHVEYQSEARHYAHVDCPGHADYVKNMVTGAAQMDGAILVVAATDGPMPQTREHILLARQVGVPAIVVFMNKVDMVDDPEILDLVEMEIRDLLSKYEFPGDTTPTIRG

SEQ ID NO: 98002 - protein, 267 aa, Unknown
  Obtained from environmental sample
  misc_feature (1)..(267): Xaa is any amino acid
DTKQATADAIEHITYLLGNQCGKGRMNIKLAAAPTKVFCNLIWSTGETGLDFELRRKLRPVDGGLDVRITGISAERWKYGAFNDLHGMASGADFAESIKRNACANHGWAGRHFLERLCSELEKDSEAFLAGLRERHRAWIEAHCPDGCDGQVRRVASRFALVSVAGGLAAEWGILPYGPNETTIAAVDIFMAWLRDKGGMGSHETRAAVDAVRDFINAEGPIYFPAPNDTAPRHTKTLGMRVQREQCVDDKGEVICLRCPGGDLHTI

SEQ ID NO: 98003 - protein, 243 aa, Unknown
  Obtained from environmental sample
  misc_feature (1)..(243): Xaa is any amino acid
LIKRFAPKAALVFDGDRAGLSAAQRAAVIIAPYGLQVSILALPGDDDPDSFVKREGAGAFLDLLAKARPAAEFLIEKLVSESDGSPHGKSRVMDELMPYARALSDEVVREDFLDKLAQRLSIERRLVANRFAGGGNYGPSSGGARPEAVRKGRGEALAMGALEEGFLGILMAAPDLITSARQYLSPEILTDPLAENIYSIMLETYDRDGCLKGLLDACGEDGSLANFVSMLSVKPVLLEHIEG

SEQ ID NO: 98004 - protein, 182 aa, Unknown
  Obtained from environmental sample
  DOMAIN (54)...(169): HD domain
  misc_feature (1)..(182): Xaa is any amino acid
MKKQKIVNDPVHGFISIRTALAYELIAHPYFQRLRNVKQLGLTHLVYPGACHTRFQHAMGAMHLMGQALEVLRCKGHHITDEELEAAECAMLLHDIGHGPFSHALEFSIAGNVSHEDISAAMMQSLNCEMGGKLNLTLDIFHNRYQRTIFHQLASSQLDVDRLDYLRRDSFFSGVAEGAIGV

SEQ ID NO: 98005 - protein, 267 aa, Unknown
  Obtained from environmental sample
  misc_feature (1)..(267): Xaa is any amino acid
GLSGTLTGNYWELPTYPFTWEAVSATTHDEIRITMNASHTAANDSKYINTNATDKEAAFAILRRLPVATNNDDLPYTLARGKNISIDTTGPSVSGIGSSNKAGHYALGSIIEINVKFSEPVKIDTTAPQLRLQLSGKTVDTTGTPKVNNDTVSFSYTVVDGDTTGDNKLSINSIIGGQITDIAGTNMTAYSFTTGTNGALDGGTSNNGTGIYVNTVAPGVPTFRALKSSTNTDIISNSINGTPVTGESGSLKDLKNYYGKDLYFAII

SEQ ID NO: 98006 - protein, 215 aa, Unknown
  Obtained from environmental sample
  DOMAIN (65)...(171): Protein of unknown function (DUF820)
  misc_feature (1)..(215): Xaa is any amino acid
MKINFHFRLLSKYKKIADEDVVMGLPAEKIRMTVEEFLAWEIEQPERWELVDCECFAMSGGTDVHNTIAGNLYMALRVSLAGCRCSVFMSDMKLKIAGDETVFYPDVMVSCDEADRTRRLWKEAPVLVAEVLSPSTEAYDRGLKFAAYRRIPGLTTVLFLGQNKPFVECYMHTGENEWRLIEARGTNSAVDIAALGFNLPLAELYRDLPDENSGR

SEQ ID NO: 98007 - protein, 136 aa, Unknown
  Obtained from environmental sample
  DOMAIN (53)...(136): Thiamine pyrophosphate enzyme, C-terminal TPP binding domain
  misc_feature (1)..(136): Xaa is any amino acid
MSGRNPRNHYLRTDRLPHIWCPGCGLGTVVNCFISAIEEECETPLDQICAVSGIGCTGRIAGYLKLDSFHTTHGRPIPFATGLKLANPKLKVVVFSGDGDLFAIGGNHFIHAARRNMDLTIICVNNFTYGMTGGQV

SEQ ID NO: 98008 - protein, 254 aa, Unknown
  Obtained from environmental sample
  misc_feature (1)..(254): Xaa is any amino acid
METVKYRRGTTRTFVRGLGVWRLRGCILFLAFVITPFLFSQNIGEGNTHIVKTEEGFTLSQVIVFSAVPNTVRYEVEIEQLTEEGSIPAEKIETVVNNVEVALKAGNYRYRVAAYNKMDLLEGMSEWQNFEILVAVEPVIETYQPFYGLYYEIMGTSGSITITGSDFFTTSEFALVSHKKGYDWSAKSLESRKGVIFPDNVEVGENQVVLTFNRETLKKGNYDIFIRNPGGMWAILGQVRVGPKNNNDFAFSFG

SEQ ID NO: 98009 - protein, 172 aa, Unknown
  Obtained from environmental sample
  DOMAIN (6)...(171): GcpE protein
  misc_feature (1)..(172): Xaa is any amino acid
MEQGKMNKTIKIGNFPHIRPVYIGGDYPIVVQTMWKDRLSVSDLDEAVGRIEALGALGCGLLRFAVPDIESAEVLGRLSEMVSMPLCADIHFDYKIALRCMDFPVSKIRINPGNIGDREKICAVLEKAANRGIPIRIGVNAGSLPLDLRERVEQGEGSLSTAEALYRRQKGK

SEQ ID NO: 98010 - protein, 111 aa, Unknown
  Obtained from environmental sample
  DOMAIN (8)...(111): AMMECR1
  misc_feature (1)..(111): Xaa is any amino acid
MEFTITKEEQKILLTQARESITAKLEGRKPSFSQVDTGENSSLQTPCGAFVSLHMKDKERSLRGCIGRMAATMPLIETVRIMAKEAAFGDPRFPPLRQEELSHLHIEISAL

SEQ ID NO: 98011 - protein, 83 aa, Unknown
  Obtained from environmental sample
  DOMAIN (3)...(75): Phd_YefM
  misc_feature (1)..(83): Xaa is any amino acid
MLNQQIGAFEAKTHFSQILDKVEHGGDFVITKRGKPVAKIIPFQKEPEMTRQEVLAKFQEIRKRYRGEPGSFNIREAIEDGRK

SEQ ID NO: 98012 - protein, 73 aa, Unknown
  Obtained from environmental sample
  misc_feature (1)..(73): Xaa is any amino acid
MFSQYLSQSALKGTVKDLMTSGLAVEFIQPWYTPLSTTPATTGIAVGGIGSAFTVTPAGTTPVMHFLLGIQVR

SEQ ID NO: 98013 - protein, 132 aa, Unknown
  Obtained from environmental sample
  misc_feature (1)..(132): Xaa is any amino acid
VDWHIPSSAEWEVLYSFAGDTIAEGIIKTSDFIDNPTAGKRLKAKEGWSNCGSLGSGKTYLCEDNFGFSALPGGIGNAGDFFSNMGGYSFWWSTDEHDHVMAYGRGLIYNSDHANWFNHDKNHLLSVRCLRD

SEQ ID NO: 98014 - protein, 115 aa, Unknown
  Obtained from environmental sample
  DOMAIN (22)...(98): Protein of unknown function DUF86
  misc_feature (1)..(115): Xaa is any amino acid
VFIDIIDCIFDINEFTNSIEYHQFEKDKMRRLAVERQLEVIGQAANKISIDAQNSLKNIPWKNIIGLRNKLAHDYGEILAERTWKISKDSIQGLLKELEKIDELKEYISTKRNIA

SEQ ID NO: 98015 - protein, 206 aa, Unknown
  Obtained from environmental sample
  misc_feature (1)..(206): Xaa is any amino acid
LNYFGKGIYTLTTAAKILKMNPQRMRRWINGYTYHKNIECRSYDPLFKTEYEYDSNDVVISFLDLTELLFINSFIQYGISIQKIRKAAIAASKFLDTSHPFAIRKMFTDGRTIFANIAQKENDPSLLDLLNKQYQFEKIIEPLLYECIDFGRYDYAEKWWPLGKEQEIVLDPARNLGQPILNKYNVKTELIYELYKTNHSISEISD

SEQ ID NO: 98016 - protein, 135 aa, Unknown
  Obtained from environmental sample
  DOMAIN (32)...(134): FlaG protein
  misc_feature (1)..(135): Xaa is any amino acid
MTITSVGSVTMEPVYAGGERVAHEGGAAPAPQTSGGDTFVPTKGASQPETSGTPAGEHDAEFQKTMDESIKQANKSLANYDRQIEREIHSVTKVLMYKIRDTKTNEVIAEYPPKKIQDMIAKMWELAGLFIDQKA

SEQ ID NO: 98017 - protein, 57 aa, Unknown
  Obtained from environmental sample
  DOMAIN (3)...(56): YcfA-like protein
  misc_feature (1)..(57): Xaa is any amino acid
MKRLDLIRIIEQNGAVFIRHGSDHDWYKNPNTGIAESVPRHREIKELLAKKIIKRLS

SEQ ID NO: 98018 - protein, 187 aa, Unknown
  Obtained from environmental sample
  DOMAIN (121)...(186): Bacterial Ig-like domain (group 2)
  misc_feature (1)..(187): Xaa is any amino acid
MRPLIHALTKFFAALLVIALPFVSCSGGGGNDNGRVVNVTGVMLDRNTLELGVNEETKLIHTVIPSNATNQSVTWLSDNTGVATVTNGRVFGAGVGEARITVTTENGGYQAQCDVYVSNIPVQSVSLTPSSLTLIVGNTSTPAPNFYPANASNKNVSWTSSSPSVASVEGNGVVRAVSPSAATITVT

SEQ ID NO: 98019 - protein, 271 aa, Unknown
  Obtained from environmental sample
  misc_feature (1)..(271): Xaa is any amino acid
MMFPGKKIFWDVDEKITEGNERMILKKNVSRSDLDRYWNILDASGRNDVRINAVIDIKAVPEIIRSDKWEGELMSALRSEDKPLVEAAYSYEEFVGGYLLVEEDEDTLDAILTAMIRSGYAGAVRHVNQLLDAKVVGVINSPAPLPNANTAYIPLEVLQDEAGMMLEGAVTELVIREKNAPDSRLPGKSESAAAISAALERGLAANGQVMPAELAVHTWEEYMRDYLGFEALENSMPQMVAALLLLLSFLGISNTILLAILERTRETGMMR

SEQ ID NO: 98020 - protein, 152 aa, Unknown
  Obtained from environmental sample
  misc_feature (1)..(152): Xaa is any amino acid
AYGGHAAAAGLTLRAEKIDAFRARFNEVVKSKLSEKDLAPRVTADAEVPIRDLTPKLLRIIKQMEPFGPGNMRPTLLTRGLKHRYPPKVVGQKHLKMSLTDGKTVMDAIAFGMGERLPEVSAAKTVDVAFGLEENEWNGKVSLQMNVKGIVC

SEQ ID NO: 98021 - protein, 276 aa, Unknown
  Obtained from environmental sample
  misc_feature (1)..(276): Xaa is any amino acid
AITDNDGSFGDWEWSAAEKELFHVTPQPAFYESLLTTKNNLWCISQMWSNEILPDCGPIIRQDWLDELNLTMPKTLAQLETVLAAFKEKGVIPVAIAPDGFDNMWNACSIMSAFDLGGYFTLNPDGKTVDDHSYIQPAFKDYLALMRDWYAKGYIDPDFMNNDYDSLMSKMLSDKLGIWMAYWGDPYDIVDMYEGSQDIDVQPMPLPRKTESQTLRFKGGYLSEPYYYMTVTTSCQYPEIACQWADKFFMKESILRANYGVEGETYDMVGGVPMYR

SEQ ID NO: 98022 - protein, 282 aa, Unknown
  Obtained from environmental sample
  DOMAIN (2)...(61): Region found in RelA / SpoT proteins
  misc_feature (1)..(282): Xaa is any amino acid
MPVQERFKDYIGAPKSNGYRSLHTTVAGNHGNVIEMQIRTWEMNKTAEEGVAAHWLYKNGERVAEIGEDDKALAWLRNIIEWQEHLTDSAEFYEFFKADLFDTEVFVFTPKGNLITLPKGATVLDFAFAVHTQLGIHCIGAKVNGQVEPIGTELTSGQTVEILHLHTKTPSADMLSYARTPKARSAIHHWLRTAERKESIDLGKKIIDRAYEQLGAHTPFGDHVPELLLHLGIGNVERLYELVGRGDLTESRVMRYFQVRKIKRRNVPSKMMSDIVKTITGQ

SEQ ID NO: 98023 - protein, 252 aa, Unknown
  Obtained from environmental sample
  misc_feature (1)..(252): Xaa is any amino acid
AVQQDCRAFECVPETQKTEVLCLAAVQQNYWALRYIPEALKTEAVCLAAVKKNGGELCYVPVAMRTEALCLAAVQQNGEALYFVPEALMTEALCLAAVQQNGWALLYVPEALWTEALCLEAIRIDDYANNYRGYNPEGLNAKVEAAFKKAFSTEALCLAKVQKNGRALKYVPEEFKTEAVCRAAVQQYGHALKYVPDALKEKFVRRAEKEYRIGDTGPAGGIVFYDKGNDSDGWRYLEAAPAETEFKAQTAT

SEQ ID NO: 98024 - protein, 237 aa, Unknown
  Obtained from environmental sample
  misc_feature (1)..(237): Xaa is any amino acid
MATKKTTKKAAKKTYKSSAKKKTVPSLNKITVEELAAAHAKTEAAIERLSANLDKSHARMEERHAKTEAAIQELSAENRMLAAEVRKTSDEVRKTSDEVRKTNDDLRKTAALVRELTQNMGGINNSFGTLVEIVLIPKIRTDINAIGNHTFNRAIVDKKVSALVAGSKSTIGEIDLFLFSDAGNEALIVEIKAQFSVRQVAERLERLKKYRKYEEDAEIKGKTLFGAIAGIYIDPTV

SEQ ID NO: 98025 - protein, 180 aa, Unknown
  Obtained from environmental sample
  DOMAIN (1)...(170): Bacterial conjugation TrbI-like protein
  misc_feature (1)..(180): Xaa is any amino acid
DLPGNILARVTQNIYDSQTGLKLLVPQGTLLLARYNSSISYSQKRIQIVWDTMIRPDGFQINLEGAGGADRAGMSGQPAKFHENWFEYLKAAGIITLFSYANAKMTETAAKYASEDKANNIAAANADFVSNLGGQLAGRAANIQPTLTVDNGTPINILLNKNLYLPPVAGYPASEKYLLE

SEQ ID NO: 98026 - protein, 198 aa, Unknown
  Obtained from environmental sample
  misc_feature (1)..(198): Xaa is any amino acid
AQNRPLRDENGRYIGEKAIKQYTLPSFVTYEWLDYVPAPVGYLVDRVYADKALPLLEAHGVHALPGAQRPKNEALLYFHETERKVAQGAYQGVITLSLGGAWKPELPARRAAYAWEPEDLDNALYVPIDQPMGKLAFYLLDPRAPDGLVFWGFFHSSYMRGPGMWGEGPRQPILAVGVKAAGQPTDANQKSAPQIEEH

SEQ ID NO: 98027 - protein, 88 aa, Unknown
  Obtained from environmental sample
  misc_feature (1)..(88): Xaa is any amino acid
MQDISSHKLFFTAFFERFLACEEEDTAPLRLKYEHSMRVFEHSERLAGNDEFAAEATRLPLPFPLLERAALLAALYHDVARFPQFVRW

SEQ ID NO: 98028 - protein, 136 aa, Unknown
  Obtained from environmental sample
  DOMAIN (5)...(136): PHP domain
  misc_feature (1)..(136): Xaa is any amino acid
MAEFVHLHCHTEYSLLDGAIRIKDLCARAKEFGMPAAAITDHGYMHGVAEFYLTCKEYGLRPVIGCEVYVCHDHRVKERGRQRFPHLVLLAQNGEGYRNLIKLVTVAALEGFHYHPRVDKELLRKYSEGIIALSAC

SEQ ID NO: 98029 - protein, 288 aa, Unknown
  Obtained from environmental sample
  DOMAIN (1)...(288): Bacterial DNA polymerase III alpha subunit
  misc_feature (1)..(288): Xaa is any amino acid
AVAQITTFGTLKAKAAVRDVGRALGFSFAETDKIAKLVPEDLKMTLDKALGAEPALAELYESDPRVHRLLDISRRLEGLVRHASTHAAGVVIADRDIWEYLPLYKGKKKEKEKKKEEKEKQETGEKREDKDEGEIVTQFDMDMVKKIGLVKFDFLGLATMTIIDDTLKAIKGQGKPVPNLDSLPLTDAATYELYARGDTDGVFQVESAGMRQYLRMLKPDCFEDLIAMLALYRPGTLRARTAEGIGMVENFIKRRHGELPVAYPLPLLEDCLRDTYGVIVYQEQVMQI

SEQ ID NO: 98030 - protein, 224 aa, Unknown
  Obtained from environmental sample
  misc_feature (1)..(224): Xaa is any amino acid
LQGLVRKTAYDPATQFCDSRDGKLYKFVSIGTGATAQIWMAENLKYNAVGSKCGDEETSTLKDYNTTTCDTYGRLYDWATAMGLSASYNTTSFTAPAKHQGVCPSGWHIPSDADWNVLMKIANPSCSDNSGCAGAGTKLKSASLWNPYEGIPAGTDVYGFSALPGGYGYSDGSFYYVGNFGGWWSASEYDSYYAYSRNMGYNGEGASWNSSNKDYLSSVRCLQD

SEQ ID NO: 98031 - protein, 170 aa, Unknown
  Obtained from environmental sample
  misc_feature (1)..(170): Xaa is any amino acid
MIRLHKGGVFLSKGRIIIEDIPENQKKLQNEFDKETLSLARQETMTARILKAHENQTQGVSENPKSELHLNFDALASHDITYVNIIQTAKASGLDEFPVPYVLTNCHNTLCAVGGTINEDDHLFGLSAARRYGGIYVPPHLGVIHSYVRETLAAPGKMILGSDSHTRYGF

SEQ ID NO: 98032 - protein, 252 aa, Unknown
  Obtained from environmental sample
  DOMAIN (113)...(216): FKBP-type peptidyl-prolyl cis-trans isomerase
  misc_feature (1)..(252): Xaa is any amino acid
VPQSVLERKFGEALKKEALGKIIEKALDEVFGNENLPKDERPLPYAQPRMEEEPKLDFDNDLVFSLVYDVMPSVSVGQWKGLEAEAPDVAISEEDIARELEALRERNGFVLDRDEDAEARSGDVVTVDYCLLDGSGNVLPDSGRDDYSFTLGSGQNAFEFDDYVVGMKKGETKDITKTVVDAPQPSPEGVEPEGVEPEVRGSPLDGETRIIRITLTALKEKKLPDLDDDLAQDIDEKFHTLDDLKNNIRERL

SEQ ID NO: 98033 - protein, 167 aa, Unknown
  Obtained from environmental sample
  DOMAIN (12)...(167): Domain of unknown function DUF140
  misc_feature (1)..(167): Xaa is any amino acid
MPSGDGNPLMTPLRLLAAVGRAGRMWVGKGKELLLGTRNYANLATQTSVRVPLIVKNFDITTNHMYTLGIESIPLVTMIAIFLGSATVTQAVYQMSGMIPFRYLGALVCKTTVTELAPVITSMVFAGRVATGIAAEIASMKGSEQIDAMNVLRLDPLRYLIVPKLVA

SEQ ID NO: 98034 - protein, 129 aa, Unknown
  Obtained from environmental sample
  misc_feature (1)..(129): Xaa is any amino acid
DSFQQDISQISRSLKGVAKELNVPVVALSQLSRASEKRTGDHRPQLSDVRDSGAIEQDADLVLFVYRDEVYNKDDIANKGKAEIIIGKQRNGPIGSVEVAFVKEYAKFENLSIRPDDGMPQREPDDAIG

SEQ ID NO: 98035 - protein, 173 aa, Unknown
  Obtained from environmental sample
  DOMAIN (115)...(172): Bacterial SH3 domain
  misc_feature (1)..(173): Xaa is any amino acid
SSSSGSYGEPYGVIISIIISAVIAVISGTYLGGFLYKLIPLNIDILTLGLIVAIFIVCMITCRNHKGLKIVKLAVILVGLIAIGILGNKVLANKSPKPQTTETTQGANTNPSAEITKNVNFRKGPSTNDAVIRQLKQGDIVILTGEVSGGWTQITHNGDTGWVSTEYLKVYGK

SEQ ID NO: 98036 - protein, 76 aa, Unknown
  Obtained from environmental sample
  misc_feature (1)..(76): Xaa is any amino acid
DLFQLFAYGEKYLEQNKLSFPIYPKTEAFRRPLPPFWFRDKVDALHALPYDLDKDECDVLRIMEEAESDETRRILV

SEQ ID NO: 98037 - protein, 96 aa, Unknown
  Obtained from environmental sample
  misc_feature (1)..(96): Xaa is any amino acid
VRSLKFKNRTPKRRSIYILPNIFTTLSLFFGFYSILAAIEARYSLATWSILISALCNGLDGTVARMTNTTSRFGMEYDSLCDLVAFGVAPAVLAYL

SEQ ID NO: 98038 - protein, 125 aa, Unknown
  Obtained from environmental sample
  DOMAIN (53)...(125): Sporulation related domain
  misc_feature (1)..(125): Xaa is any amino acid
EPPKSTAPTEPLKPVTPVEPPKPAASAEPLGPIIPPIPAKPAAPAAATNSAGNSAAVVLQTGLFSKEANARTQSDALRKAGYAALVSRKLVNGTEYWAVTVPGGQNANKTIQELKKAGFDSFPVK

SEQ ID NO: 98039 - protein, 72 aa, Unknown
  Obtained from environmental sample
  misc_feature (1)..(72): Xaa is any amino acid
LFFRSYRYIKKVNGDNDGFVSESSAKWGNNVTKIEGGISHAEILDYNMRKISGINILDIYKNIVNELIEKGF

SEQ ID NO: 98040 - protein, 280 aa, Unknown
  Obtained from environmental sample
  misc_feature (1)..(280): Xaa is any amino acid
VFYDGTTITVGAGNVDYAGFISKGAGTIIREVEEKLRALPVTVETSSKIDFYRAVLISLRALVHLASRYAALAEATAETETDPERKAELLETAAICRRVPEYPPRNFREALQSWWFFHLGVQIEQAGCGSSPGRLGQYLDPYYQQDKLENGLTPEDAVAWLKCLFVKILEFGYYQGIAYSQIVSGHTGHTISLGGLTPDGHDATTELDYLLLDTQIAMRNIQPTLTILYHDKLKEDFLLKTVDLERTGLGQPQWLNNRIVVERLLTRHAKCGITLQDARS

SEQ ID NO: 98041 - protein, 281 aa, Unknown
  Obtained from environmental sample
  DOMAIN (84)...(242): DEAD/DEAH box helicase
  misc_feature (1)..(281): Xaa is any amino acid
MLEKIIKALFGSQQERDLRAMQPIVQAVNAKEEWAASLPAEEFPKMTALFRERYHKGESLDSILPEAFALAREAAKRNLGERPFDVQILGGLVLHQGKIVEMKTGEGKTLMSVAPAYLNAIPGDGIHIVTVNDYLASRDTEWMKPIFSYLGITVGTILSNMDNAQRKENYARDITYGTNNEFGFDYLRDNMHRSMEERVQRGHNFCIVDEIDSILIDEARTPLIISGAAEDDTFKFAEVDKLIGSLREIEKKENGDYPDETQGEVVNGDYKLNEKNKNVLF

SEQ ID NO: 98042 - protein, 136 aa, Unknown
  Obtained from environmental sample
  misc_feature (1)..(136): Xaa is any amino acid
LKYHYVTRNQIFTHIWNGEDDIDKDDLEHIKKTFPVIKALKNCLYQFRDIFEKKSKEALLGFIAAYKDCELEPIRKFIEGIQKDMDPVTNAVVEDYSNGFVEGTNNKLKAIKRVGYGRCKLPLLRSKIVLPAFFWP

SEQ ID NO: 98043 - protein, 264 aa, Unknown
  Obtained from environmental sample
  DOMAIN (64)...(213): Phosphoribosyl transferase domain
  misc_feature (1)..(264): Xaa is any amino acid
MGYAVASESCALDVCGFEVVRDVLPGEIVVFESGEITSQGQSLTNKETDRGLCIFEYVYFARPDSVMDGLSIYEARYNMGIILAEEYSIDADIVCGVPDSGLVAASGFSTQSGIPVMSGFIKNRYIGRSFIYPIQTQRDGAVRQKLNPLSSNVKGKKVVLVDDSIVRGTTCARIIKSLKAAGAKEVHMRVSSPPFRHTCHYGIDIDSEDALIANKLDLDGIRNAIGADSLAYISIEGLKRACWKCSLPFCTACFTGNWVSENTK

SEQ ID NO: 98044 - protein, 88 aa, Unknown
  Obtained from environmental sample
  DOMAIN (1)...(84): PTS HPr component phosphorylation site
  misc_feature (1)..(88): Xaa is any amino acid
MTEKTVTVSNRAGIHARPSALLVQTTKNFSSNIYIEKGSDRINAKSIMGIITLGASYGTELKIIAEGEDEVTAVDTLVKLFESKFEEE

SEQ ID NO: 98045 - protein, 276 aa, Unknown
  Obtained from environmental sample
  misc_feature (1)..(276): Xaa is any amino acid
LTKQNNIPEPLGQLNIQSSALKYVAGTSIKTDEIDKLFSFLSDSAVFGLLSPEKMRSGNKTPNTRNIGMGGVTLAYCINKMDKSKKQQLDKMVSDLIGTRIGIQTIELGNKVELSVIFETADNTMSVDSLHISDGLLRIIAFAVISMEKEINLLTTEDGIFLTTESGETLGIRSKESLRNGMVLLDEIEDGINPYMTEQIVSLLHEINEKQKRQIIVTTHSPVILNDFNQEEIIFLWKDKKGSVHSRKFFDTEEMRASLDFLNPGEIWENYGKDTI

SEQ ID NO: 98046 - protein, 284 aa, Unknown
  Obtained from environmental sample
  DOMAIN (1)...(216): BadF/BadG/BcrA/BcrD ATPase family
  misc_feature (1)..(284): Xaa is any amino acid
EGDFSAAVRKLLEDGKVPEGIPALVTGNEGRFMFDVSGTLEPLCVEAALRNLGLNADAVVSMGGEDLIVYSLDAQGKIINNFSGNKCASGTGEFLKQQLARMDMTLDDIDKVPETAKVHALSTRCSVFMKSDCTHRLNKREATKDDIVLSLSDVMAVKVIDFLKRAKVTKGRVVLTGGITLNRHIIRFIREKAPQIEFIIPESAPVFEALGAAVMAPKSGSPLPPVGKLLKTNEIRFGALSALRDWKDKVQFFDKGEGKVRADHKYILGVDGGSTTTKACLVDM

SEQ ID NO: 98047 - protein, 183 aa, Unknown
  Obtained from environmental sample
  misc_feature (1)..(183): Xaa is any amino acid
MNEKKRISMLTLKDAGEVFADGILPVAIPGVDTFGVKLSQIANAIVPTTPPVGAAEPTISVQPRGGVVFIGTAYTLGVSASSTDGGILSYQWYRAASNIATSGEAINNATGSTYNVPTSVGGTSNYYVVITNTAVGSDGVERSASIASDVVTITIDPREHAATPTISAQPQGGTVTAGQSITL

SEQ ID NO: 98048 - protein, 278 aa, Unknown
  Obtained from environmental sample
  misc_feature (1)..(278): Xaa is any amino acid
GGLSAKNLLVWHFVMVFSTLTGMSDIQNRLEKVGIGIPEILLPRAELKQWAVIACDQFTQDRAYWKKAADIAAGSPSSLNLIFPEAFLEDENRAPRIENIHSSMRNYLDNGIFNAPRKGFVYIERDTPFNRGRKGLVAAVDLEQYSWSPTARPLIRSTEGTVEDRLPPRMEIRRNAPVETPHILLLIDDETNSLLQGLGERAKKNAPVYQGELMLDSGNISGWFIDSENDFAFLAERLEELARRALTRYAAQQPASAKQPASAKQPASAKQPFLFAVG

SEQ ID NO: 98049 - protein, 120 aa, Unknown
  Obtained from environmental sample
  misc_feature (1)..(120): Xaa is any amino acid
MKTDQVLLMSPQSSAGIVGGKYFAALCVYLLGLSGIFLDALVLAAVGVPEWPVVAGNFIGLFLLGSALIAIGLFISSLTESQVIAAVGAYCVGLFLMLFDSIAVIISGHALSELMKTLSM

SEQ ID NO: 98050 - protein, 137 aa, Unknown
  Obtained from environmental sample
  misc_feature (1)..(137): Xaa is any amino acid
IVRYSDICEQIKKRSHNCDIFARGIERFIVGLVKKVLLANTMAEAVDGILKLAPESVPSGYLFLVAVAAQLQLYYDFSGYSDMAIGLGRMFGFKIMENFDYPLVATNSVDFWRRWHISLQTWFLDYLYIPRGRQQKR

SEQ ID NO: 98051 - protein, 65 aa, Unknown
  Obtained from environmental sample
  misc_feature (1)..(65): Xaa is any amino acid
MILAAKDIGLGSCWVMKFDIAKASELFALPENFVPVAMLPIGYPAENAAPSDRHGTRFEVEKILF

SEQ ID NO: 98052 - protein, 135 aa, Unknown
  Obtained from environmental sample
  misc_feature (1)..(135): Xaa is any amino acid
MTLEERIDRIIHTSEIELAGEAYKGKYELNNFNSIKDFISKKLRKIYTNLDKGDQITLSGNSAGKLATRWKDGEEYQKSLAHIPEIIENMQFLAEMKPDKDDASFDKYSYYVTPAKIDEEPHTIFSTVGYKGQKI

SEQ ID NO: 98053 - protein, 263 aa, Unknown
  Obtained from environmental sample
  misc_feature (1)..(263): Xaa is any amino acid
ALVYEDRVYIYMTGDSPVPVNGVIQQNTYDLINTIRIVSSYDLVNWTEYPAIRAAGSTGIAKGAARSWAPAAAYRKKDGADQFFLYFANGTAGIWVLTAGSPTGPFTDPLNKALISNITPNCGDVTWLFDPAVFIDDDGTGYIYFGGGTPTNTGENLYGGAAHSNHPMPGTIRAAKLGADMISLDGDPVKLPVPFSFEDNGCFKLGNTYYYTYCTNRGVDAFAENDPANYPEAVQIGKGMSIAYMTSDKPLEGFTLRNQDTDQ

SEQ ID NO: 98054 - protein, 287 aa, Unknown
  Obtained from environmental sample
  misc_feature (1)..(287): Xaa is any amino acid
KNIARDNDRYVIQASQLFGRSWVTLKLRRSPLSGEQAERRSMAEKRFSHPVSESPNAFSTQYADILPPLPGFALSAAGAGFTNAETDKDGIKRRVYLARNIQGHWYLQLALSPLVDYLGNPAIDLDKRGMYLRNAKMPNGAVKNIKIPLDGKGRMLLDWPKTDFLHTYSHISLADFFLMEELELELEQYTRTLGDAETGFFSDHDPSLARIPLLIMDLKKLFGVIHPARDEALKSCSDESFKTYVDCRRISRGLIREILNLDPEAKLKALLPELEEQFPDSADAIRE

SEQ ID NO: 98055 - protein, 104 aa, Unknown
  Obtained from environmental sample
  misc_feature (1)..(104): Xaa is any amino acid
IDSEPQVKYWVRNIDSYKSLSFRLPTSTDFFYPDFVAKLQDDRILVVEYKGGHLATNDDSKEKNLIGEIWEKQSKGKGLFLLAVKDKDGKTVDKQIKEKIGVIS

SEQ ID NO: 98056 - protein, 268 aa, Unknown
  Obtained from environmental sample
  DOMAIN (190)...(268): B3/4 domain
  misc_feature (1)..(268): Xaa is any amino acid
ALASAGIEVASVVETAVPKGVKVARVVSRVPHPNADKLSLCRVDAGEGEPLQIVCGAPNVAEGMTVALATIGTILPGDFKIGKSKIRGQESFGMLCSGKELGLSEDHSGIMALPGDYAVGAPLADYIPYDAVIEIEITPNRGDCLSVVGVAREVSARFGLPFRKPVRRLQAQGRDPVSEAISVEVKDQGRCPRYMGRLVRNVAIGPSPEWMKRRLALAGLRPINNVVDITNYILIKYGQPMHAFDYDAIEDKRIVVQTAGAVGVSSFT

SEQ ID NO: 98057 - protein, 299 aa, Unknown
  Obtained from environmental sample
  misc_feature (1)..(299): Xaa is any amino acid
WAIERVGTTAHDIVEAEIENLQNSDELVYAKWTDTKLKCLATIDTRKPKNKDIGPKDIVERINEILAKKKRVDDHGETLTLDSLTAQAQDTGRREPPPASAKDATEAILNAIELKTMTEVAFTKEGVLHEAMKSTIGSAITPEDLNKEFDRLIEAPTPKIAPLLTKATDYGETAYYSTPELTEIERQNVETCVNAKKTDIAVDSRIVDEYINQANQKLIRESTDGNGFTAGQINAQRQILTTDEQYSVVQGDAGTGKSFSLLFAQKMLEAQGYNVIGIAPTGKATDELTTSAEIKNTMT

SEQ ID NO: 98058 - protein, 287 aa, Unknown
  Obtained from environmental sample
  misc_feature (1)..(287): Xaa is any amino acid
SQTNIGDVRNHGIELLLKVTPLKVGGFSWDIAYNFTKNMNIVEKLAAEETLLDGYGGIGIYAVEGKPMGQFKCAKALTIMIDGEEHTVVNNSGMPQPTPKEVFLDKDVQEKFRMGLTNTFSYKGFTLSGTFDFHYGGSIYSYTKDYSHWVGSGPETVYNDRNPFVVPNSVREITEENKQFYSNVYTFDGKLYVENSTPVNPTAWHTFYSNGGFEYTDNSVIDRSYLKLRNVGLSYSLPKSFCNAIGFYKIQLSATVENILLWTPVDNQYIDPEMTTFGSNIGAKLES

SEQ ID NO: 98059 - protein, 295 aa, Unknown
  Obtained from environmental sample
  DOMAIN (38)...(161): TonB-dependent Receptor Plug Domain
  misc_feature (1)..(295): Xaa is any amino acid
LGYRDQEVAVSSYVTVNLESASKNLSEVVVTALGISREKKTLGYSAVSVKGDEILSAKTINPLQALQGKISGVDIASSQVVGGTQNIAIRGFSSFGNNQPLLIVDGVPVTNTQNRTGNSLNSTSDFGSGMNALNPSDIEDITVLKGSAASALYGSRAAQGVIMITTKSGSNSNGKINVDYDGGVTIQSIGRLANEQKMFGQGWNMNRALDENGNWGAPFDGKERPWGYIIDGEQLMTENSYKKNRIRDFYDLGIGFNNSVSLSGGSDRQTFRLSLSQTRVDGPIPTDNDSYNRYT

SEQ ID NO: 98060 - protein, 286 aa, Unknown
  Obtained from environmental sample
  DOMAIN (109)...(198): Helicase conserved C-terminal domain
  misc_feature (1)..(286): Xaa is any amino acid
VLESRRDFKVIISSATINAEVFSEYFGECPIVKIDAQTFPVTLIYDPVTENPSFKQKDSMGEEILMKIEAITTRFISEKRGGDILIFLPGEKMIKDCMNRLSLCSAGKFLHILPLYGRLGKEEQERVFENAPNGKTKVIISTNIAETSVTIDGITAVIDSGLAKLNWYNPTTFTSSLIEAPISKASANQRKGRAGRTQEGSCYRLYTRKDFENRPLYTTEEIFRTDLSEVILRMADLGITNFEDFDFISAPERAGIIGGIETLNLLEALESDRSLSNIGKLMTEFP

SEQ ID NO: 98061 - protein, 268 aa, Unknown
  Obtained from environmental sample
  misc_feature (1)..(268): Xaa is any amino acid
MLGLSEGGDVISLRLRLREHFALPSSSGDEKDLNKKIITIESARSTEYFKIEAVDEEYARLTGDVKVSLKDGDTTHRIRAWDILFNRTRNIITASGGVEYVKEETDKEGGKIETFKGDFITVNIDNWSSIFLGGLSEHAIQGGGATYLFSGTVISRNDEDVTILNKATITTANNEESMWSLNASRVWLLPGSDFAIFNAVLKVGEIPLLYIPFFHFPADEVVFHPVIGYRSREGNYIQTTTYVLGRREGSNTSESSLTRILGNSHSME

SEQ ID NO: 98062 - protein, 242 aa, Unknown
  Obtained from environmental sample
  misc_feature (1)..(242): Xaa is any amino acid
MNSVFSTSSFQYNLAGDAIKSSFIGTGDNPKWEILYGEWKKEKISRHSLSANLSASVMDKAQSLTLTADLPPKDALLTTTAAMRVWISETTGNMKISSWDDDAKRKLEPLTINETLKFGSFATLTGYIQYDWGDEKLNKEKGFTTITSTLNLSKWRLNASYSATRSAGYDLDPVRGWVLSTGPQSLMSKSFNLSFSPKELTGKLWDDRLSYTVSFTTIKLDFDLQKYTGSNFEMGLGFKLGI

SEQ ID NO: 98063 - protein, 281 aa, Unknown
  Obtained from environmental sample
  DOMAIN (13)...(211): Glutamine amidotransferases class-II
  misc_feature (1)..(281): Xaa is any amino acid
VKLFDNDKLNEECAVFGVSLTADQAVGFAYNGLLALQHRGQEGAGIAVTNGPQMLCRKGVGLVSEVFPAEELEKMPKGMVAVGHTRYSTTGNNTKENVGPFVTEYLTGRIAVAHNGNVTNAIEIRKELSGQGLLFNATSDSEVVSSLIAYHITKEKDVLAGIVKATGCLQGAFTLVIACSDDKLVAVRDPNGFRPLCIGKNEIGYAVASESCALDVCGFELVRDVLPGEIVVFENGKITHQGQSLTNKESDRGLCIFEYVYFARPDSIVDGLSIYEARYNM

SEQ ID NO: 98064 - protein, 253 aa, Unknown
  Obtained from environmental sample
  DOMAIN (175)...(226): Protein of unknown function (DUF1566)
  misc_feature (1)..(253): Xaa is any amino acid
MKKTMYAILSLFAITVLFAQQQPVVAVVPFDIISGISETDAAMITDVFFVRLGNTRKVDLVNRTIVQRVIKEHNFQSEDWSNKEKTAELGKALNADWIVQGDIRRMNSGILIIVQFYNINTFKFEGGIDLRIANADEAYDKMNPLIDSLIQTIAASPIPAPTYKIGDRGPGSGIIFFAENGIYMECSMDIGSYDWFQAVTAAKNYKGGGFTDWRLPTIGELDLMYRNLKQKELGGFGNSFYWSSSQYGNFIAS

SEQ ID NO: 98065 - protein, 272 aa, Unknown
  Obtained from environmental sample
  misc_feature (1)..(272): Xaa is any amino acid
MIDLAINKTTLEKNIQKAKEKGIIVPTFSQMRDPQSVPDSVKERLKKTGLWDLDPVNLFRITWKNEPKESGGLFAGPNFIELPSKLTGVEAKIICLVGKYFPTGCHKVGASFGCLAPRLVTGQFDATGQKAVWPSTGNFCRGGAFNSKLLAVNPVAVLPAGMSRERFDWLKTIGTEIIATPGTESNIKEIFDKVKELKAGGENLMIFNQFEEMGNYLWHYSITGPAIADVFEHLTRQYGGRLNFAGACFTSGSAGTLASGDLLKRQFPQSRL

SEQ ID NO: 98066 - protein, 283 aa, Unknown
  Obtained from environmental sample
  DOMAIN (166)...(257): Mur ligase family, glutamate ligase domain
  misc_feature (1)..(283): Xaa is any amino acid
TRETQIAVLEMGMSAVGEIARLTRIAEPDVALVTSVGPAHLEFLGTVARVAKAKGELFAGLKEDALAVVNDDDLFLKREAGRFAGNRLYFGATARSEIRLGRIEPRGLSGQRLTFYGPGAARGRRVELTLLGRHNAQNALAAAAAALGAGADWDRIEEGLESVRGFPGRLVPVQAGGRLWILDDTYNANPASTSAGLAFLAGLKIRGRRGAILGDMLELGGKGRDFHRRVGRLAAGLGLDYLAVVGPLSVETARAARRAGLDPSAVREFAGPEEAASWVLAGW

SEQ ID NO: 98067 - protein, 271 aa, Unknown
  Obtained from environmental sample
  DOMAIN (71)...(98): The GLUG motif
  misc_feature (1)..(271): Xaa is any amino acid
VDYCYSTSKVSGTENVGGVVGQNSGTVDYCYSTGKVSGENYVGGIVGDNNGVEGSVIGTVQYCYSTGNVSGSENIGGVVGYNHYYSGLQKCYAVGDVSGVGYVGGVVGHNSYGSYVENCYATGNVLGTGGMIGGVAGYSGEASVYCCYATGNVSGTDEVCGVLGHNGGNLQNCVALNPNISGDNIGRVTLSSYENCYGRKDMKNNNNAGNWSSDLNDIDGADITAEQWGKESWWTTSGNWNTEYGKAWDFDEVWEWGGNLPILQNMPDGYR

SEQ ID NO: 98068 - protein, 276 aa, Unknown
  Obtained from environmental sample
  DOMAIN (30)...(95): Bacterial Ig-like domain (group 3)
  misc_feature (1)..(276): Xaa is any amino acid
VDLKPGHNGAIEITMHKPGEITLVGIDVTTPPDKIRYNLSEELDTTGMVVTATYSDGTTAEVTEYTLSGYDKNTTGNQVITVTYNDKTDEFEVNVIDPTLPTVATPTASPAGGEVAVNTPITLAIDTEGAEIYYTQDDTVPSATSTLYSDNNKPIITSEKLILKAYAVKEGMNDSEILTVEYTLSEIINAEYPSITTNPQDIEIIKGERVALSVTVSDLTDGGKLSFQWYRSNSPTNSTSGALIESTNLEKYDFITTYNTTPGNYYYYCAVTHTND

SEQ ID NO: 98069 - protein, 274 aa, Unknown
  Obtained from environmental sample
  DOMAIN (63)...(274): ATP synthase alpha/beta family, nucleotide-binding domain
  misc_feature (1)..(274): Xaa is any amino acid
MCVEATGSMPLLPVSEQLLGRIIDPLGNPLDDGPPLDAQAKVPVNNAPPNPMKRRRIREVLSTGVRAIDGMLTLGKGQRVGIFSGSGVGKSTLLGMIARNTSADINVLVLVGERGRELKEFIENDLGTEGLRRSVVVVATSDQPPLLRLRCALAGTAVAEFFMHRGKHVLMMMDSVTRFAMAQREVGLSAGEPPSSRGYTPSVFALLPRLMERAGNFEENGSITGIYTVLVEGDDMNEPIADAVRGILDGHIVLSRKLAGRNHYPAIDVLASIS

SEQ ID NO: 98070 - protein, 55 aa, Unknown
  Obtained from environmental sample
  misc_feature (1)..(55): Xaa is any amino acid
MSKFSGAQKAAVLMVTLGDEVASSIFKYLEEDEIQAISKEIALTKHVMPEVADEV

SEQ ID NO: 98071 - protein, 261 aa, Unknown
  Obtained from environmental sample
  DOMAIN (47)...(127): Bacterial Ig-like domain (group 2)
  misc_feature (1)..(261): Xaa is any amino acid
ATLMWPLVSDNGMVTTRSGGTTTITATTHTTQSGSKTATCAITVLIPVTGITFNYSSILMYPGESDIDFLIATVLPATATNKTVIWSSSNLDVATVTDSGRINALELGYTTITATTQEGNYTATCNLEVTDFVGAVSFATDNIWTVGSQQWSDAVQATKCSSKTSYNGNYVDCRSNPNYKGDLFSWYAVSALQGLLCPNGWRVPTRQDFIDLDIALGGTGQYSQNNSTLRNKYLNDWGGAYGGYCLSGGSLRKSGSDAYYW

SEQ ID NO: 98072 - protein, 199 aa, Unknown
  Obtained from environmental sample
  DOMAIN (1)...(199): Beta-lactamase
  misc_feature (1)..(199): Xaa is any amino acid
MRDLEKKERLENNAIYRIWSMSKTFTIVAAMTFYEKGFFKLHDPIAEFLPSFKDVKVAEIDKRGIIKLVPAKNPITFEHLFAMTSGLPYPGENSFSALTMGKIYEKAIKDAKAGKPWNTARMIDEAAKTPLCFHPGEQWMYGFSHDVLGRLIEVISGKTLGEYMADTIFKPLGLKDTAFYVPQEKQNRVVTPYSLAQTG

SEQ ID NO: 98073 - protein, 245 aa, Unknown
  Obtained from environmental sample
  DOMAIN (2)...(80): Histidine kinase-, DNA gyrase B-, and HSP90-like ATPase
  misc_feature (1)..(245): Xaa is any amino acid
DGNCELRIEVADNGIGISPEQQKRLFYAFEQAESGTSREYGGTGLGLVISKRIVELMGGRIWVESELGKGARFIFTIKAICGNTSPHSLPSTIIDCVNEHLGAENAAESQGDDAEFRGKTLLLVEDIEINREIFLALLENTGLIIDCAENGKEALEMVEAASEKYDMIFMDMQMPKMDGLEATRRIRALPLARQRGRLPIIAMTANVFKDDIEACLAAGMDDHLSKPLEMGKVLEKLRKYTPNGR

SEQ ID NO: 98074 - protein, 232 aa, Unknown
  Obtained from environmental sample
  misc_feature (1)..(232): Xaa is any amino acid
MAFCVQCGNQLEENQNYCSTCGAAAGGAASRQAVPAQSGKDGGLLTCPSCGAAAGPLDLKCPSCSREFRNRPAAKSVNDFFEQYRNAGPSERAAVIKAFPVPNVREDILTFLAMGIGNTKGLTAMEEAEYRNRDGIRSILAGGSGATALTYQKQEIAAWRAKVRQVLDIGKLLIKDNESQALFQRYEQQLKKELGKLPPAVKGLIAAAVVLLGASVSLLLLYSSVSGKKETK

SEQ ID NO: 98075 - protein, 241 aa, Unknown
  Obtained from environmental sample
  misc_feature (1)..(241): Xaa is any amino acid
RVTGATGLYTAPSDEAVIHELSEVKRLGFNMLRKHIKIEPLRWYYHCDRLGILVWQDFVSGGGPYGKFVTQFLPFLGLNMHDRRIYRGFGRRSAVGRVVFKRDMERTVHLLQNAVSLSVWVPFNEGWGQFDSRLITDRLRSLDNTRLIDHASGWHDQKYGDFASRHVYFKPFRLKSDPMRRVQALTEFGGYSLPAGRAPSDNPFGYRMFSGKQEYNAALRQLYETEVIPAVDSGLSASVYT

SEQ ID NO: 98076 - protein, 280 aa, Unknown
  Obtained from environmental sample
  misc_feature (1)..(280): Xaa is any amino acid
SRSYSLNSLYSPIGAVTFSDVYEAKIKAEGEGPDSMRSFVNLHLGLPYRDTGQRVKIDTVLNLRMEYKSGTVPKDVLFLVMACDVQRGSAKDEKNPPRIEAEVMGVCKNRITYSVIHKTFYGATDNEYGGAFAELDKWARETGLSFTRADGQILRVMMVAIDSGDAAEGRAETVYNFCAQYKQWFPVKGFNNLKTRQKEKGDLPGGFRRYRVARIGSADTQFVLEVNTAHYKNALYSRLKIPRQPGDEQKFGFCGFPRDYEDEYFFQLTAEEKKLSGEFG

SEQ ID NO: 98077 - protein, 80 aa, Unknown
  Obtained from environmental sample
  misc_feature (1)..(80): Xaa is any amino acid
MPVLIAGLLWMISRELAPLEEISRRLGARSPQDGSQFEAAGIPPEARPLVHALNGLFGRVAAMRRREQAFVANAAHELRT

SEQ ID NO: 98078 - protein, 89 aa, Unknown
  Obtained from environmental sample
  misc_feature (1)..(89): Xaa is any amino acid
LKHSRKKTRRFKEQKPELVEAYLAEMEKVSGRTHALAEGAGHSVLFLPPYSPEFNPIEHFWAWLKRRLRKALHLFSSFDEALHEPFQIN

SEQ ID NO: 98079 - protein, 125 aa, Unknown
  Obtained from environmental sample
  misc_feature (1)..(125): Xaa is any amino acid
APEALAALFTLITDINAQDDRIRLEPNERGAVLSFLDEADAIFAAWPSEKHGYLDDEIEAMIMARSEAKAKKNWAEADKIREKLKKMGIALEDRKDGSVAWHKFRGYSQLIWKGSCSASSKEENR

SEQ ID NO: 98080 - protein, 235 aa, Unknown
  Obtained from environmental sample
  DOMAIN (151)...(235): Aspartate/ornithine carbamoyltransferase, Asp/Orn binding domain
  misc_feature (1)..(235): Xaa is any amino acid
MERSKHLLRLRDWDSERIIDIIRIAIRLKKEVKEGKYSNDFAGKTIGIFFEKPSLRTITSFQVGMHQLGGMPITLEPKNIGMNKRESIMDIARCLSRWVNGLVVRCFEQSLVEQLAEYGTIPVINALSDDYHPCQALAFGQTMFELFGENLRGKTVVFVGDGNNVANSIMELCAKLGMNFTLACPAGYEQKANEIELALPEFKENGCIYKSLNNPKEAVVNADVLYSDVWGAWGR

SEQ ID NO: 98081 - protein, 245 aa, Unknown
  Obtained from environmental sample
  misc_feature (1)..(245): Xaa is any amino acid
EYFRDVTRRTFLIEATDALDNVAYVQRTVAVTNAAQLENITSTSQDGTYGIGQEIIIYANFTNQVYVTGTPQLNIRYKENGAYVYRRINCSDPPTNTSPALSLKFIFKVPDNVNADGKLETLFDSTDFTASEKRPVILPSGAGIFDLTRGDSAFLPGYTVDSVTLSNWTNNTKTLQGKKNIQLDGTRPTITVVKGGGKDAYSDGNYYFKTGESIEFTLTASEAVMASGTPRLSYTIGGTSYTTNP

SEQ ID NO: 98082 - protein, 264 aa, Unknown
  Obtained from environmental sample
  DOMAIN (102)...(253): Putative RNA methylase family UPF0020
  misc_feature (1)..(264): Xaa is any amino acid
VAWFKASDFDALFEGVRRQPLEEYIPPGMGLRVAKVRTNRSVLEAETSIQAVVHKAAADRLCAKRGINRLPENGEEAELRVYIEKDQASVLLDLSGEPLFKRGYRINGGPAPLRETTAAAIILHSGWRRKFPLYDPFCGSGTIAIEAALYAWDIAPGLGRAFARGFAKGFALDRLILGDSKTLQRIRQEYLEKADFSRMVRIGGSDSDYASAAAAKQNMERAIALSGKRGPQNPPFFKVLPMEKAEIPDTMRNITDEQDEPGFI

SEQ ID NO: 98083 - protein, 105 aa, Unknown
  Obtained from environmental sample
  misc_feature (1)..(105): Xaa is any amino acid
MKLEILEGNAIDHLNKIDTCSVDVIIADPPYNLGKDYGNNNDQKNFDEYLEFSRSWIKESQRILKETGTIYIFMGVRFISYIYSLLEKEYHFIFNSWNTWHYTQG

SEQ ID NO: 98084 - protein, 188 aa, Unknown
  Obtained from environmental sample
  misc_feature (1)..(188): Xaa is any amino acid
GRLLHKYTGAPGLSFQEDRDNFDYLYKTGDFAEYPGARFADKRNRLKKFLRSNSAAEIILYEPNLKEMFLNFARQRFTAMAVGVVSAEVLRLGLEQNLYQGFMVKIGRVAAGLLLYSELNPQTAIVHFELIDEAYDGIAQFMNNHLGKILSGKYKFINREQDLGIPGLRKSKLSYNPYRLVKKYAVRF

SEQ ID NO: 98085 - protein, 277 aa, Unknown
  Obtained from environmental sample
  DOMAIN (20)...(277): Dehydratase family
  misc_feature (1)..(277): Xaa is any amino acid
RAPHRALFRAHRFKDEDFKKPFIGIANAYNNIIPGHIHLNNLAAVIKEEIRKAGGVPLEFGVIGVCDGIAMGHEGMKYSLASRELIADSVETMGKAHCLDALILLPNCDKIVPGMIMGACRLNLPTIVVSGGPMLAGKHQGRTLDLNSVFEAVGQFAKGLINAKEFHAIECNACPGAGSCAGMFTANSMNCLCEVLGIALPGNGTIPAVDPKRAELARQAGKQIVELVKKDLKIRDILKKEAFDNALAVDMALGCSTNSALHLPAIAYEAGVELLCS

SEQ ID NO: 98086 - protein, 287 aa, Unknown
  Obtained from environmental sample
  misc_feature (1)..(287): Xaa is any amino acid
GRSKRRAKGKPRVQNSVFTLLFNEDEAIRDISGAVGAILGKEINPNATIKKTTLQNALLGGKFNDLSFVLDDKLIVLIEHQSTINKNMPLRMLHYICEIYNHLYQKKDLYKKEKILIPKPVFIVLYNGEEEFRDYQEYLLSDLFKDFDISKEPLYLELKVQVRNINKGHSAEIVERSPLLRDYVAFVEEVREVSKEEGMSHELAMEKAIENCIKKGILTKFLNLHKEEVMKMLVAEWDYELEKEVVREEAIQIGLAQGISQGLSQGLSQGISPGRAEERHKNIKDLY

SEQ ID NO: 98087 - protein, 171 aa, Unknown
  Obtained from environmental sample
  DOMAIN (30)...(67): MerR family regulatory protein
  misc_feature (1)..(171): Xaa is any amino acid
MQASDEENTDGGQPNSAAVAVGRGKKMYYSISEVCAMTGIGQHVLRYWEKEFSLLHPKKNSGGKRAYKEKDIEAIVKIKRMLEEEKYTLHGAKSKLLDERRGLRAGGAAAAKKRGKADASDGGEESDSADPPAEPAKRKSAANKSGDGGIGHDGVDNDGGDKALISSIRGE

SEQ ID NO: 98088 - protein, 182 aa, Unknown
  Obtained from environmental sample
  DOMAIN (26)...(182): NIF3 (NGG1p interacting factor 3)
  misc_feature (1)..(182): Xaa is any amino acid
VNVRARRSAASKSKVKVSRDAIVSLLDKTLRTAEITDRSVNGLQVEGAPEISKIGLAVDACLEAYEKAHALGCQMVVAHHGIIWEGIKSVRGPIYRQIEFLIKNGINLYASHLPLDLHPTLGNNAQIAKTLGLRELRPFGVYHGAFIGFEGVFPRPVTIKSVSDAVKKAYGGPTTTLPFGPQ

SEQ ID NO: 98089 - protein, 106 aa, Unknown
  Obtained from environmental sample
  DOMAIN (13)...(77): Heavy-metal-associated domain
  misc_feature (1)..(106): Xaa is any amino acid
METTEKQNLQKRSFHIDGMFCVNCQNIIEKELKNTEGVKKAAVNYHTGHAVITYDEAIIGFDKISAVIESLGYKTLEDSGKNQTLQNKTIPQILWDSYNYPRAVYA

SEQ ID NO: 98090 - protein, 303 aa, Unknown
  Obtained from environmental sample
  misc_feature (1)..(303): Xaa is any amino acid
FFGGSIIIEMKTPGKDLNKAYEQAKAYALTLPQKDIPKGILTCDFLNFQYYDLEDAPDGAAKCRSFKLEELPAHAELFGHLAGYREIDPFKHWDPVNIEAAVKMGELHNRLKDIGYSGHQLELYLVRLMFCLFADDTGIFEPPNLFNKYILERTNEDGSDLALHIQKIFEVLNKPKDQRLKTIDEQLNIFPYVNGHLFEERLETADFDRPMRDTLLECCALDWSKISPAIFGAMFQSVMNDEERHDIGAHYTSEENILKLIRPLFLDGLIEEFEKIKKLSPAQRRERLLKFHDKLASFKFSDP

SEQ ID NO: 98091 - protein, 58 aa, Unknown
  Obtained from environmental sample
  misc_feature (1)..(58): Xaa is any amino acid
DKKFARFSEEFENKFIRQGENENRTIEETLAIGWELFKLLPEDQLKRLKPEQIKKYLK

SEQ ID NO: 98092 - protein, 140 aa, Unknown
  Obtained from environmental sample
  DOMAIN (45)...(140): ATPase family associated with various cellular activities (AAA)
  misc_feature (1)..(140): Xaa is any amino acid
MTDLPPEPSDLLECALSALDALAKVILGKDAQVRRALAVLLSGGHLLLEDLPGVGKTTLARALARAIGGRFQRIQGTNDLLPSDLLGVHLWDPANQTFRFQPGPVFANVILLDELNRIGPKTQSALLEVMVEGQVTWTGT

SEQ ID NO: 98093 - protein, 277 aa, Unknown
  Obtained from environmental sample
  misc_feature (1)..(277): Xaa is any amino acid
GANLTAINVSFENIYYSSVDGVLFYTKGGVYSLVRFPAGKSSGSYAVPDGVTAIERWAFYGCTHIASIVIPNSVTSINGAFAGCSGLTSIEVAADNADFRSVDGVLFYAGNKEEYILLTYPGGRRGAYAIPGGVTRLREKAFSDCVGLTSVTIPNSVLFIENYAFSGCAGLASVTIPRSVLSIEEWVFSGCTGLKSIEVAPGNDVFRSVDGVLFRIGYDSDELLAFPAGRQGAYKIPDRAASIESMTFFNCAGLTAVSVPDSVKHIGGWAFMECYGL

SEQ ID NO: 98094 - protein, 124 aa, Unknown
  Obtained from environmental sample
  misc_feature (1)..(124): Xaa is any amino acid
MPASNSGTGGGAAKNGSYIFLGPELGKKQDEIGQIKKKLSETGAYEETVFYAGETPITNIVNTIQNHSLFAQSRLFIIKNAEQIKKKDEINAVAACMKELEFGDALILVSDEFRLAAGLDSACP

SEQ ID NO: 98095 - protein, 80 aa, Unknown
  Obtained from environmental sample
  misc_feature (1)..(80): Xaa is any amino acid
LVRLQSLVNLFDNYYSIPIEDLLKKPTVIELAAIENSYQKALIISLLLLSILSYVNSNYIGEGSLRNVIILEEAHVLLDA

SEQ ID NO: 98096 - protein, 201 aa, Unknown
  Obtained from environmental sample
  DOMAIN (1)...(200): Tryptophan synthase alpha chain
  misc_feature (1)..(201): Xaa is any amino acid
FVIQEADKRALSGGCTTDKLFDMVKRIRPKVTVPLLFMTYINPVFTYGKDRFAAKCKQVGIDGVIIPDLPFEEKGELQGECDKHGVCLISMIAPTSGKRAEEIARGAQGFLYCVSSLGVTGERSKLSTEIAETIRYVRAASPIPCAVGFGISTPPQAAEMAKFSDGVIIGSAIVKIVGKYGKNSPDPVSSFVKGIKEAISR

SEQ ID NO: 98097 - protein, 87 aa, Unknown
  Obtained from environmental sample
  DOMAIN (7)...(84): Domain of unknown function DUF143
  misc_feature (1)..(87): Xaa is any amino acid
MEGTLSETEALAIGELLRDHRGADVLVLDLREMASPYGAGAWTDFFVIATSSSDTHMDGLDRHVKEFCHERGIDILRRSHKPDGEDE

SEQ ID NO: 98098 - protein, 293 aa, Unknown
  Obtained from environmental sample
  misc_feature (1)..(293): Xaa is any amino acid
MMSVAMNSRDEDIFLSLASRLTRLDKELTAAEQSKYAESSGGIMLRVTVQRLLDAFNADVIEERTRKENNLSAEDTVTEEQIQGTKKAMAEEAAEPFYLPAVRTFIENARKAHDQIIDNVNIDHVNVSAWDTQHSENAQKVIAVFKDFINDHKDDIIALSIIYNQTWKNRPLTLNMIEELYSYLQKPPYSLNTPLLWQAYETANPGKVKAKSPEGMLADIVSLLRFELGIDRDLRPFSDMVDANFQDWVFAKNAGNVHFTAEQVTWLRMIKEFIAVSLCITRDDMDLSPLTPQ

SEQ ID NO: 98099 - protein, 253 aa, Unknown
  Obtained from environmental sample
  misc_feature (1)..(253): Xaa is any amino acid
IESIRSFDPLSQSGIEKKAELVIYPFKELVWTDDRIEALKRNLESFEEFPSDGKGIIEELKTRRAINGEECLFSLAFEKPATLADYFFASAGKSEGRKGEALVVYLERERLENAQESLEREYSSLYSKTRREREIPLPKRMLLNFKELSSSLSRSISFVSFKGSREENVLHINAACDPPRSFFGNVNYLKEEFASLKKQGWDLAVAAESDAQAGRIAELLRDEDVSVGALPFSSGFALPELKFMLIQENEIFG

SEQ ID NO: 98100 - protein, 244 aa, Unknown
  Obtained from environmental sample
  DOMAIN (35)...(169): Histidine kinase-, DNA gyrase B-, and HSP90-like ATPase
  misc_feature (1)..(244): Xaa is any amino acid
MAVKYDESSIKSLEWNEHIRTRPGMYIGKLGDGQSPDDGIYVLVKEIIDNSIDEFVMGAGKRIDIEIKDHSAKIRDWGRGIPLGKVVECVSKMNTGGKYDSEAFQKSVGLNGVGTKAVNALSSYFCVVSHRDGKCKKAEFKYGNLIKQYPEKPSSEKNGTEVYFEPDKDIFKNFRFLPAYMEERIWNYAYLNTGLSLNFNGKIYESKNGLFDLLSSQAKDSMRYPIIHCKGKDIEIAFTHGELY

SEQ ID NO: 98101 - protein, 283 aa, Unknown
  Obtained from environmental sample
  DOMAIN (149)...(179): Putative Fe-S cluster
  misc_feature (1)..(283): Xaa is any amino acid
GLLDTAERFVPGIRRKTHKVEGVHTIYPYLIEMSELLHTDVEIPLLIDCLNCEKGCNGGPGTGNIEKPVAVLENPIRKRRAKLEAYHKPHKGEWVYKKYHKVLDKYWKKNLYNREYRDLSGNNDLKVPNEKELTEVYHKLKKFDKKDIYNCTACGYGSCETMAKAIFNNLNKPENCAHYTMERLKEQMKTEELNRMLKEQIEHASKFIESISQTVHDLNTSIDMQAEAVKESSQKTETILNSLKTTSEVSRNKQDDINELLENATQGQASMKETILSVQSISQ

SEQ ID NO: 98102 - protein, 283 aa, Unknown
  Obtained from environmental sample
  DOMAIN (23)...(283): Carboxyl transferase domain
  misc_feature (1)..(283): Xaa is any amino acid
TVSEKLEQLKEIRKKIEEAGGQKRIDKQHESGKLTARERIAMLFDESSFIELDAFVKHRCVNFDMATTEAPAEGVVTGYGKVYGRLVYAYAQDFTVIGGSLGQMHAAKICKVLDLAAKMGAPVVGLNDSGGARIQEGVDALSGYGQIFYRNSINSGVIPQISVIMGPCAGGAVYSPALTDFVFMVDKTAHMFITGPQVIKAVTGEDVSAEALGGAMTHNKVSGVAQFVSPGDRECIAEVKRLLSFLPSNNRESAPAYQAPSGTNDVISELNDIVPLEPKKAYD

SEQ ID NO: 98103 - protein, 283 aa, Unknown
  Obtained from environmental sample
  DOMAIN (62)...(283): Binding-protein-dependent transport system inner membrane component
  misc_feature (1)..(283): Xaa is any amino acid
ILALPTTIWYILFCYLPMFGVILAFKNYRISGGFIKSIMQSPWAGLKNFAFLFGNRDIWMIIRNTLGYNAVMIVVGIAIPVTLALIISELRNKVAAKVYQTVLFFPYFLSWVVVSTLVWGFLSYDMGMVNSVLEKMNLPVHRFYMEPSFWPAFLVFISQWKGVGYGTVVYLATITSLDKTIYEAAIIDGASKWQQIWRLTIPMMKTVIVLLFIMAVGGIFRSDFGLFYQVPRNSNSLYQTVYTLDVYVYNLLRTSSPGMASAAALVQSVAACVTILLVNQIVK

SEQ ID NO: 98104 - protein, 210 aa, Unknown
  Obtained from environmental sample
  DOMAIN (3)...(207): NAD dependent epimerase/dehydratase family
  misc_feature (1)..(210): Xaa is any amino acid
MKVLFIGGTGTISSAITRRAAQLGWELYLLNRGNRKNEFKELEINYITCDIRAEEASVIREKLEKAIGKGNKFDVAADFFAFVPEHVQKDFDILNGLCKQYIFISSASVYQKPLSSYLITESTPLSNPLWSYSRDKIACEEFLTQKYRDVGFPITIVRPSHTYDERNVPLGVHGTKGSWQVLKRMLDGKPVIIHGDGTSLWTITHNSDLP

SEQ ID NO: 98105 - protein, 275 aa, Unknown
  Obtained from environmental sample
  misc_feature (1)..(275): Xaa is any amino acid
SYTYTGTITDHLDVLPGAGGVRLVKAIVDITGDFKINNANTELTLDGSGESGIKAVSITLGDISALNNEDFKLEATGDISFNGNVGTASEYIGDITVVNADNVTFSEDLYADSISIKATGAVTQTAKMNANALTVEAGTFITLGEDNNVITVILKSNALTPAQGDITYNSDVGTNTLIIKMETLGNVVINEKSGSMDVDEITVGGYITLDVKGAIGSNGSGKLAGKDITVNTDGNISLLDITGDSIVFNMGGNISLLNIAGDSVVLNAGYPEHTV

SEQ ID NO: 98106 - protein, 191 aa, Unknown
  Obtained from environmental sample
  DOMAIN (3)...(190): NAD dependent epimerase/dehydratase family
  misc_feature (1)..(191): Xaa is any amino acid
MTFWITGKNGMLGQDLCALARRSFDIFESDQEVDITDETAVLDYINANKPDIIINCAAYTAVDNAETQTELNHRINAIGPEVLAKCAAKAGIGVIHISTDYVLSGEPPAPLTESAPINPINAYGSAKAKGEALLAGANPQHWIVRTAWLFGIKGKNFVNSMLNLMKTKEQISVVSDQLETQPGPATWRLPY

SEQ ID NO: 98107 - protein, 166 aa, Unknown
  Obtained from environmental sample
  misc_feature (1)..(166): Xaa is any amino acid
MVKAPFFIGITRLFNIHWKLFKEILHKSGMIFISELSFVSSETIMTAMYNRRGGAEVVAGMAAGFTVANIFFLLFGGIWTAAGVLVGGSLGAGKLDEARSRAEWLKSGSLIAAFTLAIPGAIVSVPLISLVFSNLSAAARANCTGLVFVILAYLPLWCFLNVQFAI

SEQ ID NO: 98108 - protein, 209 aa, Unknown
  Obtained from environmental sample
  misc_feature (1)..(209): Xaa is any amino acid
GQVLLRAIKQDPMYRESYYHLARYYNYYENPTEERLTLDVAVRVFEAAKEESPKRIGYHVLTLGRYAEVLINSKEFFPAEENLIKGINVYQNGLSRRLLTRSPEYGKLYADLGDLEFFVKDGDMQTALDYYSYSEQNGWAPPEIQYRMGAAHYQLRQWGPALERFFAASRDMPFNRKILYALGNVSYMRGNYFAAQGYYDRLLEILMTT

SEQ ID NO: 98109 - protein, 73 aa, Unknown
  Obtained from environmental sample
  misc_feature (1)..(73): Xaa is any amino acid
MNISPHPDWALAHKRKGTELRLIRGIYYLYEVSSKWSPEKKHAVKITGKLLGKITEKDGFVEPDCTVAICFTP

SEQ ID NO: 98110 - protein, 141 aa, Unknown
  Obtained from environmental sample
  misc_feature (1)..(141): Xaa is any amino acid
MPLLINDVIQYVEENISSFHEKRLNKIETLKLKEVLQKKNPYLFKAKNIHTADEIIKGIVDAYLSSSEEAMFGDWLEGLAIFINEKVYGGKKSGIKGIDLEFDNQNTRNIVSIKSGPNWGNSSQIEKMENNFKTANKTLRT

SEQ ID NO: 98111 - protein, 266 aa, Unknown
  Obtained from environmental sample
  misc_feature (1)..(266): Xaa is any amino acid
LSKAVETGGDPGDVTVIDTPEFKATISFSGLGGDNDAPVYKGLFVSASTNTRAEIGILPKPGYTLAGVPANSFRLEGLPIGYDSNGEQDNPTNAANTGVVRYTFPKLDTTVTNSRTITGLSVPVKGATSPVVVHTNAEFIGYIVWDPVIPTNPSNQFKSRTQYTATITMEPRPGYTFWGVPENYWTLAGAFLVTNEQHSNVVTAKFPTTEPAPDEDVVTIDGLYINLIDYTVDATASSASLNVGTNDQFTFDSSNGLRFVPADAKL

SEQ ID NO: 98112 - protein, 193 aa, Unknown
  Obtained from environmental sample
  misc_feature (1)..(193): Xaa is any amino acid
LINSISIYNFKIIKNLENVPLKRITLIGGKNNIGKTTFLEALFFYLDCKTPEVIIKLLSWRMFSGMWVPQKTWEKFFSNSDLSKEIKIKVNADKDVKGQVNVKFMADYETSVPIPVTDENKITTLRKNFPSLEISHYNYESVDYLAHLLCYNTSYNYVKEIDQLQEKLSVFYISERMSLYERNTEYLGILDKA

SEQ ID NO: 98113 - protein, 194 aa, Unknown
  Obtained from environmental sample
  misc_feature (1)..(194): Xaa is any amino acid
MLSLPPSKSVANRALVLAALAPGESMLGGLAPSGLPDDVTVMLGALGALSVGTEFVDGGLRVVGGTGFAPHDWLDENRSAIHRAAIRTAWSEAQGGFIPPGANVQGVRGKARPWPRGSLVDNQVAFFECNLVLAAAGTALRFLLPLAALHCRGPIRFRGDKRLFERPLAPLLAALTACGASWEAEDNGGILVPP

SEQ ID NO: 98114 - protein, 286 aa, Unknown
  Obtained from environmental sample
  DOMAIN (136)...(250): Response regulator receiver domain
  misc_feature (1)..(286): Xaa is any amino acid
DEVRIRQIFLNILSNAVKYTSEGFVSLTVTGKPIDTETVVITIEVADSGRGIAQKDMDILFDDFVQLDVAKNKGIEGTGLGLAITYNLVKAMNGDITVQSEYGKGSVFTVTLPQGISIRENFAVEAAAKAFIAPTARVLIVDDVKTNIQVAQGLLSFYEMAVDTCLSGQEAIEAVKGRNYDIVFMDHMMPEMDGVEAARRIRELPAGRNLPIVALTANAVSGMREMFLQNGFDDFLSKPIDTAMLNTVLERWLPKDKQVEAALENDSGYAAPDSGHVRAAFCLRGV

SEQ ID NO: 98115 - protein, 157 aa, Unknown
  Obtained from environmental sample
  DOMAIN (1)...(138): Ribosomal protein S2
  misc_feature (1)..(157): Xaa is any amino acid
APFLCTNRWLGGMLTNFQTVRKSIKQIDKIDDMENQGIFKQMSKKEVLDKNRERSKLLTVFGGIREMSQLPGVIVITDLNHEHIAVSEARRLRIPIIGICDTNVNPELVQYPIPANDDALSSVSLIVDYLAANTTPRQNQPAANTKDKAADKAEEKA

SEQ ID NO: 98116 - protein, 114 aa, Unknown
  Obtained from environmental sample
  misc_feature (1)..(114): Xaa is any amino acid
NYHIHTDAIKHNLIPVKLTPQQTSVIYANEADVLNVALFGITAKQWRDKNNDLKGNIRDYASINELICLSNMENINAVLINDGIPQKERLIKLNGIAIQQMIILNEAKNKKLLR

SEQ ID NO: 98117 - protein, 281 aa, Unknown
  Obtained from environmental sample
  misc_feature (1)..(281): Xaa is any amino acid
VKKTVDAAMGGSLPNPIEIVNTIMKDILPQLPQLAAMAKSAKPAEAEAPPAQGAQAPQVAGYTGSGAEYGAPVQPPAPPPEPKKIILTPVDWTVTDAQTWIDMVNGIRTGGDRKAHTVTINTENEIVVPVEDGYTFGTVKHIKVVLDGRGVITLAAGGSLLIVGADQRVSVNGSVVLKGRENNSGSVVVVDSGATFRLDGWAQIISNSVSGDGGGVSVLGGGSCFLAGNSVVAGNSAKGSGGGVYVSHGKFGMQDSARVYGNAAGNGGGGVYLEHGVCVMV

SEQ ID NO: 98118 - protein, 198 aa, Unknown
  Obtained from environmental sample
  misc_feature (1)..(198): Xaa is any amino acid
MNWKEIEVSADGTHFLFDGKSLFDKKFTDALKFHSPGIAPVKDKSGAYHINASGESVYTERYARTFGFYCGKAAVIGDRGWFHIDENGKKGYPQNYAWTGNYQEDLCTVRDFDNSYFHIDLHGDRIYGDKYLYCGDFKDGFACVKRQNGLFKHIDRHGGFINGEEFMDLGVFHKKFAIAKDKDGRFHIGINGKPIYAR

SEQ ID NO: 98119 - protein, 240 aa, Unknown
  Obtained from environmental sample
  DOMAIN (146)...(231): Bacterial Ig-like domain (group 2)
  misc_feature (1)..(240): Xaa is any amino acid
GIKNYDTATTGFLDATNEDQAAKIFLAYYSGANKMKGLNVLKADLVEGAAVPTVESVTVNPATITVAIGTTNQFTATVTGKFSPAETVTWTIETTGKNSGTSISATGLLTVAAEETLTSLTVRATSTQDDTKYGEAAVTISAEAPTVTSVTVSPTAPSVLKGETQQFTATVEGTNSPATTVTWSITTEGINAGTTISTGGLLKVAVFETKTTLTVQATSTQDNTKYKEVTVTVTPITLPP

SEQ ID NO: 98120 - protein, 260 aa, Unknown
  Obtained from environmental sample
  misc_feature (1)..(260): Xaa is any amino acid
FSFSGLPEFQRAYQTLGDLFINFHGIDGECVEYIRLLNLENALSVVNFKIGGYRYEREVFASAPADVIVIRLTTTNPAGISFDARLVRNRLCDHSGKIDRETVFIDGVTGGGNGISFCCMMAGTAKNGEMNAIGEYLVFNNVCEAFLYINASTNFRSADSFSNCLSVLKTAKNKDYDHLLNKHITDYQEIERRVSLKLKTDDTASRLSVNERLELFQKDFSDIKLIELFFRYGRYLLISSSRPGTLPAHLQGIWCNDFLP

SEQ ID NO: 98121 - protein, 283 aa, Unknown
  Obtained from environmental sample
  misc_feature (1)..(283): Xaa is any amino acid
MKYMAQFVFINRYIQQLNVLPKITLFSDKDVEIGIVDLLVDMGNSRTCAVLFDDSKFTDVEPLGLQNFSNPLENGKLNRNYNSCDMRLAFHEANFGGNLKKGSSQFTYPSMVRLGIEANELMYNAVNLNKGIEKVTTFSSPKRFLWDSKPQSKEWEFVTLSGEQNKPVRIKGVSEQLNFDGSLNTEGIGGIDKCYSRKALMTFCFLEILAQAKMQINSYEFRNKWGGENKPRQVGRIIITCPTAMSRVEQIALRKCAEDATVILERFYKGTHNKVQVIPSVKN

SEQ ID NO: 98122 - protein, 84 aa, Unknown
  Obtained from environmental sample
  misc_feature (1)..(84): Xaa is any amino acid
GCIPNHGCFHYKPAKNTAISFGLALKLKPDEFASFLQNAGFALSNSSVFDLVIRFCVEREIYDLHDVNALLLQSDQKTLAKEAA

SEQ ID NO: 98123 - protein, 144 aa, Unknown
  Obtained from environmental sample
  misc_feature (1)..(144): Xaa is any amino acid
MGLNDEVEVAGRVMVLFFLVDTSGSMGGSKIGAVNHAIEEVIPEIKSISVGNADAQIKIAVMKFDNSIEWITKNGPEDSETFVWRSLDANGMTYMGEACKQLDKKLSTKEGGFMREATGSYAPAIFMMSDGEPNDDLTKDEGVK

SEQ ID NO: 98124 - protein, 143 aa, Unknown
  Obtained from environmental sample
  misc_feature (1)..(143): Xaa is any amino acid
MNATFDELTRSHPCFSTGAKPNKGRVHLPVSPGCNINCNFCDRALNDIDTRPGVTSSIISPPEALDVIRKALALCPDITVAGVAGPGDALATPWALETFRRVKEEFPGIIKCMSTNGLLLPEFADEIIEIGIDSLTVTVNAID

SEQ ID NO: 98125 - protein, 60 aa, Unknown
  Obtained from environmental sample
  misc_feature (1)..(60): Xaa is any amino acid
YFGLLLDEPTTFATRIHRMIKLGLSIDDDEEVIAEDSTEMPSLEEVDAAEAEGSKMEEVD

SEQ ID NO: 98126 - protein, 260 aa, Unknown
  Obtained from environmental sample
  DOMAIN (1)...(210): Elongation factor Tu GTP binding domain
  misc_feature (1)..(260): Xaa is any amino acid
EYKINLIDTPGHVDFTVEVERSLRVLDGAVALFCAVGGVQPQSETVWRQANKYQVPRIAFVNKMDRTGADFFNVVNQIKEKLGATPIPLQIPIGQEESFIGVVDLISNKALVWDDDKGVTMHEVPIPDDLKDIVAEYRAKLFEGAAEECDHLMEKFFEDPESITEEEVIRMVRKATIEMRITPVMCGSAFKNKGVQRLLDGVMRYLPSPMDIEAVKGINPKTDAEVIRKPDAKEPFSALAFKIATDPFVGRIAFFRVYSG

SEQ ID NO: 98127 - protein, 95 aa, Unknown
  Obtained from environmental sample
  DOMAIN (8)...(95): Ribosomal protein L3
  misc_feature (1)..(95): Xaa is any amino acid
MSGLIGKKIGMTSVWDASGKNVPCTVIQAGPCVVTQVKTKDVDGYDAIQLSFDEKKEKHTPKALKGHFAKANTTPKKISMEFTRFEEGHRKTLEK

SEQ ID NO: 98128 - protein, 189 aa, Unknown
  Obtained from environmental sample
  misc_feature (1)..(189): Xaa is any amino acid
MQDATLLSKGQLVEKDGFYFDIKWLAIGIIVVFLLVFQVFPLIYLVFRAFFSTGTFSLDAFKRVYTYSLNWDALTNTLITGSLSMVFGVLIAFPLAWLVGRTNMYGRKFFRTLFVMTYMVPPYVGAMAWLRLLNPTVGNLNVFIQNIFGLSKPPFDIYSIGGLVWVLTTFYYPYAFITISRAMEKMDPS

SEQ ID NO: 98129 - protein, 89 aa, Unknown
  Obtained from environmental sample
  misc_feature (1)..(89): Xaa is any amino acid
VRVFKDITIPLIGPSVVAGWFLIFMPSFYELTMSTLLYSTNTKTLGYELYTYQTFHSQQTASALATAILIMVILVNWLLNKLTAGKFSI

SEQ ID NO: 98130 - protein, 182 aa, Unknown
  Obtained from environmental sample
  DOMAIN (1)...(181): Putative methyltransferase
  misc_feature (1)..(182): Xaa is any amino acid
FADVFGNCNPVIAEIGFGMGRATAVIAGENPDKNYVGLEIHKPGIGRLLWEIERRSLSNVRIIEHDATEVFEKMFPENSLGGAHIFFPDPWPKKRHHKRRLIQRPFTDCIASRLQPGAYVYMVSDWLDYAHWALSVLTDTKGLVNEYEGFSPPQLWRPLTSFEKKGLDKKHEIKELFFRRSL

SEQ ID NO: 98131 - protein, 69 aa, Unknown
  Obtained from environmental sample
  misc_feature (1)..(69): Xaa is any amino acid
MKNDAKRIEQLERAIKKYQKSYYGGEADISDGEFDLLWDELKALAPNSPVILGIGDGADNTDGFPKQNT

SEQ ID NO: 98132 - protein, 270 aa, Unknown
  Obtained from environmental sample
  misc_feature (1)..(270): Xaa is any amino acid
MRKAIRNNVGMIRTLTACVSVIITLAILAAGCGDSGVNNGGESKYLNMFLDVFSKNPGHNDSLPPPPPATYTLKVNVSPAEGGTVSRNPNKTSYNAGDAVTLTATPMDGYIFTGWSGDVNETDMSVTVTMDGNLEVSANFVSNVVTTYTLTVNLTPSEGGNVSREPNKTRYNVGEQVTVTAEALPGYKFTGWTGAVNEAATVVTITMNSDLAVNANFLQQTYSLSIGANPANGGTVSRDPQKAAYTYGEQVTVTATPEKGYIFKGGRTTP

SEQ ID NO: 98133 - protein, 258 aa, Unknown
  Obtained from environmental sample
  DOMAIN (160)...(258): Transglycosylase SLT domain
  misc_feature (1)..(258): Xaa is any amino acid
LKPSPVRKFAAFLPFAVLILISAATVKTTAAESNLFPVPDVIKNNVAFWIRIYTEISLQEGLLHDRDYPQVVYEKIPNGDKTGKKLSEFIDQRRKVYIDAIIAVRDSAPAKWGATEKRVAELFKLAPEGSIAGAEERIRHQGGQRERFKLGLERSTMYLDTISAILKKNGVPDELKYLPHVESSFDAEAYSKVGAAGLWQFMRSTGKLYMKVDYMFDERRDPIISTNAAAKFLKSNYDMLGAWPLAITAYHHGPNGIR

SEQ ID NO: 98134 - protein, 190 aa, Unknown
  Obtained from environmental sample
  misc_feature (1)..(190): Xaa is any amino acid
ASVNRAPPKAARFPIIAISTKEFPEYQVQRQKTTFTDSRDGKKYGVVEIGARTWMAENLSFNVGKCYDNKEENCKKYGGLYDWNTAVKACPSGWHLPSNREWDILMSSVGGEKIAGYLLKSTNGWYKNGNGTDVYDFSALPSGGDYGGWWSASEYDSDNAYYWHMRYNYDSAGRDRNLKSYLFSVRCLQD

SEQ ID NO: 98135 - protein, 85 aa, Unknown
  Obtained from environmental sample
  misc_feature (1)..(85): Xaa is any amino acid
MFGMNKIPLKLTISALGLTILVLGLLLYLRVIWFVYPDKNIYQVDGLDVSNHQGVIDWKNVDARYKFVFVKATEAVTFVDKSFLE

SEQ ID NO: 98136 - protein, 265 aa, Unknown
  Obtained from environmental sample
  misc_feature (1)..(265): Xaa is any amino acid
DALIGNFVRARGLGIINGIDTEHTGTVDKIYSDSLKRILDLGMIPILPCIGWSPSGKPYNVQSDEIALAVSSALGAEKLFILSAHDRLKIDKLNIRGKHSSLMQHLLNIADAPFIQQKKPSLMWRSIHVTNKSLAQKSILENLEKRSDGSLVRISPQQTELIISIISEFKNDDGSYIEERYLRELKLALMASKAGIHRVHIMDGREEGAVLKELFSNLGVGTMVYVDEYDSVRAIHSRDLPDILRLMEPLMQKGILIRRNPETIQ

SEQ ID NO: 98137 - protein, 268 aa, Unknown
  Obtained from environmental sample
  misc_feature (1)..(268): Xaa is any amino acid
MKSFKIPTFVLVLLLCLCFAMAGCGEPDSETDSVTSITLKYNNNGITDDTLTVNLADSPLTFTADVKVTGKASKDFTLESSDVEVAAVDGKTVALLAEGETTITATAVGDSSKKHAVTLIVADGAETGSVISIKLKYNDNEIADDMLMVPYAANTQLTFTADVEVTGSASTDFTLASSNPKVAAISGKIATLTSAGQTTITATAVGDSTKTHAVTLIAGYKVTVTGGAADKIMAFANDVITLTPEIPDGKVLLGWMFELPSISTLSTH

SEQ ID NO: 98138 - protein, 210 aa, Unknown
  Obtained from environmental sample
  DOMAIN (19)...(210): Ribosomal RNA adenine dimethylase
  misc_feature (1)..(210): Xaa is any amino acid
MTINYNSATALRAFLDQENLGMQKKFGQNFLINPETRKALVQALNTKSGDEPQPSLQPSVRKHRKGSPLEVWEIGPGLGAMTALLLETGLKVKAFEIDLGFIRILKNIFSKNKKFTLIEGDVMKTWHGQQAAPFLFGNLPYNVAAAMLADLIENDRIFSRMVVTVQKEVALRMTATAGKPDYSSFSVLCASAYKVKPLMTIRPASFYPQP

SEQ ID NO: 98139 - protein, 261 aa, Unknown
  Obtained from environmental sample
  DOMAIN (65)...(256): Glycosyl transferase family 4
  misc_feature (1)..(261): Xaa is any amino acid
LLICYIFGPRIIEALKRLKVGQVIREDGPATHLAKGGTPTMGGIFIVLSVVISMVFWTDLDNGKVWLTLGALVAFGLVGFLDDYLKVTKRSSDGLPARVKLAFQFLIAFAVMLILYYTGEEGITSLYIPFFKNPVLDMGFLWVPFGVLLIVAESNAVNFSDGLDGLLAGLLIMVFITLAILTYLSGRSDFSSYLGIPYIPGAGELTVFCLAATGACIGFLWFNAHPADVIMGDVGSLSLGGVIAVISLIIKKEVLILIIGG

SEQ ID NO: 98140 - protein, 50 aa, Unknown
  Obtained from environmental sample
  misc_feature (1)..(50): Xaa is any amino acid
RRIGDSRSRTLKAGVNIKMVNQGSSEISMIFGIDAADEKKAVNALYNEFF

SEQ ID NO: 98141 - protein, 282 aa, Unknown
  Obtained from environmental sample
  DOMAIN (1)...(282): Inner membrane protein CreD
  misc_feature (1)..(282): Xaa is any amino acid
MKDRKELQRADAVVKEIEMDRKGQKEEQKGEWKEVITREYSTRFKVILPSELFFDASLDTEIRYRGIYRQTLYTAPMTVSGSFVLPTGKDFTNDTDQIFWESAWICVGVSDLKAIAQAAPFAWAGTDLAAHKPGTKAGDLLGPGFHTELPLAEKDAGTRQPFSLRLTIKGSGGIFFTPVGENTTIAVKSAWPAPSFQGNLLPVERSISDKGFAARWAISNLTRTYPQAGDIQDDYMRRSSDRSPLASLVTSFTAGVNLHEPLALYRMAGRSADYGILFIAVT

SEQ ID NO: 98142 - protein, 278 aa, Unknown
  Obtained from environmental sample
  misc_feature (1)..(278): Xaa is any amino acid
MNEWMDHLSQKSGFVEQQTKQWSEAINAKRRPLSDSVYPYLRKYSKTWPILKDIMEGAHLHKDIFDYFDGIFNQESSTEPLKVQLDEILTNLVTSFDDEELPLRKQEKFEQFIIDFEGDEKRAQSNMAIEETAFEAHKDFTQLLTDAAMKPESSHASVSTQKFAIALSKDWINNAYNDVVAKNRMKIPNEIEINMENFNDKTADGQNEREVLGRFDRLIDDEKERALADVKLSGFEHFCFWGGIAVCLIGIAAIVFEHPVFGAFMIICAIGMIINHFS

SEQ ID NO: 98143 - protein, 286 aa, Unknown
  Obtained from environmental sample
  misc_feature (1)..(286): Xaa is any amino acid
MGDVAQSKELLRRYSIARIPFIAINTIERGRTLEIIKDIAGTLSLTFFVHTLSKGVYDITTEKVVSEDKSIYSAIDFMSDQMKRRQYLTLVLTEVPDLSGNSADSKQILDLVTLAEESGGSVIALTNTSIWNQLQRLGMVIKIDLPNEDEMYDIIKEYIDDYRKEIPIEWDNNDIREAAALLAGVTRIEAQNVIAALIANKCVKKSDMDEIRFAKDRLFSDISGLEKIDVDDSVKNVGGLGGLRKWLDEKKILLSAEKRDEMKTRGLQSPRGILLVGVPGCGKSRA

SEQ ID NO: 98144 - protein, 250 aa, Unknown
  Obtained from environmental sample
  DOMAIN (190)...(221): Putative Fe-S cluster
  misc_feature (1)..(250): Xaa is any amino acid
MVSPCIAKKLESDSNPELLNAAITFAGIRKWMEDSGINPFQETPDASDVFVPRRSKDGSLYPMDGGMAQSIAHYAKNKNIKYMAFSGIRHLQESIRGLNEIELKECLFLELLACDGGCVNGPKVASNGGTALKWLSVEGYADQPGPGDKIPIGLNLSMPTDACPPPGKAYTPAEIAEALRRVGKLSQADEINCSGCGYDSCRQFAEALLENRAEPSMCVSYMRNMAMNKANALIRSMPAGVALVDERMSI

SEQ ID NO: 98145 - protein, 76 aa, Unknown
  Obtained from environmental sample
  DOMAIN (1)...(75): Dihydrodipicolinate reductase, C-terminus
  misc_feature (1)..(76): Xaa is any amino acid
MCDAPLCETSETLTIKAFREGKIFGTHKILYTSADDTIEIKHNAQSRQGFAKGAVLAAEWLVGKTGVFTMTDLLKV

SEQ ID NO: 98146 - protein, 269 aa, Unknown
  Obtained from environmental sample
  misc_feature (1)..(269): Xaa is any amino acid
FCDVIITGKEAAIGLKYDEENMFAPMVVFLEKGASADALVWAAENLGVPVIKNIALAKNLASHCKAGDAITEATYRDVSLALVKLDSNRFQKKPPASGNGRQGLPVKIPRPLSLEMGNSLFALTEEVPGRDKLLVQPLNAMRKRLIRLLGISLPAFRISRSVKLKDDEYRILFKGLEAGRGRLELGWYPKNTLAYNGVIPEIMSRPENISSAAKFAASSLLRHAEEIIEQRAPELLGRDEVEAILDAAEEQYPVVTGEVKGFLSLGIIR

SEQ ID NO: 98147 - protein, 224 aa, Unknown
  Obtained from environmental sample
  DOMAIN (25)...(213): Outer membrane efflux protein
  misc_feature (1)..(224): Xaa is any amino acid
MKKKLLICGLFLLAAFTVFSQTVNLEQARALALANSRSLAKYNLAIRSSVLDERSQLYTMLPSVSAGYSASMNYMNKNWEFVNPVDTLNTGFDVAITQKIFEGGKSFIQKAISAIATESVRKEALAEYFSVLDAADNAYYAALEAAATLEAEEASLRNALASLAVAEIRQSSGMINRGDFLKALADKEARENARDQARRSLSLSRMKLKALTGIDTGATLNRST

SEQ ID NO: 98148 - protein, 262 aa, Unknown
  Obtained from environmental sample
  misc_feature (1)..(262): Xaa is any amino acid
GDIGRCLLSVEKGIVHIRTSAACIGQGLATVLTQIACETTGLLPECFFVEPPDTRRTPNSGTTTASRQSLFTGEAVRQAALKLKEALCLHPANVAGGGCLASLEAQEFSGEYSGLTDPMGSDKPNPVSHVAYSYAAALAILDKEGRVEKIIAAYDIGNVVNPKSAEGQVEGGLLMGMGYALTEDFPVEGGYPKAKYGTLGLIRAAGAPQMEVIFVKPKNPSPLALGAKGVGELAAIPVTPAIAGAYYAMDGRHRTKLPMEGT

SEQ ID NO: 98149 - protein, 281 aa, Unknown
  Obtained from environmental sample
  misc_feature (1)..(281): Xaa is any amino acid
GINKNTVTYASSTAQYTVDDVKWLDGGGTPLPAGATFVNSATYIAEITLAAKTGYKFTSAQEAAAGPASFFASAGAATTGTRSDNDRKLTFRASFTVADQPPNISRVDITLSATSFDFSNADQRPTITSVIDNTVTPAVTLTSGDYDAAFVATSVNAGTYTVTITGKGASATNKYIGTKTATYTINPKDISAYTVTATGASATYTGAAIAAATVAVSGTPALTAPNLPTTAGDYTYDVTDNVNVGSATVTVRPTNPNFTGTATGTFAIGAASAPTIAKKKD

SEQ ID NO: 98150 - protein, 127 aa, Unknown
  Obtained from environmental sample
  misc_feature (1)..(127): Xaa is any amino acid
MVNSKAKSQMWSGRFESTMAKSMVELSFSLNIDKELLEEDILGSLAHGKGLVEAGVISKNDYAKIANGLQSILRDVKKGKELWNADDEDIHMAVERVLTQRIGNLGKKIHTGRSRNDQVATDFKLYM

SEQ ID NO: 98151 - protein, 259 aa, Unknown
  Obtained from environmental sample
  misc_feature (1)..(259): Xaa is any amino acid
AVVLLATLRFGLFVRMDPVSKLTEVPTFDILEFQYSREQEIIADYSHYSYTIGDPFIIIDPYGFNPLSALILFETDKACEVKITIKGDNDYATFTYTRAVEPPRAEVPIIGLYAGRTNNVTLTVGGVSYDYAITTEPLPVTMQKYTLISSRPEKMADGITLFIAFFDYSNSALVDCYGQVRGFITMPVMAKRMPIILLKNGHILAAGDEYKMTPYYMASMFEYNWLGKIFREYEIPNAIHHGVSELPNGDFLITSNHRN

SEQ ID NO: 98152 - protein, 197 aa, Unknown
  Obtained from environmental sample
  DOMAIN (20)...(197): N-acetyltransferase
  misc_feature (1)..(197): Xaa is any amino acid
VKNYADYLERIGFKGEAKPDFDTLSELQYRHFLTVPYENLDILNKVPISLNIDDLYKKIVTQRRGGYCFELNALFNWLLREIGFKTVVYFARFLLDEPEIPMRRHRIMRVEADGEYYIADVGVGSITPERPLKLVENEETEIRGITYKLNKEPFLCWALSFRKDDERQQEQGRNQEWKRLYSFSEEEQLEVDFVQPN

SEQ ID NO: 98153 - protein, 65 aa, Unknown
  Obtained from environmental sample
  DOMAIN (1)...(64): YgbB family
  misc_feature (1)..(65): Xaa is any amino acid
VDCTIIAQRPKLSIYKEAMKDNLCGILQIGRDDINIKATTEEGLGFTGRGEGIAAHAVCIIINNN

SEQ ID NO: 98154 - protein, 255 aa, Unknown
  Obtained from environmental sample
  DOMAIN (8)...(112): GTPase of unknown function
  misc_feature (1)..(255): Xaa is any amino acid
TPVEFAYNKVLGEERVIVTHIPGTTRDSVDQYFECEYGKYIFIDTAGIRRQNRISDNVERYSVLRAKAAVERADVCLIMIDANEGPTFHDERIAGIVHEAGKASIIAVNKWDSIEKDNSTMKKFTGILKNAFAFMSYAPEIFISAKTGQRVNKLFDIINAVYEQSSRRVTTGALNDVLSDAIARSQPPSDKGRRLKIYYMTQTGIKPPVFVMFVNNAELFHFSYQRYIENRIRETFGFLGTPMRFIIKNRSRGDI

SEQ ID NO: 98155 - protein, 187 aa, Unknown
  Obtained from environmental sample
  DOMAIN (126)...(161): WD40-like Beta Propeller Repeat
  misc_feature (1)..(187): Xaa is any amino acid
MVVSPDVSNIDGTIAYASSQSGSLNIYTCASDGSRRRQLTFSKGTDTAPSWSPNGYQIAFTSDRAGGPQIYVMDATGSNQRRVTFEGRYNDAPAWSPKGDKIAYASQGENYQFNIWTVSPDGSEAKMVVNLPGLSESPTWSPDGALIAFVNTNGGKSDMYVVKHDGTRLRKITNTGDIKMPKWSSFW

SEQ ID NO: 98156 - protein, 279 aa, Unknown
  Obtained from environmental sample
  misc_feature (1)..(279): Xaa is any amino acid
APPAGTIRLPLGFALELKVGGRRVDFPPVEIDYQANSARLWLNAEPRDSAETAVLADRLAVTVNRLIRDEQPLLISTRLKLTVSGREREVILGQALLPGTRASFLSSPLPAQLADGGLRVRVKPGVFDIFLDSRAEGRPQTLGPSPGEEEEYWAFQAQPELRLAEISGADQIDPSQVDFHPAWRNFPIYAVPPGHALAFTTLRQGDPDPPPDQLRLDRECWLDYDGQGLSCRDRLLGTLSRQWHLNTSEPFRLAQASLNGEPQVITWQTDSQGGQAPGL

SEQ ID NO: 98157 - protein, 92 aa, Unknown
  Obtained from environmental sample
  misc_feature (1)..(92): Xaa is any amino acid
MANGYWKRNLNETAVFEMFFRQQPFGGGYSVFAGLGTLLEKLLNFSFGEDDIDYIKSLSVFEEGFIDYLKTFRFKGSLWAMDEGTVIFPNEP

SEQ ID NO: 98158 - protein, 197 aa, Unknown
  Obtained from environmental sample
  DOMAIN (8)...(170): Transglycosylase SLT domain
  misc_feature (1)..(197): Xaa is any amino acid
MYPRPFNEQVTQYARETGTGSAKLYALIRTESAFNPDAISRSGAIGLTQLMPATAEEMAARILRRGGPDYRKTDKDSAAAVNNGDEISGDTDSDAANTAGGATGGGLIASEVGIDLLNPGANIHMGAAYLAYLEERLGDPLLALLAYNGGMNRVRRWRNSIPAKFPPDLFLETVEYAETMDYGRAVMGAAAMYRALY

SEQ ID NO: 98159 - protein, 272 aa, Unknown
  Obtained from environmental sample
  misc_feature (1)..(272): Xaa is any amino acid
YEVSHKAHNALRWLIARQGYRNKEQAVVAWTEKGMELPNPVSWLPPEDFDWSADTGEAVPETTAMESETVHNDAGQSFSRSVAKALRGYKADLDATEGIAILALDSASPGRLSVTFYREQMAEDYLDKLEQWQKDMAWSLPLRLADSRDAKSKERTVFTEYAPLPETIARTAYGRRIDGKLLKATVERLLPCIVDGAAIPRDLMESCVRRACNRVGLEGWEWPAVLGTACALYKGFYARHPQPKKRRTYSMALDRNRSTRDYLYGRLLAVAE

SEQ ID NO: 98160 - protein, 257 aa, Unknown
  Obtained from environmental sample
  misc_feature (1)..(257): Xaa is any amino acid
ILSETAHPVLCVSTQLMECGVDVSFGSVIRFAAGLDSILQAAGRCNRHGDSLLGRVHVVTVENEKLELLQDIKIGRDVYLRIRHECKDLLHASEQNLNQPEVIAAYFQYYLHARKNIMAYATPQGHNRNDTLLNMLGSNRYAPGNMVHGGMLRQSFMSAAGLFQPIDSPTRAVLVPYKEGERLIAELSSTALLSRKWELLQAAQRYSVNLFPNILQKLENALHDIQQSGILALNAAYYSEVFGVMTEPCGTMGFLHH

SEQ ID NO: 98161 - protein, 261 aa, Unknown
  Obtained from environmental sample
  DOMAIN (1)...(182): Protein tyrosine kinase
  misc_feature (1)..(261): Xaa is any amino acid
MELVPGESLADLLDRQPILTAAQLIPILADTARGLQHAHHNSVIHRDVKPGNILLTEVLPGTPYKVKITDFGVSVAANQAPMTATGMVMGTAQYLSPEQAVGNPATARSDLYALGVIAYEASVGKRPFTGKSPVDIAISHVNDPVPPLPRHVDQRLANIIMALLAKDPDQRPESAAVLAAELDALVAPPPRRYSHANTGAIPVISGHSGDNHRPAFPPIVVSDQPSHGESIVPPTNYPRRAARRAAAHQHDAAAGLGAGLA

SEQ ID NO: 98162 - protein, 105 aa, Unknown
  Obtained from environmental sample
  DOMAIN (11)...(67): Hemerythrin HHE cation binding domain
  misc_feature (1)..(105): Xaa is any amino acid
MLSLTKDMETGVEKIDTQHRELINRINNLIAAGEKAASREETQKTIDYLGEYIVEHFTDEQEIHIKSKYPKYEEHKTKHAYYVNDFAKLKNEFAANGNSVNYNEA

SEQ ID NO: 98163 - protein, 222 aa, Unknown
  Obtained from environmental sample
  misc_feature (1)..(222): Xaa is any amino acid
MNLDVRHIDTDFLIIGGGTAGCYAALTFSEHSDARVLIVEKADIRRSGCLAAGVNALNAYIGPGKTPQDYVDYARQDAENIVRGDLLLTMAEGLNSVAEKLESLGLTILKDSQGQYATRGWRNIKINGENIKPILAYAVKKQEHITVLNRVNVFEYIIQENRILGVYAVDIEEPILYKILAKAVLCAAGGAAGLYRPNHPGFSRHKMWYPPFNTGAGLAMGI

SEQ ID NO: 98164 - protein, 253 aa, Unknown
  Obtained from environmental sample
  DOMAIN (158)...(236): BRCA1 C Terminus (BRCT) domain
  misc_feature (1)..(253): Xaa is any amino acid
VQCPKRLLHRLEKWVSVLDIRELGTKLIKQLFDKKRVRNIHDLYTLTADELAEYDRMGEISAAKVIRHIQTKRELSLAVFIAGFDFEGIAETTMEKITAAGYNTPEKLRAASTGDLSAVYGLGDITAAVIVDGLKECAEEIDAVLKTGVITITAPVPEETLPLRGLSFCFTGEMKTIKRTAAEEKIKLLGAQAKSSVVKGLSYLVTNDPESGSAKNKKANELGIPIISEEEFLALISKTKNEAQLQHLQGELF

SEQ ID NO: 98165 - protein, 200 aa, Unknown
  Obtained from environmental sample
  misc_feature (1)..(200): Xaa is any amino acid
MPASRDSTSQARQPVSRRQVIQAAAGISAGLALSQVSSRAAAGSHLPLITKPIPSTGEKLPVIGIGTNQFSVSAPEEMAARLEVIRELAHLGGRLVDTAAAYGDAETVIGKVVNELGNREQLFIATKTPMSGEIPAGAAVVEQALMRLQISRIDLLQIHNFYRIDDLFPVLLDAKKAGKVRYVGVTVASPGQPQTQMLEV

SEQ ID NO: 98166 - protein, 85 aa, Unknown
  Obtained from environmental sample
  misc_feature (1)..(85): Xaa is any amino acid
MPEISSFYGIIITMLFDDHNPPHFHVKYGEYRALINIKDGTIKGSLPRRALNLVFEWLDLHREELLDNWSRIEKRQTLLNIEPLP

SEQ ID NO: 98167 - protein, 82 aa, Unknown
  Obtained from environmental sample
  misc_feature (1)..(82): Xaa is any amino acid
MNTTTNEILWVTKAEYAEEYKLLLTFNNDVTKLVDLKNSLYGEVFEPLKDIEKFRQFELSDWTVEWYNGADFSPEYLFELNS

SEQ ID NO: 98168 - protein, 146 aa, Unknown
  Obtained from environmental sample
  misc_feature (1)..(146): Xaa is any amino acid
MGNTLYSVETETASSTIDGEWLSITPDGYYQASPRGDRYFNVRVNNTISGIDSYRAVFYNPDVVQARLQGRPDPASKANVTIQQAANFTPPTVTIQSSANFSTTNTATANLSVNIASQSQPIKNIKIIVNGRLVGRDELAAVKGTG

SEQ ID NO: 98169 - protein, 233 aa, Unknown
  Obtained from environmental sample
  misc_feature (1)..(233): Xaa is any amino acid
TGIANEEVVEGLCERCKTRVTRKRIRQWILKITAYAQRLLEDLEGLDWPEPVKQMQRNWIGRSEGANVIFKVESSNLSFEIYTTRPDTLFGATYMVLSPEHSLVEKLTTPEQKAAVLAYIEEAAKKSDLERTDLAKTKTGVFTGSYAINPVNGEKIPIWIADYVLISYGTGAIMAVPAHDERDWEFAKAFNLPIIKVVAEEQPQSPVPSPQSPVQCTTADGFFRHSGPYNGLP

SEQ ID NO: 98170 - protein, 251 aa, Unknown
  Obtained from environmental sample
  misc_feature (1)..(251): Xaa is any amino acid
LAKLRYFYEKYAELHVAAAGSLLEFALEEIPSFGVGRIRSLFMYPFGFDEFLTALNEEELSEAVKSASPEKPLADPIHQQLLGRMKTFLICGGMPEAVSQYVQKRDLLNGELVLNDLITVLKTDFARLVKAQYHKRIPFLLLNEVFESVMRQTEGKFVYERAAPGTASVAVRQALELLIMAGLVHPVTHTAANGIPLGAETNRKYRRMIPCDTGLFLHTLGLRSEILPAVDFSAVNRGSLAEIFTGLELLK

SEQ ID NO: 98171 - protein, 240 aa, Unknown
  Obtained from environmental sample
  DOMAIN (10)...(198): ROK family
  misc_feature (1)..(240): Xaa is any amino acid
MTNEPIVLILDAGGTNFEFRAVKDNADVAEPLVLPSHGDDLSACLKTIVEGFRRQRDAVGGTVDAISFAFPGPSDYANGIIGDLSNLPCFRDGVALGPMLEDVFGIPVFINNDGDLFTYGEALGGVLPEINAELVSHGSPKRYRNLLGLTLGTGFGAGFVTDGLLLLGDNCAAAEIWCIRNRLDRDASAEEGVSIRAVRHAYAEKTKLAPEDAPKPVEIAAIADGKLPGDSEAAKYAFRR

SEQ ID NO: 98172 - protein, 265 aa, Unknown
  Obtained from environmental sample
  DOMAIN (1)...(262): FHIPEP family
  misc_feature (1)..(265): Xaa is any amino acid
MESDFYGSMDGASKFISGNVKVGVFIIIIEMLGGFIVNSALAGQQSGIGTYIALAIGDGLVTQLPALLVSTAMAIIVTRAAATGVLADQIVDQILKRDSSLYWVCAAVVAVLGFLPGFPWYLLFPMAALIGFHAYTRGRDQKKAVVLGPKTGKAREQGEKPAEFPPIVPLDALSLELGYGLVPLVEKEKGAELLERVMNVRSQSAYDLGLVIPKVRIIDNSMLAPSEYCFKIKGVDSGRGKIRLGYYLCIKPQPPAMVLTEIEGE

SEQ ID NO: 98173 - protein, 80 aa, Unknown
  Obtained from environmental sample
  misc_feature (1)..(80): Xaa is any amino acid
MVFVQPTRGLDIGAIDTIHRQMLAERDKGKAILLISLELDEIMSLADTIGIIYNGEILKIAAASDVTTNEVGNYMMGVRS

SEQ ID NO: 98174 - protein, 144 aa, Unknown
  Obtained from environmental sample
  misc_feature (1)..(144): Xaa is any amino acid
LTPALTADPLLDILNCTFPELEDFMGNTLGEPRFRAAQVWQWLWQKMARDFEEMTNVSKEARRRLAETAVIRWPEVRRIEKSADGTEKFLLALHDGALVETVLIPSVSRDGTTRNAQCLSCQVGCAMDCAFCATGAQGFERNMT

SEQ ID NO: 98175 - protein, 178 aa, Unknown
  Obtained from environmental sample
  misc_feature (1)..(178): Xaa is any amino acid
MSARAFCIFLLGFLALTVCAHIALARLLAPAAPGNPERIVSLAPNITETLYALGLGSRVVGVTDFCAYPPEAREKPRVAGFSDINFEALLRIRPDLVVLLQDVSQNRQQLERLGLATLPLDTRTIPGLMRAIETLGHAAGRAEAARSLLASIRQSLAAAEEKAAGQERPSVLFSVMHA

SEQ ID NO: 98176 - protein, 159 aa, Unknown
  Obtained from environmental sample
  DOMAIN (27)...(110): OB-fold nucleic acid binding domain
  misc_feature (1)..(159): Xaa is any amino acid
MEQIKEPHRYRTHNCGELRSANVGEFVRLSGWINNRRDHGGVLFIDLRDHYGLTQVVIYPDRAFQKAIAHLTKETVVCFDGILANRTEENVNPKLPTGEVELAADAFEVLSVAELVPIPVFPEDQAPEDLRLEYRFIDLRRSQIHANILLRSEVIAYMR

SEQ ID NO: 98177 - protein, 127 aa, Unknown
  Obtained from environmental sample
  misc_feature (1)..(127): Xaa is any amino acid
MEKNKEFCCSDCGMQSCYRQGKKFPELCVGEEVDKAEIDSIKKLYKTDPIVSKLSNAAAEIEGTYYGKLTRVEEIIAFARRIGAKKIGIATCIGLIAEAKIFVKILKAHEIKSYCAICKVGSIDKTE

SEQ ID NO: 98178 - protein, 130 aa, Unknown
  Obtained from environmental sample
  misc_feature (1)..(130): Xaa is any amino acid
GKKVFQVEGDVVLTQKDIRQVQLAKGAIRAGIEYLLRAKNTPPEQVDRVLIAGSFGYHLRAKSLININLMPKEFEGKIEFVGNTSSSGGIAFLLGKQYRAKMEKKIKEIEVLELANMPDFEKLFVKTLNF

SEQ ID NO: 98179 - protein, 179 aa, Unknown
  Obtained from environmental sample
  DOMAIN (35)...(179): Sodium:solute symporter family
  misc_feature (1)..(179): Xaa is any amino acid
MAISTPMLVTFCVYIFGMILIGFIAWRSTKNFDDYILGGRSLGPFVTALSAGASDMSGWLLMGLPGAVFLSGISESWIAIGLTLGAWINWKLVAGRLRVHTEYNNNALTLPDYFTGRFEDKSRILRIISALVILLFFTIYCASGIVAGARLFESTFGMSYETALWAGAAATILYTFIAG

SEQ ID NO: 98180 - protein, 63 aa, Unknown
  Obtained from environmental sample
  misc_feature (1)..(63): Xaa is any amino acid
MWIGVLLAAALCLGLGIFINETTGEFPQKEQELFEGIVAVIAVVILTWMVFWMRKVSRNVKVQ

SEQ ID NO: 98181 - protein, 140 aa, Unknown
  Obtained from environmental sample
  DOMAIN (27)...(139): Bacterial flagellin N-terminus
  misc_feature (1)..(140): Xaa is any amino acid
MIINHNMSAMFADRQLGVTQESLTKNMEKLSSGMKINRAGDDASGLAVSEKMRSQIRGLNQAERNIQNGVSFIQATEGYLQETTDILHRIRELSVQSANGIYTDEDRMQIQVEVSQLVDEVNPRCSHAQFNTMNMLTGAF

SEQ ID NO: 98182 - protein, 234 aa, Unknown
  Obtained from environmental sample
  DOMAIN (10)...(109): Flagellar hook-associated protein 2 C-terminus
  misc_feature (1)..(234): Xaa is any amino acid
MSDVYIPGVKSRFNTDQVIDGLMKLEKIPRDRVQSNMDTLRVQKGYWQEVGRRINTLRDSARQLYSFQNPFNERIGQSADDSVITAIAGRDVPEQSFTFTVKQTAQADRFLSQPLDEKTRIEAGTYSFSIGKDEISINYRGGTLKNFVETINNRGRNKISASLMTVKSGTISLLIESKLTGSENRLAFSQDASALATRLGMMEVGSGEQTNFPISEKTVQKSGQNANNVAINNG

SEQ ID NO: 98183 - protein, 236 aa, Unknown
  Obtained from environmental sample
  misc_feature (1)..(236): Xaa is any amino acid
LQKHGVGFIAAPLGNKKNKETFIETQDAVPDLSAWGMEKQEETQARVESQKLFAALGAMLEKKNALSALERELEAVEQEHGHFTRYFSGFYATAPSLKTFRKLDAQKILDLWLTCEDYCSRNKRFGVWARIRNFFRFGLVDNAFYSLPTEKMILTCQIHFYEHKLLELRGKIAELSRALSFFFFGDKMREYAEASMRLFRAYLYGRYGTSKRKKYKLGDLWTNADSFLKEYPVVLS

SEQ ID NO: 98184 - protein, 263 aa, Unknown
  Obtained from environmental sample
  misc_feature (1)..(263): Xaa is any amino acid
TKPDGTGTIFNAGTPVTANINVYAKWKAIPKKMVAVAFSANGGSAPNPARKEIVAGSACGSLPPATTRTGYAFDGWNTKPDGSGTAFTANTPVDAPITVYAKWKGKTYTVTFHRNGAESSNPPIPQIQAAYNSRITLPTPPTRPNFTFEGWNTKADGTGTIFNAGTPVTADIGVYAKWKAAPPKVVAILFNANGGTPNATRQVTVGSSLGTLPTVSRNGYKFDGWYNAASGGGKINSTDPISGNYTTFYAHWTANTPAPTPSP

SEQ ID NO: 98185 - protein, 220 aa, Unknown
  Obtained from environmental sample
  misc_feature (1)..(220): Xaa is any amino acid
MKHHNLNSFLTALFFSLLFTVCAGQQKKIIFRPDTSNIPQEQARLFESWEIINSQNGQGSANIPEWVRWHVENKTNEIEALDRFNGKYIFIGESGGGNFNALQQWANGYTAEQDLPRLITKRAERRLVSSASLYPDDEYGEYYEFLIRDISNGEYSGAVKEQTFWLKRKIINSAEADGITHIQSRPDAEQERYEFLVLISVDKETLQKQIQEIMTRIKTK

SEQ ID NO: 98186 - protein, 305 aa, Unknown
  Obtained from environmental sample
  misc_feature (1)..(305): Xaa is any amino acid
EAEQNKKVLRTCLDEIERSRPFFLGLIGDRYGWTPPRPYMEAALESAHFPLKDLNMSVTALEIEYGVLRSENPPVCLFYFRESPDYAVMPEELRPIYQDEAKSLEKLAKLKEEIRARFSQDIKTYTTEIHENELTVSKDWADMVASDIIARLRKEWGEPSETPPDWKEQEQDTQDSFRESRTAHFAGRAAAIADMAAFCLGGKTKPQLLMIQGEAGSGKSGLLCKVMDEIEPQCLLLPFSCGISSRSSLAENMLRYFIFLLCEKLKLKDDSEDITKFKDIKDRFTELLFAACEKNAGCGRLWMPL

SEQ ID NO: 98187 - protein, 139 aa, Unknown
  Obtained from environmental sample
  DOMAIN (11)...(139): metallopeptidase family M24
  misc_feature (1)..(139): Xaa is any amino acid
LIRLKNEKQIDGIRKSCKLLSAMYRELIPLVKPGVQTIEIDQWVQNWIKKSGGRAVFLGYTIKKKPYPAAICISINEEVIHGIPSKRRIREGDLVSLDCGIELDGFISDQALSIEAGKVSDDVKKINKITNEALYRGIN

SEQ ID NO: 98188 - protein, 139 aa, Unknown
  Obtained from environmental sample
  DOMAIN (14)...(92): Septum formation initiator
  misc_feature (1)..(139): Xaa is any amino acid
MRFIRYFVVIWTFFFVYTSFSFFLGQNGVDARRHLDSERVRLYENLKKLQNINADYQNMRNNLIHDQDSLSVYARQLGYGREGEEYIRIMGLGIAINTDMPAGQVSYTESPDFVSDTTIKIISLVFALVILSFLLVHDF

SEQ ID NO: 98189 - protein, 81 aa, Unknown
  Obtained from environmental sample
  misc_feature (1)..(81): Xaa is any amino acid
MKPEETPQNFNRKELEFAVFCIENVAEKLGKTGNEIYNILTEKSDILDSYIIPCYDVLHTQGKSYIVDDILGYLKKKGLVE

SEQ ID NO: 98190 - protein, 97 aa, Unknown
  Obtained from environmental sample
  misc_feature (1)..(97): Xaa is any amino acid
MILYHGSYTEIAKPSLSFSRKELDFGIGFYTTSIKEQADKWSLKFKKRHEPSIVSKYEFDENIIDKISTLKFDSYSEEWLDFVVLCRTGNSLGEIMI

SEQ ID NO: 98191 - protein, 254 aa, Unknown
  Obtained from environmental sample
  misc_feature (1)..(254): Xaa is any amino acid
EVSVLAVQDRLAGDSSESLADVLIHNHPSGFLTPSDNDLIISSRAAEAGVGSYIVDNLVENVYVVAEPVKRRKVQKLDPTVISAALEPDGAISRRLSSYEIREAQLNLMQLIIRGFNDDALVAAEAGTGVGKSFAYLLPALSYAAVNDERIVVSTATITLQEQLYRKDIPMVADALNKKIKTVLVKGRGNYLCRRRLDDALRESTLFDEDKGQLEDIARWAETTGTRSRSDLAFLPEESLWSRVCSEADNCMGM

SEQ ID NO: 98192 - protein, 129 aa, Unknown
  Obtained from environmental sample
  misc_feature (1)..(129): Xaa is any amino acid
MKTLGICFGATTVQYVKLNASADGAAAIEATGRVAHEGDPKGVALKLLSDPGIAGVDRVAVTGRAFRASVDLSAISEPEAVECALRRAYPGGDTPHLVISSGGETQLVYVINSKGGGSSVHSGNKCASG

SEQ ID NO: 98193 - protein, 262 aa, Unknown
  Obtained from environmental sample
  DOMAIN (6)...(261): Phosphotransferase enzyme family
  misc_feature (1)..(262): Xaa is any amino acid
CGYRVTVKEIGDGNLNYVFRAVEEATGKSIIVKQAGEQLRISAEMRITTDRNRIESEILIIQGKYAPGLVPKIFKYDTVMCACLMEDLSDHRLMRYALMEHQIFPKFAQDISTYMVNTLLNTTDVVMEHKEKKNLVKSFINPELCEITEDLIYTEPYNDAKRRNIVTPENLEFVKKELYNDKALHLEIAKLKFDFMNNAQALLHGDLHTGSIFVKPDSTIIFDPEFAFYGPMGYDIGNVIANLFFAWDNGDAAGNSSFCDWT

SEQ ID NO: 98194 - protein, 66 aa, Unknown
  Obtained from environmental sample
  misc_feature (1)..(66): Xaa is any amino acid
MTGLDVLKTIRNSDKLKKLPVIMITGESDKQNVIESIKCGANDFAIKPIDKKLFAEKILKAITTVK

SEQ ID NO: 98195 - protein, 169 aa, Unknown
  Obtained from environmental sample
  misc_feature (1)..(169): Xaa is any amino acid
MADKCAVEVNSFSKPAGFTGVRLGWSVVPKALKYVGGESINADWNRIAGTIFNGASNIAQAGGLAALDDEGLKEIRRLTDFYLGNAKLIKDALKNLGINCIGGDNSPYIWAHFPGRDSWEVFSQILEKCYVVTTPGAGFGPAGQGFIRFSAFGHREDVEEACKRLSTLF

SEQ ID NO: 98196 - protein, 269 aa, Unknown
  Obtained from environmental sample
  DOMAIN (188)...(221): Tetratricopeptide repeat
  misc_feature (1)..(269): Xaa is any amino acid
LGLLSDSSADYSDSADRYRLAQDHFIIARDYERRGFHEAAFELYEIAHGFWPRSGFLRRLLADEYMQRGRYDRALALFSEVGLSDLTPDELRTLSSLHQRLGNVDKAAEAMEALGDERSDEEMYTLVLLYESMGRKDKALKSFRDFFAGGRRPAGAGIKMVQFSVGERRLTDAESLAVILRSVYPNDAEIAALLGTVKYLVRDTASAITLFNEALKLDPKNEEALRTMAHINLVKEQYPEAIALYERLTALTAVAPIYKRGLAILLYHA

SEQ ID NO: 98197 - protein, 261 aa, Unknown
  Obtained from environmental sample
  misc_feature (1)..(261): Xaa is any amino acid
RFQYNRRDMRFEALRKRSNLIPAFLIRYADDFVVITDSRQHALWWKQQIQKFLWDKMKPTLSDEKTLITDVRKQYIHFLGYEYKVAKGKAKKGYISRTIPDKQRLKRKVQLLNEELKAFPTNWSREQVIHTINLINSKIRGIINYYTNCTWVYVALAKYDRILQLTAKRKLKKYKGKWIPANKTQNLVTVHQDHRAKIPAIKFRDIWIGVTSLTFCKWERPPLKKQEETPYTDEGRQIHFERTKKQRRNARLDEMLNLNTS

SEQ ID NO: 98198 - protein, 272 aa, Unknown
  Obtained from environmental sample
  DOMAIN (1)...(271): Aldehyde oxidase and xanthine dehydrogenase, molybdopterin binding domain
  misc_feature (1)..(272): Xaa is any amino acid
AVAWPNEIADNPAADNETTDDKAADKAAGKAAGRAADTRLVVYTATQWPFHVRRSVAQVLGLAASKILVEPTITGFHVDGKLWYPSLISCHAALGAWITQKPVRLILTRKEDFFFSPKRCESEINIENALDEKGEITGIAVNTTVNLGAYGINAAEILDHVNLGSLGIYKTKNIRLSSVAVRTNIPPQGPCAGFGLAQGFFAQERHVSHIADTLNLDPAQWRCDNSARDRIFPPGTTVKDAVPVKLLVDTVVKRSDYRRKWASYELLKHNRK

SEQ ID NO: 98199 - protein, 208 aa, Unknown
  Obtained from environmental sample
  misc_feature (1)..(208): Xaa is any amino acid
MIQLNTAADITSFLMQMIKENKDFIIPALNIPIDFTGPVTMLVVGGQGDVRQYTIELIVDTGEPRLLNFGFSKYDNEELVIDARGIINEANKTVTVNALYPVDMNYLSYKLIPSFQIQGDLLEIDGIPVVSGGTEVQFALGFGNQDKIIRVTRDGETKDYTLIVTFAEDPDTIRSITDFRFTKMNNPDIAANAVASIINTDNTGTISV

SEQ ID NO: 98200 - protein, 261 aa, Unknown
  Obtained from environmental sample
  DOMAIN (84)...(241): Cleaved Adhesin Domain
  misc_feature (1)..(261): Xaa is any amino acid
AIKLTVKASVKPDMPLFYQWYSTSNENYGGSVLISGATSNEYSITVTQAGISYYYCVVSADNGTCTERSTVAMVTVMSGCATYNVPFKENFEYTTFPPSCWTVQNVDGGGTKWERAETSPDGGSAAAVHSFSNSPQEGWLITPKILIPATGNYMLKFRSFNRYPESNNTNGYNGVLLAMAEDGFAPTSFKKELKQLKDSELSYSWKDIAINLSEYKNKTVYIGFKYKGDFADDWYIDDVEISEIPVISLKNLTEEQSLNVT

SEQ ID NO: 98201 - protein, 57 aa, Unknown
  Obtained from environmental sample
  misc_feature (1)..(57): Xaa is any amino acid
GRAEVSYKVNAPYAPDCERTLLWDDPDVGVEWPLTAAPILSAKDRQGIYWGRIFQGP

SEQ ID NO: 98202 - protein, 173 aa, Unknown
  Obtained from environmental sample
  misc_feature (1)..(173): Xaa is any amino acid
MPRKTESYIEEVITIFLKYAGKENLKDYIVYSVLELAANAKKANTKRVYFIERGLDITKNLDYTIGMEYFKESTLGNISHFLKLQEEKGLYIRLALQLRENVIHIEIRNNAAVVRTELARINDRMARSRQYQSLDEVFSQILDDSEGAGLGLIILVLMMRKIGLDEDCFNISG

SEQ ID NO: 98203 - protein, 80 aa, Unknown
  Obtained from environmental sample
  misc_feature (1)..(80): Xaa is any amino acid
MENKVAIIAIIVENRESVESLNKILHEYSQYLLGRMGIPYHQKNINIISIAIDAPQDKIGALSEKIGALNGVSVQVVYSK

SEQ ID NO: 98204 - protein, 159 aa, Unknown
  Obtained from environmental sample
  misc_feature (1)..(159): Xaa is any amino acid
MESSKLPNSKSARGSRLAGAVVAASVLAAAFVSPRSAQAVEINVIYSGETHAMLGPSSDPADPGGGLAERAAALGAFPRDTRLLIDGGGFAGGGVYDTYSAGRAADSVRTLKTLAAMGLMGYDAVGIGDDDLIYGGKWLVEAANRAAVPLVSANLFHAD

SEQ ID NO: 98205 - protein, 180 aa, Unknown
  Obtained from environmental sample
  DOMAIN (1)...(126): Homoserine dehydrogenase
  misc_feature (1)..(180): Xaa is any amino acid
ESDPTADVEGHDACGKLSILLSLASGRRAVCADIETQGISKLTEADFLCAKSLGYNIKLIAGARLSGLFAEASVAPRLVPHWHPLYNVNGVYNGVLLGAKSVGDVMFYGRGAGKYPTASAVVSDLVEVIRKINKNTNLYWSHETLDIVPTTHAERRMIRAERGETFETTVARLWPEAPNV

SEQ ID NO: 98206 - protein, 235 aa, Unknown
  Obtained from environmental sample
  DOMAIN (46)...(218): Semialdehyde dehydrogenase, dimerisation domain
  misc_feature (1)..(235): Xaa is any amino acid
VDNSSAWRMDESVPLVVPEVNPDDLVRHKGIIANPNCSTIQAVVALNPLHKAYHLKRIVYATYQAVSGAGMGGWRDLESEGEPTTFPFPIKGNCIPHIGDFCDNGYTKEEMKMITETQKILHEPELRVTATTVRVPVFTGHSEAINAEFEKPFELGAVAALLKNSPGVTVLDGKGGVAPYPMPLYAQGTDDVYVGRIRRDTSVNNGLSMWVVSDNLRKGAASNAVQIAEKLIKTE

SEQ ID NO: 98207 - protein, 245 aa, Unknown
  Obtained from environmental sample
  DOMAIN (83)...(243): ATPase family associated with various cellular activities (AAA)
  misc_feature (1)..(245): Xaa is any amino acid
MGTFSINPNNGDGPGPAFMGAAIQVGIPIKGANSEDSEEDEAFEDSPTDTQSETIGDTPPRGSPPDATREKFRAMLREGKLEDRKVEITVNQNPQFPAIEMMGGGMEEIEASLSGIAGFFGGNKKKKVVTVSRAREILINEESERLIDRDRVSDEARQRVEETGIVFIDEIDKIAVKGDRGGGPDVSREGVQRDILPIVEGATVNTKWGPVNTDHILFIAAGAFNMAKPSDLIPELQGRFPLRVE

SEQ ID NO: 98208 - protein, 264 aa, Unknown
  Obtained from environmental sample
  DOMAIN (197)...(264): Lon protease (S16) C-terminal proteolytic domain
  misc_feature (1)..(264): Xaa is any amino acid
VKRRFQRLSLGGMRDEAEIRGHRRTYIGSMPGRIIQALKQAGTRNPVVVLDEVDKLGTDFRGDPSSALLEALDPEQNFSFSDHYLNVPFDLSKVMFICTANHLETIPSALRDRMEVIALPGYTMQEKLVIAQRHLLPKMLKDNGLQEKELSIHAKAIERIIREYTREAGLRNLERELGSLCRKIARRKAEGRQGPFRVGAAQAPKFLGVPRFLDTEKEKDFKPGLALGLAWTPFGGEVLYIEASNMKGKGRLTMTGQLGDVMQE

SEQ ID NO: 98209 - protein, 261 aa, Unknown
  Obtained from environmental sample
  misc_feature (1)..(261): Xaa is any amino acid
LRLVRLLGALDLPVPPASAAQRAMLLDIGSGPLTLPLALWLAKPGWRELPLDVACLDASSGALEWGRALFARLAGEKSPWRIIPLRAGVHELARAVRGRPWLISAVNVLNELKAGRVPLEDRLAVFAGQAAKLLHPQGAFLGVEPGTRLGAKLVQSMRDVSLASGLAPARPCPHARPCPLRGTRRWCHFSLSAEGAPVWLAQLTREAGLAKKDLHLSFVLLQKQAAERPDTHRGGGTEVLEARIISAPFKVRGEESLARYA

SEQ ID NO: 98210 - protein, 76 aa, Unknown
  Obtained from environmental sample
  misc_feature (1)..(76): Xaa is any amino acid
MNLLAIDAACSVLSVAVARDRDYYYAQTEAGMKHSELVMEIINEQMEKAEMKPADLNGVLCMGGPGSFTGLRIGFS

SEQ ID NO: 98211 - protein, 82 aa, Unknown
  Obtained from environmental sample
  misc_feature (1)..(82): Xaa is any amino acid
MHGKIERPHAAAGVGADNRIVPLEALRGLAALTVVFGHFAGAFVIPWPEEFHFLNFLTNGGAAVPVFFVLSGFVLALPSLEG

SEQ ID NO: 98212 - protein, 129 aa, Unknown
  Obtained from environmental sample
  DOMAIN (1)...(120): Cytidylyltransferase
  misc_feature (1)..(129): Xaa is any amino acid
VLHPGHVQLLCEARSHCDRLVVGLNSDASVKRLKGPARPVQGEDARSIVLAGLAFVDAVVLFAEDTPIELIRRIRPDILVKGADYRLEQVVGHEVVAAAGGRVVLVNLVPDSSTTRIIDRLKADALRVA

SEQ ID NO: 98213 - protein, 255 aa, Unknown
  Obtained from environmental sample
  DOMAIN (178)...(201): 4Fe-4S binding domain
  misc_feature (1)..(255): Xaa is any amino acid
GRVYCSILCPLGILQDLLSRLGGKRRFRFSKGRPWLRAGALLVFLLAFLTGTSLIFSLLEPYSAFGRIATNLLAPIWQSGSNILALASERAGNFAVGPTPVWQKGFAALVAAAVTLAVIGVLAVRSGRTWCNTLCPVGACLGLLHRFALFQPWIDHEKCARCGVCAQGCKSSCIDGNMVMDSSRCVACFNCVNNCRNQAISYAPPRRTGVSAAREASGPDLARRAFIAAGLGLTGFPAIAAARNPDERPPDLTRR

SEQ ID NO: 98214 - protein, 278 aa, Unknown
  Obtained from environmental sample
  DOMAIN (243)...(266): 4Fe-4S binding domain
  misc_feature (1)..(278): Xaa is any amino acid
MPRLKPPFPAQRGYWKKPTNINNVETFANVPWIVSNGGAAFAAMGTDKSKGTKVFALTGKIKKGGLVEIPMGLPLREIIYEIGGGIRDGREFKAVQMGGPSGGCIPASLIDTPVTYEDIPATGAIVGSGGMVVMDDSTCMVDMARFFLDFTKKESCGKCNFCRIGTNRMLEILNRIVAGNGRDGDIELLEELSQRIKDGSMCALGQTAPGPVLTTLRYFRNEYEDHIYKKKCTAKSCRALLTFTIDAEQCKGCTLCKKNCPVGAISGETKKPHMMTTK

SEQ ID NO: 98215 - protein, 251 aa, Unknown
  Obtained from environmental sample
  misc_feature (1)..(251): Xaa is any amino acid
IGDPNAKKWIGNQWHGTNAELRDLEQPFLRMRSWSEASGIPVILGEFGTIDKADMASRARWAAAMRELAESFGFAWSYWDFCAGFGIYDPVKKQIRDPLAQALTGAAIHSAYGERRGLPKMIIKEQDGFIGPTEIITNVSIICDQWTGISYFYTEEANVVIELNGPDKVHDWAQIFIPMLEIKDTGADFSFNYAELTFRNINRSITDFCINMENTYSYGTKNYRETQIFWPSKNELLDGNKNDIIQNADGT

SEQ ID NO: 98216 - protein, 282 aa, Unknown
  Obtained from environmental sample
  DOMAIN (30)...(174): GAF domain
  misc_feature (1)..(282): Xaa is any amino acid
VTEEVEQREKLLNMVNSVANVLLSINNYESFEASLYKSFELVGHCLDIDRVQIWRNEVIEGELHFVNRFEWLSDIGLNSVPVPIGLHFPYSQKPEWESLFFRGKYINSPISDLPENDRDFLNLFGMKSIVIIPMFLEGNFWGVFSIDDCRRERAFSDDEIRILTSVGLMMSNAVNRNLQIAKMRETDERTQIMLDATPLCVNFWNKELQNIDCNQEAVKLFNFSNKREYLDRFYELSPKYQPDGRLSSEKAVELVRKTFEEGYCRFEWMHQKINGEPIPCDI

SEQ ID NO: 98217 - protein, 276 aa, Unknown
  Obtained from environmental sample
  DOMAIN (1)...(272): Aconitase family (aconitate hydratase)
  misc_feature (1)..(276): Xaa is any amino acid
MILGSDSHTRYGALGTMAVGEGGGELAKQLAGRTYDMAYPQVVGIYLEGEPANGVGPQDVALSIIGAVFKNGYVKNKVMEFIGDGISKLSVDFRNGIDVMTTETTCWSSVWKTDSQVKTYLEQRGRGGDYRELKPGGAAYYDGFITVDLSEIEPCIALPFHPSNVYTIKELQHNAKDIFAKVEEENKASGLNMKLGLKYHDGGVWADQAIIAGCSGGIYSNIMAAADILNGHSTGSGNFSMSVYPESQPTYLELVKNGAVETFMKAGRTCTGSLLR

SEQ ID NO: 98218 - protein, 175 aa, Unknown
  Obtained from environmental sample
  DOMAIN (72)...(175): Poly A polymerase family
  misc_feature (1)..(175): Xaa is any amino acid
MNAEYNAAVFICEIIQRAGHQAVFAGGCVRDMLLNKPYSDIDIATSCPENELISILVSNEINTKSVGKAFGVTLAQIGDCQFEIARFRKDINCDGRHPEEVRFCSMEEDAQRRDFTINAVFYDPIADKYHDFVGGIEDIKNKRLRFVGSLIERLSEDYLRVLRYVRFCAKGLSRI

SEQ ID NO: 98219 - protein, 58 aa, Unknown
  Obtained from environmental sample
  misc_feature (1)..(58): Xaa is any amino acid
MKNELLRELEARGLLFQASDLEGLSDWLDGGPRAAYLGMDPTADSIHVGHLVPAMIVR

SEQ ID NO: 98220 - protein, 262 aa, Unknown
  Obtained from environmental sample
  misc_feature (1)..(262): Xaa is any amino acid
TASSMAILKDLSIYYRESYKLEVRQKITQGMSAGEATPENIKKKMPSVMPGSPFYKELIDEIIKEDYSKDGQDMKDTILNSLKVPMAKQKAVKAPVNFKLILLDGIQVIGGASASLTEILTKLDENQTIMESHKKGFMQMVKELIRQITNAEPEEVIYTVEYLDQTKDVPVKERVSFHHLRDELEKKIRFLTSLMKGPAYQKLSAMSEEQIIGYLERNITEMQNYHRTLGALDDFFKAKVTPENRDKIKGIKPELSALKNSY

SEQ ID NO: 98221 - protein, 143 aa, Unknown
  Obtained from environmental sample
  misc_feature (1)..(143): Xaa is any amino acid
VEELEDAEPAEDLHEDSSAPAETAEMQSLEDADNLDEIEDLNSLDEIEDVNNLDEIEEAEEIDEEIDEVEELEEEIEEFEEVEEELDEFEEAEEEKTYTEIHLSKGLLKAANETLSKIKKKELLKSADKLVNTEEPAAESEYK

SEQ ID NO: 98222 - protein, 248 aa, Unknown
  Obtained from environmental sample
  misc_feature (1)..(248): Xaa is any amino acid
TRYKTNLNRMDCSPGTFEHARYAANSMSRFDGYPNDGSSWLQRSTNEVGDVIAGTVVNLTGIGKSVISIKNNVTDMANKIRSLVESVNLTKAFIKQNTKWGGGKLVSNVLENGTIQRGTDGGEESGIMIGNYGFQISLSELDKLMTRAIFTVDEYIEARFPDTSTRAGLRPAEKRELYEQYLKDNGLLYTRLSDIGIRSDQSNEGVYVIEESRLMECLSQNPEAVIKLFTFTNGDRDFPANNTVFVYE

SEQ ID NO: 98223 - protein, 275 aa, Unknown
  Obtained from environmental sample
  DOMAIN (38)...(275): Phosphofructokinase
  misc_feature (1)..(275): Xaa is any amino acid
TEAISDKEKIREIFKNTYGKPLASFKKGKHEKIRRELKVGVILSGGQAPGGHNVIAGLFDGLKKANPASTLYGFKGGPSGLIDNKTVVLTKEHIDEYRNTGGFDIIGSGRTKIETPQQFASSLQTAKTLGLDAVVVIGGDDSNTNAALLAEYFVANGSNTQVIGCPKTIDGDLKNEYIETSFGFDTACKTYSELIGNLCRDTNSAKKYWHFVKLMGRAASHIALECAFQTQPNICLISEEVEAKHYSLDNIVDQVCASIAKRADKGENFGVVLIP

SEQ ID NO: 98224 - protein, 267 aa, Unknown
  Obtained from environmental sample
  misc_feature (1)..(267): Xaa is any amino acid
AGAVIPESVRLTLDRRKIADVELNKYGVFRYELPDFYSREDGSVAVSAAFQTPSGELVTSHENLLRVVQYGPVLNITSHKDGDVITGRPWLEGTALMFRPIGENADRRAKALYGVAKVELSFDNGRSFAQARGTGEWKYRLETGEMDVGILPIIIRAVFNNDEVAVRRILLIVDPVRPVVNVIGPAENSGYRTTLEVFGSSLDNYNVDGVEVSLRPGNKIGYSVPDFIQGLYFDTHILGSMNFCSGVGLSFFKDNVKLQFNVSQAPP

SEQ ID NO: 98225 - protein, 242 aa, Unknown
  Obtained from environmental sample
  DOMAIN (154)...(242): Aspartate/ornithine carbamoyltransferase, Asp/Orn binding domain
  misc_feature (1)..(242): Xaa is any amino acid
MAREQFEGRSLLTWLDYEADDIRYLLELSKNVKAESRRGEVHNRFAGKTIALIFEKRSTRTRCAFETAFGEEGGHPVFLSTQDIQLGAKESIEDTARVLGRMFNAIQFRGFKQSTVETLAKYSGVPVYNGLTDDYHPTQALADIMTLDECFGSSRGKKLCFVGDGRNNVARSLLVICSKLGVDFTIITPAVLNPDWALVEKCAPLSAASGAKLRITDNLDEVEGANALYTDVWGFHGRGSQE

SEQ ID NO: 98226 - protein, 169 aa, Unknown
  Obtained from environmental sample
  misc_feature (1)..(169): Xaa is any amino acid
IHAIIARHFKYKLSIHSGSDKFSVFPAIGKETRHIFHVKTAGTNWLEAMRVIAQVDPCLYREIHKYALSVFNEARKYYHVTTDLGKIPDVDSLANEDLPKLFENNDSRQLIHITYGLILNRKNDNGKTPSFTFKDKLYDLWQKHEDQYNQLLFRHIGKHLDLLGIRKGD

SEQ ID NO: 98227 - protein, 201 aa, Unknown
  Obtained from environmental sample
  misc_feature (1)..(201): Xaa is any amino acid
MFDLLEIGRRCNDIVKNKFKICCFCIDKDIEDFYDYTSYTNKGYCRSRMWSQYGNSHKGVCLIFNKDRLLEIIKSSFKNVFAGEVHYKNNLSNLLDVTDIDYDIDRKIKPLERVIKYINEYLFHKFTDYKSEQEFRIALHSDDNNDSILIDFNNSLEGIILGVRFPEVYKDNIVNSMNARELLVFQLSFVNGEYYIDEIAK

SEQ ID NO: 98228 - protein, 267 aa, Unknown
  Obtained from environmental sample
  misc_feature (1)..(267): Xaa is any amino acid
GLDPNLPYDLQKSGKWTWDEFLNICKKLTRDINNDGKVDIYAMPRDLSTEILDALVSSNGAMYVSRDPKTGKLFNATNKPEFIEAVQFFLKLRDEGVMMPRPEGSEWNWHIPAFNDGKVAVRIDAQYIVNGDLQNMKDDWGMVLPPKGPRAKNYTVFTDENVMVIPNTYNRDQADAIMWAVQAWNTPIDNNWKASLYQIYRDRRAIDETWEYIRNPSLQMWKNHLHVPGLERGGIAWEIWYHEGEAAQLIEAVSQQWNALIKDANDY

SEQ ID NO: 98229 - protein, 290 aa, Unknown
  Obtained from environmental sample
  DOMAIN (1)...(63): Bacterial Ig-like domain (group 2)
  misc_feature (1)..(290): Xaa is any amino acid
AGSETLQPTVEPGNATNKDVEWRSSAPGVATVSASGQVTAVAAGTAVITARTLDGGRAASCTATVTAGVTDVTLNRRVLSLVRGYSETLVATVWPANASNKGIEWSSSAPEVASVSQDGRVTALDLGSATITAAALDGSKKATCAVAVALETIHVTGVALNRSEMSLEAGGATGELYATVSPADATIKDVVWATSNSGVATVSGDGHGAVVTPLSNGVALISVTTVSNGRSAVCTVRVTGPVAVTGVALNKTTNTLGIGVGETLVATVRPSTATNQNVTWASSAPTIASV

SEQ ID NO: 98230 - protein, 252 aa, Unknown
  Obtained from environmental sample
  misc_feature (1)..(252): Xaa is any amino acid
VAVELVNAVGKSVGRQSANLQLGGWFMPDGGALSGTTAPYLRPPVKIEFSGVDVKDIDGLTIRVVSVNSIPAERAASQMGLRILPQDEYDSIPSITDNGLQIANLQLFDIQFEQGKNLLKGYKGSTYAAIPYGVTYINYSSGLVKKGLTSVKIPSSVTVIESSAFSENLLTSVTIPDSVTSIGEGVFRDNRSLTSVFMGNSVIFIGERAFESNRLNTLTIPDSVTSIARFAFIYNDTRSITIGANINWDELW

SEQ ID NO: 98231 - protein, 265 aa, Unknown
  Obtained from environmental sample
  misc_feature (1)..(265): Xaa is any amino acid
EKLLEVYELCASTGVKDRAGTVMYALGQTQSTIGVQKIRSLCIMQLLLGNIGICGGGVNALRGEPNVQGSTDHAILYHYLPGYLPVPRAGKQTLEEYIRAITPVSKEARSANWPGNMPKYAVSLLKSWFGDAAAPENDFGYSWLPKCDDDQNCDVLHMIDDMYAGKIKGYFCIGQNPCGSLPNANKVRAAMTKLDWMVHVNIFDNESASFWKGPGLDPKKVKTECFLLPATANFEKEGSQANSGRWMQWLHRAVKNPGACLSTGA

SEQ ID NO: 98232 - protein, 149 aa, Unknown
  Obtained from environmental sample
  misc_feature (1)..(149): Xaa is any amino acid
MENKERAGKRPPLPDKIHPALITAWAAIVAVGHLLPTIPILGTGGTFSLTAVLSPLSGIFFGPVTGALCSAAGGFIGSLIAPHTAWIGMGTFIIGTTTAFTSGCIAWGRWPLVSVNRSGHFIINGGIIVYIIGTILWFTQETGRSIVLF

SEQ ID NO: 98233 - protein, 71 aa, Unknown
  Obtained from environmental sample
  misc_feature (1)..(71): Xaa is any amino acid
ELGKLWQQLGLTVILVTHDIEEAVFFGDRIYMLNEGKLEGEIPILLKHPRDYRSAEFQEHCREIEARLVPR

SEQ ID NO: 98234 - protein, 138 aa, Unknown
  Obtained from environmental sample
  DOMAIN (28)...(123): D-Tyr-tRNA(Tyr) deacylase
  misc_feature (1)..(138): Xaa is any amino acid
MKAVVQRVQEAAVSVDGVVKGSIRSGLLVYLGVAHNDTEADADWLSEKIAYLRIFNDEDGKMNLSLKDLAAADSQAGVLAVSQFTLLADARKGRRPSWNGAAAPEKAKQLYEYFIDAVRKTRTCLRMRRVSGAHEGYI

SEQ ID NO: 98235 - protein, 100 aa, Unknown
  Obtained from environmental sample
  misc_feature (1)..(100): Xaa is any amino acid
DNPSFADVKSESAIYRNVYVIWKGMATNVTVTDEGTSFDFLVGYDTRKTLEGIIPVVFSAPVAINMERPLEVLGKITLGFSYSDIKLEGVAIHQSGKLEN

SEQ ID NO: 98236 - protein, 87 aa, Unknown
  Obtained from environmental sample
  misc_feature (1)..(87): Xaa is any amino acid
VPGPPEGCAGAEGELAPGPPDGCDGEEGELAPGPPEGCDGAEGGLAPGPEGWDGAEGGLAPEPPDGCDGVGGEFVPGPPEGCDGAEG

SEQ ID NO: 98237 - protein, 96 aa, Unknown
  Obtained from environmental sample
  misc_feature (1)..(96): Xaa is any amino acid
MTIKERMACCQLFTDNDDHYPEEAEELARARQRGKTLCYEINRLHPDDIKGRFTLMKQIFGAMGDHVWMEPPIYMSYGSNTYLGDYIYINFGLTRS

SEQ ID NO: 98238 - protein, 243 aa, Unknown
  Obtained from environmental sample
  DOMAIN (2)...(201): 3'-5' exonuclease
  misc_feature (1)..(243): Xaa is any amino acid
MYRTVTTLGGVREYLSARKGDALAFDFETAPDEPYRDEERAALDPHKAHIVGISFSTAEDSGIYIPLTHKVGKNIDAPTALWETLAELFASGGCVKVAHNLAFESAFLYSRGIIVQEPCYDTIAAAQMTLKGNTGFRKLADSGLKTLVPELFKLDLPTFGEVTLGRHFDELDPADAETIRYACADSDFTLRLYHLLNGWFDRWLPKHRTIVERIESPTAVYVGLMRYNGILADTELMARKAAE

SEQ ID NO: 98239 - protein, 249 aa, Unknown
  Obtained from environmental sample
  DOMAIN (1)...(131): PHP domain
  misc_feature (1)..(249): Xaa is any amino acid
ANREGYFNLVKLCSLAYTEGFYYRPRVDEELLKQYHGGLIALSACVSGEIPRLIRAGKTAEAEQKALHYRELFGADEQGNPNFYLELQDHGIPADVLRGSLSQREINREIIAISRKTGIPLVATNDVHYLNREDYIAHDILLCIGTAKFRTDEKRKKYFGEQFYFKTADEMARLFADCPEAVENTVRIARRCAADVPKIGVKELTRYLPDFDIPPDFENADVYLRHLAVEGLAKRYAKEKSGRQVLNGG

SEQ ID NO: 98240 - protein, 263 aa, Unknown
  Obtained from environmental sample
  DOMAIN (171)...(242): HAMP domain
  misc_feature (1)..(263): Xaa is any amino acid
MAYFNGPNAKNDRVEHPIPRTIEGKDTHLLRIMVPVINPRTNEVVGGVGCLYIIDAIQQGVTDTIKANDVIAAMVIYSSNGLIIGHLVPERIGKMLIDVETIYGQYIQEADQAVKNGKEFSCSTYSPVLDSKVQIVMLPFQIGSSDKTWSVMMVVTDEYIMKDVNAITGFTVILTAIAIVIAAVIVYFVLNSTTKPIVKVADNLKDISEGEGDLTRSITVNSKDEIGDLALYFNKTLEKIKNLIINIKKEATDLGSTGNDLAT

SEQ ID NO: 98241 - protein, 94 aa, Unknown
  Obtained from environmental sample
  misc_feature (1)..(94): Xaa is any amino acid
EGVASSGTAKDVFRNYPIKVAAKTGTVQSGDKIENSAVFIAYAPAEKPEIAVAVVVEKGGTGSGVASVAKGVFDYYFVSTVNTRGLPADGVLLR

SEQ ID NO: 98242 - protein, 233 aa, Unknown
  Obtained from environmental sample
  DOMAIN (1)...(177): Respiratory-chain NADH dehydrogenase 51 Kd subunit
  misc_feature (1)..(233): Xaa is any amino acid
VIANAAECEPYLTTDEAVISEKPGVLVKGLAIVMKVLGVNRAIIGMEDNKASLIPVIEKEVSQLNYPGEIKIGLCRTLYPQGGEKMLITALTGREVPSGGLPMDAGCVVSNAGTLVAIAEAFTLGKPLIDRELTVSGGACKTPKNIRVPVGTILTDLPKEFIDIDYERLRKVIFGGPMMGFAVPAPDAPIQKNTSGIILMTQEEISVHEEKVCIRCGRCIRNCAMRLSPVVVN

SEQ ID NO: 98243 - protein, 265 aa, Unknown
  Obtained from environmental sample
  misc_feature (1)..(265): Xaa is any amino acid
ALLTAYETPDIAIILGPPGTGKSALIRAIAKAIEERDKPLNGTLLTAYQHDALDSLMENATVNGLPCIRYGGKDKNAAKILSDGLADQIMKKAEELAKMYPEYDKKGILYTIKDQIAALDYMQLSFNNVCYYIDGIIDSVKKYLPESTLRKLRDLRVKYAAKTNVKENIIPVASAVSRLRCNKTAYEDDGEFRFEEVKNYLDRFELLKDNKIKEAIREYETAIKAGKFDLALEHRSRLVAEITADREPIINESEKQELREILRGM

SEQ ID NO: 98244 - protein, 91 aa, Unknown
  Obtained from environmental sample
  misc_feature (1)..(91): Xaa is any amino acid
VTRNYKELLEYIESTEYEIIIMGHSCGISDKTLLNTLFEHENCLSIKLFYHKINDETDNYIDVYKNISRIFINKQRMRKIVLNKQDCEPLI

SEQ ID NO: 98245 - protein, 90 aa, Unknown
  Obtained from environmental sample
  misc_feature (1)..(90): Xaa is any amino acid
MSEREKWRRIIRKCFGAPAMSEREKLSCLIDQAAGRLQANLLITNCRLDDVFNQTLIDGPLAVGGGFILRWGEGYEAEKTLDAGGGIVLP

SEQ ID NO: 98246 - protein, 240 aa, Unknown
  Obtained from environmental sample
  DOMAIN (88)...(177): Mur ligase family, glutamate ligase domain
  misc_feature (1)..(240): Xaa is any amino acid
AVNADDPKLRALTGASGTFGFGGEATFGGTVKETTKLSTTIAAGGITATLPLPGAHNASNLLAALCVCKHLGCDDNRLSEAAAHYKGVDRRFAVTRTTKGVTVIDDFAHNPEKIRAAASAAKHLSDKIIAIYQPHGFGPTRFLKNEYAATFKEVLRPTDTLCLLPIYYAGGTAVKDIESKDIIELMGDVPFKAVAVNNRDEVIDLINKSVHPDSAILLMGARDPSLSSFAQRIINFLNEE

SEQ ID NO: 98247 - protein, 65 aa, Unknown
  Obtained from environmental sample
  misc_feature (1)..(65): Xaa is any amino acid
MRMQGMGITKRAMLSRATAAIRGKTLIINLPGSPKAVRENLEFIIGELKHGLDILTGSEGDCALP

SEQ ID NO: 98248 - protein, 277 aa, Unknown
  Obtained from environmental sample
  misc_feature (1)..(277): Xaa is any amino acid
ADETSAWWGGRRERLLTLASAPLGGRLQKALAPLAELLAKIAPEGLDLAIQTQAVAEFYLPRLRDLYPDDWPDRQSDLRELLRMAGERDDLRLFLDELALDPPNQKRVAPEEKRETLTLSTIHSAKGLEWKAVFLLSAVEGRFPPAYSARTEAELEEERRLMYVAVTRAEDLLYIMLPLGLIDRWSGALAAPSRFLADLPPGSGLAGLSENLRPPTARPSARPWPDQAPPNPPAARKDFLTDLAIGQRVSHPVYGAGRVAEILGPRAVIDFDLSGKR

SEQ ID NO: 98249 - protein, 72 aa, Unknown
  Obtained from environmental sample
  misc_feature (1)..(72): Xaa is any amino acid
MKDPIRFRFAGIFMILAMCAVFGLAAMLLWNELMPQLFALPQISYFQAVGLLILARLIFGGIGGGGWRHHHH

SEQ ID NO: 98250 - protein, 294 aa, Unknown
  Obtained from environmental sample
  misc_feature (1)..(294): Xaa is any amino acid
KSAFVVWALWVAAQIALIAYYWGYPQRSDMAMYISYAQRCFANREWYPMVEDIYSDSICAPGFINYLILQLHIFGTINFNAVINLFLNIAMLFEVYYLSKKFFSKRVGLISTIIFCLLSSNLFIVLGANTENPFLFLCLSALCLVFSNKWKYIVVASVLLALANWIRPLAIIFLFSSVAYFVITRTKAYNYIALLIPCVLIALTIGVMTEKKIGYFAYQSTIGGINLLVSAHDRPNGNFYYFGGAFGEHDVDFIENIHLLTFAERDSIYMDRSLTWIKKHPVKFTALFFVKIPI

SEQ ID NO: 98251 - protein, 137 aa, Unknown
  Obtained from environmental sample
  misc_feature (1)..(137): Xaa is any amino acid
TLVAYPEGAGNSFTIPNSVTSIESFAFSSCYNLTSITIPDSVISIGYGAFLICKSLTIVTIPDSVTSIGNSAFRGCRNLTSVMFETGSSIADANFGSSAFPEGNDLDGGDTLRTAYSTGKAGTYTRAINGTTWSKSL

SEQ ID NO: 98252 - protein, 220 aa, Unknown
  Obtained from environmental sample
  DOMAIN (1)...(189): ATP-dependent protease La (LON) domain
  misc_feature (1)..(220): Xaa is any amino acid
MISIFITYKSGIAAIEEALKRDLRLFAVCLKSAETAASDQKTEETWDAGTVVRIVQNLRLPDNTFRVVLQGEYRALLTSLHPKNDFNLASIDPIKAENPDPPAREKSEERTQEIAGLMRAVQKSFAQYAEFTKKIGTEILSAVEKTENPEKLVNIIANAMSIKAERKISLIRIADPASRLEKLLETLELENEIFGIQKNISGKVKSRMDKNQRDYILHEQ

SEQ ID NO: 98253 - protein, 88 aa, Unknown
  Obtained from environmental sample
  misc_feature (1)..(88): Xaa is any amino acid
AGIPVLTFLAAVRGQRKGSNIAKAMADGPYNKPFKPNRTSFDWISRDENEVDKYVNDPFSGMLCSTAFLQGTCEVVVSYSPRRRNGED

SEQ ID NO: 98254 - protein, 76 aa, Unknown
  Obtained from environmental sample
  misc_feature (1)..(76): Xaa is any amino acid
GTSARQITYVTDRAGHDLRYAIDASKIQRELGWIPSVTFEQGLEKTVDWYLANEAWLNSVVSGDYAKYYETQYGGR

SEQ ID NO: 98255 - protein, 265 aa, Unknown
  Obtained from environmental sample
  DOMAIN (1)...(265): 3-beta hydroxysteroid dehydrogenase/isomerase family
  misc_feature (1)..(265): Xaa is any amino acid
GYIGSHTVVELQNAGFEAIIVDNLSNSSAEVVDGIARITGKRPAFEKLDCCDCERLNKLFETHKGISAIIHFAASKAVGESVQKPLLYYRNNLISLINLLELMPKYGVENFVFSSSCTVYGQPDELPVTEQAPRKPAESPYGNTKQICEDIVSDTVKSGAKIKSILLRYFNPIGAHHSAEIGELPLGVPQNLIPFVTQTAVGIRPKLSVFGNDYSTPDGSCIRDYINVVDLAKAHVVAVKRLLENKNKKPVETFNLGTGRGLSVL

SEQ ID NO: 98256 - protein, 210 aa, Unknown
  Obtained from environmental sample
  misc_feature (1)..(210): Xaa is any amino acid
MPNLENEGKQEAAAGAAVGSAEGGMPAPVNAEESLANAFGGAAGAEGKKPDAKPATGDAAAGGKQAGSEKIELAAWCDQLPPEMKNNPESAAKLAKYQKVGDMAKAFLELDTKAASGGIPGKDAKPEEVAAFWEKAGRPKTADGYSFAKDKESDGAVFAEAAHKANLTAAQAEALFKNLNEAGAARLNAVMREQARQMKDTADALRPNTA

SEQ ID NO: 98257 - protein, 226 aa, Unknown
  Obtained from environmental sample
  DOMAIN (1)...(226): Domain of unknown function DUF140
  misc_feature (1)..(226): Xaa is any amino acid
LKDFIAALGRWVINKSTSTGNIACLFWQTFLSLGKSNIKETIKQMARLGVDSLPIVLITTTAAGMVFAVQTAREFAKLGAADSVGAVVTIAMGRELVPILSGVVVAGRVGAAITAEIGSMKVTEQIDALRVMAISPVTYLVAPRFWACMLMLPVLGVFANVVGSWGGYWVANLYAGVTSYSYLNSIKIFCVPFDIVGGLIKCMFFGGIIAVIGCHKGLTTVPGAEG

SEQ ID NO: 98258 - protein, 238 aa, Unknown
  Obtained from environmental sample
  DOMAIN (33)...(109): mce related protein
  misc_feature (1)..(238): Xaa is any amino acid
MNNETKVGMAVIAGLVVLMGMVSFLGLFRFASDSYRIYIKFPRATGLKPGHNVNYVGVPVGQVDKIEVTDNSARVSALIKKNVQIPEGSYFWLGAEGVMGGMYIDIDPPNAPSGNYLLPDAEVQGSQVAGMNDLMMTAASMLQKLGVITDALNKVLGDRDVQEAIIATTRNTKEITDNVNAMTKMLAEVVRQNQQDVNKMIKQMGSMAETLNQTAGRANAMLAGLDNNGQTVRDAIET

SEQ ID NO: 98259 - protein, 287 aa, Unknown
  Obtained from environmental sample
  DOMAIN (80)...(217): GatB/Yqey domain
  misc_feature (1)..(287): Xaa is any amino acid
TTVLFDADTKQTKTMRKKEYAADYRLHVDPDIPLVNIEKTVDDSYVDEKTLPCAIETILIKAGVRPQDAKFFTNDSTRSSMFMAIYSQLNDPLFVAKTLLNNVKVEEYESVHNIEALCFLFTAYKSQKISIIILQEALQSLIKDNSFDYVAFVESKSISDEALDAKIDEILLRNQSIANEIKSGNLSKINILVGTAIKLTGNSVSGKIVKQKIIEKLSVKAPQTPVAGKKTNEPEVKAIQTKVVNSDVVIVKEQYRTHHISEISIINLNEDVILSGWVASVRDHGEL

SEQ ID NO: 98260 - protein, 266 aa, Unknown
  Obtained from environmental sample
  DOMAIN (1)...(266): Cell cycle protein
  misc_feature (1)..(266): Xaa is any amino acid
MRQSILAVIGIILFLVFSRLNREGFRKLVPLMIFGTLILCGLTLIPGVGIEKNGARRWLGFGTNPANPSEPRITIQPSEFLKISLPFYLAHILTKKSGYINNLMKGLLPPAIIVGFSFAIIYSQNNISTALFILVNSLAVFFLAGVQIRWFISAVTLIIPLVVLMILREQHRFDRIRNFIFSAQIDPQREGFQLYASLRAINSGGFWGKGLGQGTWKVAGIPEVHSDFIFSAFAEETGLLGVILFVALFTVFAYRGYRAVLKNEDT

SEQ ID NO: 98261 - protein, 58 aa, Unknown
  Obtained from environmental sample
  DOMAIN (7)...(56): Phd_YefM
  misc_feature (1)..(58): Xaa is any amino acid
MAVNLAADIKPISYIKTNAADMMKYVTDRRNPIIITQNGEAKAVLVDIQTYQETQDAF

SEQ ID NO: 98262 - protein, 63 aa, Unknown
  Obtained from environmental sample
  misc_feature (1)..(63): Xaa is any amino acid
MKNKDYSALLGKIGVTDTDLRPSGTVLIDDEIYDAKTDGEFIEAGRGVRVSRVKGKKIFVIRV

SEQ ID NO: 98263 - protein, 68 aa, Unknown
  Obtained from environmental sample
  misc_feature (1)..(68): Xaa is any amino acid
MIIYHGSDTPVKIPKILISNRLLDFGEGFYTTSSLEQAQRWAKRVREVRKTEEQIVSIYEFDRDKAEK

SEQ ID NO: 98264 - protein, 225 aa, Unknown
  Obtained from environmental sample
  misc_feature (1)..(225): Xaa is any amino acid
VFFDKDAVPGETGPIDAPGQLLSITPAHPGEFVKIDGRTLEFRPAAPWEPLKRYKVVSRKNTRELFTLLPDPESVFCGQVGGGDDIPIGKTKRSASEEEYEESYDSYDSDDDDDGYRSYRRYSGNDDDGRWKPKVNLASTRHLADAEPVKWVGFVFSSKVDAGGLSRLISVETCPLPGVDSRGCRVLRQSEYRVREDILGAKSFAYRVMFNEPIGYGQRVKIKLG

SEQ ID NO: 98265 - protein, 51 aa, Unknown
  Obtained from environmental sample
  misc_feature (1)..(51): Xaa is any amino acid
DRQTGDKIADLLFSLNREHGTTLIMVTHDLQLAARCDRCLRLVNGQLQEEA

SEQ ID NO: 98266 - protein, 243 aa, Unknown
  Obtained from environmental sample
  DOMAIN (32)...(214): Semialdehyde dehydrogenase, dimerisation domain
  misc_feature (1)..(243): Xaa is any amino acid
MNREQIKTLAGTGPVIVGNPGCYPTGASLGMLPALMMGLAESGTIIVDSASGITGGGREPQRSFHFPECSDSISPYKVGAHRHIPEITRNMHKMAAIFGSPLPKLVFTPHLAPMNRGILSTIYIPLTKEWQPPAQFGPASSPRPPSKEIEEKTEEIRGLYEEYYKGEPFVRVLPQGVMASTGHVRQSNFCDISVNMDQGGDTLIVITAIDNMVKGAAGQAVQNMNIIMGFDETEGLETIPSLF

SEQ ID NO: 98267 - protein, 270 aa, Unknown
  Obtained from environmental sample
  DOMAIN (10)...(269): tRNA synthetases class II (D, K and N)
  misc_feature (1)..(270): Xaa is any amino acid
TFPLQKKRHSDEFLRTIAHLRPRTNKYGAAFRIRSEAAWAVHDFFRGEGFHYVHTPILTGSDCEGAGEMFRVSTLPPDAGLTPSGNRFAGDFFGKECSLTVSGQLEAEAMAMGLGKVYTFGPTFRAEHSNTPRHAAEFWMIEPEAAFADLVDNMDLGEGLVRHVTRHILSRCGPDVELFDRFVSPGLIADLQTLESKAFVRIPYREAVDVLGKCGKQFEYPAAFGADLQTEHERFLTEEHFHAPVTVYDYPKTIKAFYMYLNDDHETVSA

SEQ ID NO: 98268 - protein, 120 aa, Unknown
  Obtained from environmental sample
  DOMAIN (42)...(108): DNA gyrase B subunit, carboxyl terminus
  misc_feature (1)..(120): Xaa is any amino acid
DAPACGWRLCLLGNPTALPHKGWQQETYHFSDEDKDEMLRAIKESGKKADLQRYKGLGEMNPDQLANTTMLPETRVLKQCCVEDAIKADQIFSMLMGEEVEPRRRFIEENAYKVLDKLDV

SEQ ID NO: 98269 - protein, 267 aa, Unknown
  Obtained from environmental sample
  DOMAIN (1)...(267): Bacterial DNA polymerase III alpha subunit
  misc_feature (1)..(267): Xaa is any amino acid
SYGLGITNVDPLRHNLYFGRFLNLARPDPPDLDIDFAWDERDELIQAVIEKFGRDYCARVANHNMFRYKSALRETAKAYGFGDAEITAIERQLFHTGDKSSVDNPLWQEILSIAKKIEGLPRGLGMHCGGVVITPEPIYKYVPIEKSAEGYPLIAWEKEGVEAAGFVKIDLLGNRSLAVIRDALKNLEEQGIHIDRNMWRPIDDKKTVEALAQGDSMGVFYIESPAMRQLQKKTNKGDFPHVVIHSSIIRPAANRFISEYVRRLKGG

SEQ ID NO: 98270 - protein, 72 aa, Unknown
  Obtained from environmental sample
  misc_feature (1)..(72): Xaa is any amino acid
VGADSLLIVEDSFVQAKIIRKEFEALTDFSILVARSLSEAEELIAANKEDLCAAIVGLSLPDAPNGETVDAC

SEQ ID NO: 98271 - protein, 274 aa, Unknown
  Obtained from environmental sample
  misc_feature (1)..(274): Xaa is any amino acid
VLGILCDSLNYYTGGTASDRNCTQETVLRGLGWRVCRTWALDWWDNSEKELERIRVEIEAAVHAENERKTAVAPSVAVVESEKPAVTRADSFERFEKTEDNISGRVLVQYALAQLSEVTEFLGNSEYFATYYSTDIIRRQISTVLEAEAPVSRNVLCKRVLEAWGISRMGSRISKRFDEVISNMHVKFTKLGDAIFYWTDGMEPNKYDDFRVPIKEDEKTRRNLDDIPPEEIASAVKYILIQQIGLLREDLEREISRLFGFARCTEAMQKCIRA

SEQ ID NO: 98272 - protein, 117 aa, Unknown
  Obtained from environmental sample
  DOMAIN (2)...(116): S-adenosyl-L-homocysteine hydrolase
  misc_feature (1)..(117): Xaa is any amino acid
IKITNIKPQVDKYTFPDGHSIILLAEGRLVNLGCATGHPSFVMSNSFTNQTLAQIDLWKNRGKITKGVRTLSKLLDEEVARLHLAKIGVSLTELTDKQAAYIGVPKTGPFKAENYRY

SEQ ID NO: 98273 - protein, 193 aa, Unknown
  Obtained from environmental sample
  misc_feature (1)..(193): Xaa is any amino acid
MPINEKSVSGYSALTGKIINVPDMYNLPKDVPYSFNSTFDKTAGYKTISTLTFPLITADGRILGVIQVINKKDDKGNVIVFTKEDGFLITHFAANATVALQQAYITRAMILRMIKMAELRDPKETGTHVNRVAGYAVEIYDRWAHNHHIPTEERESFRDVLKIGSMLHDVGKVAISDMILKKPITFTPEEFQI

SEQ ID NO: 98274 - protein, 175 aa, Unknown
  Obtained from environmental sample
  DOMAIN (5)...(74): HAMP domain
  misc_feature (1)..(175): Xaa is any amino acid
MLVCVAVFVLFISVINSILTYRMIKTITSPLEILTRGVNQIQNKNFAHRIEYTADDEFHPVCEAFNQMAAQLEASTAQRLKDEANRRELLAGISHDLRTPLTTISGYLDGLESGVACTPHMREKYLQTIKNKSIDMQRIIEQLFLFFKLDMDEFQFSPSRFEITRALSDMIEEVT

SEQ ID NO: 98275 - protein, 142 aa, Unknown
  Obtained from environmental sample
  misc_feature (1)..(142): Xaa is any amino acid
MAYIHERPDWPHFTWNMDRLAETLASVRHKQGLLLGRMSALGFPARAEAGLAVLTWDVVKSSAIEGEMLDMAQVRSSLARRLGMNIGGLAPVNRHIEGIAEMMLDATQHYAESLSAERLCGWHAALFPMGYGGARRITVGAW

SEQ ID NO: 98276 - protein, 260 aa, Unknown
  Obtained from environmental sample
  DOMAIN (168)...(260): Peptidase dimerisation domain
  misc_feature (1)..(260): Xaa is any amino acid
DPAFLGPRPDEHTLRAAQDRAIREGANPELVARMDGGYTALWADLPRSGETSPLLAFRFDMDANSIQESADPGHRPCREGFASLHPGCMHACGHDAHTALGLGLAALLMDIREHLRGGVRLIFQPAEEDGSGALPMLKAGALDGVKHLVGLHVGIRATQTGAVICGTRDFMAYSGFDVRYAGSPAHAGHAPHEGHNALLAACSATLGMYDITRHSDGNSRINVGQIRAGRARNIIPAEAELKVETRGITTEINSFMLQEA

SEQ ID NO: 98277 - protein, 160 aa, Unknown
  Obtained from environmental sample
  misc_feature (1)..(160): Xaa is any amino acid
FRLPTEGGKHGRGSEKTPVLVSVSRTGGGKPGRARMRVVERVTSEAVMEFSEAAVAKGSEVRTDGLHVYRRLAKAGYSLNQRKTGPKDESGHLRWVHVVISNAKAFIGGTFHGLDARHLQRYLDEFCYRFNRRWEPHGIFSRLLSACASAGRITYAELIG

SEQ ID NO: 98278 - protein, 287 aa, Unknown
  Obtained from environmental sample
  DOMAIN (1)...(287): Protein of unknown function (DUF1703)
  misc_feature (1)..(287): Xaa is any amino acid
KSYDKYLQFVFLTGATKFSHVSVFSDLNHLVDLTLDPRYADLCGITQEEMEQNCAPEIEAVLEDSGKSRGAYLDELRRFYNGYRFSRKLLSVYNPFGLLNHFDKGGEFLPYWYESGTPTFLINLIIKQKINIVDLTDMRVGYEDFRKYDIETMRAEPLLYQSGYLTIKDYDEESNQYILDYPNEEVRASFSKALLEQYLQPSVEASRGLNTRLITALLKGDVDSAMNSLKSFLASIPYEIIKERENYYETAIHLIFTMLGLNCRSEVRIASGRIDTLVETKQFVYCL

SEQ ID NO: 98279 - protein, 237 aa, Unknown
  Obtained from environmental sample
  misc_feature (1)..(237): Xaa is any amino acid
MSDEVAVCYTSLEACQGITERAEAMITMHKAICESARAWNMPVPELPINNPELLLYETMRKWAELIAPKPLVVLFDETDVLEGEALISFLRQLRSGFANRAVGTFPVSIALVGMRDLKDYITSAKGGVALNPDSPFNIKEDSAVLSNFSQADVEKLFAQRTEETGQAIDRDALEYIWEQSRGQPWIVNSLFKRATMRVLQNDDYSTVTLTHIKEAREQMILARETHLEALAYRMENP

SEQ ID NO: 98280 - protein, 277 aa, Unknown
  Obtained from environmental sample
  misc_feature (1)..(277): Xaa is any amino acid
CSKTYEDVEELLRTIRQELDVCWAVLVENYAYEYELSIHRLKSNLDNEDKVASFNDRFLTRRAALDVNPDIIKHLIGPLYDNNPSYGVRELIQNAVDACNEHSAINEKVIGKINVYVDTGKKIFEINDNGIGMNEDILRNYFLVAGSSYRDSDVWRETFITDEGKAKIVRTGRFGIGALAGFLIGNEITVTTRHIDDKHGFQFTFSNKPKTLDVKRVDTNEPGTKIEIKMYEESLNYFKIDKKSKNSREVPNWIEWYHFSKPEVCYYLNGERIRENI

SEQ ID NO: 98281 - protein, 251 aa, Unknown
  Obtained from environmental sample
  misc_feature (1)..(251): Xaa is any amino acid
LLAYEKGLGRGESPLFPNVCFKLKEDVNFEEGDPNYDLFQLSMRVACKRLFPAYSFQDSSFNKPYRDEEVAYMGCRTRVMSNCNGAEITNSRGNLSFTTINLPRLGIRAERDLALFWKLLDELIDLTVEQLITRYNVQKNLKVRDFPFLMGQKLYLDSDELSANDTIEKAIRHGTLSIGFIGLAECLTALIGRHHGESADAQALGLAIVSHMRRRCDEATKKHKLNFSLLATPAEQLSGKFTRLDVKQYGV

SEQ ID NO: 98282 - protein, 283 aa, Unknown
  Obtained from environmental sample
  misc_feature (1)..(283): Xaa is any amino acid
MDGYAASTKPLAAPSESLGMSEKDRKAYSVATALRAIVTGDPTIGGLERDISNALAAKLGRNTGGILIPTDMPMRDAHNTKVLDSAGNLVFKEYAGYIELLENTAVVLQMGATVSTGLQGTPTWVKQTGASQTFWIDENPAQGVTESNLTWSLVSSTPKTAKALLRYTRQQVLQSVEAFEPLLQKDLLEQDTLAIDSAALNGTGTQFQPLGILNTPGLQTHSLGTNGAKPKYSDITRLKTLVKKQNALGLGEGGYLTTPEIEDLLMNTPRLDNQIALPIWERT

SEQ ID NO: 98283 - protein, 65 aa, Unknown
  Obtained from environmental sample
  misc_feature (1)..(65): Xaa is any amino acid
MRTNVVLDDELVNEAFKYSQTISTKRELIETALKEYVDTRKRKNIGELRGRISFDEKYDYKAMRK

SEQ ID NO: 98284 - protein, 95 aa, Unknown
  Obtained from environmental sample
  DOMAIN (10)...(95): Trp repressor protein
  misc_feature (1)..(95): Xaa is any amino acid
MTINDPRVNENLDDLARHLSKAGESALIEDFLRCLLTPAEIADIAGRWALVKALRQKVSQREIAKDLGVSLCKITRGSRELKKPDSAFVRMLEKA

SEQ ID NO: 98285 - protein, 71 aa, Unknown
  Obtained from environmental sample
  misc_feature (1)..(71): Xaa is any amino acid
MLAFDAIANVPAAQRAQALATGISVAMSSTLWGLIVAVPMLLLHGVVGAKSDGVMQELDEKSTKLINLVEA

SEQ ID NO: 98286 - protein, 233 aa, Unknown
  Obtained from environmental sample
  DOMAIN (143)...(202): Bacterial regulatory proteins, luxR family
  misc_feature (1)..(233): Xaa is any amino acid
MKGGTLLVSRAVNWFPHFKMRLEALGFPDVQVTSTEKDGLIMLIRKLKPKYVLISSNFYDCATPYMVGQMLSVFPKLNIAILNSSFFPDAIAAWFIFHGIRFYVKLLDGKDEFNRGLQCILNGKKYIAPDVQAIIDELGGMPEVPLKETRRQKEVLLMLCSGYSIKKMENKLHVCKATIENHIRELMNIFNSRGREELIKIARDLEIFTKYEMSFYDDTHYKASLPGWADHRG

SEQ ID NO: 98287 - protein, 261 aa, Unknown
  Obtained from environmental sample
  DOMAIN (110)...(254): Thiamine pyrophosphate enzyme, C-terminal TPP binding domain
  misc_feature (1)..(261): Xaa is any amino acid
VGWRGEPGVKDEPQHFKQGRVTLALFGALGLPCIILADNEDEVRSQLAECYRQIKINNAPLALVVRSGTFAPYAGPGGAEAGAAGFEMSREGAIEEIILASSPDEIFVSTTGMISRELYELREKHHMPHDRDFLMVGAMGHASSLALSLALQKPGAQVNCLDGDGAALMHLGALAAIGALKPVNLRHFVLNNGAHDSVGGQPTIAHEIDLPGMARSAGYAKVYPVGNLKELRLVVADISASRKKESEGPIFVEIKVRKGNR

SEQ ID NO: 98288 - protein, 256 aa, Unknown
  Obtained from environmental sample
  DOMAIN (2)...(229): Aminotransferase class-V
  misc_feature (1)..(256): Xaa is any amino acid
GLQKFRLPAPGLRSGEGQTCEGGFTHLAIVYHETTTGLLNPAPEICRFCHERGIITIVDAVSAFAAIPIDMDREAFDFMASTSNKNIQGMAGVGFVFCRKEALEKISGYPPRNYYLNLWDQYIHFKKNRQTRFTPPVQALYALRQAILEARREGMENRYARYVSCWNVLVAAIKKIGLSMLVPEAAQSKLITAILDPPSPNYSFESLHDLARSRGFTIYPGKLSEADTFRIANIGDIRPEEMIVFTEVLENYLNSL

SEQ ID NO: 98289 - protein, 255 aa, Unknown
  Obtained from environmental sample
  DOMAIN (153)...(233): Formyl transferase, C-terminal domain
  misc_feature (1)..(255): Xaa is any amino acid
AQRLSLPILKPKKLDGAAREQIAALKPDLLVCFAYGKIFSPQFLALFPLGGINIHPSLLPKYRGATPIPAAIINREPVTGITIQLLAAEVDSGDILVQETVPLSGRETTASLSETMAKKAAELLPAALRGIAGGTLRALPQDHGAATYCSIIKKEDGLIDWNRGAAAIDAQIRAFDPWPLSWTMHGETPLFILQAEALENADNAAGSEDTLTGSRAVAGAGPLLFSETAASSGPTPCGICSEDTLTGSRAVAGRI

SEQ ID NO: 98290 - protein, 136 aa, Unknown
  Obtained from environmental sample
  DOMAIN (10)...(134): KR domain
  misc_feature (1)..(136): Xaa is any amino acid
MISLKGKNAIVTGATRGIGLEISKVLAENGANVAILDIQLGDGSAIKEVEALGVTCKGYACDVSSPEAVDEVFKQILADFSKVDILVNNAGITRDNLLIRMKQEDFDSVLNVNLRSAFICTKAISSHLMRNRSGRI

SEQ ID NO: 98291 - protein, 252 aa, Unknown
  Obtained from environmental sample
  misc_feature (1)..(252): Xaa is any amino acid
MSYYNSVYGSIVKPKAGESTPEEKSLRLNFFDMSSGDTVTVRRLQGSNPQNISSYDSVSVMVYPKESYGEELKFVFRFGSDDSTYYEYSAPLPNGGRWHRFAFSLQDFSDLKLSADQEGKPINVSSGNLRVAAPAGKRPNFTAITFMAIGAASGGGREGEIWVNELIATGGRVLSGLAARVNIATQWADFLTLGAGVSFMDGDFKTMTDETLGGSDRSELSANLNAVMKLDKFMPEEWGVSIPVGGSISGTL

SEQ ID NO: 98292 - protein, 276 aa, Unknown
  Obtained from environmental sample
  misc_feature (1)..(276): Xaa is any amino acid
DLSINNQYKGIYQLTEKIQSNKGRVDLREKHRGWLVEFDYHSPASDERSSYFTTDKYNLTTFIKFPELDDTIPNRPTSYLDYVKTDLNNLVNKMAENGFPENGYRDLIDLDSYAKYVLIQLFLDNSDFNSKFQNGALPGSNYAYRIDSSSCSKIKAGPLWDFDLAIVTKSSHPRHDYNSYREAITPTQAFYKRLWEDPVFKAKYKRIWIENKSHFQAMSSFIDSIKTVAEGSVDNNTWNSGTLNAQTFNTEIQNLKGWLTNRINWVDQQIGSNLNG

SEQ ID NO: 98293 - protein, 285 aa, Unknown
  Obtained from environmental sample
  DOMAIN (1)...(207): Domain of unknown function (DUF323)
  misc_feature (1)..(285): Xaa is any amino acid
MNAGLKGSSGDGSDQQPVTMVNWYDSIVWCNALTEYWNEKTGANLTTVYNNGGSPIRDAGDTWTLDEVTPSVSARGFRLPTSNEWELAARWRDDDTNTVAGYSNPWFTKGDSASGATDNYYDTGNVAVYGGNDGYTTAAVKTKTPNALGLYDMVGNVWEVCFDSYSSSSRVTRGAAYNNDTYYTGVGYVHNRPPEETYDSHGFRIARTGHDNVEIAPPNTHAVTFNTDGGDPVPAKQFIEDGGKVTKPETSPAKTGYTFDDWYKDSSFTTLWDFETDTVTAAITI

SEQ ID NO: 98294 - protein, 277 aa, Unknown
  Obtained from environmental sample
  misc_feature (1)..(277): Xaa is any amino acid
NGSATSTTTKLTLNFNKDITGLIVADITLTPNSTGAAKGTLTRTGTGIYELTISGITASGSVGVTVADKEGYTISPKTQNVAVYYYAEPVTFIGVTANGSTTSTTTKLTLNFNNDITGLTEADITLTPNSTGAVKGTLDKTGTGVYELVVSGITASGSIGVTVSDKAGYAINPKTQDVTVYYAEPVTFNSVTANGSITTTTTRLTLTFDKDISGLTETDIALTANDTGAVKGALTKTDTGVYELALSGVSASGTVSVSVSKSGYDISGGVKRLMCIC

SEQ ID NO: 98295 - protein, 157 aa, Unknown
  Obtained from environmental sample
  DOMAIN (9)...(154): Phosphoenolpyruvate-dependent sugar phosphotransferase system, EIIA 2
  misc_feature (1)..(157): Xaa is any amino acid
MYNIIRLSEQLSEKHIIVHSGSSDAESILCEMVQLLSDELGPEACKDISDAVLEREKSKSTGIGYGVAVPHTRTSLVKQLYCVAATSENGIEFKALDSKLTSLFFLIISPDFTVGPHLNIIAAISHLVGKNTNMSAKLNNAQSPEEFMDILKAEEEK

SEQ ID NO: 98296 - protein, 281 aa, Unknown
  Obtained from environmental sample
  misc_feature (1)..(281): Xaa is any amino acid
LEKSVVLGGESTWKTVEYRNGITEVSSVRPHPVLTLSSAVNKTVSGYSAATGVMGNFIPLTENALDLSILFDESNTGFYKDRTGNYLVYVSPEVEAVDHRYARTGAGAALFNGTGSVTVEPQSRNALFASGNRIRDFTVEFWLFPLNMENGEQIFSWVGTRLINGNYVIQRIRCTFSKNRLQWSFENFFTSADGISFVNTEFSGNTPVVPKAWSHHLVRFDATTGMIEYLSNETSEAIVYSTVTGREKGDVYTPVAGNNGVIRIGERLWVLLMNLNSQCLC

SEQ ID NO: 98297 - protein, 228 aa, Unknown
  Obtained from environmental sample
  misc_feature (1)..(228): Xaa is any amino acid
MPKTCAVCKKGKGSQICKVCGFLDYVSIDRRSLSPEDIKTQIEKEQFLKIIFPKDGKKHKIPTPKQYIKNWMENVVKPYRKKWKEKTREAKLWAKEMAKKYGTFIDPRDSKKYKTIEINGQVWMAENLAYTIGGRYYKDKPAYGKKYHLLYNWNAAKEACPPGWHLPSCAEWESLMDFIGNRWQGQKLMAKVGWANCNGTDDFGFAAMPGGYGLSTLPGDFGDKYYGF

SEQ ID NO: 98298 - protein, 67 aa, Unknown
  Obtained from environmental sample
  misc_feature (1)..(67): Xaa is any amino acid
MFSQYLSQSALKGTVKDLMTSGLAVEFIQPWYTPLTTTPSTTGIALGGIGSAYTVTPAGTTPVMHFL

SEQ ID NO: 98299 - protein, 270 aa, Unknown
  Obtained from environmental sample
  misc_feature (1)..(270): Xaa is any amino acid
NDTIFARWTLATYTITFLPNGGTVTPTTMIVSGDDGKLSLLPIPRLSLYAFDAWYTAPTGGEKVTLNTVFTGDAAVFARWIPLYIIRFNANGGTVSIAADTTGADGKLAALPTPVPANNGETFKGWFTALASGERVTASTVFTGDATLYAQWSPAAVSYTVTFNPNGGLVNPTSRVTTGDGTLAALPIPARENYAFTGWFTSATVGSTEVTTDYVFTGNTTIYARWTPIYTVTFNPNNGTVNPTSAKVNIEGLIEGTLPTPTRAGYKFDG

SEQ ID NO: 98300 - protein, 108 aa, Unknown
  Obtained from environmental sample
  misc_feature (1)..(108): Xaa is any amino acid
AWSGRLPVHVRDGKVVAFGKGMDCHKANCEYVGLARIQGNFIAECKQHLEAMAANQRHGDWWEQILYDMVNTRPIWAVDIAGQFWAEVDFIEDYDRILNYVKQKKGKY

SEQ ID NO: 98301 - protein, 254 aa, Unknown
  Obtained from environmental sample
  DOMAIN (15)...(254): Aminodeoxychorismate lyase
  misc_feature (1)..(254): Xaa is any amino acid
CIWSYYRPGPSTEEITVLVKRGMTISQAAEELELGGVIRSKKLFKYWARFSGLRLLRGEYLFEPRVSMSDVTRKFERGEIHMTKLVITPSLHGWSLQKRLEPYVPPDVFWNLWKSPKLKELAGFPNAPSLEGLIAPATYNVNLAMEPEEIVQGMVETFRSQVYPTLADGALPPYETLILASLAEKETNLPEELPHIAGVYYKRLNVPMRLQCDPTSLYARWLIGDLRFTAPMRDDTARSHPYNTYSVMGLPPGP

SEQ ID NO: 98302 - protein, 282 aa, Unknown
  Obtained from environmental sample
  DOMAIN (62)...(100): WD domain, G-beta repeat
  misc_feature (1)..(282): Xaa is any amino acid
EIAAGDVKAAVTAIPQRQPEAVMDNPNGHSGPVNSVAFSPDGMRIVSGSDDRTITVWAAATGREIRMFAGYPGAVRSAAFSSEGTRIVSGSDDNTIKLWDLAAGRLIRTFQGHSGSVYFAAFSPDGRRIVSGSWDTTIKLWDAATGSLIRTFRGHSGYVNSVAFSPNGTQITSGSSDNTIKLWDISTGREIRTFSGHSNRVLSVAFSPDGTRIVSGSFDKTIKLWDISTGREIRTFSGHISAVESVAFSPDGRQVVSGSQDNTIRLWDVATGRLIRTFTGHS

SEQ ID NO: 98303 - protein, 269 aa, Unknown
  Obtained from environmental sample
  misc_feature (1)..(269): Xaa is any amino acid
LAIFCRTSGWVEIIRKIDEKNAAIKLSFTNHTIEPDKADLTGSTKIWMDNPIEAVYIPVKDMTSNAPGFRSLYDIREIHFEEIYVDILRKAFTPFLKGPTDKQRKKLLDNLQAAISGRVIIKNEEFFLRNEEGELEFTLLAEGYRKLGLLWVLLQNGTLLNGSVLFWDEPEANLNPKLMQSVVGILLEMQRFGVQIFIATHDYVLLKELDLQIQEHDKIKFYSLFRNEKGQVEVSTTGNYREIYPNTINDTFGNIVTREIQRPIKGSQA

SEQ ID NO: 98304 - protein, 260 aa, Unknown
  Obtained from environmental sample
  DOMAIN (1)...(260): Phosphoenolpyruvate carboxykinase
  misc_feature (1)..(260): Xaa is any amino acid
VDAGIGIPLNPEKRPGSYWFHSDPSDVARAESRTFIASKSKDDAGPTNNWTDPAKLKDEMKALYKGCMKGRVMYVIPFSMGPVGSDIAKIGVQITDSPYVVFNMHIMTRVGTKVLDVLGKDGFFVPCLHSIAKPLKPGEKDTSWPCEPDVNKKYISHFPDTYEIWSYGSGYGGNALLGKKCLALRIASVLARDEGWLAEHMLILKLTNPQGKVKYVTGALPSACGKTNLAMLIPTLPGWKVETIGDDIAWMKFGKDGRLY

SEQ ID NO: 98305 - protein, 265 aa, Unknown
  Obtained from environmental sample
  DOMAIN (121)...(264): Protein of unknown function (DUF1538)
  misc_feature (1)..(265): Xaa is any amino acid
VLVILYIITCAVAYFTPITFVPVAFDSGGVTTGPMTVPFILAMGAGIASIRSDKDSMDDSFGLVALCSVGPILAVLLLGIFYKPEAAEMEKYVLQDAQTSRDVALYFFHELPIFFKDVAYALGAIVLFFVVFQLFTRRYHRRQLGRIIIGFVYTLIGLVIFLTGVNVGFIPVGELLGSQLAASEFKWVLIPLAIVIGYYIVAAEPAVHVLNKQVEEISSGAITVKMMSRGLAIGMAAALAITMTRILLHIPIAWILIPRLRFCPG

SEQ ID NO: 98306 - protein, 223 aa, Unknown
  Obtained from environmental sample
  misc_feature (1)..(223): Xaa is any amino acid
MSGSFSLTDGGHANGRQIDVPPTLVSFAVSTAKIENIITPEFKKTDSYVYLLKLPFSIYEKRDFAVLREYFDTVEKLIKDGKILSAWASGNGGTAEAVVKMCMGNKIGFTAENELFIGDGFCGFVIETNTPLQADAVLLGRTKSDYILKTKTYEIPIDKLQDAWEKTLEPVYPYLIKQEGKVENFIFDREVTIKPTNRQSKPKFLIPVFPGTNSEYDSATAVE

SEQ ID NO: 98307 - protein, 208 aa, Unknown
  Obtained from environmental sample
  DOMAIN (28)...(207): ABC transporter
  misc_feature (1)..(208): Xaa is any amino acid
MYVEMRHISKQFGTVLANDDAALSVDRGEVLALLGENGSGKSTLVNMLAGIYVPDSGSIHIDGKRHNLRSPQEAIESGIGMVHQHFKLIPVMNVWENISLGEKPEEGRALSRFNPLIEKQRINKRIAALEGRFGLTVPHDKKIYNMAVGEKQTVEILKMLYRGAVTLILDEPTAVLAPQEIERLFSMLRNMKQEGCAIVIITHKLNEV

SEQ ID NO: 98308 - protein, 238 aa, Unknown
  Obtained from environmental sample
  misc_feature (1)..(238): Xaa is any amino acid
MDILHDAAEFGPPEPFFSWVNALYNIAWFIRVPAILLLIFAALTGMPIFAAIGGIALIMLQAAGLEPEAAPIQIFSALTDTDIIAIPLFTLTGFFLSESKAGERLVRTFRCFFSWLPGGMIIATVIICAFFTSFTGASGVTILALGGILFTILTENKYTEHFSIGLLTSTGGIGLMFPPSLPIILVASTSNTILHFMNIPSQYSIIHFFIGALIPGIILVLAMMAAGIFASIKIKIPV

SEQ ID NO: 98309 - protein, 256 aa, Unknown
  Obtained from environmental sample
  DOMAIN (32)...(256): DAHP synthetase I family
  misc_feature (1)..(256): Xaa is any amino acid
LDHVVNTVGIVDYGKRITEQYKAVNRTVHEDNTIINVGGVSIGEGFFTVMAGPCSVESREQITEIAHSVKKSGAKILRGGAFKPRTSPYAFQGKQAEGLEMLRIAKRETGLPLVSEIMNQTQIELFEDIDIVQVGARNMQNFDLLKEVGKLKKPVLLKRGLANTIEELLMSAEYIVSSGNDQVILCERGIRTFETMTRNTLDLAAVALLKQKSHLPVIVDPSHASGIRSLVPPLAKAAMAVGADGLMVEAPARAAR

SEQ ID NO: 98310 - protein, 63 aa, Unknown
  Obtained from environmental sample
  misc_feature (1)..(63): Xaa is any amino acid
MGIVEPVFADITYCKGISRFTLRTQKKVNIQWILYCIVHNIGKCNKAEKEKGKENDRKWKIAA

SEQ ID NO: 98311 - protein, 87 aa, Unknown
  Obtained from environmental sample
  misc_feature (1)..(87): Xaa is any amino acid
KEFLDLLKSVTAKRPKTVIDHILQYGFITTEDLKNKYGYNHPPRAVRDVKEYGIPIEMYRVEGGDGRKIAAYRFGEYGYLLDAGINV

SEQ ID NO: 98312 - protein, 203 aa, Unknown
  Obtained from environmental sample
  DOMAIN (13)...(202): Pyruvate flavodoxin/ferredoxin oxidoreductase, thiamine diP-binding domain
  misc_feature (1)..(203): Xaa is any amino acid
MKELLTGNEAIALGALEAGVVYACAYPGTPSTEILEILGTRPKAEIMAEWAPNEKVALEAAIGASLAGGRALAAMKHVGVNVAADPLLSIAYSGVNGGLVLVSADDPGLHSSQNEQDNRYYAKFAKVPMLEPADSQEAKDMVGAALAISEKYQRPVLLRTTTRINHSKSVVEPGRKIDPPKRPYERQSRFDLVPAVARRLHVE

SEQ ID NO: 98313 - protein, 175 aa, Unknown
  Obtained from environmental sample
  DOMAIN (13)...(173): Pyruvate ferredoxin/flavodoxin oxidoreductase
  misc_feature (1)..(175): Xaa is any amino acid
MSDVKNILLVGVGGQGTILVGKILSGGLLEAGYDVKMSEVHGMAQRGGSVSTQVRYGKKVHSPVIDLGQADILVAFETMEAVRWSPHLKKGGQIVVNDYQIPSAPILAGQTRYPEGLLTALSAQAPTTVVKAGDLAEALGNVKAMNMVLFGALVRKMNLDGLDWAGRIKAGVKQE

SEQ ID NO: 98314 - protein, 96 aa, Unknown
  Obtained from environmental sample
  DOMAIN (69)...(92): 4Fe-4S binding domain
  misc_feature (1)..(96): Xaa is any amino acid
EWGLAITDAPSVIITRWPCALKKTSPADRREFGDYFHLCQVEAELCVGCRTCVRTGCPALRFSPDDQKTRIEPGQCVGCEICLQVCPKKAISAVRP

SEQ ID NO: 98315 - protein, 158 aa, Unknown
  Obtained from environmental sample
  DOMAIN (1)...(108): Protein of unknown function, DUF583
  misc_feature (1)..(158): Xaa is any amino acid
DYTINTIIGPNSNLNGNIDTPGFTRIDGSITGDVNASGRVVIGERARMKSNVLGTAVTIGGVVYGNVIAGESLVVLSTALVLGDIITRRIKADEGCLIHGKIKVCPDEESWASAVSEYRDAQRIKSALPVFAKKAGKDEASPAKGGTAKDKASLRGEV

SEQ ID NO: 98316 - protein, 260 aa, Unknown
  Obtained from environmental sample
  DOMAIN (36)...(101): His Kinase A (phosphoacceptor) domain
  misc_feature (1)..(260): Xaa is any amino acid
MALTLSLLGIALASVLIIVLIRVDAAKSKSDIENKHKSAFLANMSHEIRTPMNAIIGMTTIGKSASDSIRKDYCLSKIEDASNHLLGVINDILDMSKIEANKFELAPVEFDLEKMLKRVVNVITFRIDEKHIKFSVHFDGSLPRTLIGDDQRIAQVITNLLGNAIKFTPEKGSITLAVRLAEKGSDLCTLQFSVSDTGIGITPEHQEKIFKSFEQAESSTTRKYGGTGLGLAISKSIVEMMSGDIWVQSEPGKGSVFTLP

SEQ ID NO: 98317 - protein, 254 aa, Unknown
  Obtained from environmental sample
  DOMAIN (101)...(237): Thiamine pyrophosphate enzyme, C-terminal TPP binding domain
  misc_feature (1)..(254): Xaa is any amino acid
VLVIEEGQSFIAKKLYGIAGGSINPIIQCGELDPDNVRAALGLPPHKRLSVKGTKFTDNLPQRPPQLCKGCPHADSYETINKAVAALDPRDGHPDIAVSSDIGCYSLGALPPFSAIESVICMGASVGMAKGASDAGLKHSIAVIGDSTFIHSGITALIDAVVSDTPMTLVILDNSTVAMTGCQPTIVPSEKLVNLILGCGVKPDRLLQLEAKNQLINENAAQLKAEIEHRGLSVVIFRRECLEALRKNKKNHGA

SEQ ID NO: 98318 - protein, 179 aa, Unknown
  Obtained from environmental sample
  DOMAIN (15)...(115): Biotin/lipoate A/B protein ligase family
  misc_feature (1)..(179): Xaa is any amino acid
VKLLDIQNPFKAPVYHEEVVDSTMEVSRLLAQNGARHGTVITADFQEAGRGRIPERKWEMERDQALAFTILLRFTSIPAALGLRTGLATALAIEDFAPALTGKALIKWPNDILLPAPVSDGKQTILKAAGILAEADSDSARIGIGVNVSQKMMPDFLRDKATSLSLVSGEEYNAADRYK

SEQ ID NO: 98319 - protein, 69 aa, Unknown
  Obtained from environmental sample
  misc_feature (1)..(69): Xaa is any amino acid
MLIYEKYIGKNRDDFKSYQDILENYKVTYKDDFNFAYDVLDELAKNQPDNLCMLWISNEGEEKRITFSQ

SEQ ID NO: 98320 - protein, 150 aa, Unknown
  Obtained from environmental sample
  misc_feature (1)..(150): Xaa is any amino acid
MRYYSTRNKNDAVNFATAALTGLAPDGGLFVPEEIPQYTQAVLSSLGTMDYRDIALETIKPYVKGEIPDSILEEIVQAAYPFTAPLVGVGGRFILELFHGPTAAFKDFGARFMARAFAYLRRGEEKPLHILVATSGDTGGAVADGFFKSP

SEQ ID NO: 98321 - protein, 130 aa, Unknown
  Obtained from environmental sample
  misc_feature (1)..(130): Xaa is any amino acid
MDEAAEFAAAQGLGGLEFLAGMPGTIGGAVWMNARCYGSEIADVLAWTQIIDFSAAGAPEEKRVPADKAEFGYKRSPFQGKECLILSAVFKLKTADSAEIKSKMEKNRQDRQEKGHYCFPCAGSALKITM

SEQ ID NO: 98322 - protein, 227 aa, Unknown
  Obtained from environmental sample
  misc_feature (1)..(227): Xaa is any amino acid
LAYEDPDKQAGIPFLSASKMNLKIPEGYARTVGLLSDMESFFGKMDSADSNQIINLQFPQNYGSTLLLASMIPRTLMESALIKIQYFLAHGHSMTHIVNTLNVQIKDKERALKDYIDKIIFRPFECINEMERFDDFVYLFWVHFCALVKKDINAKSEIREPDLAVLQSIYVIEVCSSLYRSSVVRKREIDAAYARLEELMGLPPCRYTLGDIAKFTTDQGIPLLIIF

SEQ ID NO: 98323 - protein, 283 aa, Unknown
  Obtained from environmental sample
  DOMAIN (1)...(86): Protein of unknown function (DUF1156)
  misc_feature (1)..(283): Xaa is any amino acid
EAAREKSIRHGHPSTLHLWWARRPLAACRAVLFASLVDDPSSHKDKFPTEEAQEKERQRLFELIERLVKWENINKEELYKEAWQEILASTGGKPPPILDPFAGGGSIPLEAQRLGLEAHASDLNPVAVLINKALIEIPPKFANCPPVNPEARGKIGGGAEWKGAAGLAEDVRYYGEWMRKKAFEKIGHLYPKVNVPATDKTESHEATVIAWLWARTVQCPNPACKAEMPLVRSFEISKKKGKEAWVCPKIDKAHKTIQFEVQNGEGEIPDGTVNRNGAKCICA

SEQ ID NO: 98324 - protein, 146 aa, Unknown
  Obtained from environmental sample
  misc_feature (1)..(146): Xaa is any amino acid
MLPTSMAGSPANSTEEGRDEIERIAMQTIMTLERKSGNSPEDKSKDNLGYDIESKTQEGSLRFIEVKGRSVGHNDVTVTHNEMKTASNSQDKCILAVVIVDGNKRDVTYFMNWIDTGPSFAESMRSLDINKLRQVSRVVLEKEILV

SEQ ID NO: 98325 - protein, 126 aa, Unknown
  Obtained from environmental sample
  misc_feature (1)..(126): Xaa is any amino acid
MLKKLTIRNFKAIQDMTIEFTPLTVLIGENGCGKSTILQALDFLCASTYRDIPEYLRDRGWSFDELKSQTKDGFNKPIGFISLFEFNIGKKTVQIEWFLFVNLIDKRWNIQEEIRVDGERIVSYGK

SEQ ID NO: 98326 - protein, 266 aa, Unknown
  Obtained from environmental sample
  misc_feature (1)..(266): Xaa is any amino acid
AAKQRELEKEITEITEYSKDAYASLDEAAVNTRKTFDEWQSLYNTRMREMDNSLEDLRRHSRETAAENDERISVFRQNLEDIRKELGVQKKIFDQTGTLRQEMERGIEEINGNLDRLDQRKNEITQLENKFTHIKRLEEEIQSKMNSFLSERHRMEVMEKNFERIIKTSQSVEEKLAHITTSDDILQAVQVKIRELEDALKETEEKYQRIERKNAVLEKTNEGIDHNFQALQKTENAIKNAQAFITEVSAQLEELKTSVEALSAEN

SEQ ID NO: 98327 - protein, 282 aa, Unknown
  Obtained from environmental sample
  DOMAIN (1)...(233): tRNA synthetases class I (E and Q), catalytic domain
  misc_feature (1)..(282): Xaa is any amino acid
VKKDRAYYCLCSAERLEKVRKEREASHSSESGYDRFCRAIPPEEASRRAEAGEAHTIRLKIPLGEETPEGKTASVTKFYDHIVGNVEWKNEDVNPDPVLLKSDGFPTYHLANIVDDHFMGITHILRAQEWLPSTPLHVIMYNSFGWEPPAFCHLPMVMGQDGKKLSKRHGSTGIDEFRQQGCLPEALINYIALVGCSYEEGKDIYTLDELAERFSLEKLAKAPAIFDYKKLEWFNGQYIRRKSDAELASLTLPLAVKQGLFGNPSKNPDPDQEALYIAAMPL

SEQ ID NO: 98328 - protein, 221 aa, Unknown
  Obtained from environmental sample
  misc_feature (1)..(221): Xaa is any amino acid
MIVEFLEGRDFLTAWVLTTSARRLGVLAADGREMSISAARVLNSVELPDPGLKSARLELLRATAETRRNLAAALDLAELWSVLEGEGSEFSFESLAALFFGRSVQADEVSAVARAVFADGLRFRFTPDGAVRQAQAEVERLLEARSRAAEAERALAVCAEWLAALKRGAAAPEPPEALAAKARLLRLALDGSGAGGSAEAKKLLARAGFAPEPEGAVLALT

SEQ ID NO: 98329 - protein, 286 aa, Unknown
  Obtained from environmental sample
  DOMAIN (161)...(272): Pyridine nucleotide-disulphide oxidoreductase
  misc_feature (1)..(286): Xaa is any amino acid
ADYERKSGEISVPEISKPNGIKVAIIGSGPAGLAVAGDMAKYGYDVTVFEALHEIGGVLKYGIPEFRLPNIIVDVEIDNLRKMGVRFEANFIVGKTSDFDTLRAEGYKAFFIGSGAGLPNFMNIPGENYIGVFSSNEYLTRVNLMGASRPECDTPVLKGRNVAVIGGGNTAMDSVRTAKRLGAERAMIIYRRSMDEMPARNEEIHHAQQEGIEFMCLHNPIEYLADEKGRVNRMIVQKMKLGEPDSSGRRRPIVIEGSEFPIDVDMVIVSIGVSPNPLIAKALPSL

SEQ ID NO: 98330 - protein, 125 aa, Unknown
  Obtained from environmental sample
  DOMAIN (1)...(115): recA bacterial DNA recombination protein
  misc_feature (1)..(125): Xaa is any amino acid
FYASVRIDIRKTTAIKEKDGENVSGNRVKVKIVKNKLAPPFRRAEFDVIYGEGISRIGEIIDLGTTFNIIKKSGSWFSYGETKLGQGRDAVKQLLCDNYELAAELEDKIRQALIVNPNVVEESNE

SEQ ID NO: 98331 - protein, 159 aa, Unknown
  Obtained from environmental sample
  DOMAIN (1)...(94): Oxidoreductase FAD-binding domain
  misc_feature (1)..(159): Xaa is any amino acid
MNRIIKKEFLSENVFRIEIEAKRISESRKAGHFVIIRIGEGGERIPLTIADADAIYGTITLIVQIVGCTSAKLSKLKEGDFISDVVGPLGNATHIEKVGTVLCAGGGVGIAPLYPIVQGFKRAGNRVITVLAARSADLLILQKEMAEFSDDIIVMTDDG

SEQ ID NO: 98332 - protein, 133 aa, Unknown
  Obtained from environmental sample
  misc_feature (1)..(133): Xaa is any amino acid
MNIGDYSVKRPVTIVILYALALGIAVTLVLNLAVDLYPSTARPVLSIFTRFPGSGPADVEKNVTERLERALSTSVGLVNMTSNSQFETSFINLEFAYGTDMDKAANNAQLLVNRLANSLPDDVQTPTVRRFDM

SEQ ID NO: 98333 - protein, 196 aa, Unknown
  Obtained from environmental sample
  misc_feature (1)..(196): Xaa is any amino acid
MALNKAVETRQIRIFISSTFRDMHDERDYLVNKIFPALRRYCEERDVSLYELDLRWGISEEESKQGKVVDICLKEIQKTTPFFIGLLGDRYGWVPNEDERLKIAESTEVFEEYPWVHDELLKGTSITEIEIQDGVLRSQEKVNAYFYFRSPKMKVGSDFKENPGSREAQKLAALKKTLREQKDYPVKDYDSKEHLA

SEQ ID NO: 98334 - protein, 191 aa, Unknown
  Obtained from environmental sample
  misc_feature (1)..(191): Xaa is any amino acid
MMMMSDGALSKAEIDALLSGVDSSPGGGSATATVAAPSGESLSPEQRKALETFLVSTTDAQSSNLSMLTGAQIHVKGPQVTVNGRDLFLGQLPEKVVVIKADFSSGFPGEHMFIFPEEGAKTIASLMNKEENIQLDEMSLSVLGEAVSQIVGHQITALAGKTGNKSIAAIPPEATNVPKAVVALPSGDFAG

SEQ ID NO: 98335 - protein, 245 aa, Unknown
  Obtained from environmental sample
  DOMAIN (5)...(227): Protein of unknown function DUF262
  misc_feature (1)..(245): Xaa is any amino acid
MSENGLVPICDLMGQTFTIPHYQRGYRWEEQEVTELLDDLWAFHNDLTLGDFYCLQPIVLQKNEEGNYDVLDGQQRLTTLYLILVYLKKEREENIYPQPLFSLNYVTRKECENFLKSINKFSNGDINKSNIDFYHICNAYQCIDKWFNDEEHQGAKSKLVSTLLDITKKGKRNVRVIRYEVEEVVNPEEKLNPIDIFIRLNEGKIPLTDAELTKALLLQSDKYPKEEKEFNELILFNIATEWDNM

SEQ ID NO: 98336 - protein, 145 aa, Unknown
  Obtained from environmental sample
  DOMAIN (22)...(145): Domain of unknown function (DUF323)
  misc_feature (1)..(145): Xaa is any amino acid
MLTDSIGRKQKYNSTRLIAGKTDIEMVFVKGGTFTMGCTPEQRGDCEEDELPAHSVTFSDYYIGKYEVTQKQWRDIMGTEPSYFVGDSMPVSVVNWDHVQEFIRELNFATGKKYRLPTEAEWEYAARGGSKSKGYKYSGGDSILN

SEQ ID NO: 98337 - protein, 154 aa, Unknown
  Obtained from environmental sample
  misc_feature (1)..(154): Xaa is any amino acid
MKKLNNYQNNILNIDKEFKEKILKSYDEIRERYIKAIYDSSWDSSGLSAGKFCEIILRFLQKKLTNTYTPFGQHITNFPDECKKLTSLPSTSGNESLRIIIPRALIFLYTIRGKRGIGHVGGDIDNNEIDATIIFHTATWIFCEIIRIYHSFII

SEQ ID NO: 98338 - protein, 146 aa, Unknown
  Obtained from environmental sample
  DOMAIN (5)...(35): Flagella basal body rod protein
  misc_feature (1)..(146): Xaa is any amino acid
MVRSLWTGASGMIGQQANIDVISNNLANVNTHGYKKQRADFEDLLYQTVRVAGTPATEDTVVPVGVQMGHGVKLADTQRVFSQGSLQQTEVPTDMAIAGEGFFKIQMYDGSWAYTRNGNFKVDQEGRMVTGNGYWLLPDIVMPESF

SEQ ID NO: 98339 - protein, 193 aa, Unknown
  Obtained from environmental sample
  DOMAIN (113)...(193): Cache domain
  misc_feature (1)..(193): Xaa is any amino acid
MNDAESALDTTELNINSDLQELENMQVYLSETIRLMILRRSSYEMVTEYITDINDYMFDNEKFKLYTTGVYGVFDVFGGRFHDGTGWIPPADFIPQDRPWYKAAVEANGEITVTEPYMSVATGILTMTFTRRIFTSDNKPLGIISLDIVLDRVRELAINTRFAHSGYGILMNSQLDILAHPNNVLWGKNITDI

SEQ ID NO: 98340 - protein, 300 aa, Unknown
  Obtained from environmental sample
  misc_feature (1)..(300): Xaa is any amino acid
ADSISASPSISFSRSAARAAGDGLKITGLTNYGKTLETIVIPPTIGSITVTTIGANAFAGTDITSIKLPDTVTEILAGAFSNCPVLVIVVFVSVEPPVMANNVFEGSNALETIIVPEGSGSAYSEKIEDAAPALAEKIEEAKPEPLTITVNAGNGGTITTNPSGSALVGTSVVITVNTNTGYQLAALTVTDAHNKNISLQTVNGIVNGTMTIIGYSFIMPSSNVTVSGTFTGGPTQDTDIIGATLRLYNKQIANYPSTGNIAADFGYIGGQALSNSITGTAEVTITNGAVTIKLDTPNEK

SEQ ID NO: 98341 - protein, 293 aa, Unknown
  Obtained from environmental sample
  misc_feature (1)..(293): Xaa is any amino acid
QSILEIEKRSKELKGKLAGAVGAYNATSMIVQNPEELERLYLAELGLEPSEHSTQLVEPEYLLRLLLEFNTAFGIIANLADDLRNLQRSEIGELREGFAADQVGSSTMPQKRNPWNSEHIKSLWKAFMPRVNTFFMDQISEHQRDLSNSASQRFIADYIAGFCLAISRMTGVIKGLGADRERLLANLRGGTGGPAGGLTGGVLAEPAYILLAEAGVSDAHEVIRKITLNAEKANISFAQALTKESDVLQRIGGKMAELGLVASADDALSFFEKPERYNGLAVPKAQSLARKYK

SEQ ID NO: 98342 - protein, 220 aa, Unknown
  Obtained from environmental sample
  misc_feature (1)..(220): Xaa is any amino acid
MAHKRFLKTAFSVLSAVVFFGLVFTSCGGGDDNSTSGGGVQGGETSATYQSTKDGTTYKLTVTKKTDKAAYAPLIGDTYKLLIVKGGTTQTSSGTVSSYIDNVFTLMPTNATIAFTLKISGNTIVTINGTITLEGSAGTVQGPGDLQSGGNPPAGNAGDFDYIINGGNVTIIRYKGAGGNVAIPATIEGKPVTSIGDYAFFNCTSLASVTIPGKSYQHWG

SEQ ID NO: 98343 - protein, 146 aa, Unknown
  Obtained from environmental sample
  DOMAIN (4)...(81): RNA pseudouridylate synthase
  misc_feature (1)..(146): Xaa is any amino acid
KRLGQCNQGQVSRCVKRYLAMCKGKPARDEGIISLELEIRGMKKNSETRYRLIESFRDDFSLMELELGTGRMHQIRRHLALTGNPVLGDDKHGDFTLNHLLRKTMKLNKLLLHASQLIIPETPDNPRLDLSAPLPEYFSEFIIQIR

SEQ ID NO: 98344 - protein, 228 aa, Unknown
  Obtained from environmental sample
  DOMAIN (71)...(104): Tetratricopeptide repeat
  misc_feature (1)..(228): Xaa is any amino acid
MKLDPILTKANRLVRSGKYEAAIRTLEPEVNRYHGSFHYYYLLGSSCLRTGDFGGALTYFRLAHEAKRQEPLAILGLAALFFRRGETERAVDYYLDVLELNEKNRIAIKAMKILRRQAGTDNFLSWIEAGKLPSLYPPIPFPGFSAKEKLMALGVLLAVCIITFSCLIRFKVVPNPFYPRGSRLDVTGNIATLSLSREDRMAPVQTGGSYRYILTRVQAIDTYEKAIS

SEQ ID NO: 98345 - protein, 87 aa, Unknown
  Obtained from environmental sample
  misc_feature (1)..(87): Xaa is any amino acid
MPDVEIFYFTGKNGVECDFIINPYNKPSCIQVCWELTHDNQDREINGLLEAMDFFNLDNGTILTFNTEDIIQTAGKNINVIPAWKYE

SEQ ID NO: 98346 - protein, 168 aa, Unknown
  Obtained from environmental sample
  DOMAIN (37)...(130): Divergent AAA domain
  misc_feature (1)..(168): Xaa is any amino acid
MNINIKQILQQGEGISVEFKKSAQKLPESLFETICAFLNRNGGVILLGVEDNKNIIGVNEKTAPALCKDIANLSNNPQKLFPSFLLDVQVVVYKKKTLIHVFVPASSQVHTCNGKIFDRSADGDFELKSSEQIKNLYTRKSTLYSENTIYPYLHETNFKPGIVDRVRK

SEQ ID NO: 98347 - protein, 86 aa, Unknown
  Obtained from environmental sample
  misc_feature (1)..(86): Xaa is any amino acid
MNIGLEKSRKFAIRIYNLYKHLCDSKKEYALAKQLLRSGTSIGANLSEAQYSVSRKEFLVKEKIALKECAETEFWIDLLQETGLLT

SEQ ID NO: 98348 - protein, 278 aa, Unknown
  Obtained from environmental sample
  DOMAIN (1)...(278): Glucuronate isomerase
  misc_feature (1)..(278): Xaa is any amino acid
VLPSFRPDRAVNIEKPDFAEYITKLGKATGKNINCLDDLLGAIRARIDFFNKTGCRISDHGLDFVPFATASGDACLARPAEINFVQWEKEVKDIFTRVLAGKKPDARETESWKTFCLNFLGEEYANRGWAMQLHISAIRGVNSAMLASVGPDMGFDAVADYPVAEKLARFLDLLASRGKLPKTILYSLNFKDLYPMATIMGGFQSDSSEESLPGKMQLGSGWWFLDHIDGMEAQMRLLGNTGLLSRFVGMLTDSRSFLSYPRHEYFRRVLCNILRTWA

SEQ ID NO: 98349 - protein, 255 aa, Unknown
  Obtained from environmental sample
  DOMAIN (36)...(255): Bacterial extracellular solute-binding protein, family 7
  misc_feature (1)..(255): Xaa is any amino acid
MKTSLLKALLLCAVVALFAAGFAKQGEAAPSLTLKLGHIQTEQDFWHLGALKFKEELEARSNGAITLAIFPNSTLGGDRDLVEGMQMGTADFGLIAGVLGNFEKSIGLLELPYLFNSQEEFNKVIHGPIGQEISENVRKAANVRLLNWWDRGPRQVTSNKPINGLADLKGLKIRLPQIPAMMVTWRAMGANPTPMAWSEVYTGLEQNVIDAQENPIPFIYGGRIHEVQKYLAVTDHKYEYVTIAMSEKRWPIAER

SEQ ID NO: 98350 - protein, 299 aa, Unknown
  Obtained from environmental sample
  misc_feature (1)..(299): Xaa is any amino acid
GRHGVYAWNSADGSKKALLTGVGKYQSLIFDDKGSQVAFLSDRDDATEKDKAAEAKKEASKANQGQGSEGGEPQQAEASPANAEGSASENTDPNVFKLYFWRSGQDSATEIVAPGTKGLPDGWNVSEHGGLSFSKDGKRLFLGMAPIPKAAPKDAPEPMKVDIWHWQDPELQTVQKARAEADKNRNFRAVLHLEDSKLIQLATEDMASVQTNDNSRYGLGTDNREYRLASTWDTSYSDVYAVDLQTGARKQLFKALRFGASLSPEGKYAITFDATAQKWLAASTENGAIRDLTGSIKMA

SEQ ID NO: 98351 - protein, 152 aa, Unknown
  Obtained from environmental sample
  misc_feature (1)..(152): Xaa is any amino acid
VARQKITDALKSGKVLISDGAWGTFLHKKGLKPGECPELWCIDRPADVLDIAKSYIDAGADMVETDSFGGSSFKLAHYKLDGRAAEINEAAAKISRQAAGDDHWVIASIGPTGKMLVTEEVTEEELYEAFKTQAAALKKAERTPLYRNNERY

SEQ ID NO: 98352 - protein, 88 aa, Unknown
  Obtained from environmental sample
  misc_feature (1)..(88): Xaa is any amino acid
MLSGGPIVDARIKLNDDHSFEMDYVYLGKAYSSFNTEGKFRWDRTGNIIMIDINDSPSYYLVTKNMMTLLDNKGRPIDNYVLKKRIQL

SEQ ID NO: 98353 - protein, 235 aa, Unknown
  Obtained from environmental sample
  misc_feature (1)..(235): Xaa is any amino acid
VCVILPAGTCATFAKNEGVNVFCNIRETLAKYSLDGPIHLKYVVSPRKNDSEADLKGFIDFCSCVKPRTVEFSGSTLGTTPLNDTSIDMLSHLINELVITLGIGFSLPNKDFSAKYFDPWCVDEIRSKLKKIKKKSEREITAICCADALRNKTMLFTYAYNAEKTLARAIESVLAQTFGDFTYYIVDNGSHDSTTDIIRLYACRDKRIVQLANDRNHVWKFGNLFFNLTKGFETS

SEQ ID NO: 98354 - protein, 248 aa, Unknown
  Obtained from environmental sample
  misc_feature (1)..(248): Xaa is any amino acid
MKRANGSGSVVHHKGRSLRKQYQARVTVGRDATGKQVQRSVGWYATRDEAMAALLAYNQSPYDIDARQITFAALYDKWLARAQQTGRPGFQTVRICRSVYNHCAKLHDTPYVSIRADMMQSCVDNCGKGYATEYSIKNLFHHLDLYAAELDITSKRYSELVKTSSHEVVKKRTIFSDIEVMRLWENKDFPLVDTVLILLYSGWRISELLGLRRENVNLNCEVPYMQGGVKTAAGKNRIVPIHSAILPF

SEQ ID NO: 98355 - protein, 274 aa, Unknown
  Obtained from environmental sample
  DOMAIN (9)...(274): Glycosyl hydrolase family 52
  misc_feature (1)..(274): Xaa is any amino acid
DVFDHRVETEPTAQDVWGDSDKQSGIQQDLPGQEDCIDEDQAVKIVPFADDEITRRTTPARDVWRCGDLEFKIYTPFPSVPDMALEAEFMSVDPTITKDVLIPAVFVEMTLDNTANASPRKAFFGYEGNDPYNAMRRIDTVKTGVRVKGIAQGGITGIFTDDADALCALAFAAEELLADDIADRLPFGLGTTGLLVVTAKPYEQRTWRFAVCFYRAGVVTTGVEAVYMYTRHFVNIEEAACYALKNFERYKAAAAEFDSMIAPRGLSAERMFML

SEQ ID NO: 98356 - protein, 160 aa, Unknown
  Obtained from environmental sample
  misc_feature (1)..(160): Xaa is any amino acid
YDDTLSVIAKHIKYYGKSGLADRMGIISAPLIPTTFFDGIDAVIPVPLHRRRQRRRGYNQAEHFARGVLTGLGINAALLRTDLLMRVRNTKTQTRLDREDRQKNLAGAFAVNDLTACGLAGARVALVDDIFTTGATTEACAQALLRAGCASVIVLAMGRD

SEQ ID NO: 98357 - protein, 79 aa, Unknown
  Obtained from environmental sample
  DOMAIN (26)...(49): 4Fe-4S binding domain
  misc_feature (1)..(79): Xaa is any amino acid
MTKGVGASGAQNREKSNTFKGGYLMAHKISPACLACGSCLSECPSGAIEEGEPYTIDPGKCTDCGNCAETCPAEAITKA

SEQ ID NO: 98358 - protein, 273 aa, Unknown
  Obtained from environmental sample
  DOMAIN (56)...(89): Tetratricopeptide repeat
  misc_feature (1)..(273): Xaa is any amino acid
KGDNQTALKLYKELALLTPNDPKPFKNLYEASLKDGNKKDGIMYLRNFVLLDSSDASAIKQLADLLYESKDADGALNEYRKVLRRDPNIKGIYKNYINILIDKKLNDEALKVLQKAIALKEVDAVIYGASGDMYKKRNENGSAIKMYQAALALDKQNTGLLAKLAEAQAATGDTRNAIVSYEQLVALNSNASTEYKVLGDLVTKSGKAKEGMDNYKKYLAKVPSDNEVSIKVGLYEYANKQYKEAIANLSRVTDAKLITTEVLFALGDSLHTT

SEQ ID NO: 98359 - protein, 155 aa, Unknown
  Obtained from environmental sample
  misc_feature (1)..(155): Xaa is any amino acid
MRSQFGLEKKREEQFDNLWLITFADLMVQLMAFFAIVYSYSQFSIADSGSLLRALREELGIKGSAPQGEGILPGTQGLPPDRVSDIEKLIADMKNENGPDEGVRLRVVTLRGSILFDEGSSLVKPEFDLWLKRIMSLSREYPGFILVLEGHSAPD

SEQ ID NO: 98360 - protein, 270 aa, Unknown
  Obtained from environmental sample
  misc_feature (1)..(270): Xaa is any amino acid
GEAAARGDVLIGLLTDSAIASHKRLPYLTWEQRREVVENIKGVSRVVPQEEWSYIPNLKKYRPSAIIHGDDWNSGSLSKEREEVIALMNEMGGEVIEVPYTKGVDSSTLNEAMRSIGTTPDIRLKTLRRLIEIKKPVRIMEAHSGLSGLIVEQLEVEKEDGLHSFDGIWSSSLTDSTSKGKPDIEAVDLTTRLQDLTSILECTTKPIIFDGDTGGKPEHFVYTVRTLERNGISAVIIEDKVGLKKNSLFGTEVTQDLAPVADFCEKISAG

SEQ ID NO: 98361 - protein, 270 aa, Unknown
  Obtained from environmental sample
  misc_feature (1)..(270): Xaa is any amino acid
RSFRWRQHRIGLKRRGKNANYNSWSDISDSLLRKTEVKYLYVMNANYGDSIEFYLSARDHLGKINFLEKERIDDFDTNIINGLKNKLDIKTSKIDYYPSFGWLVYSYVPVKNSKGEVVAFVGADKEMFDIDNDMRKIGTKILAAGVLFLAIVFVLITYLIRKIFVSPISKIIEAADNFNLLNVSFKNLDLIHIKEYDALIKSFRNMEQKINYAITRSFTDELTKLNNRYFFTLSLENILMPTEIEKKIAFLIIDLDSFKQINDTYGHEKG

SEQ ID NO: 98362 - protein, 278 aa, Unknown
  Obtained from environmental sample
  DOMAIN (99)...(130): Putative Fe-S cluster
  misc_feature (1)..(278): Xaa is any amino acid
MALFSGVPDFDGILVEPLFCKGGCVGGPCRGDDAGRNIFKRRDNVIRYAQAAHEDKAPPALVIAHRAEFARDEQELEEVSEGQILKVLERTGKTEQANQLNCGACGYETCIENAVAVARGMAEPEMCIPYMRRLSQQRTDRIIETTPNGVLILDDELMMIKMNPAFQAMFSCNNGLLGRRVSYLLNAQGFESLQSGETEKYESIRTQYGIRYHEILYALREERQYVGIYSDISKVKFDSRQMDTIKSQTLMHAREFLEHQVSFAQEMAHYRAKARLKA

SEQ ID NO: 98363 - protein, 253 aa, Unknown
  Obtained from environmental sample
  DOMAIN (128)...(184): Iron hydrogenase small subunit
  misc_feature (1)..(253): Xaa is any amino acid
MALMMKEYGIDFDMMELGSFDMPYGFATGGAVIFGSSGGVSEAVLRFASDTIEKGSAHEFKQLRGDDGIKVTEVALGGETLKLAAVSGLANARKLIDRIRSGEAHYDLVEVMACAGGCVNGGGQPITPHNKAAVKKRAEGLYDGDKMMQFHVSSENPYLQQIYAESLTPEKAHAILHTKYENRRRITQEDFTLGESSGEKALSLEICFGTSCFLRGAQGLYRDLMGYIRENGLEATTEFKATFCGQHCKKGPV

SEQ ID NO: 98364 - protein, 165 aa, Unknown
  Obtained from environmental sample
  misc_feature (1)..(165): Xaa is any amino acid
MDISALYQNCRLCPRDCGVNRLAGPDGFCGESSQLRLAFAGLHRGEEPPLSGTGGSGTVFVSGCNLGCVFCQNWQISGGGQTDKRQGQHLGRAVSTDEFTAICLELQKRGAENINIVTGSHAVPAIVQGICAARTAGLSIPILWNSSGYESLETLKLLDGHIDTY

SEQ ID NO: 98365 - protein, 280 aa, Unknown
  Obtained from environmental sample
  DOMAIN (2)...(215): Caspase domain
  misc_feature (1)..(280): Xaa is any amino acid
MGAYTNITKLNNPVNDANDMAAALQGLGFTVDKLLNGTLDQMENAVIRLKSRLSSTKDSYGFLFYAGHGVQSNGENYLIPVDANIQSESFLRQRAVSVQAMLDELNSAGNELNVVVLDACRDNPFSWRRSGSRGLTLVSNQPADSIIVYATSAGSTAADGAGRNGLFTEQLLKNLNTPGLEVNEIFRLTMGDVARASNNQQRPAIYNQFPGTAYLGARPTVFDQGAINIATGSLEVSTITAGSLEIRGGTINQKADLPAWGTLPISRINAGSYDITIRYG

SEQ ID NO: 98366 - protein, 57 aa, Unknown
  Obtained from environmental sample
  misc_feature (1)..(57): Xaa is any amino acid
MIERKSYSRIKRGIDLPNLLEIQTRSYEAFLQPDTPPRLRKKEGLHGAFLSLFQWTT

SEQ ID NO: 98367 - protein, 256 aa, Unknown
  Obtained from environmental sample
  DOMAIN (33)...(193): Alpha-L-rhamnosidase N-terminal domain
  misc_feature (1)..(256): Xaa is any amino acid
MNGAAFTASWITHDLADDETVCPVFCRSFKVMEPVESARLYATSLGIYECELNENRVEDAYFAPGWTNYHKRLQYQVYPLNLRLGENRIEFTVANGWYKGLLDAPPKPNHYGNCVALLAELHIHYINGITEIIGTDPGWEIMTGPICFAELYMGETIDTTRKKEYRGAAKSFHFDNTLIVAQESEPVKITIKMPAKECITSPKGEQLLDFGQNLVGFIEMRIKGNYGQVIKLRHGEALDKYGNLYTETLRTAVSTD

SEQ ID NO: 98368 - protein, 154 aa, Unknown
  Obtained from environmental sample
  misc_feature (1)..(154): Xaa is any amino acid
MLIHKNSRNPLMPLEYHFPDCEAHVMSDGKLYLYGSYDREAGVYCSDQYHVVSTSDMVHWTVHDISFRVQQAEWATGEGIKAGTSFDRVKSYDDLPKHIKDSLPPEALKMPFEQLVAALRTSIEAQTEKLQQRGAILYAPDAIEHKGKYYLYMC

SEQ ID NO: 98369 - protein, 65 aa, Unknown
  Obtained from environmental sample
  misc_feature (1)..(65): Xaa is any amino acid
GAAKNKNEWTCTLKMVGNVKMVGGVNIQLNGFGVYSGKYSVDEVTHSIGRGYTTTVKAHRVLVGY

SEQ ID NO: 98370 - protein, 300 aa, Unknown
  Obtained from environmental sample
  DOMAIN (16)...(268): Baseplate J-like protein
  misc_feature (1)..(300): Xaa is any amino acid
TLTVPRPVITPVPKGYRTTPDNKVFFATKRILEIPAGDLYADVEAVSLTPGVAGDGFAVGDIKNMVDRSPWLLSAVNITPSTGGAEEESIEAWIQRLRLLPESFSSAGPDGAYEFWARSANPRIIDAKAWMPQLDLEDFAEFLAPWGITNVPGFYKALGDYYRDRGTGPGNVNVTALMKDGEMPSVEVLNQVMETLSSRTRRPLTDFVHVVPPKQKSFGVSFEYWIETARATEAASIIEAVEKATLRYIAWQKSKLGLDINPDTLHKMIMDCGVKRLEIEEPVFTILEPIEVADFNGIKT

SEQ ID NO: 98371 - protein, 284 aa, Unknown
  Obtained from environmental sample
  misc_feature (1)..(284): Xaa is any amino acid
MMEREDVIIVATVSCIYGMVTPDVYRKMTSTFAKGETVNVDSLMRRFVELQYERNDVALERGRFRRRGDTIEIYPAYMEEAYRVDMDWDKVERIRRFNPVSGEMLEDIDRALIYPAKQFVMPADMVHNAMGAIKRELEERLEFFKSQGKIIEAERLKTRVEYDIEMLNEMGYCSGIENYSALLAGRKPGESPDTLVDYLPQKHLTFIDESHVTLPQLGAMYAGDRSRKQSLVDYGFRLPCALDNRPLRYDEFVDRLDKTVFVSATPGKTEIEQSARVGSSLYGR

SEQ ID NO: 98372 - protein, 289 aa, Unknown
  Obtained from environmental sample
  DOMAIN (1)...(289): Aminotransferase class-III
  misc_feature (1)..(289): Xaa is any amino acid
VRAVSEQAAKYLHVCNYYQSDASAAFAEKLVEACAPAGMKNVFLANSGAEANEGACKLARKYSLLKYGPGRHTIVTLQGSFHGRTITTLAATGQEKFHRDFGPFTEGFIHIQGGDISALESVLDSKSVAGLLIEAVQGESGIIPQSQEFIAAASKLCAERDILLMFDEIQCGLGRTGTFLALEQYQDFEGNPLKADIVTLAKGLAGGIPAGAVLAGEKTCGVFGIGDHGSTFGGNPVAAAAGLVVLKTVNTSEFLQEIKRKGDLLTAAIKQLPNVKEVRGRGLMIGFDI

SEQ ID NO: 98373 - protein, 279 aa, Unknown
  Obtained from environmental sample
  DOMAIN (1)...(127): tRNA synthetase class II core domain (G, H, P, S and T)
  misc_feature (1)..(279): Xaa is any amino acid
NYHENMYFTAIDDEEYAIKPMNCPGGLLIYKTGLHSYRELPLKNAELGLVHRHELSGVLHGLFRVRSFTQDDAHIFCEPEQIREQVLETIRYTIEVYRDFGFEDIAIFIATRPEKSMGSDEDWALATDALTSAMTESGMAYRLKKGEGAFYGPKIEFNIKDSLGRNWQCGTTQVDFSMPARLGIAYRGRDGKDHVPVMIHRAIFGSLERFIGIITEHFAGKFPLWIAPVQAIVLSVSEASVAWADTFAARLLEAGLRVERDFSGESLGNKIRLHEIAAF

SEQ ID NO: 98374 - protein, 279 aa, Unknown
  Obtained from environmental sample
  DOMAIN (2)...(192): LytB protein
  misc_feature (1)..(279): Xaa is any amino acid
MTLVNATCPEVAKVHARIKKWSSKGYYTVILGTHGHAESLAHRSFAAAGSSIVSDIGEARALPDGCLKKVLVVAQTTFTAKDFDPIVEEIRGRCGEMVAENTICEDTKRRQEEAERIAASVDGVVVVGGKSSSNTKHLATLTQERGVPVQLVEVASELDLGAYSGLETIGVLAGASTPTWLVDEVVDVLQQHGKRPGPAKELLDGPLVAPVLLSLGVAAMAMGLHSWIGLKRDWASIAIVLAYALAMHLVTPFLDPYGLGTKGPARARRLERGKITMLS

SEQ ID NO: 98375 - protein, 258 aa, Unknown
  Obtained from environmental sample
  DOMAIN (13)...(140): GTPase of unknown function
  misc_feature (1)..(258): Xaa is any amino acid
MAKEKFERTKPHINVGTIGHIDHGKTTLTAAITTVGQAVGLTKTAKRFDEIDNAPEEKARGITINTAHVEYESKERHYAHVDCPGHADYVKNMITGAAQMDGAILVVSAADGLMPQTREHVLLARQVGVPKIIVFLNKTDLVDDPELIDIAEMEIRDLLSKYEFPGDITPFVRGSARSALENPKDPAAQKCILELLDTMDSYFPIPERAIDKPFLMPIEDVFSITGRGTVVTGRVERGIIKVGEKVEIVGITDTKDTT

SEQ ID NO: 98376 - protein, 146 aa, Unknown
  Obtained from environmental sample
  misc_feature (1)..(146): Xaa is any amino acid
MAALAFTGCPTEGSSSNDNPVTEKIIQGIKIPQLGDKPVTSITPNTQFSGKVTWEPAHETFQADTSYKAIITLEQIGNLSFSGVPENYFEVPNAVAVTNVRNSNRVTAVFGRTGGKDDGSLKVVDELNIIVNRPQEGQVAIKAIDH

SEQ ID NO: 98377 - protein, 253 aa, Unknown
  Obtained from environmental sample
  misc_feature (1)..(253): Xaa is any amino acid
MHESKELLTGLLKEEMGFEGFVVSDWAAVTQLSGGNYKAQIANAINAGVDMVMATNGRNSWISFITNLQELVEEGTVPMARIDDAVLRILRFKQSLGLFDAPLMEKVGAIGSDANRTAARALVSESLVLLRNENNVLAKLPEYKRILVAGQGAHDIGMQCGGWTITWQGNHGAITKGTTILEGIQAAAKDKAVITYAEDGKADGAFDAVIAVIGENPYAETEGDRNDQINIRTIDTDMLREVYGYDCPVIVIM

SEQ ID NO: 98378 - protein, 202 aa, Unknown
  Obtained from environmental sample
  misc_feature (1)..(202): Xaa is any amino acid
MVKTDHAKLSVVSQCRLLSIARSGLYYEKTGESAYNLALMQEIDRAFTEWPFLGVRQMREYLRLLGYGVGSKRVRRLMRLMGLTPIYRKPKTSISNPEHTRYPYLLRDLAITRPNQVWCTDITYIPMRKGFLYMVAVMDWHSRKVLSWRISNTMDADFCVWALEEALAKYGKPDIFNTDQGSQFTSFTFTNVLRENNIRISM

SEQ ID NO: 98379 - protein, 72 aa, Unknown
  Obtained from environmental sample
  misc_feature (1)..(72): Xaa is any amino acid
ERTIVELASEFGVHQTMVHKWVKQLKESAPGIFSGEIKTDEAKKEKELTRLHAKIGQLTVERDFLAEAWGKR

SEQ ID NO: 98380 - protein, 171 aa, Unknown
  Obtained from environmental sample
  DOMAIN (1)...(168): Carbon starvation protein CstA
  misc_feature (1)..(171): Xaa is any amino acid
MSGIVILLISIVVLVVGYVTYGSWLAKKWGVNPDLKTPAHELKDGVDYMPAKAPVLLGHHFSSIAGAGPINGPIQAAVFGWVPVLLWVLIGGVFFGAVHDFGSLFASIRHKGQSIGAVIAENMGGRAKKLFIIFSYLTLLLVVAAFASIVAGTFNGFVVDKGVVTDVKIPN

SEQ ID NO: 98381 - protein, 151 aa, Unknown
  Obtained from environmental sample
  DOMAIN (4)...(132): MgtE intracellular domain
  misc_feature (1)..(151): Xaa is any amino acid
MLKELLTPEIVQLIRERQWTDMRDALIIWPPAEVADLIESIDEPTRVLLLRFLPRDYEAEVFAELTPGLQNDLLKELTNREVRGLLSELSPDDRTALIDEMPAEVTRRLLGLLSPEDLAETRQLLGYPEGSVGRVMTPYFLDIRADMTAAE

SEQ ID NO: 98382 - protein, 120 aa, Unknown
  Obtained from environmental sample
  misc_feature (1)..(120): Xaa is any amino acid
MWWKDSIVYQIYPRSFQDSSGTRFPNDGIGDIPGIISRLDEIKDLGADVIWLSPVYKSPDADNGYDISDYYDINPNFGTMADMENLFAEAKKRDIKIIMDLVINHTSDEHEWFKRAAISK

SEQ ID NO: 98383 - protein, 80 aa, Unknown
  Obtained from environmental sample
  misc_feature (1)..(80): Xaa is any amino acid
MTVDMLKPVTNLVTWSATYSVGIKLIDDQHKELFNLVNDMCNHENNDDEQAERAYFKSVVKQVVGYVKIHFATEENIMKR

SEQ ID NO: 98384 - protein, 294 aa, Unknown
  Obtained from environmental sample
  misc_feature (1)..(294): Xaa is any amino acid
KFTPGNFINESGEIQAINAPDGGAPFGYIIADSGDIGKLIVNNINVARINNNEYKTLNAAIAAAATDGSPTVITILRNITVPEPGMTIADNTAYNISFNKRITLTVNSNITITASAGAYRLFTVNSGASLSLDGAGGSLTLTGNGSAASNRQGVFVNGGTLAMNNNVTINGFNNTSGYGGGMYIAGGTFTMSGGKIMNNTAVSRGGGLYLGGGTFTMSGGFIYGADEPPTKNTASGSSPGGAAVYISGGTAEYGGDYGGGKYDENDAISTSNLTVPQYSVARIDTTYYKTLNAA

SEQ ID NO: 98385 - protein, 74 aa, Unknown
  Obtained from environmental sample
  misc_feature (1)..(74): Xaa is any amino acid
MPLNIRDVRLDDSQALLDIYAYYVENTWVTFETKVPELQVFRGRIEQYRFKLGFPYKVAELDSVIAGYAYAHPF

SEQ ID NO: 98386 - protein, 285 aa, Unknown
  Obtained from environmental sample
  DOMAIN (6)...(278): Elongation factor Tu GTP binding domain
  misc_feature (1)..(285): Xaa is any amino acid
YQNAEIGISAHIDSGKTTLSERILFYSKKIHAIHEVRGKDGVGATMDHMELERERGITIQSAATQVNWKDYTINVIDTPGHVDFTIEVERSLRVLDGAILVLCSVGGVQSQSITVDRQLKRYHVPRIAFVNKCDRTGANPFKVCLQLREKLGLNAVMVQIPIGLEDKLEGIVDLVTMKAVYFDGDQGETIRYADIPSNFKADAEKYREEMLEALSMFCDDLAGQYLEGGVVSEDLIHQAIRKGTLSEQLVPVMLGSAYKFKGIQPLLDAVNLYPSHPTEVKNPGS

SEQ ID NO: 98387 - protein, 271 aa, Unknown
  Obtained from environmental sample
  DOMAIN (158)...(191): Tetratricopeptide repeat
  misc_feature (1)..(271): Xaa is any amino acid
FVAVDDKGEIAYSSDGENWTAVANNTFEDCSINAIAYGGGKFVVGDQHGKIMYHIPLSPEEEKAYIEEKEREQREAKEKAEREAKERAEREAREKAEREAREKAEREAREKAEREAKEKDEREAKELVARGNEYIQKCNDDQALMDFAGAIRINPNCKDAYLSRGGVYEHKGKYRKAESDYEKALQLDPNDKDIPLLLERIKPLVIEEIRKTQEEEARKRREAEEARQRREAEERKARELREAKEKKKAKIARIFWVAVVLALITFIIYKI

SEQ ID NO: 98388 - protein, 111 aa, Unknown
  Obtained from environmental sample
  misc_feature (1)..(111): Xaa is any amino acid
AGCKSAENELREFEQKVKAEMAEIEKSAKQDEEAIAGLEKEREEYKTKVNQKILSQYERIREGRDGQGIVLIDGESCGGCGMVLRPQLINQAQKCHELVFCDNCSRILLKK

SEQ ID NO: 98389 - protein, 82 aa, Unknown
  Obtained from environmental sample
  misc_feature (1)..(82): Xaa is any amino acid
MDNASKQIESVYKILSEEFKKNRTPIVDLIDVQTGDPFKVLVATILSARTKDETTAAAARKLFERVKGLDDLDKLTEKEFAR

SEQ ID NO: 98390 - protein, 273 aa, Unknown
  Obtained from environmental sample
  misc_feature (1)..(273): Xaa is any amino acid
MGELRAWIIGWDLLLEYAVSNVAVAISWGDYARSFLSNVFHVNIPGWLAMDPRTALMYKEGTAPLAEKLSALASAKGGGPECELFANWEALKEAPTLFGFPLTFNMLAVVITIVITYLVYRGIKESSRANNWMVILKVLILLLVIAAGARFVSGENYAPFFPNGWKGVQAGAAIIFFAFIGFDSVSTTAEECRDPGRDLPRGILWSLGACTIVYALIALVVTGMLKYTQLEGIADPLAYIFEQKGYSVLAGVISAGAVIATTAALLVFQIGQP

SEQ ID NO: 98391 - protein, 170 aa, Unknown
  Obtained from environmental sample
  misc_feature (1)..(170): Xaa is any amino acid
VQLFRQEKKSANEFRTGNNELLDANIQEMYVCATFRPLVEWFAVFTVAAVIVVGSKLVFSLSVSLGVLIAFINLVQMFFHPVTDIAEKYTLLQSAMAGGEKVFKLMDTDEQIPDTGTHNFNGEVRGHIEFDNVRFAYKNGEDVLKGLTFAVKPGEMTAIVGYTGAGKTTI

SEQ ID NO: 98392 - protein, 166 aa, Unknown
  Obtained from environmental sample
  DOMAIN (69)...(130): NADH-Ubiquinone oxidoreductase (complex I), chain 5 N-terminus
  misc_feature (1)..(166): Xaa is any amino acid
MTSQIPLWIIPFFPLVGALLLGAITLAQAKSEQPVPEAYIGALAVSFPLFSFVATAMFALGMPEDGAYAETLGDWISIGDFQISFGFLFDSLTKTMLLFVTGITTLIVLYSIGYMKGDSGYTRFMCYMNLFLFSMIVLVLSDSLPLTFLGWEGVGLCSYLLVGFGI

SEQ ID NO: 98393 - protein, 104 aa, Unknown
  Obtained from environmental sample
  misc_feature (1)..(104): Xaa is any amino acid
GSVTLFRGETISIKTEFGEIPTRNGFSLYESGKLESLEPAAPTLIKTPTGKVKAFDPDAVGVSADVNSLVFGEDGDIIGFNPARYGSLQMCSPEDCANCSLGCS

SEQ ID NO: 98394 - protein, 263 aa, Unknown
  Obtained from environmental sample
  DOMAIN (1)...(187): YjeF-related protein N-terminus
  misc_feature (1)..(263): Xaa is any amino acid
MGLYVFSLIEAAGRLSADIFVRHFGELFENKPKISVFSGTGNNGADAMVMLRSWILSGLAEASNCKLVVSRLPRDEETGPWTEMLKSLEKMKVPVFTWNGETGKDLISNSGIIFDSDIIIDGIAGTGISGPLRGAALEMINAINSQKTKKPFVVSVDMPSGNSDKWKPDMTIVEANVTLAIEPQKSCIYNPAARSYAGIILPVNGIFPKEIIDRYRCRNAELLDWESVRLRVPKVKAYAHKYERGCVEIRAGSAGNTGAASIA

SEQ ID NO: 98395 - protein, 106 aa, Unknown
  Obtained from environmental sample
  DOMAIN (1)...(94): Adenylate kinase
  misc_feature (1)..(106): Xaa is any amino acid
TGSIFRAAVAAESPLGIKVKAIMDSGKLVDDETTIALVKERLAMDDVQKGYILDGFPRTIPQAKALAEFSVVDKVVNFDIPDANVIERLSGRRVCRKCGYNFHVIF

SEQ ID NO: 98396 - protein, 277 aa, Unknown
  Obtained from environmental sample
  misc_feature (1)..(277): Xaa is any amino acid
MEARFVELQKNIYGLALEKNARENETRLFNEQRGENKVKIGQNEEREKQIIQKIEELNNDAAGQDAIVADMQKQLESIEENIRSFEENIQLSASRISENEKEVRRAEDEIHNIEKEQAELEKDLAKITDDIVAELDAGLKKAGYSAAERKSAEEALHETLGRLNAVLGGREALIRDLAAASAASSTTGGVDAAELGRIAGTLASGLAEAAADAQKALELFKSYREHTPVFIDEFLAPQGIITKKRELDSRIRGAKDSIEERRQRVKNLRSDNINLLA

SEQ ID NO: 98397 - protein, 256 aa, Unknown
  Obtained from environmental sample
  DOMAIN (85)...(118): Tetratricopeptide repeat
  misc_feature (1)..(256): Xaa is any amino acid
GKVRTGVQVSRSLNELSALMPALGVSLTEINPVNYQKADPAVLRQMGMEQHLISFITAERKYREGNYRDALAEFNRSIALKPDNADALEGRGNAWLKTGDTGRAIEDYTRAINLKTNRAELYNYRGFVYAGRGETEKAIADFTQALRLKPGYADALANRSRAYYQSGDYAKAVDDCTLLIALEPENFTAWNRRGSSWYAQHDDNRAIADFSRAITIKPDFALALHNRGNAWHSKGDFAKALADLNNAITVDARVCR

SEQ ID NO: 98398 - protein, 228 aa, Unknown
  Obtained from environmental sample
  misc_feature (1)..(228): Xaa is any amino acid
VPVRLEITGGTVSATTGEAVYNDSTGAVTISGGTVSATSGYAVYNNSTGAVTISGGTVSATSGYAVYNNSTNTVTISGGTVSAISGYAVYNNSTGAVTISGGTVSATGSYGYAVYNRTTGKITVSGTAKVTSENTNSSSGTIYLANSGSSTAVRLEITGGTIENTASNENTRTIYNASTGEITISGGTVLATSGRAVYNTFTGAVTISGGTVSATSGSAIYNYYDGTV

SEQ ID NO: 98399 - protein, 107 aa, Unknown
  Obtained from environmental sample
  misc_feature (1)..(107): Xaa is any amino acid
MVIAIDGPAGSGKSTIAKLLAQKLKDKEGRGFTYINSGNLYRAITLGCLRSGITPNDEEKALEYAKKADIAYDGDKIILDGEDVTDGLHTDEIDKWSAPLSAIVPIR

SEQ ID NO: 98400 - protein, 85 aa, Unknown
  Obtained from environmental sample
  misc_feature (1)..(85): Xaa is any amino acid
VETAKGIVKRLNNHADTKTHARHIHADEALALGLKITMLEKDDDLQDLVLTVHHAYMHTLSSSMAATIIENHLGHAIVSMIRREQ

SEQ ID NO: 98401 - protein, 246 aa, Unknown
  Obtained from environmental sample
  misc_feature (1)..(246): Xaa is any amino acid
MGYQYIENLKNSREVLIREYEDTDIANLPDERYQIKLRYFDNAQLNEDRKAYDVQIKSFETEIQHLWDVLEVIYQDSKNSMKVNDFEDLAKKEKPRVQKLIKSKTGEPMYEDIAKVWDEISFVRGGETEVEKSNRTFIYEKDRIRQRIILMRNRMKTMYTYQYPIERRVMEDRLAFLEREYYRFEYMINPYHLLPGLLLDVDITSIKRKKATLDAMANVLNEFLHGVSKGFADAAFASFSRRRSTV

SEQ ID NO: 98402 - protein, 259 aa, Unknown
  Obtained from environmental sample
  misc_feature (1)..(259): Xaa is any amino acid
FQEFLDFNHFSRGFTLEDKFLLFVKYGGMPAVAEYGFNEKMIYEMLEGVYNTVIVKDISQRNKITDHTLLKKLTDFLAHSIGSVNSVNSISNYLVSNKETTHKSAPNKTIPNYIAALQNAFIFYELKRYDIKGKALLRTLGKNYIVDIGLRNMLLGYRDAEKGHILENIVFLELLRRGYKIHIGKYMNFEIDFIAETPKEKIYFQVCESLSDKNVLEREIAPLRLIKDNHEKVILSQDKPFIASYDGIKIRNVLEFLLE

SEQ ID NO: 98403 - protein, 224 aa, Unknown
  Obtained from environmental sample
  DOMAIN (1)...(223): Membrane dipeptidase (Peptidase family M19)
  misc_feature (1)..(224): Xaa is any amino acid
MKEGGLSASCFAVYLGQGPRTADGYALAKERALATFGQLEAMFKKYPELCEQAYTPDDFRRIAKTGKRAILVSMENGYSIGIDVNNVNEYYAKGARMMGLVHSSNNDICDSATDRAVTGGTDKGLSEFGKSVVRRMNELGVVVDVSHASDKSFFDTLAISKSPIMASHSSARAICGHARNLSDEMLRALKKNGGVVQLCILSDYIKTRKIDPEQKKLQDDLNAR

SEQ ID NO: 98404 - protein, 263 aa, Unknown
  Obtained from environmental sample
  DOMAIN (1)...(263): tRNA synthetases class II (A)
  misc_feature (1)..(263): Xaa is any amino acid
MRFGEKSNLWEMGDTGPCGPCSEIHYDKGDLATQDATFADPVQGVNGANARYIEIWNNVFMQFERIKSGELLPLKNKNVDTGMGFERVCAILQGKDSNYETDVFSPIINKIAELSGVPYNADQSGMPHRVVADHLRALSFAIADGALPSNDGRGYVLRRILRRASRYARLLNQKEPFICRLVPTLVQTMGEAFPEIRERADFVTEVIRSEEERFIRTLDDGLERFEKITHELNSKLILGSQVFLLYDTYGFPPDLTRIWQKKK

SEQ ID NO: 98405 - protein, 196 aa, Unknown
  Obtained from environmental sample
  misc_feature (1)..(196): Xaa is any amino acid
EKYSYVIGPREGRSNSKEQYWVIYDTEKVTVLEYDNWPDEEDIFERNPFSVYFKTSGAFDFTLIDNHIRPSDAENEIRALPSVITYYIDLWNDPDVLVLGDFNADGRYFDKTLLYSIFPEGEYRIIFNDEDTTVAVSHNTYDRFIITSSASDYFTGNFGVIRFDEVYDFSGYSIRPSQVSDHYPIWAEFYVDRQPW

SEQ ID NO: 98406 - protein, 240 aa, Unknown
  Obtained from environmental sample
  DOMAIN (29)...(240): Aminotransferase class-III
  misc_feature (1)..(240): Xaa is any amino acid
MPDLSAKSKSLIEQENQFGAHNYHPLDVVCTKGEGVFLTDVDGNKYMDFLAAYSAVNQGHNHPYIAEAMIQQIRKLALTSRAFRNDMFPPLLEKLCRMTGFDKALLMNSGAEAVETAIKAVRKWAYDVKGVEYPKAEIITASGNFHGRTTTIVGFSTDPDSFSNFGPFTPGFKIVPYGDISAVEAAITPNTAAIFMEPIQGEGGVVIPPHGFLKALREIADKNHCLLILDEIQSGLGRTG

SEQ ID NO: 98407 - protein, 288 aa, Unknown
  Obtained from environmental sample
  DOMAIN (51)...(94): SWIM zinc finger
  misc_feature (1)..(288): Xaa is any amino acid
GYRKVEGNYNPYYYVEIIFPRLAEAEQVYKLIENDPPLLAGIAAGELPESFLEKLKKKDINLIPKRWRDMSRSCTCPDYGDPCKHMAALYYIIAREIDADPHVLFKLRGMDLAQRFGNAAVRKIAPPFAVTFAAKEKAPHEKAAQAEAPPLELEEIPHCGELISSLLPSAPPFCERDFALALTEFYHYCAGYHGWQTAEESEETLAETEHDFSRSRWTAHCSAYEPGADIYLQAQDINGRKKRYGLHEAFDLFSRFSDEDGTASYTFLFYLFKFLNPCLSAGAFIPFI

SEQ ID NO: 98408 - protein, 210 aa, Unknown
  Obtained from environmental sample
  misc_feature (1)..(210): Xaa is any amino acid
MILSLPLAEDSDLSGKNQTNKKRVELSDYSDIGVADAFSRYYGNIARYSSSLGWLVWDGKRWENNDLKAQSLEVAFTDIIREQALQSGDSDYVRFATRIRSYNRVHGVLGIAKSLLEISNDELDSNPCDLNTPAGIVDLKTGKTRPHDPAAFCTKMTGVSPSAGGSPLFDKFLNDITLGNAELKKYVQCIAGMACLGKVYSEVLIIAYGG

SEQ ID NO: 98409 - protein, 260 aa, Unknown
  Obtained from environmental sample
  misc_feature (1)..(260): Xaa is any amino acid
MLGILEDILVRPELTNKKLIKDLLVEERNSLNSSIIHSGHSFAITDAAARLSRTRKLDDMLGGITQLRFLDEIVKNEEYDLAERACGGLHDMMINRRTCVVSMTAGDPSKFTGALEPFVGNLPSHEKVGERFQDMAQGYSDEWLELFSDAEAFARREAGSPTESCKGIEINSAVNFIARAWRLPDTDAAEKGRSYLLSRNLSTGYLWDKVRVEGGAYGGMSGSSVAHPVFSCASYRDPNLESTLAHFVGGLSEAVSTVRR

SEQ ID NO: 98410 - protein, 253 aa, Unknown
  Obtained from environmental sample
  DOMAIN (42)...(241): Ferrous iron transport protein B
  misc_feature (1)..(253): Xaa is any amino acid
MVLTLNMMDEVQANNGSIDIQRMREVLGIPVVPISAIKKEGLSELMEQAVETVHNRKRPERIDFCSGAVHRTIHAVVHLIEDHCQRQELPMRFAATRLVEGDEPMLKTLGLDENEAHMIEHAVKEMEMEMKTDREAALADMRYQFIEDVCKKCVVKAKESREYRRSVKIDSLLTHKIWAFPAFLGIMLLIFWLTFGVIGNRLSELMVLGLDNLRDIIDSALTTYGINPVIHSLLINGIFAGVGAVLSFIPIIV

SEQ ID NO: 98411 - protein, 157 aa, Unknown
  Obtained from environmental sample
  DOMAIN (3)...(121): Calcineurin-like phosphoesterase
  misc_feature (1)..(157): Xaa is any amino acid
MSNKLLVLSDIHGNMPAIVAVLRWASDELTGSDMAVFLGDGLRELSFAQERAALSCEWKKVRGNNDLAPTAPESDVFDFGGHRFYLCHGHRHALYNNFDRLAASALKTGADAALFGHIHVPCLENANGLLLVCPGSIGRARSNAGETFAVIDCMPGK

SEQ ID NO: 98412 - protein, 71 aa, Unknown
  Obtained from environmental sample
  misc_feature (1)..(71): Xaa is any amino acid
AWTGALAKRAELDSQVELGEFAKKLEAATLATVEAGEMTGDLACIANPAPGRVLNSWEFIDAIAQRMGTGD

SEQ ID NO: 98413 - protein, 262 aa, Unknown
  Obtained from environmental sample
  DOMAIN (8)...(262): Nitrogenase component 1 type Oxidoreductase
  misc_feature (1)..(262): Xaa is any amino acid
MSGNLVNLNVNPCKMCMPMGAVSALCGIRGCMSILHGSQGCATYIRRHAATHYNEPVDIASSSLTEEGTVFGGEENLLKGLRNMIDLYAPEVIGVCTTCLAETIGEDVGAIVRKFYAQNPDDVGVKIITVASPGYGGTQNEGWFAAIRAVLEQTMPNDEPNGRINVFTPMISPADVRYLKNTLKSFFPGKGTECVILPDISENLDGATEKRYNRLKTEGTPIECVAEMAGARLTIEFSEFTDARHSPAEYLNETFGIPFVKL

SEQ ID NO: 98414 - protein, 251 aa, Unknown
  Obtained from environmental sample
  DOMAIN (1)...(200): Domain of unknown function (DUF1083)
  misc_feature (1)..(251): Xaa is any amino acid
MWDDTGLYVFARVADPTIRNATGDNANSSHTFSSVEVFVNERVDADGEVFRGDGSKNGDNASATASSYAGRGGQYRLAAGSTTGYRSGNPTAAYNAFNNNSLGRSYWTITANDEWAVDGKPGYIMIFKVPFRFASASTGADSGVTPAAPWPPANNKKIGLDLQINACDSNSRLGVMVWSNTTSTNYQNCYDWGVATLVGRPPDGHPPTIDTDLNTTLVEYGLDSISAASLTVSATAPTDATLAYQWYYSTA

SEQ ID NO: 98415 - protein, 273 aa, Unknown
  Obtained from environmental sample
  DOMAIN (46)...(270): AICARFT/IMPCHase bienzyme
  misc_feature (1)..(273): Xaa is any amino acid
AQYEIPEIDLVIVDLYPFEETVASSAAEADIIEKIDIGGISLIRAAAKNFNDVAIIASREQYAELLQMLRENNGSTTLENRKYLAAQAFNVSSHYDSAIFSYFNRSQNISSFKQSVHGSMNLRYGENPHQKAAFYGRFNDMFEQLHGKEISYNNLLDIDAAVALINEFSEPTFAILKHNNACGVASRPTLPQAWSDALASDPVSAFGGVLICNRELDKATAEEVNKLFCEVVIAPSYNAEGLEILKQKKNRIILVTKNLTLSAMQSSYATQWC

SEQ ID NO: 98416 - protein, 263 aa, Unknown
  Obtained from environmental sample
  DOMAIN (1)...(263): tRNA synthetases class II (A)
  misc_feature (1)..(263): Xaa is any amino acid
VTCFAGDNVAARDTECADYWSGQGVPRERIHFLPKCENWWAMSSGLGPQGPCSEMFYANPVKSGCKRANSTECNPACNECGRFIELGNDVYMQYVVKSAGGRAEPCAQKNVDTGWGLERILCFINGHKNVYETEVFAPAIKILADAGVRDTKSQRIIAEHTRAAAVILADGVVPSNSGAGYILRRLIRRAVRNVRAVPDHGKVFGELIEFYNSYLDFDRKTVTDAFLEEVARFETTLANGLKEFEKLDKIDGKTAFYLFETYG

SEQ ID NO: 98417 - protein, 115 aa, Unknown
  Obtained from environmental sample
  misc_feature (1)..(115): Xaa is any amino acid
MGERKPVVQFCDFGFQYKVHTSPTLFDINLTVYEGEKILILGASGSGKSTLANCINGIIPFSYPGTITGSLKVNGVETRDLSIFKLSNSVGTVLQDSDAQFVGLSVGEDIAFAME

SEQ ID NO: 98418 - protein, 231 aa, Unknown
  Obtained from environmental sample
  DOMAIN (12)...(231): Cobalt transport protein
  misc_feature (1)..(231): Xaa is any amino acid
MNNRFMINYSPGTTPIHKLNGATKVIGFIAITIYVIMTFDVRVMLVMFILCCIGIISMKPNWKPVFFMFCFLFVTAGLFGTLMVLLIRPSSGLSHVGAETIIVRFNEHLFLSKELLWYVAAMFFKRLTSFSTAILFILAITPSELAAGLNKIGLPYKICTVVSLAFRTIPDIARDFTDIRNSLMMRGLELDSRKAGLFKRISQTVMILSPLIITAFGKVGNIANAMDLRSF

SEQ ID NO: 98419 - protein, 271 aa, Unknown
  Obtained from environmental sample
  misc_feature (1)..(271): Xaa is any amino acid
MKVEKLFGAISQNTEKMPRPQIAPFEKGNYRGQQKLVPEGQSENISKKSTETIEYKGVKSKPLSKKDAKLKQNDIQKNEKPAKYNIKNDISTKSIVKGIHTKSLHVAGASAVICGSVSFIRNVVEVAQGNKEIDEATLAIIKDTGGAAVIGYGSTAVGTTLKVALSTTKNQTLKAIGKTNLPAQIVYVAIETGKTLKRYINGEIDGVECIKDLGEKGTGMVGGALLGTYGGIAATAVFGKSLELPFAILGQTVIPIPVIGSIIRSMVGYTL

SEQ ID NO: 98420 - protein, 89 aa, Unknown
  Obtained from environmental sample
  DOMAIN (3)...(73): ACT domain
  misc_feature (1)..(89): Xaa is any amino acid
MNAIITVVGSDKVGIIARVSAFLAERNINILDISQTVLSGNFVMMMVVDLSSSTKALELVKNELAELGDSFNVSISMMHEKVFSAMHRV

SEQ ID NO: 98421 - protein, 252 aa, Unknown
  Obtained from environmental sample
  DOMAIN (103)...(252): Lon protease (S16) C-terminal proteolytic domain
  misc_feature (1)..(252): Xaa is any amino acid
MFICTANHLETIPSALRDRMEVIALPGYTMQEKLVIAQRHLLPKMLKDNGLQEKELSIHVKAVERIIQEYTREAGLRNLERELGSLCRKIARRKAEGQHGPFRVGAAQTPKFLGAPRFLDAEKEKEFKPGLALGLAWTPFGGEVLHIEAGAMKGKGRLTMTGQLGDVMQESAKAALSYARTHAGELGVAPGFADKTDIHIHVPSGATPKDGPSAGVTMVVALISALTDKPVDSTLCMTGEVTLRGRILPVGG

SEQ ID NO: 98422 - protein, 130 aa, Unknown
  Obtained from environmental sample
  misc_feature (1)..(130): Xaa is any amino acid
DIEPDRYIHRIARMGHAEGYAAMEAVVRNYPLPFSVFAVNDETALGVLKFCRRNGLSVPADVEIVGFSNIAFLDMISARLSTVNIPAETMGEEAARMLLHRIEGGTEDGRVTVLETTFVPGETTLKKYPA

SEQ ID NO: 98423 - protein, 133 aa, Unknown
  Obtained from environmental sample
  misc_feature (1)..(133): Xaa is any amino acid
IPKIRLAMNATGKHTFAGIQTDKIFKKIDGLGEKKTLTEVDVLLYGDTEVMAVETKSHLVIRDVKHHIDRLEILRQHEELVGIKDKKLVGAVVGAIVDKDVTDFALERGLYVAKIREEEDKLDIAEPDQCRTW

SEQ ID NO: 98424 - protein, 67 aa, Unknown
  Obtained from environmental sample
  DOMAIN (11)...(47): Flagella basal body rod protein
  misc_feature (1)..(67): Xaa is any amino acid
MSDINGLFSAMRISASGMRAQRIKQGVITSNLANAETTRTPEGGPYKREFVVFEADGRDSMAGLREE

SEQ ID NO: 98425 - protein, 181 aa, Unknown
  Obtained from environmental sample
  misc_feature (1)..(181): Xaa is any amino acid
LSIASTSVRRPVLTLVLSAFIVLFGLIGLKQVGVREYPAIDPPIINVRTTYTGANAEIIANQITEPLESAINGIDGIRAITSNSRDEQSNITVEFNLGANLERAANDVRDKVSRAQRLLPEEADGSVVSKADANATAILVLSLGSNNMSLLELTDLGERVQERLQTVEGVAEIGMWEQRNM

SEQ ID NO: 98426 - protein, 275 aa, Unknown
  Obtained from environmental sample
  DOMAIN (3)...(275): Glycosyl hydrolases family 38 C-terminal domain
  misc_feature (1)..(275): Xaa is any amino acid
MEEQYFESPFYTITFDTEGRITSLKDHRQGREMVALGGAFNAFITAEDARDDIDADWIKHIRQETRLVSTEITAYGPVCFRLRRTYEIGEASRLVQDMVCYAGDPRIDFDTKVSWHEKWRLLNVEFDTAIDAIHVRYEVQYGHVLRNTHRSLMQDRPSFEICAQKWISLEEEGAGIALLNNCKYGYNVEGGRMRLSLLRSPIAPDPEADLGEHYFTYSILPFAGHFGDSGVIRSAYELNSPVEALLIPVSQIADDYDTESFCSVDGNQVIIESEK

SEQ ID NO: 98427 - protein, 115 aa, Unknown
  Obtained from environmental sample
  DOMAIN (10)...(115): Elongation factor Tu GTP binding domain
  misc_feature (1)..(115): Xaa is any amino acid
MGKKKFDRTKPHVNVGTIGHIDHGKTTLTAAITLVLSKAGGGDYVPFDKIDKAPEEKERGITIAASHVEYETSNRHYAHVDCPGHADYIKNMITGAAQMDGAILVVGADDGPMPQ

SEQ ID NO: 98428 - protein, 75 aa, Unknown
  Obtained from environmental sample
  DOMAIN (1)...(68): Ribosomal protein S7p/S5e
  misc_feature (1)..(75): Xaa is any amino acid
RQHLPTAGGDKPDRRHALSIRWLINYAQGRGEKGMQAKLAGELLDASQGRGASVKKREDTHRMAEANKAFAHYRW

SEQ ID NO: 98429 - protein, 136 aa, Unknown
  Obtained from environmental sample
  DOMAIN (8)...(136): Elongation factor Tu GTP binding domain
  misc_feature (1)..(136): Xaa is any amino acid
LAPSVPITQTRNIGIIAHIDAGKTTTSERILFYTGVSQKMGEVHDGQATMDWMEQEQERGITITSAATTCFWRKHRINIIDTPGHVDFTVEVERSLRVLDGVVAVFCAVGGCQPQSETVWRQADRYGVPRIAFINK

SEQ ID NO: 98430 - protein, 245 aa, Unknown
  Obtained from environmental sample
  DOMAIN (120)...(200): Phage integrase, N-terminal SAM-like domain
  misc_feature (1)..(245): Xaa is any amino acid
MNVLYLFRESGYLRIPYVFYNQALFNDLLSAGGEWDNTCHTFIFRGDIDKEYFIDIFQKFLPKMHSMIPVVQVLENSGSQPLISGFLDQPLGVTPEQSPIKKAPLIPVSVSLPEKLSVQLQEKLENELRAGKYSVRTRRTYNYYNRLLCRNLQKTPEEIQADDIKQFLADIEKDRDYSAASMNLAISAIKFFFKRVMQKDILKDQRRPRHDKRLPVVLSKEEIKKLFMKEKNFKHRLLLMMVYAS

SEQ ID NO: 98431 - protein, 247 aa, Unknown
  Obtained from environmental sample
  DOMAIN (31)...(244): Radical SAM superfamily
  misc_feature (1)..(247): Xaa is any amino acid
MDEIYDLPYARMWHPMYKSGIPALEEVKFSVTSHRGCFGGCAFCAIYAHQGRIVQARSHGSILREIERMTRLPDFKGYVHDIGGPTANFRHPSCKEQLMRGACRKRECLFPEPCKKLDASHADYLELLREARAVEKVKKVFVRSGLRYDYLMVDCERAPEKGLEFLIELCRHHVGGQLKVAPEHASPGVLWAMRKGTLARYRKFMELFREVNARLRKKQYLVPYFMTSHPGSGLSEAIELALFAAEL

SEQ ID NO: 98432 - protein, 242 aa, Unknown
  Obtained from environmental sample
  DOMAIN (1)...(204): Pyridoxal-phosphate dependent enzyme
  misc_feature (1)..(242): Xaa is any amino acid
SVKGDYAATFRLSAQAIEKYGWYNRNAAINPYLSEGKKTVSMEIAEQLGAEAGGFTAPDFVAVSVGDGCTIAGVWKGFKDLYATGLIDKLPRLISVQAEGCCPINRAVENNTAIEKMEENTLADSIAVGVPRNGDKALAAIRESNGIAVNVSDDEILAAMRLLGKSAGVFGEPAGVAGTAGLAKAAARGLIPRDAPVVSIVTGNGLKDVASAQKAAGIGAANHIRIEPDMALLTKEFSKRRF

SEQ ID NO: 98433 - protein, 299 aa, Unknown
  Obtained from environmental sample
  misc_feature (1)..(299): Xaa is any amino acid
IIVPTFGQMRDPAAVPASIKERLKKTGLWDVDPANLFRITWKNEAKESGGLFGAPNYIELPSKLTGVAAKIICLVGKYFPTGCHKVGASFGCLAPRLVTGQFDATAQKAVWPSTGNYCRGGAFNSKLLAVDSVAILPKGMSRERFDWLKTIATEIIATPGTESNVKEIFDKVNELKATRKDVMIFNQFDELGNYLWHYSVTGPAIAEVFENLAQNDKRINFSGACFTSGSAGTLASGDFLKQRYVKSRLAVGEALQCPTILNNGFGSHRIEGIGDKHIPWVHNVKIPTWQSPLTITTAW

SEQ ID NO: 98434 - protein, 144 aa, Unknown
  Obtained from environmental sample
  misc_feature (1)..(144): Xaa is any amino acid
GVDIPTDGVALAQAMESYQTVEIRLTDDGFEPAIVVMQRGQLALWNINVDSLDPGSASLIFPAYYTTLGTKQGDNVLQIIPSDDFDFSTGDNVFYGFVKVVDDINIVDIEAVKAEVTNFETLIYPEAYFEAAMGGGGGCPCCSR

SEQ ID NO: 98435 - protein, 273 aa, Unknown
  Obtained from environmental sample
  misc_feature (1)..(273): Xaa is any amino acid
RDNAFQRRGHGSIQERAVKEFDDFVSLLRGNGVDVVVVEDTPEPHTPDSIFPNNWFSTHASGELVFYPMCAVNRRAERKEAPIQAIKALGEGGRIKRTIDLSGWEAKEQFLEGTGSLVLDRANRIAFVCRSSRSNEEVLDAFCSELDYTYFYFSAVDKGWDQIYHTNVMMCMGDSFVVVCLASIGDAQQREEFLTIVGKCGKEVVDISLSQMEQFAGNMLQLKSKGGESLLVMSTTAKDSLDEPQLAALQRHCKLVVPKIDVIETNGGGSARC

SEQ ID NO: 98436 - protein, 91 aa, Unknown
  Obtained from environmental sample
  misc_feature (1)..(91): Xaa is any amino acid
IEITLAEFPEDLIKEIQNIARKAHQALDCEIYSRTDVRIDKSGNVFVLETNTLPGMTPTSFLPAQANHIGLDYPTLVETLLEKSLTKSTGR

SEQ ID NO: 98437 - protein, 121 aa, Unknown
  Obtained from environmental sample
  misc_feature (1)..(121): Xaa is any amino acid
CIPHLGASTPEAEDNCAIMAVRQLMDFLEYGGIRNAVNFPRCKLDMRAPNRLLVANRNIPNMVGQITTILAAANINITDLINHHRDDFAYNIIDTEQEITASVLEQLRGINGIIRVRSIKK

SEQ ID NO: 98438 - protein, 84 aa, Unknown
  Obtained from environmental sample
  misc_feature (1)..(84): Xaa is any amino acid
MLAILGISAFYHDSAAALLIDGHIVAAAQEERFTRVKHDSNYPVHAIDYVLRETGLSGDDIHEVVFYEKPFIKFERLLETYHAF

SEQ ID NO: 98439 - protein, 267 aa, Unknown
  Obtained from environmental sample
  DOMAIN (170)...(237): His Kinase A (phosphoacceptor) domain
  misc_feature (1)..(267): Xaa is any amino acid
VLRALEKKQLLEENRRYREYLEEEVIKRSDELLSSAVRFKTLFNLAGDALFIHDRDGKIIDCNEAAFQHTGYSRKLLLEMNIRDLILPDDVGCFEHAMARLPRTNNMMYELRFAHKSGAVSVMELHATIVTTEASPLIFVICRDVSERRRMEQEREELKAQVEAAQRVELVGMLVSGIAHDFNNVLTALTGYASLLQMDAAQVGAPVAGYVDKITEIAAKGQGLTARLMSFIRKKREELVPVDIHKMLTETEQLLRPNTNHVKIDLD

SEQ ID NO: 98440 - protein, 268 aa, Unknown
  Obtained from environmental sample
  misc_feature (1)..(268): Xaa is any amino acid
YQQQEYQPQQRQYDLVDGNLVIHDGVTYIYEKEFMNKRLTSVTIPDSVTYISELAFADNQLTSVTIGNSVTSIGESAFRGNQLTSVTIPNSVTKIGKGTFMENQLTSVTIPNSVTEIGESAFAINQLTSVTIPNSVTEIGESAFYKNQLTSVTIPNSVTEIGSYAFAGNKLTSVTIPNSVTSIESGAFANNQLTSVTIPNSVTSIESGAFANNQLTSVIIPNSVTYIGGKYFFSTRGAFENNRLTSATIPNSVKTIRENAFANNPLTS

SEQ ID NO: 98441 - protein, 68 aa, Unknown
  Obtained from environmental sample
  DOMAIN (5)...(67): DnaJ domain
  misc_feature (1)..(68): Xaa is any amino acid
MAKKDYYEVLGVSKDASADDIKRAYKKLAIKYHPDKNPGDKEAENKFKEAAEAYDVLSDEKKKAQYDR

SEQ ID NO: 98442 - protein, 258 aa, Unknown
  Obtained from environmental sample
  DOMAIN (116)...(203): Helicase conserved C-terminal domain
  misc_feature (1)..(258): Xaa is any amino acid
EILYGDEDTDADSGIEQFVFDTEEYRKLARKYYQTLSDTRQKYEWIRIELFNKKLKDDLETDTVQLLKIMELGKTWDQAKDRQLGALYELLTKKYPEEKVVIFSQYADTVYYLSNMLKKRGLADVECATGSCEDPTDLAYRFSPESNKEHLGKKDFKEIRVLVSTDVLSEGQNLQDCHIVVNYDLPWAIIRLIQRAGRVDRIGQKHDKIWCYSFLPEEGLETILDLRGRLQRRIRENAETVGSDEVFFDGDPVNLKDL

SEQ ID NO: 98443 - protein, 92 aa, Unknown
  Obtained from environmental sample
  DOMAIN (1)...(82): Transposase IS200 like
  misc_feature (1)..(92): Xaa is any amino acid
MMAQRCAEMGADAIEMEVMPDHVHLLIEVDPQYGINRAVRSIKGRASRALRGEFPSLKSRLPALWTNSHFVSTVGGAPLDAVRKYIEGQARE

SEQ ID NO: 98444 - protein, 67 aa, Unknown
  Obtained from environmental sample
  misc_feature (1)..(67): Xaa is any amino acid
MELNYNSAAELRAFLDENGLGMRKKFGQNFLINPSVREALVRALEAEAGDAVWEIGPGLGAMTSLLL

SEQ ID NO: 98445 - protein, 127 aa, Unknown
  Obtained from environmental sample
  misc_feature (1)..(127): Xaa is any amino acid
IVDLVKERVNFVHELWTQSHFFFIAPTSYDETVVKKRWTPETPAILESFAKLLCNETDFSSEHLEHLTTEFIKSNNHNMGQVMNCLRLCLVGAAMGPHLNDIMAIIGQEETVQRIRKAVQCLSVNSK

SEQ ID NO: 98446 - protein, 230 aa, Unknown
  Obtained from environmental sample
  misc_feature (1)..(230): Xaa is any amino acid
MITCGALVIYKNKPAIVKDQADGKFSISLQNGEQVKVRDKDVEEIHAGPVNNFKEIESAGPAVSSVREAWELLSGEGGSLTLKDLAGFICNEYTPSSAYAAYCAIRDGLYFYGTIDSVTPRTRDEVISEESKRAAVLLESGERMQFLERLKACIKNSPNNKLLPEDARHLQDVEALAFGKSTKSRTMRDLTLSETPEDAHLLLLKTGFWTGMVNPHPNRFGVTLSSASVC

SEQ ID NO: 98447 - protein, 211 aa, Unknown
  Obtained from environmental sample
  misc_feature (1)..(211): Xaa is any amino acid
MTVEESYLQESIELMIIRETARAESREQKLIALEYIKDALDRGNRNDEIRQTLENLSREGRRTVSRENGRVTNNFPDVRRQAAKYLGQMGTSEAQKSLMDITQYENEPMVLQEAIKALGDIGTNDNNETVTHIVWVVRKFDNLNPDNLMAVATIDAFEKIAKKNNGINSPEAIQILVRISEGNYVTPVRERAKQLLADLRSYGNPGSVSDK

SEQ ID NO: 98448 - protein, 97 aa, Unknown
  Obtained from environmental sample
  misc_feature (1)..(97): Xaa is any amino acid
MDNDVYVGLDIGTTKVACIIATRGESGGLEVVGVGKCNSMGLRKGVMRNMLNIVESIQTAVKEAELMAGVDVDDVWVGIAGDTIRALNSTGSVAMTH

SEQ ID NO: 98449 - protein, 171 aa, Unknown
  Obtained from environmental sample
  DOMAIN (13)...(171): Tubulin/FtsZ family, GTPase domain
  misc_feature (1)..(171): Xaa is any amino acid
MRITMDETFKAIAKLKVIGVGGGGGNAVNRMVDAGLSDVEFIAVNTDAAALDKNLAKKRLAIGKKLTGGLGAGACPDIGRQAMEEDRDTVMSLLEGADMLFITAGMGGGTGTGGAPVVAEIAKELGILTVAIVTRPFLFEGKVRERNASHGISELRKHVDTIIVIPNQKLL

SEQ ID NO: 98450 - protein, 72 aa, Unknown
  Obtained from environmental sample
  misc_feature (1)..(72): Xaa is any amino acid
MPVRIGAPQKFGGLADMAKTPMFATGVGLCMFGAETAQAGGGHKSGKKKSSSGENGYRNIVKKVSSWFSKYF

SEQ ID NO: 98451 - protein, 62 aa, Unknown
  Obtained from environmental sample
  misc_feature (1)..(62): Xaa is any amino acid
MLVTEWDYDLEKEVLKEEAYEKGLEEGWKKGLEEGLEESLEEGRKEERCKNIREFVPDRCRY

SEQ ID NO: 98452 - protein, 62 aa, Unknown
  Obtained from environmental sample
  misc_feature (1)..(62): Xaa is any amino acid
MDFVLEDLSPVRKKVTVSAGALEVDNALNDALRHVSRDFAMPGFRKGKAPAAVIERRFGGEI

SEQ ID NO: 98453 - protein, 285 aa, Unknown
  Obtained from environmental sample
  DOMAIN (1)...(124): DEAD/DEAH box helicase
  misc_feature (1)..(285): Xaa is any amino acid
VVSPLISLMKDQVNALTQSGVAAAYINTSLTQGQIDKALRNAVNGAYKLIYVAPERLPTSEFMAFAGSVNISMLAVDEAHCISQWGQDFRPSYTRIPDFIAKLSKRPVVSAFTATATPKVRDDILAHLKLRNPRILIAGFDRKNLYFGARRPRNKYDALTAFLKEREGRSGIVYCGTRSYVETLCNRLRTDGYSVSRYHAGLLDKERHDNQDDFLRDRVKIMVATNAFGMGIDKSNVSFVLHLNMPKDIESYYHEAGRAGRDGEPAECVLFYSDRDIRMNAWLLE

SEQ ID NO: 98454 - protein, 261 aa, Unknown
  Obtained from environmental sample
  DOMAIN (1)...(243): Protein of unknown function (DUF1015)
  misc_feature (1)..(261): Xaa is any amino acid
LPHEYTLSGPKQDRYELMETTLANTGQIFGLASDDDGKLYGLIRLIMSSSPLVGIFKDENDTVHSLYKCSDDSLIDQAAELMKTRTILIADGHHRYETALRFYRDIKDEAFSHVMMTIVSMADPGLIIRPFHRLVRKTDQGRSVSDMLDELAKYFDVVPIGKASADGVYKALSAQSKVEMVYWDCASGEIYDLRLSKGGESFLAGVMPEQSDKWKRLDVSKINCIIINGILSLPLDGQVLHDIVHYANDAAVGAEKLLGAE

SEQ ID NO: 98455 - protein, 281 aa, Unknown
  Obtained from environmental sample
  DOMAIN (156)...(194): WD domain, G-beta repeat
  misc_feature (1)..(281): Xaa is any amino acid
FRRWLPPSAYGKLWDATSGREIRTFLNVDTDQSVVFSPDGKQMLSGSSELDGKQLIGTVKLWDVASGREIRSFAGHTSQVNSVAFSPSGKQVLSGSRDETIKLWDVASGREIRTLRFGSEVKSVAFSPNGKHLVISGHWNYETNTPPVEIWDVENGKILSTLSGHIMTVNSIAYSPDGKHIVSGSGSEGITYNKYKPAADYTVRIWDAESGLLLRTLSGHKRDVRSVMYSPDGKRIVSGSRDGTIRIWDAENGRVLKAFSGGKDDGSNNMSAFSPDGKCIV

SEQ ID NO: 98456 - protein, 64 aa, Unknown
  Obtained from environmental sample
  DOMAIN (4)...(59): ANTAR domain
  misc_feature (1)..(64): Xaa is any amino acid
MQKENRELRLKIEDIRIIDRAKCVLISRLNLSEEEAHRAIEKQAMDMRTPKRAIAEGILKTYEE

SEQ ID NO: 98457 - protein, 66 aa, Unknown
  Obtained from environmental sample
  misc_feature (1)..(66): Xaa is any amino acid
MKRFKKLGVIKNEPIYDEQKLKVFLDTIYSLRKKGSWSRLELIDLFNFIIPEFNHKETGNFLDDKM

SEQ ID NO: 98458 - protein, 278 aa, Unknown
  Obtained from environmental sample
  DOMAIN (83)...(278): tRNA synthetases class II core domain (F)
  misc_feature (1)..(278): Xaa is any amino acid
ALSADEKSAIADIAKKRGAADAPFRQIDREKVIFAFTVAKDGSVPAEEAAAALKAAGITGDEIGTLTPEMLETGSWKGKTFRSYNVKVPPTRLVPGRTNPYAQFLEDVKDKLASLGFEEFDGPVVETEFWNSDALFMPQFHAARDIHDAYYVADPGKSGFAHAKAIEEPWLSNVAAAHENGGKTGSRGWSYDFDVEFTKRLILRSQGTVLSAKTLPKAKVPGKYFGIVRCFRYDQVDATHLPDFYQTEGIVLGEDVNLRTLLGMLEIFAREVAGADEV

SEQ ID NO: 98459 - protein, 248 aa, Unknown
  Obtained from environmental sample
  misc_feature (1)..(248): Xaa is any amino acid
MGWELLDLYSDYLLCSSRQTTATGLSEITGGVVSHDRITRLLSGATTDSKTLWLKVKKTVRSHENEEASLIFDDTIIEKEYMDENDIICWHWDHQDGRNVKGINLLTAFYTAVTGETAIRIPLGYEIIAKTERYFDEKEEKEKRRSPKTKNELMQEMINAQITNRVKFRYILADSWFSSNENMKFINKRKKVFIFELKENRLVADSEQDKKEGYFERLDQKTLGKKLDDCMAKGFKYTCNALQTSLKN

SEQ ID NO: 98460 - protein, 168 aa, Unknown
  Obtained from environmental sample
  misc_feature (1)..(168): Xaa is any amino acid
MFLRELSSPVTALKGVGDSVASNLTRLGITNIAALLSHFPRDWEDWSHIVPLKDWETSRVCTEVQIVAKDWFGYGPIRTLKLYVEDETARVCLKCFKRPFLEKQFPVGMRARLLGNFEYKYGEIQSKSFELEHIEHINSPIMPVYPLTAGVKQGPLRKLVRQAVSRYV

SEQ ID NO: 98461 - protein, 166 aa, Unknown
  Obtained from environmental sample
  DOMAIN (1)...(154): Glycosyl transferases group 1
  misc_feature (1)..(166): Xaa is any amino acid
PVITFSSEDSGYKRADIAIEACVKSGRELVVAGAGNKITGKYRKNRLVRFTGRVSDNEAVRLFSEAKALLYPGIEDLGLVPIEAQAAGCPVIAFREGGAVDTVKENITGLFFNEQTPEALIAAMERFEQNEVTFGDRGVFYDHVQQFSKTAFIDRMRRVLEERKRI

SEQ ID NO: 98462 - protein, 261 aa, Unknown
  Obtained from environmental sample
  DOMAIN (10)...(261): Periplasmic solute binding protein family
  misc_feature (1)..(261): Xaa is any amino acid
MKKNIKYVTFALLATILAFIGCGKSNKPATDNAKISIVTTIFPPYDFARAIAGDKADITMLLPPGSESHSFEPRPQDIIKIQNSGVFIHVGGESDAWVNDILKSIDKPKMKVIILMDCVETVEEEIVEGMQEEEGEDKKDGEGEEGPEYDEHVWTSPRNAKLIARKISETLREADPSNAETYQKNTEAYLSALDALDKKFKDVVDSAARKTLVFGDRFPFRYFADAYGLKYFAAFPGCATETDASAKTVAFLIDKIKKEKI

SEQ ID NO: 98463 - protein, 259 aa, Unknown
  Obtained from environmental sample
  DOMAIN (1)...(98): TonB-dependent Receptor Plug Domain
  misc_feature (1)..(259): Xaa is any amino acid
VIDSKEIERRSKGTIAQLLQDIPGVQVTDGGVGGGSKRVTIRGEGPARVLVLIDGMKVSEQKSMDGSMIMIDPNNVERIEVIKGPASALYGSEAIGGVVNIITKKGGTSPVQGTQALTWDGSNGALTPYTSLFGGHNGFSYRVSGDYTGAGDKVGGSGKIENSGYMQRNWSAYMDCALSKGKVGVGYDHYWVSNRVPVVREEGDTEYNSSMGSVNGFGKTSIATDLPDWRRDRYYAFFELEKLSDTLRKVRLSPFVQNT

SEQ ID NO: 98464 - protein, 244 aa, Unknown
  Obtained from environmental sample
  misc_feature (1)..(244): Xaa is any amino acid
LIVQRVIPFGKAKKSSNFTINKKQVEFVWSDIQKIQDVYKIKIVIEDPVPLCILPNSYRNMIEPCKWGINKVSINGNGDLSRCGADPRYQLGNIFKKPLLEIWNESEVLQSFREKKYLPGRCHVCEVLDKCGGGCPLSCVIDEDHGLDYLYFDFENLAADIHGDLKFVPAKYEELSSILQLEWANFSDFANAFSVDSIKKWYKHNPNMFWVVKDASNWILGYVVLVPIKEPLYKDICDGKYSAL

SEQ ID NO: 98465 - protein, 261 aa, Unknown
  Obtained from environmental sample
  DOMAIN (8)...(60): Clp amino terminal domain
  misc_feature (1)..(261): Xaa is any amino acid
AQEALQEASSLAQKNDNSQIENEHLLLALLRQEDGIVPPIVEKVGADPHRLIAAAEGLMASQPKIFGEAAQVYLSSAASKVLAKAENEAASLKDEFVSTEHILIALAAGEGKTAETLKKAGVTKNAILGALKQVRGNARVTDQSPEEKYRVLDKYCRDLTALARQEKLDPVIGRDEEIRRCMQVLSRRTKNNPVLIGEPGVGKTAIVEGLARRIVAGDVPEGLKGKRLLALDIGALVAGAKFRGEFEERLIAVIHEVQASE

SEQ ID NO: 98466 - protein, 264 aa, Unknown
  Obtained from environmental sample
  misc_feature (1)..(264): Xaa is any amino acid
VIDLSNDTTLSNYVFVEYENALLGSQQKVTNFMVFKVELKQVPTASDFNTPGNKTVSYNGASQPVTITPKDGKSQGTITIYYTGTGSTSYPKNTTAPTALGTYTVTFDVAAATGWEEITGLPAGTLTIVKGTPVIDDFTITGQNTTYDGNSHTVNITPKPGKSLGAIKDIKYDNSTTAPTNAGTYTVTFDIEEENPNWNAETGLSINMTIAKATPIASDFNTPGNKTVSYNGAPQPVIISPKAGKSLGTIAIYYTGTSGTSYPK

SEQ ID NO: 98467 - protein, 104 aa, Unknown
  Obtained from environmental sample
  misc_feature (1)..(104): Xaa is any amino acid
MANKDLIEKTLQKGEGIFRLNPNFIPRPFGVEGRRLRLHPDDYFAYGLERGSIKERWMSSTNIAQNGPLAGPQEGLSFVAVDYGNDEKFSLKEAMKLWGRQSSG

SEQ ID NO: 98468 - protein, 88 aa, Unknown
  Obtained from environmental sample
  DOMAIN (1)...(76): OmpA family
  misc_feature (1)..(88): Xaa is any amino acid
NDLAGRKFRIEGHTDNLDVDPSVWASNWELSSQRSINILHYLTGLGIDEKRFQVAAFADTVPIATNDTPEGRAYNRRVDIIILDDAHL

SEQ ID NO: 98469 - protein, 206 aa, Unknown
  Obtained from environmental sample
  DOMAIN (1)...(140): Uncharacterised protein family (UPF0158)
  misc_feature (1)..(206): Xaa is any amino acid
MRFELDKILTDEILFYMENQDGEFLLDTLEAKVINVDNCNLDDESRYIPIPSWDSNDGFHLMEKFAAELKNPIIRHELSAALNTKRGVFRSFKNALEQYPEAEKMWYNYKNRKMKEDILAWYNAIREEWGLEPVGGEPEDISSIILEDFVFREGKESDESDINALHKFCTDAKENARFLDKEEHNNFSSGVFLVAETASGDFCGYI

SEQ ID NO: 98470 - protein, 286 aa, Unknown
  Obtained from environmental sample
  DOMAIN (138)...(170): Ankyrin repeat
  misc_feature (1)..(286): Xaa is any amino acid
IIDARNREGDTALHIAVRMNLREDGEYLISRGASIFSVNAAGDSPLYNALTSSGGIRYWIINPNTTGAKDGLGNNMLHYAANWKLDNAIPAIIQRGVSVESTNATGETPLFMAVKANSPSTMKTLLDNRANIKASDSQGYNLLHAAVRWNALEAASFLIASGIDINAHSLSGDTALHIAVSLGLSDMDSLLISNGANLEVRNIDGNTPFMEAVKTGLMPTIEKLAVKGADPNTRNIRGDTPLHIAVADGRHDIVTQLLRMRANIHARNTLNRTPFHIALGISSRMT

SEQ ID NO: 98471 - protein, 288 aa, Unknown
  Obtained from environmental sample
  DOMAIN (99)...(173): Protein of unknown function, DUF586
  misc_feature (1)..(288): Xaa is any amino acid
KRMASLYLTRLQIENMRTLGNSRCAAFRAGEIIFIDGVGEFLLLSVEHEGGQSGGGGNGSGDREYTYKNNFYCIDSTKKRYAPPLRAKPPVAAGLITAPIDALGEDLPNIDEMGRYRVKLPFDLSETPEYGATKDIRLSQISGGDGYGVHFPSKKNSEMILGYVDGNPDKPVGLGLLPDANARSVSNSENRTENVIRTWGGNELVMDDEKEKSKIAMSTTEGHKLVMDDLKGLAQIAMRTAAGHGLIMNDEDQKEMVTLHTVGGNELIMDDDEEGETVTLSTPKVEGK

SEQ ID NO: 98472 - protein, 179 aa, Unknown
  Obtained from environmental sample
  misc_feature (1)..(179): Xaa is any amino acid
TLSKPKDTELSFDFTEWYDCASARNLIARQAIDQGYDYVFMVDSDIVLPHKALSLLLAADKDVIMGWYPTRRLADGMSSIYGFEGCDCPNPCDKRNIRMPDMPVGKVIEIMGGGFGCALVKTDMLKKTKPGPWFRYVEYPDGNLFSEDLYFCHRVRTQFGYKVFAHTSVRCGHICKIVK

SEQ ID NO: 98473 - protein, 120 aa, Unknown
  Obtained from environmental sample
  misc_feature (1)..(120): Xaa is any amino acid
VSKFPPNAKVVFRGQRWKVWQWEQKQYDGSTKIYEGVSRLDTAKTIAEIGGKFVYTRQNQPHIAEPYLDLPGGVIEEGEGPLSAAKRELLEESGLESNDWELLNFRSHRVSRSIGTSISI

SEQ ID NO: 98474 - protein, 237 aa, Unknown
  Obtained from environmental sample
  DOMAIN (27)...(237): Branched-chain amino acid transport system / permease component
  misc_feature (1)..(237): Xaa is any amino acid
MSGRVLRFAPFALACGLALLPIGLNAYWMDVCVSVGIYALLALSLNVILGQCGLFHMGHAAFFAVGAYVTAICNTSLHIPVLWLLLPSGAAAALFALIVARPIIHLRGDYLLIVTIGIVEIVRIALVNDVGGLTGGANGIFGISRPVIFGCRIRTGMQFYYLVWGLVGLTVLLFFCLSRSRFGRALNCIKEDDVAAEGCGINVAGLKLAAFVVGAFWAGLAGNIFAAKMTIISPGSF

SEQ ID NO: 98475 - protein, 41 aa, Unknown
  Obtained from environmental sample
  misc_feature (1)..(41): Xaa is any amino acid
EALGAAYLAVAWKDALTFFVLIVILIVRPTGILGERAAEKI

SEQ ID NO: 98476 - protein, 274 aa, Unknown
  Obtained from environmental sample
  DOMAIN (1)...(274): FHIPEP family
  misc_feature (1)..(274): Xaa is any amino acid
MMAKSGEAGRKQKDDRGDVPQMEPPDPLSLELGVGLIPLVDKDKGAELMERVKQMRRQIGLDMGILIPKVRIVDNILLGQSEYCFKIRGVDVGKGKIRMGNYLCINPGTVKEELSGEKTTDPAFGLPALWIGEEKRDEAERAGYTVVDPPTIIATHLTEIIKRHAAELLGRQETKAIIDSLQKDYSAVVDAIFTSKDEKGRDLLNLGDVQKVLQGLLKEQVSIRNMVPILESIADFAPLANNTRFLVEKARQALSSQICHQYADEDRVLHVMTL

SEQ ID NO: 98477 - protein, 98 aa, Unknown
  Obtained from environmental sample
  misc_feature (1)..(98): Xaa is any amino acid
MDVKQAIIENKTSLGIELGSTRIKAVLIDENFTPIAQGSHDWENRLEDGVWTYHLNDVWTGLQDCLKNLALDVNNRYGLSLSSVGSIGISAMMHGYLA

SEQ ID NO: 98478 - protein, 261 aa, Unknown
  Obtained from environmental sample
  DOMAIN (1)...(212): Pyridoxal-dependent decarboxylase, pyridoxal binding domain
  misc_feature (1)..(261): Xaa is any amino acid
MKSAGVDVDAVSAGEVVRALRAGFEPKHIRYTADILDRDALILIKEHSIPVNIGSPDMLFQLHEADIKVPLAIRINPGFGHGHSNKVNTGGELSKHGIWHKDLPSIIKKAEELGFVVECLHIHIGSGSDYVHLSQVVSAMEHAVSTIGDARQSLKIISAGGGIPISYKRDENWHIDLDKYYNIWDNARKRISESTQHYLQLEVEPGRYLVAESCVLATEIRAVKKMGKNLFYLIDAGFSDLVRPSFYGAYHHISIISMNGK

SEQ ID NO: 98479 - protein, 274 aa, Unknown
  Obtained from environmental sample
  DOMAIN (101)...(134): Tetratricopeptide repeat
  misc_feature (1)..(274): Xaa is any amino acid
GKALKKSPGNSSGFQATEFKSKTKALLGTAYLKSRHSQAAVEIFQEAVEEAPEDRRIYRAYLNSLLVRGIRLCGTGDYELGNQMLRFVQENRSEAGLGESPLLRLELGRASRETGNLQEALEHFTAALKISGGKGIGDRRIRWSRASILMALGKTKEAIKEIEIIRSSDAEVPNLPWNSELVDLFMIKAFLETGEWRRAAESCREWLKQREDKPIIHALFAEALRNLRNFKIAHNHLQRALEKEPEELDFWYADILVSWEGKDYKAVKKAIKRQ

SEQ ID NO: 98480 - protein, 242 aa, Unknown
  Obtained from environmental sample
  misc_feature (1)..(242): Xaa is any amino acid
MLYMAVPALVSIIALFCVPAGADTTVKTAYAFITNVIAIAIVYTAIAIPYGSLMAFITKSTEERSKIGLFRALSGYVIGMIIAIALIPVTNALGGDQKAWITVGVVIGILSMAGLIITFFSNKEQNDTASQNSGEEKVAFFSGLKLIFRNKYLVIMSMVMFVINIIYTISASSGIYFTKWILKNENLIAVMGAAGLVPVVIGFAITTPMIKKFGLAKTARIALLVGIAGTIIRCFTRPASYR

SEQ ID NO: 98481 - protein, 288 aa, Unknown
  Obtained from environmental sample
  DOMAIN (118)...(288): Bacterial alpha-L-rhamnosidase
  misc_feature (1)..(288): Xaa is any amino acid
LLLCPGENNLAIELGDGWYRGSIGAMGVTNLYGTETKLLAQLEITCLDGSTNVICGDENFRWSNDGQIRFADLKDGEIIDMRKQPSYNGHPLLSSFSILPCSSNNVPVTEHERFTAKQSLSPSGKTLLDFGQNISGYIEFTVNASNGQKITLQMAEKLKDGELDMASIQCRAGKSNATPQQKIEVTCTEGTNHYKTKFAVFGFRYAQVVSDFPIDISYFTAIAVYSDMEETGFFNCSNTMVNKLVENTRWSMKGNFLDVPTDCPTRERAGWTGDTQVFLKREHGSWIL

SEQ ID NO: 98482 - protein, 246 aa, Unknown
  Obtained from environmental sample
  DOMAIN (1)...(246): BPG-independent PGAM N-terminus (iPGM_N)
  misc_feature (1)..(246): Xaa is any amino acid
MAELMSEIKAKGSRLHLMGLLGPGGVHSHQNHLEALAHWADAEGLPTTIHAYLDGRDTPQKSADGFIESLEKHLADAKNVKIGSISGRYWAMDRDKRWERVEKAWHMLVDGQPEHKCGTASEAIAEAYARGETDEFVTPTTTKDFFPIQDGDGVIFFNFRGDRGRQFSHALVDPSFSGFAAKKRPAVKLVTFTQYDAALDPYLKVAFPPQNLKNIFGEIISNSGIKQFRTAETEKYAHVTFFFNGG

SEQ ID NO: 98483 - protein, 116 aa, Unknown
  Obtained from environmental sample
  misc_feature (1)..(116): Xaa is any amino acid
MPEGAAPETHLAAGPWCFAGREDLFPGWEARFSFAPEPLRDPAARERAKQYAWALTAHYLPRMGEHLNRERGVDLPAVFWETALMPSMLTISQILVERWLRVQALVELWGRLPLRV

SEQ ID NO: 98484 - protein, 75 aa, Unknown
  Obtained from environmental sample
  misc_feature (1)..(75): Xaa is any amino acid
IEVCELFLRRWKPLADRLRPDDRMIAHTGFLVFCRLQECSGEFESLRPAGTRERKQAAARRGRLAAEEAEEAAEE

SEQ ID NO: 98485 - protein, 167 aa, Unknown
  Obtained from environmental sample
  misc_feature (1)..(167): Xaa is any amino acid
CISIICLLLLPACTKRETVNHDKNEVNEPKKVITIDEIFEKWQRATDIAASLDDRLLAAQVLISGIEGKGSLNSNIATLLSEFPTGGIMLFKYNLDTDNDSIRALISQTVSLVNSESGIPPFMAVDHEGGTVNRFRQGTADLPDASFYWELSPKQDKQTSFKKIEND

SEQ ID NO: 98486 - protein, 243 aa, Unknown
  Obtained from environmental sample
  misc_feature (1)..(243): Xaa is any amino acid
ITIPEILLPRAELKKWAVIACDQFTQDRAYWKKAADIASGSPSSLSLIFPEAFLDEENRAGRIESIHSSMRNYLDSGIFAAPRQGFVYLERDTPFNRGRKGLVAAVDLEQYSWSPTARPMIRSTEGTVADRLPPRMAIRRNAPVETPHILLLIDDETNGLLQGLEARAKKAAPVYQGELMLNSGNISGWFLDSEDDFAFLAARLEELASRALTRYQTGNEMSGAQPATASQPFLFAVGDGNHS

SEQ ID NO: 98487 - protein, 218 aa, Unknown
  Obtained from environmental sample
  misc_feature (1)..(218): Xaa is any amino acid
LIAVPVLIMQGQYKSIPKLHFYLKGFALTAAIGATQAFLWRNYVDMSSFSQPEKVYFGRFLWCNRGLIIELPLLLLLRFFVDKQQKGFYGLCRGNHHIRAYLWLFVLVLPILIGVSFTHGFRTLYPMGKVWLYGEGLFGYPAWANLLVLELAYLARFVIVELVFRGALVIGMGNVISRSAVLPMVAVYVALHFNKPILETTSAIFGGLFLGALAYQTK

SEQ ID NO: 98488 - protein, 238 aa, Unknown
  Obtained from environmental sample
  DOMAIN (114)...(180): His Kinase A (phosphoacceptor) domain
  misc_feature (1)..(238): Xaa is any amino acid
LEGTNFANINNDTARLVALLKSGNNRVSEYRMINYQNIPSITFIRKLENGWYLGIVTPEEEYFAEAERVKLILILLGITLSAILSVILAKIITEKRKADEKINEAEKAIVANRVKTSFLAKMSHEIRSPMNVILGITEMQLEKKDLPPDTMRALGRMHNSGYMLLNIINDILDLSKIESGKMELAPVTYDVAGMINDTVQINVIRFDTKPVQFILKVDEHVPSTLFGDALRVKQILNN

SEQ ID NO: 98489 - protein, 54 aa, Unknown
  Obtained from environmental sample
  misc_feature (1)..(54): Xaa is any amino acid
SYVNDVVFDPFVGSGTSLIVAQSLGRKAIGTELDSNYCKLAKNRILKEIGTLDL

SEQ ID NO: 98490 - protein, 254 aa, Unknown
  Obtained from environmental sample
  misc_feature (1)..(254): Xaa is any amino acid
MIWASNYNRYATATMFSLFFAGKTYAQDLQIEGENVQDWLQNRYIAAFKHTQRRLKNCAAITGWGSMNEPHFGFIGHQNLENPENYLIPAGPRPSPWQTIRAASGFPVEVPVYKIETLFKKVSYYETFNTQGISLFKDGFSCPWKQAGIWQEEGGVPRLLRADHFSRYQGRPVDFADDFLKPFIIKYIDTMKEADKHSIFFIEGLPNSAKAESHPSWDKNDPINTVNAFHWYDGFALFTKSFRTWFSMNQNTAE

SEQ ID NO: 98491 - protein, 86 aa, Unknown
  Obtained from environmental sample
  DOMAIN (15)...(86): Isoamylase N-terminal domain
  misc_feature (1)..(86): Xaa is any amino acid
MYFDNIVVDFGKALPLGATISNEGVNFAVFSRNATAVTLILFETADPGSPCVEIPLTKRGNRTGNIWHCFIKGLKEGTCYLYRADG

SEQ ID NO: 98492 - protein, 78 aa, Unknown
  Obtained from environmental sample
  misc_feature (1)..(78): Xaa is any amino acid
MDNSSFILGVDLDGVVGDFYGAIREIASEWLNKPVESLTREVSFGLKEWGIDEFGGYDRLHRFAVTQRNIFRDMKPMK

SEQ ID NO: 98493 - protein, 62 aa, Unknown
  Obtained from environmental sample
  misc_feature (1)..(62): Xaa is any amino acid
MSSLFDYISWRGDLDFIQSPLNPVDYVIFSQIAYLPFDGIVPGPEEKEGISLYLAMGKLKKK

SEQ ID NO: 98494 - protein, 235 aa, Unknown
  Obtained from environmental sample
  DOMAIN (112)...(191): Cache domain
  misc_feature (1)..(235): Xaa is any amino acid
LENKITELKALEKNIQAIMRLSDKDKADILGKLLYSISDQPVVSDVYVTFERGAYFGADKTEAGKYYNIEAFLSESGKREIFLDPVEVADDDDWYNGPKETKKIHMTEPYGWTYPDENRERKMFTLSAPIMVDGTFVGVAGIDLQLDLLRKHLFDKMTDDKRGSYAVLVSNDGLMATHPVDELVLGEIGEDMEAADRQALKDAIKNGEYRRVLKKSLKTGDFSLVSYVPMLPSGL

SEQ ID NO: 98495 - protein, 178 aa, Unknown
  Obtained from environmental sample
  misc_feature (1)..(178): Xaa is any amino acid
MKKILLFGCISMLFSALSCASKGAIAEVQKEDEAPSEFVQKKAPGGNYGVYYQIFVGSFCDGNNDGIGDIRGIIQKLDYINDGNLASNRSLHADGIWLTPIHPSRTYHKYDVMDYMAIDRSFGTMGDFEELIAECNRRGIKVIIDLVLNHTSAEHPWFQAARRGDKKYLDYYNLADSK

SEQ ID NO: 98496 - protein, 231 aa, Unknown
  Obtained from environmental sample
  misc_feature (1)..(231): Xaa is any amino acid
MAEVSQTQTNAYVETLQQVLASRKEWLEKEEMQKLKDELRNFHTSYASLYNIYLKKKLIDEDPYKQETKITELEVPDSTAFNEAKRVEQMSIRLSNYDNQLDYLTNFYQLGIDFLNLDRIKRIVGLVRYIDWVALSPDSQSLMTKAVAEISISSKAGVDQITLSIIGESLSRLSKTTASSMAILKNLSIYYRECYKLDVRQKITQNMSASEATLDNIRKKMHSAMPGSPFI

SEQ ID NO: 98497 - protein, 243 aa, Unknown
  Obtained from environmental sample
  DOMAIN (15)...(242): Peptidase family M13
  misc_feature (1)..(243): Xaa is any amino acid
VNTGIDVNNLDMTKSPGDNFYDFATSGWRRANPLTPEYSRFGVFDQLGQTVLKQVQDLILGIAGNPKGELENKIALIYNGAMDYDKRNRQGMEPVMAEMAEVDNIKDMAAYLGKAHRDGNPFWSDGVTIDAKDSEHYIFGIGQGGLGLERDYLLDDDAKSREVRAKYQKYMADVFKMFGISDAPAKSVYEFEIEMAKGFYPKEKLRDPIANYHKFSYADFKKKFSGFDWDAYFAARGIVPDAI

SEQ ID NO: 98498 - protein, 225 aa, Unknown
  Obtained from environmental sample
  DOMAIN (78)...(225): Thiamine pyrophosphate enzyme, C-terminal TPP binding domain
  misc_feature (1)..(225): Xaa is any amino acid
MSINAVTPVKEFADILTPEYKALAADGPYGRQTSVDDLGTFKEITEPHPHCAGCGVALGIRLSLASLPSPEDTIVIGTPGCAYFALSQSNLNYSCTAFGNQNSVASGLKRMLTLRHPGKNKDVMVMVGDGGVADIGLDYTLHSWFRGEKITTVMLDNEVYGNTGGQESGMTVKGRVLNMAPMGKKFGKIPVFEMAKTAGCVYAVRVTVASPKKLGAAIRRAVLIA

SEQ ID NO: 98499 - protein, 286 aa, Unknown
  Obtained from environmental sample
  misc_feature (1)..(286): Xaa is any amino acid
DFISGLLGSVVIVDDLDQALDLYGQLSGAGLSAAVTLAGEIVTASGLITGGSVGKEKESVSLLGRQREIIELRKDIEQYTNDLRSTDEALRLIEQLFGQIENELREHAAELKNLEIEEGTLANDLARLAIEREKLAKNIAAAGQESGEQRGKLERIAVEKQHLSAELTQLNAQKTAQEQAINAKEQALRQADSEKEKVNELLTEIKISNTNALGTKRQIQLKLDSFLDGIRQAQEQLAAKNAEREGLQTGLAETEQLVLFSQNTLPELEQQIEQTLALVRANNQER

SEQ ID NO: 98500 - protein, 258 aa, Unknown
  Obtained from environmental sample
  DOMAIN (142)...(212): ACT domain
  misc_feature (1)..(258): Xaa is any amino acid
YSLGADGSARPVQIATRFYRQRQGQFGSTLGRGGSDLSAAIFAAALEAEELEIWTDVDGILTADPRQVQNAFRIDSISYIEAIELSHFGAKVIYPPTIRPALEKGIPIRIKNTFNPSSPGTTVINDAEEGDFPIRGISSISGIALVCVEGSGMAGVTGFSARLFGALARRGINIILISQSSSEYSICFAILPSDTEAASEAIKEEYAQEIATGTIEEPTIEKDLSIVAVVGAKMKKISGISGRFFHALGRNGINVVAI

SEQ ID NO: 98501 - protein, 130 aa, Unknown
  Obtained from environmental sample
  misc_feature (1)..(130): Xaa is any amino acid
TPTVIVGRFRNESSEHIDTEIISSIMESSIFNSGKMDFVAGGSVRDDIRAERQDQQSNASAATRAALRNETGADYMLTGTVRSIVDRESNRTVRTYFVTAELTDIETNMRMWIGQNNDIKKIVTQPRNRL

SEQ ID NO: 98502 - protein, 65 aa, Unknown
  Obtained from environmental sample
  misc_feature (1)..(65): Xaa is any amino acid
MDYLTQKAPPKREDRLKACIVYGGDLCNLADKGRKCGCLSDGQRKFEQGSICLLLPGISILNSIP

SEQ ID NO: 98503 - protein, 180 aa, Unknown
  Obtained from environmental sample
  DOMAIN (46)...(149): DnaB-like helicase N terminal domain
  misc_feature (1)..(180): Xaa is any amino acid
MKRRPPARTAAAEMKPLRPRKITLLKKRPRPRRQKRPQMAKLRENVPPHDDELERAALGSLLADNQAIDAARQNHLRQEDFYSRAHQRIFETISALDIHNLTPDIQTVIQELKQNGKLDEAGGAAYVASLTSVVPSSANIDYYIQSVLDHSLRRSLLRVASDIGVAAYDESMESHEILDK

SEQ ID NO: 98504 - protein, 236 aa, Unknown
  Obtained from environmental sample
  misc_feature (1)..(236): Xaa is any amino acid
TGFPDTKEKLNHYKTIIRDYIVMEKRILVIDDFHCIEDPAVLRVMEEGFFRNMLPGTSVFLISRSISRINTADLLSRDQIFNITENDFRFTENELSQYFRGMGISFQPDSLREIMQDTEGWAFAINLIARSYQRAPGYGGYVRSAMKQNIFRLLETEIWDGLPENLQNFFVRLSLIDHLSVDLIARLTGGDEELTDGLEKQNAYVRRDTYINAYLIHPLLLEFLKTKQTLLTEEQK

SEQ ID NO: 98505 - protein, 263 aa, Unknown
  Obtained from environmental sample
  DOMAIN (1)...(139): AIR synthase related protein, N-terminal domain
  misc_feature (1)..(263): Xaa is any amino acid
LRLSENDIIDLIRQRFPDGAGLTDDCGRVPAPGPDEILLATADLMESGTHFNLEWHPPKMLGRKLMAVNISDLDASGARPLGFMLTLAVGRDIEAGLLKELLEGIADAAEEYSAPVIGGDTVGRECGLGLGITAFGAAKRHLHRNGVQVNDCIYVDHLPGASARGLEKLKSGQRLDPKQPDADILAHLDPSPNIGLGVKLAAIPEVHACIDVSDGLCKELRLMAEASDLSIMAGPNLGAEELYGGEDYSRCFACAMPLEELQN

SEQ ID NO: 98506 - protein, 275 aa, Unknown
  Obtained from environmental sample
  DOMAIN (3)...(254): Cell cycle protein
  misc_feature (1)..(275): Xaa is any amino acid
GQFYRALASTEYIRQIIWASIGLIIALTLSLLNYRRSYDIALYVYLIILIPLLYTCVFGRVVHGTRWLRLGMFGIQASEFAKISTIIFLARYLTDTRLSGNPFGRFLAACFIVLVPMGIVLIQPDLGTSLVFIPILLSMTFVAGISTRNIFFLIFCILLTSLLTVLPFWQTYILRKSLPAIVMLTNPRLIIITILALGLIMGIALFGYLKYKKRYFYWLFYFVAIIVLSLGASYAARKVLKNYQIMRLIVFLDPNVDPRGAGWNIIQSVTAIGAG

SEQ ID NO: 98507 - protein, 280 aa, Unknown
  Obtained from environmental sample
  misc_feature (1)..(280): Xaa is any amino acid
DHQQFVPIQSERRRTRSRAGKEAEPGETPTGLPIGQVLDKIKADITPVNGKRAAVIQFGPGDKNGNNKVDEDEVVAIEDPMRFEDIGWDSVELQGNLASKNNGDSSAAVMVLGNVSLTSFASIEGGYGGNSNVIYSESVNDKAVSVEGGTLQAKFGRVIYNNGDGTVQVIRGTVAALVKDGIINNKAGTVIVDGGTVEATTGRAILNASSGTVYVKSGTVKASGSNGVAIRNSTITAEDSEPGKIFISGGTVTSENTIQDQGTVVLMDYYLDPEGEDVEI

SEQ ID NO: 98508 - protein, 76 aa, Unknown
  Obtained from environmental sample
  misc_feature (1)..(76): Xaa is any amino acid
WATVLYRYKQWEKAKNGYGQDRYAIRRYRKMDDEYRQQNKFNISSRDQALKIIEALKKWVDLDDGAESGGSAGDEE

SEQ ID NO: 98509 - protein, 197 aa, Unknown
  Obtained from environmental sample
  misc_feature (1)..(197): Xaa is any amino acid
MMRRIKKSVVLVLAAVGLVFAQGAPNWHNLYPEYNGLAFGDGKFVAVSGDGLIRATGDGTAWSHYFIREGGNSRKIYAVAYGAGQFVALQNGSDYLYSLSGGVDWGIGTTGIPSSPWQYIVFGDVGGGSFVAVDGDGLTALFNEEDGWMGGVDAYVASLSHAAFGAGKFVVVGEGIKSSSDARGWRSTGVSAGVSVA

SEQ ID NO: 98510 - protein, 74 aa, Unknown
  Obtained from environmental sample
  misc_feature (1)..(74): Xaa is any amino acid
MKSEFAKLAISATFGLALALMHTAAFAQYQQQPPPQGQYYYPPPQQQQPPPHGQQGQYYYPPPQGQQQPPPQQG

SEQ ID NO: 98511 - protein, 136 aa, Unknown
  Obtained from environmental sample
  misc_feature (1)..(136): Xaa is any amino acid
VKYGMFIAKRICFIIIFGMVSVGFSQERVVYTFFINIVSEEFNIPLIGFVNMAAGSHSATQIGFVNRNTGNFSNLQTGFVNTSGGDTKGSQIGFVNNSGADTKGSQIGFVNNSGADTKGSQIGFVNKAPQNLKGVQ

SEQ ID NO: 98512 - protein, 67 aa, Unknown
  Obtained from environmental sample
  misc_feature (1)..(67): Xaa is any amino acid
MAVIGVIGGSGLDNPDILKNAKDEVVATPYGASSSPLKHGTINETQVVLIARHGRQHTITPSNVNYR

SEQ ID NO: 98513 - protein, 213 aa, Unknown
  Obtained from environmental sample
  misc_feature (1)..(213): Xaa is any amino acid
MKIILKNFRLVDEETDTFGSIIIQDGIIAALHTTPLSEEDKNGAVMIICGENFSSSGKPPVLMPAFIDLHAHFRDPGIPSIPVPQSEVLESASMAAAAGGFGTVVCMANTKPAIDTIEKAASLKKRSDALGLIDLFPVLSLTKNMEGKELSEITGISADDTSYIPLMLSEDGKDVEDDGIFFTTMKEAKRIGIPISCHCDFGGDENNAVHRVI

SEQ ID NO: 98514 - protein, 62 aa, Unknown
  Obtained from environmental sample
  misc_feature (1)..(62): Xaa is any amino acid
MDGYEAIKIVKLNPETKDIPVIFLTGMTDSNNEEKGRSLGAVDYITKPFDPQALIACLEKYC

SEQ ID NO: 98515 - protein, 64 aa, Unknown
  Obtained from environmental sample
  misc_feature (1)..(64): Xaa is any amino acid
DGYDATQCIPKLVFPQAKTIPIVAMTANVFREDVERCLKAGMNDHVGKPIDFKEVLEKLNKYLS

SEQ ID NO: 98516 - protein, 265 aa, Unknown
  Obtained from environmental sample
  DOMAIN (189)...(265): B12 binding domain
  misc_feature (1)..(265): Xaa is any amino acid
MAVDFGCPVIALTIDDEGMAGTVDRKMDVAKRLIELACGEYRLPEHYIYIDPLVFTLVTGDAGTANAALDSLEALRRIKAEFPNVRTVMGVSNVSFGLKPAARRILNNLMLHHAVKAGLAAAIFNPLHVDDINTYDKDVRELGENLLLNRGGDALQKYVEYFVALEASSKSVKKDKSNVDKSIDTKTSQSPEERLHAAIIDRDKRNLSELIDKLLSVRKAPDILNNILLPAMAEVGDLMARGEMILPFVLQAAETMKDAVSILEP

SEQ ID NO: 98517 - protein, 258 aa, Unknown
  Obtained from environmental sample
  DOMAIN (27)...(258): Glycosyl hydrolase family 57
  misc_feature (1)..(258): Xaa is any amino acid
YTPQNERHTGQKGAKAPVLMNNQSVISFVLHGHTPFVRHPEQLNPSQELWFFESLSETYIPLLEVFDRLDRDLVPFRIGFSLSPTLCHMLGDELLIQRYLEYTDRQIEFGIQELERSADNPELRSLVQFFYDQTVKKREFFSERFEKNILKGFDYFQKKGRLELLVTAATNAFLPFYTAYPEAVQAQFEVAISGFRANFGRYPTGFWLPELGWKEELDAWLRTYNFAYTIVDTHALAFARPFAEKGSFFPAKTPLGVI

SEQ ID NO: 98518 - protein, 271 aa, Unknown
  Obtained from environmental sample
  misc_feature (1)..(271): Xaa is any amino acid
LGTASGFFGVEKVFVRLDSGAPAEAEGTEYWSKLVEFGKIKDGKHSFFFRANDTKGTPGPETRVDFILDTTPPKIELLSNKTGGTISRSVNIKGKASDPNGIKKVELSEDGKNFTELRFSKRKDFVNFDIPVNIAGMPDGPKTYFVRAVDTTGAITVKSYMFLIKNNAPALEVFTPAPGEVVFNTFMLSGRAENKTGTVKLSYEWGKLKGDIPLRAGDPYWSVPIVAAKGAGGNIKVIAKDKGKTVSVTRRVEYRSEGGADVSRYTNIQFI

SEQ ID NO: 98519 - protein, 208 aa, Unknown
  Obtained from environmental sample
  DOMAIN (135)...(207): Cold-shock' DNA-binding domain
  misc_feature (1)..(208): Xaa is any amino acid
VLIAGDGDYVPLVRKLHTLGTQVMLICWDFSYHNENGDIVETKTSRQLLSEVYYPVQMAQKIDQNNCEHMKDLFVTERPQEWTFSFGSKAASSSLTDASVNADMPTWASSPIWANAAALHEKQHESSLDLSGATELVSTIFSVSPNGFGFIKDEEKNNIFFHYSRLTNCDFSELKTGMKVRCTIEEDPERSKREETPVYRATKVTLIE

SEQ ID NO: 98520 - protein, 169 aa, Unknown
  Obtained from environmental sample
  DOMAIN (35)...(125): Rare lipoprotein A (RlpA)-like double-psi beta-barrel
  misc_feature (1)..(169): Xaa is any amino acid
MRRNSVFVFIFFVAILCIPQYTAAQTSAPAGEVWRDEGVASWYGTEFDDRPTASGEIFNSALFTAAHPSLPFGTFLKVTNKQNNRWVTVKVNDRGPFIASRIIDVSKAAAEHLDMISAGTVPVIIETLSGGYASSPRTQAVPPPPAISQAPAAAPEPSPPPVYAPPPPP

SEQ ID NO: 98521 - protein, 82 aa, Unknown
  Obtained from environmental sample
  misc_feature (1)..(82): Xaa is any amino acid
GFGFVLFESPFRVLKLFEDLADLDNSRYVCVGREMTKIHEEYLRGSVTEICEILRKKAEKSEIRGEFSVFISGNKSNYRVNY

SEQ ID NO: 98522 - protein, 94 aa, Unknown
  Obtained from environmental sample
  misc_feature (1)..(94): Xaa is any amino acid
MTIDRVGPIDPIQPGKRPGKTGQAHESPKSDIISISSEAHEKAELLRVQELAAAAPDVRPEKVAEMKEKINDPSYINDSVVNATANKLIDALFG

SEQ ID NO: 98523 - protein, 124 aa, Unknown
  Obtained from environmental sample
  misc_feature (1)..(124): Xaa is any amino acid
MAQDNVFQGEMDPEIAALLGTVATPKEKASSDIPDFAHLFSDGEASEADEADESQGESGETDLTVGGFPEITKRLEEVPHKAFDDPEYYKTALSNEGDIAKRVHMILQKYLNAKDPKDKGVSAS

SEQ ID NO: 98524 - protein, 269 aa, Unknown
  Obtained from environmental sample
  DOMAIN (2)...(257): Bacterial extracellular solute-binding proteins, family 5 Middle
  misc_feature (1)..(269): Xaa is any amino acid
KYGANWTRVENFVGNGPFVLSERVPNSRTIVVPNPNYWNKDNVFLTKITFIPIDDDNTVYNMYLNGEIDWSTGIPVSRIDEVKLHKDYNVSPQLGTYYYVINNKDHKPLNDIRVRKALSMAIDRQELVTKVTKAGQIPATALVPPMPGYTPTTGNGFNVTEAKRLLAEAGFPNGQGFPTFTVIYNTNEGHRIIAEYIQQSWKNNLGINVNLQNMEWASFLDFRRTSGMQIGRAGWIADYMDPQNFLELLISNTGNNDGQYSNAQYDSLL

SEQ ID NO: 98525 - protein, 234 aa, Unknown
  Obtained from environmental sample
  misc_feature (1)..(234): Xaa is any amino acid
MPATAAPYKNEVYSGDVDFLVDQIGKITDSLHHEMPSDFIERVRYLTRDLTPFPGKFSFERFPYFREIVDCFSPLDPTQEVVLMKGAQMGATTAVLETVLLYNIMSDPKAQMYVTADAGLMRTSVQVRIEKMIDNAGARDLIFSQSRKKKGSRNTGDTAIAKEYPGGYLHCFGGRSPARFRGISYPCALADEVDAFPDSIPKEGTVIDLVRNRTKAYTGSKRKILWTSTPLIKQ

SEQ ID NO: 98526 - protein, 296 aa, Unknown
  Obtained from environmental sample
  misc_feature (1)..(296): Xaa is any amino acid
EPYETGTVVRIINRLKLPDNTYRVVLQCEYRGTIVSLYPHNDFSVVRVEPIKATGLSEPLNPDDLALIRSIQKSFTQYADYSKKINNDTLSAVERTENPERLANLICNSAYLKSEKKIELLRYTDTRERLLAILETLEKENEIFGIQKNITGKVRSRMDKRHREYVLTEQLREINKELGKDKIEDEYALLEQRIAGKKPPAEITEKTAKEIKRLKKLQTLSPEAGVLRGYLEWIADLPWSNFSVDSGDLNKAEKILDEDHFGMKKAKDRILEFIAVRQLLNNERPIVSEELPAQIL

SEQ ID NO: 98527 - protein, 227 aa, Unknown
  Obtained from environmental sample
  misc_feature (1)..(227): Xaa is any amino acid
IFRYICTLGKEEFSNSRNSNVLKWSCYINGTATRQDFLERAIEWVSKGKENIGNYMSYHRTDNNITELKNYFNSVIDWVSTVFTDVEREMCGLEWGRLYETYHNHPYNPQEVSAKVKKLYADPYVKSRKGIFEYILGGSTDTKLLDVRVFDDATKKSVYATQTANAEKAGTSNCPLCALGHDSNKSKIWKLSEMNADHVAAWSRGGATEITNCQMLCTTHNKAKGNK

SEQ ID NO: 98528 - protein, 234 aa, Unknown
  Obtained from environmental sample
  DOMAIN (1)...(68): FMN-binding domain
  misc_feature (1)..(234): Xaa is any amino acid
VTTTFASNAIVRISIGGHEETVPILDTIKTLLIPRIIQTQSIGVDSIAGATMSSIGVKSAVADAIAQANGNPDEWGIEPPKSNKRVVLPNDGGAPYDVIVVGLGGSGMAAYVSAAEVTGATVFGIEWAGKIGGNSATAGGPLAINSEYLKRLYNLPDSSGLIQDWYETFERKYGDVKPYEIDSKNGGAKMDVVRFLLEESGKTVTWLGDNYYFNFTPPFLGGPGTNYGTDRWVN

SEQ ID NO: 98529 - protein, 266 aa, Unknown
  Obtained from environmental sample
  DOMAIN (95)...(266): SRP54-type protein, GTPase domain
  misc_feature (1)..(266): Xaa is any amino acid
DKIKNFFGRRQSLSEEVFEDLADLLVEGDFGARGAWALTEKLKEACGREKASDGEGAKRILARLLTEILLKAGTAKNNIEEGKLFAEKPLSDGKRLGIVLLLGVNGVGKTTTAAKLAERYRTLEKRRPILAAADTFRAAAIDQLKIHGERLGVRVVAHQHGGDPAAVIYDAIEAANAGGGDVIIADTAGRMHTKSALVEELKKIDRVIESKAAGCRYIKYLVLDATTGRNALAQAETFKEAVTPDGIILAKCDSSARGGTVFSLAE

SEQ ID NO: 98530 - protein, 215 aa, Unknown
  Obtained from environmental sample
  DOMAIN (64)...(118): KH domain
  misc_feature (1)..(215): Xaa is any amino acid
MGQKVHPYGFRVVHTKAWHSKWYSRREYAALLHEDLKLRKELKAQLHGLNAMVSKIDIERAADKVTIRIFTARPGIVIGRKGAEIEKLREDLQRKLNRPVAVDIQEIKKPEIDAQLVAEAVAQQLERRVAFRRALRKAEEAAMRFGARGFKIKISGRLNGAEIARTEDYLSGQMPLQTIRAKIDYGFAEAHTTYGIIGIKVWVNAGDAAAEPAKR

SEQ ID NO: 98531 - protein, 94 aa, Unknown
  Obtained from environmental sample
  misc_feature (1)..(94): Xaa is any amino acid
MTVNRIGHLEPIPPGKKPGRNEQVGGENRADSIDLSAEAVEQAERYQVIELIKSTPELDDAKIAELRQKIDDPAYLNEKVINATAENILNAWFA

SEQ ID NO: 98532 - protein, 262 aa, Unknown
  Obtained from environmental sample
  misc_feature (1)..(262): Xaa is any amino acid
MEPKITIVSPQTGVPGTLVAITGQNFGASKEGAGVFFSWDYAAHSINPYVVAEPEYIEVSDIEFGYETWNAREIRIRLPDGAVSGSLKIKTPNGESRPVFFDVAGKPGSKYFKDKRSYTISYSVDVKINEAVRPNNLYLWIPLPVTSASQRKVTLVSRSMEPFMENHRGVSLFKLDNLTAGAAHTINLSFNIEVYAVETSVRPVSVRQGKSPLYTAYTQSTNLIPADNSHIKSTVAGIVGKEQNPYIKARMLYEWIIKNIDI

SEQ ID NO: 98533 - protein, 76 aa, Unknown
  Obtained from environmental sample
  misc_feature (1)..(76): Xaa is any amino acid
VKTVKVFKSGNSQAVCIPKEYQVNEEELIINKIGNSIILFPRDDPWDLFKKSLYEFSDDFITEGRNQPATQKRDLF

SEQ ID NO: 98534 - protein, 268 aa, Unknown
  Obtained from environmental sample
  misc_feature (1)..(268): Xaa is any amino acid
ASGTVTVTATIANGLTASSPYTQDFTITIQAGGVALGGTYVITGSGTAFTATNSGATIGSGAIQDVIYAIQTHAAGTDLTVQFGNGTATLDIGTASVKFDGTWGALKLTGKITSAVQNSNSITTGAIYIKDSVSISSEADITNSADKGVAIMQSSTLGTLSITGGTVSATSGYAVYISDDGGVLVSGTAKVTSANTNNAQGTIYLKDNKNPGARLAMSGGTVANTSTTTGNAIRNDSPGIVQIADGTVSKAGNNSGYALYNGGKRRDI

SEQ ID NO: 98535 - protein, 294 aa, Unknown
  Obtained from environmental sample
  DOMAIN (51)...(271): Methyl-accepting chemotaxis protein (MCP) signaling domain
  misc_feature (1)..(294): Xaa is any amino acid
DEIGAMAEALDTFVDTLRITAIDAMKKIPASDLGVEIKLRNDALCGVKESDSRTPSAYEEISQNLAAASSLTLRNVDNSMWAKLLAAESNAAVIEGDTAIKRMAEAVDLIKISSDNNAKIVKMVNYMAFRANFLALNAAIGAVRANEDSNEFPEVADEMLNFAMRCAGTAKNITDMIEESAIDVEKGVKMAEEAVKSIRTIVDRADNVDGMIAEIAKVSDEQVQSIERAKEAAARMYRAIPAYSIEPESGAEKANVCAPEQANTTDGSASNSDSGPYAADSCGRRNMSTRQKLY

SEQ ID NO: 98536 - protein, 84 aa, Unknown
  Obtained from environmental sample
  misc_feature (1)..(84): Xaa is any amino acid
MPEIARFYGMVIKMFFRNTEHNPPHIHVSYGDYAGLIDLQNGEMIEGDLPVKAYNLVKEWFDLHKNELHDMWNNQQLKKLPPLE

SEQ ID NO: 98537 - protein, 290 aa, Unknown
  Obtained from environmental sample
  misc_feature (1)..(290): Xaa is any amino acid
LLQAIQRSLLSRKNDLAFINTSTQKDKNIGKDTSLQILACPDLSREVEEVRELILDMANENAIRSFSDIAVYMPDPNKYVPYIQRVFGAYPHNHPEYIPFTILGASGSSSLAAKALSALFSIAGGEFNRAMIFELLDNPIVRESRRFSHGDLARWEEWAEAYGMFRGYNAEQRELMGDKGDAVTDEHTFEHGIRRVKSNSEEMAKDGAARSVELFLSLLRELNDWSAFFLDSGALLDIREAVEVVRQAIWLWLGRIGNSADEAAETRVRRDALNGLAQIGLQHTYAGRVN

SEQ ID NO: 98538 - protein, 156 aa, Unknown
  Obtained from environmental sample
  DOMAIN (5)...(152): N-(5'phosphoribosyl)anthranilate (PRA) isomerase
  misc_feature (1)..(156): Xaa is any amino acid
LPTRIKVCGITRAEDALAAVRLGVDALGFIFVPASPRYIAPAAAAGIIKMLPPFVSKVGVFVNEDPQFVIEASRTAGVDTAQLHGDEPPEYCAGFPMPVIKVFSVGADFDPSVMRRYAVAGYLLDTWDPKRRGGSGNTFDWAVAAKASGMYGSVIL

SEQ ID NO: 98539 - protein, 278 aa, Unknown
  Obtained from environmental sample
  misc_feature (1)..(278): Xaa is any amino acid
DEDDSEYDEIRRINEWAQNTKTGVRSELSFQPAETVWSAICSESDLCLGIHCPWRENCFVFALRKEASNAHIIVVNHHLLFADLAARFQGAGYENAVVLPPFNRLVIDEAHTIENAATSFFSAEFGRTGIFRQLGRLYHKKKRSKRGLLVRLCAMLPPGSKHLNSMVKQADKIRDCAQALDSSALELCSEAGVFRLSPDMHEAPLKENLLPCLKALRKDILALTSMIREITEELDDTQAADPSVWEIKAIVRRLEEIAEICDSFCKYQKLENEVLWIA

SEQ ID NO: 98540 - protein, 219 aa, Unknown
  Obtained from environmental sample
  misc_feature (1)..(219): Xaa is any amino acid
ALVELYYSNDKLFSAKTNVNGNAYLFPSEELNRENITIKVNGVEKQNPEYEGNIINITLEGDEAKISALDLMFVVDTTSSMGNELLYLKYKYTNIIGRIKEDNPEYTVVRLALLFYRDTGDEYITRYFDFTKNIEEQQRNLDKQSASGGGDFPEASDRALAEAVDKEKWSDSAVRLIFHVCDAPPHSDQISQSTYYNAVKTAAQKGIRIIPIASKGIDI

SEQ ID NO: 98541 - protein, 145 aa, Unknown
  Obtained from environmental sample
  DOMAIN (1)...(83): Single-strand binding protein family
  misc_feature (1)..(145): Xaa is any amino acid
AGGQAVCKFSVAVNRRRKNGDQWEDEANYFDIVLWGRQGESLNQYLVKGKSVGVEGELRQDRWQQDGQNRSKVEIVANNIQLLGGSQGPGGSYGSSGSAGSNGSFGGNSQGDGGSQGGNQGSWQRKGGDNNPPPSDDNFTDDIPF

SEQ ID NO: 98542 - protein, 117 aa, Unknown
  Obtained from environmental sample
  DOMAIN (59)...(112): Ribosomal protein S18
  misc_feature (1)..(117): Xaa is any amino acid
MIFHFNGVNMSDEKYTENGERPYRERDRGLEPQMEGRDGDGGRSGKGKVFFKKKICKFCIQKLKIDYKDADTLRRFITERGKILPRRITGTCAKHQRALALAIKRARIIALLPFVAD

SEQ ID NO: 98543 - protein, 75 aa, Unknown
  Obtained from environmental sample
  misc_feature (1)..(75): Xaa is any amino acid
MKRGEAEEKIKSLGAQSKSSVVKGLSYLVTNDPASGSSKNKKARELGIPVIDEEQFLALLSAPKKQSAPKQGELF

SEQ ID NO: 98544 - protein, 252 aa, Unknown
  Obtained from environmental sample
  DOMAIN (7)...(241): Aldo/keto reductase family
  misc_feature (1)..(252): Xaa is any amino acid
MQQTIFGRTGLTAGRTGFGGIPIQRIPYEESTALLRRAYEHGVTLYDTANGYTTSEERIGVALNHVRDKIVLCTKSGAQTPDKLMEHIENSLKMLRTDYIDVFQFHNPDFVPRPEGGDGLYSLALKAKEQGKIRHIGITAHSKDNAKEAVLSGLYETLQYPLSYLSSDEELALVDLCREHNTGLLAMKSLCGGLIGNAKAAFAFLRQYENVIPIWGMQKITELDEFLLYENEPPLLDGVLLSVMKKTGPNFR

SEQ ID NO: 98545 - protein, 171 aa, Unknown
  Obtained from environmental sample
  DOMAIN (1)...(109): Flagellar filament outer layer protein FlaA
  misc_feature (1)..(171): Xaa is any amino acid
SVAVNVYGLNFPYGLWTNILDDFGNQKSLYMGHLNFDGWGELRWDNPAYIMEVRNRDLRLYPLYPDTMPFIKFAGFEVKRDATQIGGDFITYFKDVKVIYDKAVLDTDRDIDDEALWQIINARETARKLWQMERFGEIQVIRFIDTQKKATESTFKETPTNNQPAPAAQQQ

SEQ ID NO: 98546 - protein, 62 aa, Unknown
  Obtained from environmental sample
  misc_feature (1)..(62): Xaa is any amino acid
MDRTRAGYVEGTLSVIINTALFALKLWASVITGSIALAADAWHTLSDSLSSFVVIIAAKLAS

SEQ ID NO: 98547 - protein, 287 aa, Unknown
  Obtained from environmental sample
  misc_feature (1)..(287): Xaa is any amino acid
LYDGLKKISHKGTIFAGIRNEITSIQAVFQLLDLGINLYLVDTGSTNIVFHPKLYIFEFDNFYEIIIGSANLTGGGLNSNIEVSTLLTFDKPDLSISKFINNIISFPKRYKKNIIKIKNKKEAFLLFKKGLLIDERFTHNTISGEKNKSRKKIDDTPRIKLQNKPLLIPKPKIKRKVKISTTSIIPSFKDWLLVWESKELTERDLNIPRNKGTNPTGSMLFKKGNFDDIDQREYFRKNVFNELIWKKDDNPSKAHYERSNAFFHFLIRGIYNGVYELKLSHNTDIIQ

SEQ ID NO: 98548 - protein, 65 aa, Unknown
  Obtained from environmental sample
  misc_feature (1)..(65): Xaa is any amino acid
MIFPLKELIEYGDNMYEITTAASRRAYQLSSVLEKDEKDDYDGKMVALAALQVFTKEVQFRLEAE

SEQ ID NO: 98549 - protein, 91 aa, Unknown
  Obtained from environmental sample
  misc_feature (1)..(91): Xaa is any amino acid
MIGSHRNLGSHLQYQVFHLIVRCRALPLARALLAVVVLYYTLLPHVRRRCAPYLQRRFGTADGWTGFVHAYRLYLNFGQVLLDRMIAGTTG

SEQ ID NO: 98550 - protein, 257 aa, Unknown
  Obtained from environmental sample
  DOMAIN (32)...(257): DNA methylase
  misc_feature (1)..(257): Xaa is any amino acid
MDEIFGRNNFVNRIAIDVRAPSAFSTVNPGVFKASEYILWYACDRNHFVENTLKIPRKPDMAYSKWVANPDSPYTDWKFSTVKEAYKKATGSMEIGTEKFYRFMLDNCKHVFRYTSISDTGAGKNTLNAKKQSKEQPEKVFCVERDSYENQYIHNGQQISFYDKNVSEIEGKLTATTLLTNIWSDIAWEGIANEGDVQFKKGKKPERLIQRIITLATNEDDIVLDSFLGSGTTAAVAHKMGRRYIGIEMGKQPKHIA

SEQ ID NO: 98551 - protein, 190 aa, Unknown
  Obtained from environmental sample
  DOMAIN (72)...(190): Leucyl/phenylalanyl-tRNA protein transferase
  misc_feature (1)..(190): Xaa is any amino acid
MYPLRYLPTGHIFIDPTDDCDLVVDAMLETDYSEEFCIAKDFDEAFICRLMAAGFLVMSMELKDDDSGEENKNEETEPFYILLPKLHLIRSALFFPDLHIKKSIRRFLSQYELRTDTDFDFILDKCIQVHGSDWLTPPLVEILKGIHRDSADAKPVSFAVYREGELKAGEIGVVVGRVYTSYSGYYEEDN

SEQ ID NO: 98552 - protein, 300 aa, Unknown
  Obtained from environmental sample
  misc_feature (1)..(300): Xaa is any amino acid
LKINFDIRKLKQSFPDDFIQNEFSPYCERFRRLLGIENEVALRLLHKTQSAKNLGDLNTLFRDFMLEKPETFDAADRLVSEFGDLNAAHQSVVTARKQIETLVPAREKHNLMETIKSQKTNLNELQVGITSYCEIKRMDLLKENIDSLTVEKDGWEGEITSRQSLLDNQKDILRSLERQHLMIGGNQIELLESEKKTFETQRTNRMRKLEQATAACKELGWTLSESPQGFAELIGKAREEIEGIEDRNKATRDEWLLHERNKKEAEDAFAITVKEVRALHSQPSNIPADMLDMRNNIAKA

SEQ ID NO: 98553 - protein, 76 aa, Unknown
  Obtained from environmental sample
  misc_feature (1)..(76): Xaa is any amino acid
MAKPHRGSSLRELFKHGRGECPVCKRKNVKILYEQEKDGQKFKICKTCKAAVKNGAKSLPAVDKPASEEKSAEAVS

SEQ ID NO: 98554 - protein, 219 aa, Unknown
  Obtained from environmental sample
  misc_feature (1)..(219): Xaa is any amino acid
MRRNIYIALCALTALCFSNCVAVNFTKEKGVSGKGAPEKFEIITGEYSGIRVEGFCEIRYFAAPSNTVILEIQPNLREYFIVEVQNGEMVVSSTRKINYSGRSLTPVLTVSAPALNSLTITGMCTFKTNDKIKGDSFNLDIRGAGDGKAEFDVNKLKANMAGAGNFDFSGKADIAEINMSGAGKLNAFSLQAREASVALSGAGSIKINSSEKLSIKASG

SEQ ID NO: 98555 - protein, 79 aa, Unknown
  Obtained from environmental sample
  misc_feature (1)..(79): Xaa is any amino acid
SEWNRNGNGDDKYGFSALPGGFGNSDGYFNFTGNDGVWWSTNEYDGYYAYNRHLTYMDDGAHWSYNDKSNLFSVRCLRD

SEQ ID NO: 98556 - protein, 223 aa, Unknown
  Obtained from environmental sample
  misc_feature (1)..(223): Xaa is any amino acid
GATQIANQSGAIKKAFDVKGNSIEIEGHSLSINECKITGAHQLQNMAAAVLALQSLGLSVSACMEHLKSYEGLEFRLQKIGSKVFKNKNLDFYNDSYSTRPEAAISAAESMSKPFIIILGGSEKHADFTELSQKLAKNNLLKGVALIGATAERMQKSLQTENCKATTQIFENLQTAYEWCLENTPDNGAILLSPACASFGLFANYKERGKEFNRLFNPSNSER

SEQ ID NO: 98557 - protein, 288 aa, Unknown
  Obtained from environmental sample
  misc_feature (1)..(288): Xaa is any amino acid
AGRYRALAVGFSPQENGFGYFLNKDQSQAVYGESDKETREKLNEYLAYWEPRVSQRKFREAFPEDAARVVGSDLFYEEPGVGFYLSRISGTHPDYDKLVRLGIDGLINEIKGYAQEANQVYSRMLETLDIFTALCEYYEKQAREKGLHDMALVLRHISRKAPTNLREAVQLVHLYAIFCGSVNYGRMDVYLGDFLPDENALTHLCGFWKLLSARGAIYDIRVIIGGLGRRNGESADKFALYAMEASKIVNDILPQLTLRFYEGQNPLLLAKAYDNFAQGIVYPMLYNE

SEQ ID NO: 98558 - protein, 212 aa, Unknown
  Obtained from environmental sample
  DOMAIN (1)...(157): D-isomer specific 2-hydroxyacid dehydrogenase, NAD binding domain
  misc_feature (1)..(212): Xaa is any amino acid
MMAVNDAKCKYLFDNHHGTGQSTWDAIMYATNNMITGRTVVVAGYGYCGSGIAMRAKGLGANVIVTEVDRFKALQALMDGFRVMPMKEAAKLGDIFVTATGCKKVITTEHFKLMKNNVLLSNAGHFDVEVERAALEKIAVKKETRKPFIDGYYLHNGKILNLLAEGRLVNIVAGNGHPADIMDLSFSIQLLSVLHIAKNGKQLEPKLHNIPT

SEQ ID NO: 98559 - protein, 250 aa, Unknown
  Obtained from environmental sample
  DOMAIN (133)...(213): Cache domain
  misc_feature (1)..(250): Xaa is any amino acid
MVVSSCIFTSRIVRVNLVRNVESILDYMESQINYDLLESRTILDDFGQSIRSLILRGDDSSKLIAYNTDISDHLLSRNNDIYSPNGPFGYIEISPEGPFFFNGIGWEAPDDWQVTDRPWYKAALEAGGGIAETIPYPDTVTGETVFTYSRAIFDNDGNRLGVVAIDVRAGYIGARVVDTASSKDSSYGVLVGQDLTMIGHSNLEYVGKKMYDPEVPLSFLTNELVRTGKISEIEWVNWKGEKVVGFFKTL

SEQ ID NO: 98560 - protein, 182 aa, Unknown
  Obtained from environmental sample
  misc_feature (1)..(182): Xaa is any amino acid
MSVKLEEGLVKTKGRELINVRTKSVLTQILQSKELYLFCLPGILVMLIFHYWPLYGAQIAFRSYSARRGIWGSPWVGLYHFARFFRSANAVRIILNTLVLSFYSLAAGFPIPIILALLLNSFRHERYTRVIQTVTYAPHFISTVVMCGMIILFLSPRVGAVNMIMGLLGIQPVNIMGERTIW

SEQ ID NO: 98561 - protein, 215 aa, Unknown
  Obtained from environmental sample
  DOMAIN (1)...(202): DNA / pantothenate metabolism flavoprotein
  misc_feature (1)..(215): Xaa is any amino acid
MAGIRALITLGPTREQWDAARFWSNPSSGVMGASCAVAAWLRGAEVDAVCGPGCPWLPSGIRRHEITSAGQMFDRAQALWPSAHCGIFTAAVADFSPEPYGPEKFTKAEAAEGFSLKFTPNPDILKTLAARRRSDQKVVGFAAETTDDLGAAVRRKLRAKGADMMVGNRIGQEGAGFGAPTNVAHVADATGREEQWPLMPKTEVAWRVCSWLLRL

SEQ ID NO: 98562 - protein, 194 aa, Unknown
  Obtained from environmental sample
  misc_feature (1)..(194): Xaa is any amino acid
ALALHIGHRKSVDIDLFANKKQNNGVILDSLKDYFKYYEMLNITNNGLQLMIKNIKVDITGMNQNILEDIKSEDNMHYYGKQDISAMKLRAVLYRDQFRDYVDIAYLLKDIPFKKMIEYYKTKYNENNITLLKMKIINTQFNNAEITEVKDCMIKNDMDLYKVPVLIKNEIKKLNDENNINTNMFKKLFFIKKQ

SEQ ID NO: 98563 - protein, 85 aa, Unknown
  Obtained from environmental sample
  misc_feature (1)..(85): Xaa is any amino acid
MYQREIAPSIVIDEAIGISKEFGTDESYRFVNGVLDSIHHTLLARTRTEPDRCKRTGVEPSYQGYAVRGSPQQTEKGAVFSPNAL

SEQ ID NO: 98564 - protein, 211 aa, Unknown
  Obtained from environmental sample
  misc_feature (1)..(211): Xaa is any amino acid
MVSKKGKKKEILYVTAFDKNGVLIKANDAEKTEDYFCPECNDKLILKKSGKTGKGSKRPHFAHYSQSPNCTPEGVLHKSFKILLLEKIRKHIEDKTPINIEWECIYCHEKHKGNLIQIATNAQDEYPMEKCRADIALLNQEGNPFAVIEIVVTHKPEEAAIEYYSQNKIVLIQIELDSEDDLDKIESKISIPTSIDYCFSLKCPNIANYAW

SEQ ID NO: 98565 - protein, 203 aa, Unknown
  Obtained from environmental sample
  DOMAIN (1)...(195): Bacterial export proteins, family 1
  misc_feature (1)..(203): Xaa is any amino acid
SRLFPARYVAALFLLVIKEALVGLAVGFASSFLFTAVQFAGRMVDTEMGFGFVEVVDPFTEEQTTVLGQLQVILFTILFLAINGHYFLLITVQKSFEIVPMFSATFPGGRITDHLTTMTADVFILGLKLSAPIFVTLLLSELAMGIVARTVPQMNIFFVGLPLKIIVGMATMVIVLPMLADLFKRMAEGIIKDIWKLLYIMSG

SEQ ID NO: 98566 - protein, 72 aa, Unknown
  Obtained from environmental sample
  misc_feature (1)..(72): Xaa is any amino acid
MAEDSSQEKEEAPSEKKRSDTRKKGQVAKSTEVNSVFVLLTAVFLLRLVGPWMMREFDAHIRDYFALCSTPT

SEQ ID NO: 98567 - protein, 162 aa, Unknown
  Obtained from environmental sample
  DOMAIN (88)...(162): Mur ligase family, glutamate ligase domain
  misc_feature (1)..(162): Xaa is any amino acid
VGPWFKPRSPSGRESGGWLDEPEGPCFARLCGDSWPGSAGETAELVPSRLLVPGAHQKQNLLAAALAAYGAGIDAEKIRASLASFPGIEHRLEFFHEAGGIRFYNDSAATIPEAAAAAVEALSPQAPLVLVTGGTDKNLDFSPLVKAAPRARAMILLAGSGS

SEQ ID NO: 98568 - protein, 201 aa, Unknown
  Obtained from environmental sample
  DOMAIN (57)...(143): Transposase IS116/IS110/IS902 family
  misc_feature (1)..(201): Xaa is any amino acid
MIVKNNLATAEKQREAVKILTGLELEEAEWILKYLELQEQRVKEPKCKIQKEDEGMKNLRTIPGVGPVVAYAFTAHVGDGSRFSTGVRASNFIGFVPRLDYSGTIQREGPITKHGNEYLRGLLVQAAWSMVRCKGESSLKDRYICLTVFGGKGKKKTIVSIDRRLAELMYSVLRDKSSYGSRVWAGRREYLAKLKGLKNRA

SEQ ID NO: 98569 - protein, 301 aa, Unknown
  Obtained from environmental sample
  misc_feature (1)..(301): Xaa is any amino acid
QPESDKAASVKTINLGAIGPGQANRSHVVRLEDIADVNLSYNENAARVYNNGQSGVYIQVTSEADSNQVQVSSRVKAALAGINNALPSGITLEVLSDNTSMITATLDQVYKNAIQGALLAMLVIFLFLRNIKGTLIIGLAIPISILLTVMCMAFFGFTLNLLTLTGLIMGLGMTVDGSIVILENIHSYRLRGAKSEIAAILGSKEMLRAIIASAATTLCVFIAPLIYKNRLEMIGQFASDLIFTVVISLTCSLAVAVTLVPSLCGSILKLDTRKQKPLKNRLLRAIDNASEAILVAIEKRL

SEQ ID NO: 98570 - protein, 191 aa, Unknown
  Obtained from environmental sample
  misc_feature (1)..(191): Xaa is any amino acid
KELFLFLAAYWLYYDGINTFIRMAVDFGLSIGFGPEALMAALVISQLTAFPASLLFGYLAAKIGAGLMISAGVSVYLIVSIVGSLLMRTETHFIVLAALTGLAQGGIQALSRSYFGKLIPPEESTEYFGFYNVVSRFAVAGPAVVGLVAMAARGAGVGETAASRIGMSAVGLFFAAGLILLRMSQRRRLAG

SEQ ID NO: 98571 - protein, 145 aa, Unknown
  Obtained from environmental sample
  misc_feature (1)..(145): Xaa is any amino acid
MKDNAQQVLWSGRLEEKPEAEAFAFQASIAVDQRLAQEDIAGSRAHAAMLAQQGIIPPETAQALDRELERIAGEIASGINADGVLEIDRNAEDIHSFIEGVLTKRLGDTGRTVHAGRSRNDQVAVDFRLYLKQAIPLLLRELAET

SEQ ID NO: 98572 - protein, 56 aa, Unknown
  Obtained from environmental sample
  misc_feature (1)..(56): Xaa is any amino acid
MAQASKNSRTASATQKFMCACGGEIKMKTLFEDGKVKNMAECEKCKRKERRPSDFR

SEQ ID NO: 98573 - protein, 90 aa, Unknown
  Obtained from environmental sample
  DOMAIN (3)...(85): Ribosomal protein S20
  misc_feature (1)..(90): Xaa is any amino acid
LAKKSNSAEKRHRRSEERRLRNKSAKSAVRSSVKTFVTLTQKKDPKAGEALKEMIKKIDTAAGKGIIKKNAAARKKSRMQRYYHTMKAAQ

SEQ ID NO: 98574 - protein, 265 aa, Unknown
  Obtained from environmental sample
  misc_feature (1)..(265): Xaa is any amino acid
EPIPPFIRRPVATTLLTVAIALTGSIAYRFLPVAPIPQVEFPTIQVFAALPGASPETMASSVATPLERQFGRIAGITEMTSSSSLGFTNVTLQFDLDRNIDAAGREVQAAINAASSQLPSDLPSNPGYRKINPADAPIMSIMLSSNVVSRTEMYDIGSNILQQKLSQVPGVGQVFVQGGAVPAVRVEVNPTLLNSMDLSLADVRAAIAAANVNRPTGDISDGSRTWSIKVTDQIFTADDYKQIIVRYKNGSALRLDQVANVTDSV

SEQ ID NO: 98575 - protein, 284 aa, Unknown
  Obtained from environmental sample
  misc_feature (1)..(284): Xaa is any amino acid
ECGAPDYIITRDSIPLGYIEAKDISVGLDNKLNKEQFDRYKQSLGNLIITDYLTFRLFVEGNQMVSVTIAHESGGGITPDKKQYDAFIELINQFSGYSGKTICQSLDLARMMAAKAKLLAEVIKAALSNKDGEGGKLPDDTLSGQLEGFRKILIHNLSETAFADMYAQTLAYGLFAARLNQADNQTFNRVIAAHLVPKSNPFLRKFFQYIAGFDLDSRIRWIVDALADLFNSVAIEDILNEFGKANQDPYIHFYETFLAEYDPALRESRGVYYTPLTAVRFIVR

SEQ ID NO: 98576 - protein, 275 aa, Unknown
  Obtained from environmental sample
  misc_feature (1)..(275): Xaa is any amino acid
SRAPALFANLFDPDVHFQTATDETVELVNGKGRLANNDVYDGLVLTNGGGTEFQPGVDYHLNQITGEITALDGGAMTSLTTVSATYSYAAPELVTVSEAIGGYDIVSGKTTGLELVNRAFPKYRLFPGALKAPRFGEDPTAAALLAAKSQNINGVFDAFAVADIPSDGLNGITRYTDVPGYKNDNGLVSENLYLCWPKITQGDRRMRPSSQLAGILADVDAAHFDIPYVSPSNESLICTGATAGGEPVWLDIQQANYLNSNGIATPLNFVDGWKL

SEQ ID NO: 98577 - protein, 138 aa, Unknown
  Obtained from environmental sample
  DOMAIN (10)...(60): DNA gyrase C-terminal domain, beta-propeller
  misc_feature (1)..(138): Xaa is any amino acid
MEADEATAEYGMLLTVTEKGYGKRSLLQDYRLQGRGGQGVINIRAGVRNGLVVGSVLVKPGEGCLLISQEGMTIRFAIDEVRKTGRAAQGVRLLNLASDHDRVVAIAKIDAAAQALDAEDEGKDTGEEPSSVQPSLGL

SEQ ID NO: 98578 - protein, 300 aa, Unknown
  Obtained from environmental sample
  misc_feature (1)..(300): Xaa is any amino acid
MTNKAPLAGIYENIDNVLMEYDEIKAIASGDPNIQKKIELDRKVSELTTLKIKHQNEIYNLEYQISEKLPKEIRNKELQLAGYREDAERLRINTSKDGFSPMIIGKTQYTEKAEAGKALLDSFARVGRVPEKAGEYRGFDIHISYDNFSKEVRAILKGAMQHETALGGDVHGNITRLNNALNNISDKIALAEKYIQEKQKELESAKTHKEKPFAREDELKEAEAELAEVNSLLNRSNKNQEEAMENEQMEAPAESSEGYKEDFQTSPKMESINEGMKFFLDEPDGIKLLNVPKYRKKKYR

SEQ ID NO: 98579 - protein, 281 aa, Unknown
  Obtained from environmental sample
  DOMAIN (155)...(235): Bacterial pre-peptidase C-terminal domain
  misc_feature (1)..(281): Xaa is any amino acid
GEINKKLIAGKAGKIAIGQFAYRGNIVPLGNYWVNQLTGELANIPNRSYTVLSAGTAGADWTISGEIIDTAEGAVRFYTRLIRTADQAVEASFQFDFERNEQIVALLASGSSQGGRSSSSVAPDALEPDSFDHPVSYEIGADANAQVVNRTLHSGDEDFFLLLPANDGQLTMETTGDTDTYMEFYNAETQEKLGQNDDGGSGSNARIRYNVQAGKRYIAKVRGYDRSTGSYGFRAWMTIRTSSNGFNNPLSYEIGSDENAPVMNRTLDNDSEDYFLLAPAN

SEQ ID NO: 98580 - protein, 287 aa, Unknown
  Obtained from environmental sample
  misc_feature (1)..(287): Xaa is any amino acid
YIIGVNGQNYDVDADTPGQIAVNGQVFRVEVQKTAGMPPVESPWHKLRRDSAERLSGAASLASGKIVDQGNAVKLLEALIRPFDRVTIEGDNQKQADFLAEALSKADPNRIHDLHMVQSCIALDTHLDIFEKGIAKKVDFSFSGPQSGRLAEMIRRGKVELGSIHTYLELFGRYFLDLTPRVALVAAEAADKNGNLYTGFNTEDTPTIIEAVKFKQGIVVVQANKITDTLPRVDIPGDWVDFVIQSPRPFYVEPLFTRDPALITDAHILRAMIAIKGVYAEYGVRRL

SEQ ID NO: 98581 - protein, 89 aa, Unknown
  Obtained from environmental sample
  misc_feature (1)..(89): Xaa is any amino acid
VAKYITIDKNDIEYEVYGGHALSYPDPDKKATTELKTGVVEFGYTKGADYDIEKQYNLDIYKKALAQVLAKNPNDSIYKSLDAHFKTAN

SEQ ID NO: 98582 - protein, 100 aa, Unknown
  Obtained from environmental sample
  misc_feature (1)..(100): Xaa is any amino acid
LSKIEVKNLYAEYEDKNGKFLALKDVSFHVGEGEFVSIIGSSGCGKSTLLSILQGIIFPSAGTVTIDGNIITGPSTNRGVVFQHYSLFPWMSARANVAFG

SEQ ID NO: 98583 - protein, 211 aa, Unknown
  Obtained from environmental sample
  DOMAIN (5)...(88): B12 binding domain
  misc_feature (1)..(211): Xaa is any amino acid
MANDNELFQKLSDAVVEMEEDTVEETANRVVEEGLDAYQAIDKGLADGMERAGKLFEEHEYFVPELMICADAMYKGLDILTPHIKTAEDEKKATVVIGVIEGDTHDIGKNLVRIMQETAGFNVIDLGRDIPPNVFVEEAVKNKADVIAISTLMTTTMDGMSEVIEILNQRGIRDNFKVIVGGGPISQGFANKIGANGYSSNAAESVRLVRK

SEQ ID NO: 98584 - protein, 61 aa, Unknown
  Obtained from environmental sample
  misc_feature (1)..(61): Xaa is any amino acid
ILLVSAEMIGARSGLGYYVNNYANFGNYTNALVGVITIGIVVTFITFLFNLAQKSLLRWKQ

SEQ ID NO: 98585 - protein, 268 aa, Unknown
  Obtained from environmental sample
  misc_feature (1)..(268): Xaa is any amino acid
MRTRNLFPAVKKSYYALEYVPELLKTKEICLAAVKHYGSRWIMGYIPEHIRTAEFTKEYLTDTKDDMPFGDLGLCLDIPGLLTEEACLKAVRNNANALAAIPAALRTYELCIEALLHPHSDRNTLEYVPDKFKTKEFLLNCIRIDGVKLAGVPNPMKTYELCLEAVTNNGYAVRYVPPHILSGEIVLAAVKDNGKALEYVPVKYIDANLCRLAVNNYGMAIEFVPDKFRTKELFFDAVRQDGHALKFVDTGKLTKEEYSEICRLAFER

SEQ ID NO: 98586 - protein, 302 aa, Unknown
  Obtained from environmental sample
  misc_feature (1)..(302): Xaa is any amino acid
AIAIATITVPVDTVKKPNKPAKPVPAAPPINIVDSASSIDTAKTAAAPEPVSPIASVNTSVNIVDTASITAAPAKPSEPPLIRDIKVTIKSPSFERGAPIPPIVPAIAKYIVPTVPTPSALTTDPAVPLSTPPVSSVSAPPVSTQPATAAPPPIVVMPIDTATAKPAKINPLVKPDPDPTFNADVYDLGMTVAPGGSSVRVRVSVDESIGRFAEWMRVNISDIRTANNMAENEALQLGAFISIPIKSSTNIKRFEVNRLQYHLAIEEDFFANFNVIDFEKRTVKPGINLWKICREAQIPMWL

SEQ ID NO: 98587 - protein, 274 aa, Unknown
  Obtained from environmental sample
  DOMAIN (7)...(274): DNA gyrase/topoisomerase IV, subunit A
  misc_feature (1)..(274): Xaa is any amino acid
MSVIVARALPDVRDGLKPVHRRLLYSMGELGLRPNAATKKCARIVGDTMGKYHPHGDLALYDTLVRMARDFALRYPLITGQGNFGSLAPDSAAAMRYTEAKLSRFGEEMLQDLGKETVDFVPNFSDEELEPTVLPAVVPNLLVNGSSGIAVGMATNMAPHNMGEVCNAICAQIDNPDISLDELMKFIQGPDFPTGGIVFGRKGMRDAYKTGRGKILLRGRFTLETTKSGREIIVFNEIPYGIYIKPLLERIGELVRDKVIDGIASFNDESGKGE

SEQ ID NO: 98588 - protein, 80 aa, Unknown
  Obtained from environmental sample
  misc_feature (1)..(80): Xaa is any amino acid
MSDMTLTNGELAGTESLLDRVSALIEQGRHFAATRANAALTYANWHVGRLIDNEVLEGGRAEHGKQVLATLSQQLRRGMG

SEQ ID NO: 98589 - protein, 72 aa, Unknown
  Obtained from environmental sample
  misc_feature (1)..(72): Xaa is any amino acid
MAPTTKEAQRGELHKTIWRIANDLRGSVDGWDFKTYVLGMLFYRFISENLTAYINVGEHDAGDTSFDYARLP

SEQ ID NO: 98590 - protein, 290 aa, Unknown
  Obtained from environmental sample
  misc_feature (1)..(290): Xaa is any amino acid
YDIYDPTTEDDLKRDTNYGYLIVKTKPNFKEAAFERLGLAITGKVPAGGAVFYQVYKSSDVLAALKSLKVNAGVLYAEADLKVDLHAEVPTNPIAFNNIDPNLGNRTQWGAYVTKAFDAWTTLGFGQHRPVVANVDSGVKYRHVDLRNQVRHAFSWWVANTAESVLDPMGSVNNWEPYDYKALAPNGTGTDSNGHGTHTSGIICAEGNNGSGATGMCWNVDLVQYRGFNVNSASSSWSVYGSLWHLARWKKANNVTSTIPVNFSLGSQANQYFIIDMMENALQNDIMMVA

SEQ ID NO: 98591 - protein, 296 aa, Unknown
  Obtained from environmental sample
  DOMAIN (20)...(181): MatE
  misc_feature (1)..(296): Xaa is any amino acid
MKTDLLSGNIVKSLVAFAIPMFLSNIFQQLYNTADVVIVGYYLGEASLAAIGACAVVFELLIGFAMGVGGGFGIVVARSYGAGDQDLLKRTVAGAIVIGVLLTLLISVTASLLMMPILKLINIPEYIIGDAYSYISVLIALAIVLFTFNFCAGLLRAIGNSTMPLIFLVISSLLNVALDILFITQFNMGVRGAAIATVVAQGVSALLCLIYIHKKYHMLVPQKKHFRNNVSLYKELVAQGFSMGFMLSIVTLGSVALQRAIHGLGYLVIAGHIAARKLNSFCMMPIPTIAIALSTF

SEQ ID NO: 98592 - protein, 72 aa, Unknown
  Obtained from environmental sample
  DOMAIN (23)...(71): Biotin protein ligase C terminal domain
  misc_feature (1)..(72): Xaa is any amino acid
MSFDFGADGIKSIIEEYRARSLALGREITVKENSGAEYRAVAVDIDEKGGLIVKKADGSATTLFSGEISIKL

SEQ ID NO: 98593 - protein, 284 aa, Unknown
  Obtained from environmental sample
  DOMAIN (3)...(284): Amidohydrolase family
  misc_feature (1)..(284): Xaa is any amino acid
FHGITTETLITEFSSFLEDFWWPYVENRLDHGLIEITTEWACAEMIQSGITSFMDVLEGPNSIPGALEVEKKVVEKAGLRAILSFEACERLSPVNGQAGLKENADFARANNDPASLVRGMMSAHTLFTASRDFLIQAKKTADDIGCGIHMHLSESVFEPDWCEEHYKKRPVKIYDEMGFLDAGVFASQLVQLNDEEIEIFARSGARAVSMPLSNCEVGGGVAPVQKLIKKGIKVGLGTDGYINNFFEVMRGAFLIHKAHNRDPQAMPAKLVYTMGTAMGAQAMG

SEQ ID NO: 98594 - protein, 255 aa, Unknown
  Obtained from environmental sample
  misc_feature (1)..(255): Xaa is any amino acid
MNPLELRRKNCLKSGAKTATGQSVDNVILQEVMDYTAEQTEYLKKREFHMNRKPMARRKGIGMAICYRGCGLGAESPDAAGALVSACEDGSVIINTGISENGQGLKTAYAQIAAEALGVQFESIRFYGIDTHSIPDCGMSVASRGTVMGAQPMRKAAEKLKQLMIKNVMELGILPTANNEQADISDIELEDGFFYRKSDPGIRKAFKDVCNACLWSGKQMAVFEWHTPAPFHQDHHTGQGDAFPTYAYGCVVAEV

SEQ ID NO: 98595 - protein, 236 aa, Unknown
  Obtained from environmental sample
  misc_feature (1)..(236): Xaa is any amino acid
MEKASGRKLNQNEQKEVLDAMINERLAIQAAERDRITVAESEVNKQVDQLKSQMVQVIGRQPTDAEFATAIRSQTGLDIPSFREKLRRQLIIQKYLMSKKQSTIENIKVPTEADIVNQYNLAKAQLVRPDTVRISMIQATYGQDAASKTKAKELIDRLAREIGTSPSKFDEVFIRGQAPNSGYYAGDEGYLPRSMQTAQVVGQEFINIAFSLKQGEISKVIEGQRGYQIIKVPRLM

SEQ ID NO: 98596 - protein, 142 aa, Unknown
  Obtained from environmental sample
  misc_feature (1)..(142): Xaa is any amino acid
GRELLDGNQITKWSVTNNRGTRLLTAYGASSVNGTKSTPVLQADLFGDWREEVVLAYGNSALRIYTTTSATTHRLVTMMHDPTYRCAVAWQNSSYNQPPHPGYYIASDMSFPPPALNVAVVGGDSDTSGGLTPVREAVAAVR

SEQ ID NO: 98597 - protein, 273 aa, Unknown
  Obtained from environmental sample
  misc_feature (1)..(273): Xaa is any amino acid
EKITEQLAPETTDETTDEADDLGLPDFPDFDTSENMDLFEEGAPISESTDDADGTATETDLPDFDLGDLPDFGDGEGQEPFGEEEPFTEDAEETGTSDLPDFDLGGLPDFDNNESQEPFAEPEEGQEFAPEPFGEEELGVDFPPFDDTGTEGDEEAFGFDGELPAAGDEATLEEVPGDAFDSFSPESGSLGEGFDTDGGDVFGGLEDFAIPGLDTGFEDILPGKGKKAGKKGRASKGGAGDIEEISLTPEELDLLQETLSSYPLNLRMACEEL

SEQ ID NO: 98598 - protein, 73 aa, Unknown
  Obtained from environmental sample
  misc_feature (1)..(73): Xaa is any amino acid
VYAAIRIFDGAAGGLGGCPYAPGARGNCATEILTEMFHRMGVETGIDQKKIEEVGEFAQTLSTLLHKKDGVAC

SEQ ID NO: 98599 - protein, 58 aa, Unknown
  Obtained from environmental sample
  DOMAIN (1)...(58): GTP-binding protein LepA C-terminus
  misc_feature (1)..(58): Xaa is any amino acid
VARETVRALRKDVLAKCYGGDITRKRKLLEKQKEGKKRMRMLGNVEVPSEAFISILKI

SEQ ID NO: 98600 - protein, 240 aa, Unknown
  Obtained from environmental sample
  misc_feature (1)..(240): Xaa is any amino acid
MNDVCTEAYKRFNIPIIKFGVDVVAYHNAAAPNQYVFAPIYEERSDRAINHNLLLMDIMKKVAQRHKLICILNEKPFAGVSGNGKRVNWSLSDDNNNNLFNPGDTAEENLVFLTLLVSVIQAAHRHGDLLRAAAASAGNERRLGVGGAPPVIMSVSLGEQLTKIISIIEAGKTEKGKKRDLADLGLGSLPIFARDATNRNLAAPFVFTGADFEFTMPGGSMDVFAAVTVVNTIAADSIKL

SEQ ID NO: 98601 - protein, 271 aa, Unknown
  Obtained from environmental sample
  DOMAIN (144)...(271): AIR synthase related protein, C-terminal domain
  misc_feature (1)..(271): Xaa is any amino acid
EINACTVKVKAEFSNGTSEPWLLLFKNETHNHPTEIEPFGGAATCLGGAIRDPLSGRAFVHQAMRVTGGGDPSGGLRDTLPGKLPQIKIAREAAAGYSSYGNQIGLATGQVTEFYHPGFIAKRMELGAVIGAVPEAWVRREEPAAGDLVILVGGRTGRDGIGGATGSSKVHTGASVESAGAEVQKGNAVEERKLQRLFRKAEVSRFIKRCNDFGAGGVSVAVGELARGLEINLDAVPKKYAGLDGTELAISESQERMAVLCSACDAEAFIK

SEQ ID NO: 98602 - protein, 282 aa, Unknown
  Obtained from environmental sample
  DOMAIN (72)...(161): FKBP-type peptidyl-prolyl cis-trans isomerase
  misc_feature (1)..(282): Xaa is any amino acid
KINPVSESKLTDMKGGVDGEPLCFTIETEVDPPIAEIKDYDKLKIKAKPVNVTDSMVDDAFNSYIDGYAKFEDVSRPAKKGDFLRIRYKTVSIDGAERPDLKDHCPEYPIELGGEGVFKEFDKGLSGKSAGDEVEISVKFPKDYADTGVAGKTGEFSVEVLSVQEKHLPEFNEAFMEKIGGVTADKLRDEIRVSMELRLSHEAKQTAHDEAIQALIKENEIEVAPSNVTALTQSLLNDHIKRHNLQNAVPTDEDWETFRNLAVMMLKRIKIIDYVAEKESIK

SEQ ID NO: 98603 - protein, 88 aa, Unknown
  Obtained from environmental sample
  misc_feature (1)..(88): Xaa is any amino acid
AISTRQGVLRNPSFTTYKIYTAPDIPRMKNMLVEGSYEHSGPFGAKSVSELGINGPMPVIANAFFNATGKRLCKAPFTPEYVLSVLKG

SEQ ID NO: 98604 - protein, 104 aa, Unknown
  Obtained from environmental sample
  misc_feature (1)..(104): Xaa is any amino acid
MQMPEMLDNVSKTVKDDLTVTIQKGDKLSVSAMQFNAEGTESAKAGYSTICEIGKADMEKVTAIAKKKPYYAVFRDSSFASDSAMVNFEQVFRAYSPNTMRKVL

SEQ ID NO: 98605 - protein, 237 aa, Unknown
  Obtained from environmental sample
  DOMAIN (100)...(235): von Willebrand factor type A domain
  misc_feature (1)..(237): Xaa is any amino acid
MRLKSKTLLFLCVIFFAAAPAIMNSQGRLPAENGAAARQGSDGSPEFRISVNVDLVSIYASVVDKNNHFVSGLEQSQFRVFEDGAEQRIESFAREDVPVSMGIILDLSGSMMGKIEQVKRAALAFIQAGKPDDEFFLIGFNDDVELLQDYTGDIDEISDALENTVVAGKTHLYDAVYLGVEKAHAGAKSKKALVVITDGNDDKSYFSLKELIAKVRKSDVQVFCVGLLDDLPKKGIF

SEQ ID NO: 98606 - protein, 271 aa, Unknown
  Obtained from environmental sample
  DOMAIN (6)...(271): Bacterial Cytochrome Ubiquinol Oxidase
  misc_feature (1)..(271): Xaa is any amino acid
MDVLILSRLQFAMAAYFHFLFVPLTLGLSMLVAIMETMYVVKRAEDYKRMAKFWGKLFLINFAVGLVTGITLEFQFGTNWSTYSKFVGDIFGSLLAIEATAAFFLESTFIAVWFFGWNKLSPKAHCAAIWFVAFATNLSAFWILCANAWMQHPVGYVLRNGRAELSNFFEIITQNHALFEFCHTLGGAYILAGFFVLGISAWHIVRKNETEFFVKSFKVAAAWTLVFSLSSIVTGHLSATNLHKEQPAKLAAMESQWETGKNVPLAILTWP

SEQ ID NO: 98607 - protein, 263 aa, Unknown
  Obtained from environmental sample
  DOMAIN (56)...(133): Helicase conserved C-terminal domain
  misc_feature (1)..(263): Xaa is any amino acid
MAGIARTSGEDRKWKELSRLLQDDSKMFDSDGLREKLIIFTEHRDTLRYLTDKIRSLMTNEAAVVTIHGGMLRDERRKMEELFKQDKEVRILIATDAAGEGINLQRAHLMVNYDLPWNPNRLEQRFGRIHRIGQTEVCHLWNLVAKETREGMVFQRLFEKLEQEREALKGKVFDILGKLTFDNRSLRELLIEAIRYNEKEDVRARLYQVVDNSLDTEKLRKLIDEYALTEDTMDVHQVMKIREDMERMEVHKLQPHFIEEFFI

SEQ ID NO: 98608 - protein, 193 aa, Unknown
  Obtained from environmental sample
  DOMAIN (16)...(191): PHP domain
  misc_feature (1)..(193): Xaa is any amino acid
METQKDIYPGSKWWKIDFHVHTPASTDYENKNATEEDILKAAMSAKLDCIVITDHNSGDWIDKLQAENKRIQLQTSKPDWYHKLAIFPGVEITVGDSGSRVHLLAIFDIGFDSKKIISVLGACSISNGIGDSQNTSTTKSFIETVKEIETAGGIAIPAHIDGNNGLLHKKTTLNIETRKSLSKIFAAEFCDVN

SEQ ID NO: 98609 - protein, 177 aa, Unknown
  Obtained from environmental sample
  misc_feature (1)..(177): Xaa is any amino acid
MPHRHRLPVTVTNTGNRETGELSIELTGANPELVSRLSKTSIENLEENGHDTFTIAPVTGLPANTYTATVTVSGGNDISQTFTVSFTVTSVTSKAATPTANIPAGTYTTVQNVTLTTATEGATIYYTTNGTDPTTSSDPNSGPISIDVTTTLKAIAVKDGMNASDIMTAVYTLKSLC

SEQ ID NO: 98610 - protein, 107 aa, Unknown
  Obtained from environmental sample
  misc_feature (1)..(107): Xaa is any amino acid
MAFFKDSLHVLKERTAANYMSLFKPLDRTPRYNLVSVMANVDAGLTHLLQGDLVFLSKQLFPDTAEREYLRAHWSNRIPPLYAVTAIGNVEVSGIAGRPVPAGMFSR

SEQ ID NO: 98611 - protein, 204 aa, Unknown
  Obtained from environmental sample
  DOMAIN (1)...(204): Nucleotidyl transferase
  misc_feature (1)..(204): Xaa is any amino acid
MAGGKGTRIASIANDIPKPMIPICGRPILEHQIDCLKRNGITDITLVIGHLGHHIKNYFGDGSRFGCGISYYAETEPLGTAGALYKLENLSGDFILLNGDIIFDIDFSRMIDFHHKSKALATLAVHPNSHPFDSSLIISGCNSQITGWLNKEDERIYYKNQVNAGIHILSVELLKNRPQEKEKIDLDRDILKPSIHTNKIYAYN

SEQ ID NO: 98612 - protein, 69 aa, Unknown
  Obtained from environmental sample
  misc_feature (1)..(69): Xaa is any amino acid
DSKNILYAAATAKANALKIVALTGADGGKIKQYADVSIVVPETETYKIQELHLPIYHCLCMMLEERFFS

SEQ ID NO: 98613 - protein, 281 aa, Unknown
  Obtained from environmental sample
  DOMAIN (6)...(248): HMGL-like
  misc_feature (1)..(281): Xaa is any amino acid
PNGLIRQCEFFLYTEKDREAALKCLSLGYDFPEVTGWIRANKRDFEMVKSLGLAETGVLMSCSDYHIFNKMKMTRKQALEHYVGIVKLAFEAGVKPRCHLEDITRADFYGFVVPFIMELMNASREYGIPVKIRACDTMGYGVSFPGAALPRSVPGIVYGLTHHAGVPPGLLEWHGHNDFYKAVSNASTAWLYGASAVNCSLLGIGERTGNCPLEAMVFEYAAFRGSLDGMETTVITEIANYYENELGYKAPPQTPFVGEQFNMTRAGIHADGMLKTRKSTI

SEQ ID NO: 98614 - protein, 175 aa, Unknown
  Obtained from environmental sample
  misc_feature (1)..(175): Xaa is any amino acid
MEKTVKVIMIAIVAAVIVCVTVIGLSLAACNNGTSGGGGGPVIQPVTEPVLTGTVSISGTAEVGQTLTAVTTSLGGSGTISYQWKRGDTNIGTENTYLVAAADVGFTITVTVTRAGYTGSVTSDPTAVVTDPSLPELTGTVSISGNARVGQTLTADITALGGEGPISYQWKRESV

SEQ ID NO: 98615 - protein, 257 aa, Unknown
  Obtained from environmental sample
  DOMAIN (4)...(257): Phosphofructokinase
  misc_feature (1)..(257): Xaa is any amino acid
MTFGILTAGGDCPGLNAAIRGVCRAATSRYNMKVIGIANGFRGLISGDFRSLYQEDFSDILTRGGTILGASREKPFKVDYHLSSKDSNYGEIEQDKVAVIIENYTKLALDCLVVLGGNGTNTTGYRLAGEGLNVLGLPKTIDNDIEGTDRTFGFDSALAIATDAIDRLHSTAQSHSRVMVIELMGHKAGWLALYAGVAGGGDVILIPEMPYDIKSIGRHLEERARHGKRFSIVVVAEGALSVEESKMDKKDRKKYRA

SEQ ID NO: 98616 - protein, 300 aa, Unknown
  Obtained from environmental sample
  misc_feature (1)..(300): Xaa is any amino acid
SRGLPEKTIKLYENGKKFLIAEIQDIKDLEVDPANRDIMVCAIKNAVYLSQNGGRSWESLGMPNYRSNGIKAVAVTSSPELTVFCSHSIYGVYYINPKAQGAKWIEISGGLEKLETTENPDEVSDITVALDSSGSVAIYASQSFRPRLYKLDWASKSWNLLWSSGAVFGPLDSLQAGRGSLTFVRDGGVFDLQLNAGNSAIRYRQDLTEAIDILPGKASCAVFTGSETICLSELWLMAERSSIVSNTIGRNFAFPQAAGKEGLYLPVNHAMDTGSLRPYLQTIESRKLNMVVIDMKDDYG

SEQ ID NO: 98617 - protein, 88 aa, Unknown
  Obtained from environmental sample
  DOMAIN (1)...(76): Protein of unknown function (DUF815)
  misc_feature (1)..(88): Xaa is any amino acid
DEIHLKDTMSEKLSLSERFGIRVNFVTANTSDDYFKIIEGILSLNNILFTEEIKQEASRWEILYNGRSGRTAAQFAKSVIASRRKEII

SEQ ID NO: 98618 - protein, 273 aa, Unknown
  Obtained from environmental sample
  misc_feature (1)..(273): Xaa is any amino acid
VERYIAERRYTAAATALDELYHRVPKDSLNGSVSLALEKIDRLKSYPEAEYWLGETYRAEGELALALRQYEKAWNERGLLETPGFEMEILYKITELHRIRGNYQEMERRANEIIEGTGANGLPRDSLWAGTSQGSSNQIRAAMARILENEGVNRFLTLYRHSNTDTERAHRLLGFFYYSSNRYTQAMEHLIFAFLIQNSVLIEELIRRDYDYSFSTLENLMALIQRRPELAAFMEETEYYRTIYYLATALYASGKTLPASQLWAFLAGRNNAG

SEQ ID NO: 98619 - protein, 70 aa, Unknown
  Obtained from environmental sample
  misc_feature (1)..(70): Xaa is any amino acid
MEQPIIGVIPLWDEEKDSIWMLPGYMQGLEEAGAVPVILNLTISETVLKQTVCFFDGFLFTGGHDVNPEL

SEQ ID NO: 98620 - protein, 215 aa, Unknown
  Obtained from environmental sample
  misc_feature (1)..(215): Xaa is any amino acid
VRAQWAEYYISYAQRKGIKCFWWDNGVTSGDGELFGLLNRTNNTFTYPALLSGMMNGISGAGPTPPTPPATPIPPTTITGNLGTYRFGTDEKGDPNYTQAVWELSSANVTTAKTTGAKLTLVLSTAPSAVMQFVWQGPANNLWWNEKDILNNTGNPSATGVTWDSGTKTLTIPLTTNSVKDYSVFTAQPSLRIIIAYYNGGNVNDLGIVSANLQQ

SEQ ID NO: 98621 - protein, 92 aa, Unknown
  Obtained from environmental sample
  misc_feature (1)..(92): Xaa is any amino acid
GLRIGTPATTTLGMGADEMKEIAAVIKLVLSNTKPETVAEGENAGKPSKAKYKTDGKAVKEAKARVKELLDRFPVYPQLDLAALREGFLKHK

SEQ ID NO: 98622 - protein, 120 aa, Unknown
  Obtained from environmental sample
  misc_feature (1)..(120): Xaa is any amino acid
VRFAKELNPDTAQFYPIMVYPGTSDYEYFGEKGWIVSSDFRHWLTEDGLHSSVVSNPDLRYQELVAFCDRARREFYLRPTYMFAKLKQMITNPGESKRIIKAALTFFRYLLRPSIKSKGR

SEQ ID NO: 98623 - protein, 88 aa, Unknown
  Obtained from environmental sample
  misc_feature (1)..(88): Xaa is any amino acid
MLLLVFEAMFWGSLAVVAYSYLLYPALLTLFAWLFKRPVRCSDDYLPAVGILVPAYNEEKVIARKVENVLSMDYPPDKISVWVGSDCS

SEQ ID NO: 98624 - protein, 282 aa, Unknown
  Obtained from environmental sample
  DOMAIN (1)...(133): 3'-5' exonuclease
  misc_feature (1)..(282): Xaa is any amino acid
GVKQDGTAADPLHNDPEKVRVLFAPLLADPEMTIVAHNAKYDYKVSRGWGIDRWKCKIWDTMIAAWLADPERNNYSLDSLAAYTFDYTPLVYHDVVPKGCTFDAVSLETAARYSGEDSDLCLRMMRHLEPQLTDADGMRLFENLEMPLLPILAEMEGIGIKIEAKILTDYGKELEVELDAIQRETWAAAGHEFNLASTKQLQEVLFTERKLKPGKKTKTGYSTDAASLEELAREDPLPALILRHRTLAKLKSTYVDTLAGMADNAGRLHTNFDQAGTATGRL

SEQ ID NO: 98625 - protein, 218 aa, Unknown
  Obtained from environmental sample
  misc_feature (1)..(218): Xaa is any amino acid
MRLAEICRAKRELQVVSGEWGILDPNSEKKTLYVLAKEMADSGKYAVRISSVLQYLDKYPGGSTVQIIRINKKWVENFQDFLLKHLSCNTARNYILGIRQVLNKAIQENIILKNPGCDVEIIKKQESERVFLNIEEMQKLANIETKTDLEKDVKKAFIFACYTGLRVSDLITITWGNIENNPPQIVKNQKKTGVRVYIPLHKIARTVMTTKFCMIKAI

SEQ ID NO: 98626 - protein, 186 aa, Unknown
  Obtained from environmental sample
  DOMAIN (2)...(186): Hsp90 protein
  misc_feature (1)..(186): Xaa is any amino acid
MSKALVSKILGKLTEMAESDPAAYKDFWKSFGTVLKEGLYNDYENREKLLELARFQSSMGESDSDIVSLKQYVGRMREDQKDIYYITAENRSVAEKSPHLEIFRAKSIEVLYLVDPVDEWIIGMGGISDYNGKQLKSITKGDLDLGDLGKEEAEKRTAAQAELAGLSGRIKEILAESVEEVRVTGR

SEQ ID NO: 98627 - protein, 114 aa, Unknown
  Obtained from environmental sample
  DOMAIN (1)...(114): TatD related DNase
  misc_feature (1)..(114): Xaa is any amino acid
MSPAFDRDREAVIARAEAAGLKALIITGNDIESSAGAAAYATAFAAKNANLKCKSTAGVHPHNAKDWNEHALARLEELTAPGGDIRAVGECGLDYNRNFSPQDAQRKCFEDQLK

SEQ ID NO: 98628 - protein, 269 aa, Unknown
  Obtained from environmental sample
  misc_feature (1)..(269): Xaa is any amino acid
VPDIQPAGEQDVDLVFAVSEREAGTGQFGAGAAYSQADGLVFTLNLSIPNCCMGDGQSANMNAEYGIDKKSISLGFAEPWLFDTPTKIGTSANYSWWRGSSYGYNHDILRYGGSVYVGRRLTWPDDYFYVQGGVSWQRNEQGENIPGSLVLFTGNEASLDFVIIRDDKNLPIFPTEGSRYVLSISKAFQFEPVGDFSFVQTDLSIKWWFPLYSDKLALGIVNEFGVITGDALQYRTLYQMGGALGYKGLMRGYTFWSIGAYRLGRSYQY

SEQ ID NO: 98629 - protein, 96 aa, Unknown
  Obtained from environmental sample
  misc_feature (1)..(96): Xaa is any amino acid
IYAEIDGLLENGTQAMAVEVKTTLEIEDVNDHLKRMEKIRKYADEHGDKREFLGAIAAMIVNPKPKKYALEKGLFVIVSSGEDVKVLKPEAEPRIW

SEQ ID NO: 98630 - protein, 55 aa, Unknown
  Obtained from environmental sample
  misc_feature (1)..(55): Xaa is any amino acid
MFNNNALAAIISDYKQNFKQIHNEEIYKWKAVKCFQNNWDENAVDFPAMLNRALD

SEQ ID NO: 98631 - protein, 75 aa, Unknown
  Obtained from environmental sample
  misc_feature (1)..(75): Xaa is any amino acid
MPKLAFGSRTDDSRKGGDIDIAIFSEKINKNVMQKIQVRRFICDKIGEQKIDIVTTNTGEEAIFRLAVAEGIQLQ

SEQ ID NO: 98632 - protein, 248 aa, Unknown
  Obtained from environmental sample
  DOMAIN (126)...(227): HemN C-terminal region
  misc_feature (1)..(248): Xaa is any amino acid
IERVLAFQPSHVSLYSLTLEPETPLGNRITAPRQGALTDKYDTLPRIINPQYTLMPAGFIQPSARRRKDDFRIKTPCNSVVNSYLPCGDEADNLWITGRDMLEKAGLAQYEVSNFALPDKTCAHNTRYWRMENWLGAGPAASGTIINDADGSGRRSSYPADINAYLAAPEPRIHSARIEELNKADLIRESLLMGFRCRTGPDPLLFNGVSAVTLKTASPRTLPAGASGAFLKRNQAAGSLRFHAKGCC

SEQ ID NO: 98633 - protein, 163 aa, Unknown
  Obtained from environmental sample
  DOMAIN (1)...(163): Chromate transporter
  misc_feature (1)..(163): Xaa is any amino acid
MYFDLFIAFFKLGCITFGGGYAMLSVLERELIKKRNWATMEEIMDYYTIAQVTPGIIAVNVSTFIGFKLKGFLGGIVSTIAFIIPGISFIAIIAAVLQNFADYPIVKNAFVGIRIAVGALIVDTVFKLLKGSLKDKKSIVIFILAFLCSSILSASPVLIVIAA

SEQ ID NO: 98634 - protein, 249 aa, Unknown
  Obtained from environmental sample
  misc_feature (1)..(249): Xaa is any amino acid
MYARVLEKYGWQVPVAERMMKYFIRTDNLKEVLYMRIWFENDTRRVLSPASLAELGGYLLDKQLAVANGEVKGVPDPYLDSIESVRDMLLKAVREEPTLPEPHYHLARYYNNLGNIYEERLTLENAIRAFDLAQTESVRRRQYRVDTHYRYANLLINNREFFPAEEQLVRGIQLYEDFLSRNLISAGPQLGKLYAVKGDLEYFVKSGDTNAALDNYRLAERYGYAPPEIQYRMGAAYYNLQDWRNSLNI

SEQ ID NO: 98635 - protein, 124 aa, Unknown
  Obtained from environmental sample
  DOMAIN (1)...(115): Transketolase, C-terminal domain
  misc_feature (1)..(124): Xaa is any amino acid
GKDVCFIALGSLMVNQSLKACEKLAAEGINAGVLDVLTLKPIDRDAVLNQAGKVRAVISAENAQIRGGLGSAVAEIIAEEGCRCKFARIGIRDEFGEVGTQDYLVDHFGLDVGSLVKKAQELLA

SEQ ID NO: 98636 - protein, 130 aa, Unknown
  Obtained from environmental sample
  misc_feature (1)..(130): Xaa is any amino acid
TDIVYLVGSMLFRACAKAATLNNSDLIKVFDTYVQIGTVKFIICSAKYYSYKNKTNVKAIPAKSVVAIAKDDSFSLAYCALDSADANFASLAFYINAVKQDDPEAMKLIGQSRPMPIPNVDAIRIAQVLE

SEQ ID NO: 98637 - protein, 272 aa, Unknown
  Obtained from environmental sample
  misc_feature (1)..(272): Xaa is any amino acid
MILTIRGHLTKDDVKKLKGLLKVVKENKKGPVKFIPIIFAASITAAVILFCTIFASPLLGKAMEMGLEAAFEARSNVKNFRLVIVPSLGIKIGGITVANRDKPMTNLFEMGSINITFKTNAILRGKVYIEEISANEILFGTEREVSGSLPGKPPRDPKEKKEKSDAPPLVDLKNFDAMALLDQEFDKLSTPKLYDEAINFYDETSAKYKTQVESSSAKVNELSSTTEPLLKINVNDMRDPQQIRSTIEKITTAVNTVQTASNDITTVANNIE

SEQ ID NO: 98638 - protein, 207 aa, Unknown
  Obtained from environmental sample
  misc_feature (1)..(207): Xaa is any amino acid
MKRYITFLFICIFPVCIYAQQGASVLRDYVGLINQSYHPGIVAYFEKAKKEYEKQGEKDSAKFIDIILGGAFGSGFLYNDAKGNLYVITNNHVISQAHTISITFERADGTTKKIENLKLIATDVEADLAIMAIPAGEKPFVTQGLSFLTRAVEEGEDAYSAGFPGLGITPIWQFGRGMISNASVKFPRGITDETMMGPYIQHTAQVT

SEQ ID NO: 98639 - protein, 221 aa, Unknown
  Obtained from environmental sample
  misc_feature (1)..(221): Xaa is any amino acid
MAKDSIIDAAKGIHYLTKFRPVYTYGNNPPPALSTDWNRGEYDDTTLRWRKNAYTDDDFSGIVGSNGAAITIPAGNRSIDGAFENKVLEGKLWFRHIGNGVYQFSQKDFFPLDNAPAAYDANGRKPGVEFTSGTPLSPATQWKTAHNFSFTMEMVCDFTMQDGLKFDFTGDDDVWVFVNGRLAVDVGGIHSAVTHNVNLDTKRAELGGLVNDTKYKLHMFY

SEQ ID NO: 98640 - protein, 160 aa, Unknown
  Obtained from environmental sample
  misc_feature (1)..(160): Xaa is any amino acid
ILAKPGTRAYGSLSLFTAFHSAPELLFHVSPGNFHPAPSVYSSVVRFRLHPPPLPPEARPYFFALVRAVFSSRRKTLRNSLRDSPFTHMNPALLDAVLQAEHIDGGIRGETLSMERFVALALAWIELGVCTTQTSRARQEAATGAGQSTTQTSRAGRDIE

SEQ ID NO: 98641 - protein, 120 aa, Unknown
  Obtained from environmental sample
  misc_feature (1)..(120): Xaa is any amino acid
MNNLPAAAVHTLVDWFEQNAKPYLFRLEPSAYSIWILEVMAQQTQIARAEERHRRWLERFPNLEALASSPVESVLKEWEGLGYYARARNIHRTARLVVEEGRGLPETSRELESLPASEIY

SEQ ID NO: 98642 - protein, 277 aa, Unknown
  Obtained from environmental sample
  DOMAIN (178)...(277): Histidine kinase-, DNA gyrase B-, and HSP90-like ATPase
  misc_feature (1)..(277): Xaa is any amino acid
NNAQYREIPIIFLTSMNDPTSEMEGLKLGAVDYISKPFLAPLLLQRIKTHLDLIEHKINALKASQAKGEFLSHMSHEIRSPLNAVIGMITIASETDDVQKIKHCLERADSATRFLLGLINDILDMSKIEANKLELAYGEFNFEKMITSIINVTSVRAVEKHQNIVVNVNADIPPFIVSDELRLSQVITNLLTNAIKFTPEFGRIILSAEKLDEKDGRPPQAAPQAAPQSGEITLKIKVEDNGIGISPEQQKRLFTSYNQADSSISGKFGGTGLVCHS

SEQ ID NO: 98643 - protein, 133 aa, Unknown
  Obtained from environmental sample
  misc_feature (1)..(133): Xaa is any amino acid
MSAVNLAIVLQARIDSSRLPGKSLLPLGGETVVISRVMEALNKVPAHLRVLACPEDSAAAFAPLADKAGFTLLAGPKDDVLGRYCLALRTFNIQRVIRATGDNPFVFADAAAAINAEALALNADYAGYCGLPL

SEQ ID NO: 98644 - protein, 90 aa, Unknown
  Obtained from environmental sample
  misc_feature (1)..(90): Xaa is any amino acid
CVTTGDIARLFCAAWGSGAVWQVQGDGGPHEANFLKLDCSKSKAVLGWHPYWDIQTAVEKAVEFAKIQSDNERQTCIEKQIQEYFGGHHV

SEQ ID NO: 98645 - protein, 267 aa, Unknown
  Obtained from environmental sample
  misc_feature (1)..(267): Xaa is any amino acid
AATKILKGIGIGISLVAITRSVVGAAKEFIANNEEIQGTVSKVKDEWNNWKKNIDETYGVSKKLTQIIVRGINQAVKVVRRVTDWFLRFSNKVGGVTKMLKLLAISAGAIFVALNAGKILSFIKDLSSGLGKVNLKMMAMIAVIVIIALLIEDLIKFMQGEDSLIGSLLEKFGIDGDEMRNTIQGILDAVKGLLPFILDLGRQLGGFLLTALKALLPLIMQIVKVVLPVIIGLLGKLLPLATQIITAVLPVVTSLIEALISVIMPII

SEQ ID NO: 98646 - protein, 278 aa, Unknown
  Obtained from environmental sample
  misc_feature (1)..(278): Xaa is any amino acid
MQIQTRAAAAAIDIGTTAIQAQLIDLNTGQTLGTFSGFNDQRVFGADVISRISAAQNGKLDTLFSAINNQVKNILMSFTQKLNISNIEKCAVSGNTAMLHIFCRSDPSSMGTAPYTPLFLKERHFSGKDLSLPAENITLLPGISAFVGADITAGLVFVDIMGKGEDALFVDLGTNGEIAVWKNNEKRLYCCSTAAGPCFEEADSCGLRASDFIDAVAEMRRQNVIDETGALAGKFSQTGFPAAGGKFITQKDVRQFQLAKSAIYSGIRTICRRAGTEI

SEQ ID NO: 98647 - protein, 133 aa, Unknown
  Obtained from environmental sample
  misc_feature (1)..(133): Xaa is any amino acid
MLFVIGGDGTQRGTLDIAEEVSKRKLKISLIGIPKTVDNDFAIIDRSFGFNTAVAKAVEVVKAAHVEAVSSINGVGLVKVMGRDSGFIAAHTALASHEVNFVLIPEVPFNLEGDNGFLHHLEKRLERRHHAVV

SEQ ID NO: 98648 - protein, 295 aa, Unknown
  Obtained from environmental sample
  misc_feature (1)..(295): Xaa is any amino acid
MRISPKIDMIPIVHGAEMFAREVRRLCSENKYDCIAVDISPVVQDDLAEAVDELPLISALIVHGHDFNYGFHDGGAFSVGVDFDDNGVNNSIDGVDHNGINHDPDKSDFSVDDDDDGYDDVCDNGLPSCCYIPVDPCDAMIEGVRQARQRRIPFQCVGPRTLRPPVPMVSMPDEYSIRKIGFDAYTLLCRKALGDKHCADADAESVADNLRGLRKRYDNILAIVHISRFDAVMKKLNGGLSQHNDNDDATDPYAVTKRYINPDHLYFALSELPFVAAKSQIERQNPFATPMDPTD

SEQ ID NO: 98649 - protein, 293 aa, Unknown
  Obtained from environmental sample
  misc_feature (1)..(293): Xaa is any amino acid
WAIHSITIKLQKAGDGKSHNYEIVAGRRRFAAAKMLGWTEIKASILEPDEEYLAEAIAGSENINRLPMHALDEAHIFKTLIENGVSLDELVKQFDLPRSAIWQRVQLLDLGDGIKEMFRQRKISMQAAAMLKSMDAKQQEAFCKKFSGKYHKEISDYEIKEFIAGAQRDRLYPCVAGKECASCRKRTYYSDSELFPELRGQNDFCLDHDCYVEKWQGVLSVLLKQIKTESTGHADTNIITSNDNDLLRVLGKTITVDGVVYTVVRTGWSDSPDKKQTKTSKPCFHIVLDDGFD

SEQ ID NO: 98650 - protein, 270 aa, Unknown
  Obtained from environmental sample
  misc_feature (1)..(270): Xaa is any amino acid
MGVPTPDWVKIYLEKGLSALQAQTQYKDKYCIVGEESGVNRQFVISWADAASAQQRLGALLKTNIASRYEAAITAASQSGTESAAKYRQEINNAVNALVNVSYSGAQREADWWSLRRRYDPANKEQYSDEYTAYVLYTVPKAEMNRQIALALETSVAKDSELYDVTIALARDILLQGYDEKELQNAAAIQKTAADYYDPPGTVTAQALEEIYLLDEYNIGRDVAASVLSRYRIWDANPALTKYVNMICQAIVLNSPKPIAYNGYLTAILD

SEQ ID NO: 98651 - protein, 232 aa, Unknown
  Obtained from environmental sample
  misc_feature (1)..(232): Xaa is any amino acid
MAFADNTNGFGPIPADPDYILGYPVASWRNSRYEVFSWDAFPEILIFDTADYAVQDRLFKRLAFFVEKAGFRGRLAADAEIANLHGWNAHDYRAEDLASFFEAARKSNFPLLAEERELESILLSNGILKRNFSMQIVPGKGAIVSISRESDKTDRTLRSRFMVHECFHGLYFIDEDFRNFSRQRWEVFPPVAKKFLLSFFEFQAYDTKDTNLVINEFMAHVLQQPVSQAAWY

SEQ ID NO: 98652 - protein, 240 aa, Unknown
  Obtained from environmental sample
  DOMAIN (7)...(212): Glycosyl hydrolase family 3 N terminal domain
  misc_feature (1)..(240): Xaa is any amino acid
MPGAADLPAAYSYWETAQNEGRGAAIAQVLTDSFNTGKKLHALGINFNLAPVAESLNDDNAKFLEGRSYGPDPVFTVEAVRAFIVGMEFAGLICAVKHFPGSAGADPHYFPGKLNGGKDVLAGLVSPFAALIRDNQARAIMVSHSAVPAWDTEHIASLSPAIMGEWLRLELGFKGLIISDDFSMGAATASGRTRPEDAAVQSLIAGADIVLVWPPDLRRTHRAIQAALASGRLSRQRLEE

SEQ ID NO: 98653 - protein, 205 aa, Unknown
  Obtained from environmental sample
  misc_feature (1)..(205): Xaa is any amino acid
MCKSACIPILKSVSFELPAPTDTVINAGTDAGINADADSDINTAANTVVGKNTGIAFPSAPGWQIHYAKSEPIAFSAGTPSSAAPAAGGINADQPELSGLSLNPSSGGINGGINIALSGLPSQPDGYQSGADESQTHQQNDSIGYAASTYSAVLYDYTPLEERREYSLLTAILFALLAGLALNLTPCIFPMLSVRVLSFAESARE

SEQ ID NO: 98654 - protein, 291 aa, Unknown
  Obtained from environmental sample
  misc_feature (1)..(291): Xaa is any amino acid
VHCQHHRRHPINNSATKAPAPGELSPNPTPVAGDYVIDNLTQSEGSVTAVTITPKSGKSSGARTIYYAGTDNTTYTKSKTLPTAKGTYDVTFDVAAASGWNAATGLSAGELEINDNKTPVAGDFDIGNLTQSVGSVTAVTITPKADKSSGQITIYYASTTYAKSTTLPTAAGTYAVTFDVAAATGWNPATGLSAGNLVVNIINQTPVEGDYNFGNLTQSAGSVTAVTITAKSGKSTGAITIKYAGNTMIPQTAGYYAVTFDVAAVSGWNAATGLSAGFLTITSSGDGGTLP

SEQ ID NO: 98655 - protein, 118 aa, Unknown
  Obtained from environmental sample
  misc_feature (1)..(118): Xaa is any amino acid
MKKSLLACGLLLCVSMALAQTLNISGVVVDGKNEPVAGANVVVKGTSTGVTAGADGSYSIQAGANTTLVFSFLGMSTKEEAVNGRARIDVALLENANEMDEVVVVGYGVMNKSDLTGA

SEQ ID NO: 98656 - protein, 272 aa, Unknown
  Obtained from environmental sample
  misc_feature (1)..(272): Xaa is any amino acid
MLRSAVSIDYSMLRNRSFADKYEYSTYDKREKNFLSSSFTRYYTTIIENVATYAKTIDRHSLSLMLGQTTEEYSYYSLGNSGSTILNPIKSNWYLSQTTADNTNPAGDGVDRTRMLSLLSRLHYTYADRYLLTVNFRADGSSKFPQNRWGYFPSAALGWRISKESFMQDFSDIDELKLRLGWGQLGNQSSVGSSAFLQTVSIGTYFSSYIFGNNGALIDGQGLAQGASVNTWVNLNGKWEVTEQWNLAVDWSLWRKKLSGTVDLFRRDTKEM

SEQ ID NO: 98657 - protein, 164 aa, Unknown
  Obtained from environmental sample
  misc_feature (1)..(164): Xaa is any amino acid
MQHFKAIRTRTRLTISIILGFVLVSFGCTSDGGSGDFIYEGTDTITITKYTGAGGDVTIPAFIKGKPVTVIGEYAFYDCDTVTGVTIPDSVTSIGDHAFYSCDNLSSVRIPASVASIGENNYAFIYCDSLTAINVDTANTMYSSEDGILYNKAKTVLIQYPAGK

SEQ ID NO: 98658 - protein, 250 aa, Unknown
  Obtained from environmental sample
  misc_feature (1)..(250): Xaa is any amino acid
VEDTISILRGLKERCEVHHGVRISDSAIVEAVTLSHRYITDRRLPDKAIDLIDEAAALIRTEIDSLPADLDEANRKLMQLEIEREALRRETDEASRERLRRLEGELEELRAGQAGLRAQWEAEKGSINAVRKIKEEIEQTRLAVEEAERAYDLNKAAELKYSTLLNLEKALQEAEAAEKDGPRLLKEEVRPDDVAEIVARWTGIPVTRLMEAEREKLLRLPAELHKRVVGQEEAVSAVSDAVLRARAGIS

SEQ ID NO: 98659 - protein, 255 aa, Unknown
  Obtained from environmental sample
  DOMAIN (147)...(230): PEP-utilising enzyme, mobile domain
  misc_feature (1)..(255): Xaa is any amino acid
MKTFTGIPVSTGVAYAKAFVYTVDETLEVPHHSVSETEIPSELKRLRNAIAEAAVGAQSRLERARREMSREQADIFQAQLLMIEDADFHEQMNDRLKKSLCNAEWVVWEVSQELSQKLMQSQDANLRERAIDIDDVSHRIIGCLLSDARGYSPLAELDEEVILVSQYLMPSDMVNLNKDCVKGIVMDEGSGTCHTAILARAFNIPAVMGISGFSRNVNDGEPLAMNGMSGLVVTNPDKQALARFKTDEKQQRRQM

SEQ ID NO: 98660 - protein, 232 aa, Unknown
  Obtained from environmental sample
  DOMAIN (69)...(226): Transposase DDE domain
  misc_feature (1)..(232): Xaa is any amino acid
TFKDKVVYHVNRDSTAINARETVKKGSGKNDRKQPKKRGRSPKSEGTREKQLSELELQMESDPHDSLKKLDTACSFGCKKNSQGNVSFWKGYKLHLDVSDWGFPLTACVTAANVHDSRLAIPMEKMTEQRVAFCYSLMDPAYDAQTIADFIRSRGRVPIIDPNKRKDKNRPPLDPAKQERYKIRTAVERANSHLKDNLIPKALYVKGHTKVSFVLFAAVLCLASLKYLSFIC

SEQ ID NO: 98661 - protein, 269 aa, Unknown
  Obtained from environmental sample
  DOMAIN (10)...(122): Phosphoglucomutase/phosphomannomutase, alpha/beta/alpha domain II
  misc_feature (1)..(269): Xaa is any amino acid
LKIVDKEVDEPYQAMVKSRLFRPDLIKVKAGEVKIVYTPLHGTGAMHVEKVLGDLGLNVTTVPEQREGNGDFPTVSFPNPEEAAALDMAIKLGTKEKADVVMATDPDADRFGIAVPNKQGSFTLVTGNQMGVLMADYIFLSLKELGKLPSDAAMVNTIVTTGMQKRVAQMYNVECFECLTGFKWIADIMRKWELDKADGKAGAKTFVFGTEESYGYLVETEVRDKDGVSAAAMTAEMTLYWRSKGKSLLDRLDELYQSCGYWQEMGISK

SEQ ID NO: 98662 - protein, 210 aa, Unknown
  Obtained from environmental sample
  DOMAIN (38)...(200): Exonuclease
  misc_feature (1)..(210): Xaa is any amino acid
NDYKQYSLVPDPQSLVPLGVNLDSFDWALIAFQEGADFTAFDIETTGLDNRWDSIVEIGAVRFNKQGIIDRYAQLSDPGFPMPAEAGRVNNITDEMLAGQPPIQEVLPVFLRFSADSIVLAHNAPFDCGFINRSLSRLCDDGYVQYSVLPNRVADTLPLARRLLPGRSHYHLQDIADSLGFKAEAAHRALDDARLCMEIFVYLAYNAQKD

SEQ ID NO: 98663 - protein, 271 aa, Unknown
  Obtained from environmental sample
  DOMAIN (68)...(137): HAMP domain
  misc_feature (1)..(271): Xaa is any amino acid
DDLNTIIPLQDAAMDKTNSNREGAMDNLTKASDIMISHTDELIQYSNKRNLFRATEVQASSAKSMKMLLVATFIAIALAFGAAFLVTRSITRPVGNIVEVVEAMAGGDLSRAIKAESKDEIGTLQAALGRMNESLRRMIGEIRNAAKQLIASTRELSGASDNVQKGSDLQSEAASAMAAALEEMSTSISHVSSLSEDARQTSADSGQTAHSGSDTIHAMVEEIQKIAEAIRDGAAKAEQLGRESERISSIVQVIRDVADQTNLLALNAAIE

SEQ ID NO: 98664 - protein, 110 aa, Unknown
  Obtained from environmental sample
  DOMAIN (1)...(110): Cyclophilin type peptidyl-prolyl cis-trans isomerase/CLD
  misc_feature (1)..(110): Xaa is any amino acid
MIKLTTNYGILTLKLDAEKAPLTVANFEQYVREGFYDGTIFHRVIPGFMIQGGGFTPDMQQKGTRDAIQNEADNGLQNKRGSIAMARTNDPHSATAQFFINVVDNGFLDF

SEQ ID NO: 98665 - protein, 93 aa, Unknown
  Obtained from environmental sample
  misc_feature (1)..(93): Xaa is any amino acid
VGGKDVAGKKLKARSGWNITGNGTDEFGFSALPGGIRSSDGSFYSAGYYGYWWTATEDYDNYAYGRSIYYLDNNVSVDDYYKSYGLSVRCVQN

SEQ ID NO: 98666 - protein, 303 aa, Unknown
  Obtained from environmental sample
  DOMAIN (3)...(215): Respiratory-chain NADH dehydrogenase 51 Kd subunit
  misc_feature (1)..(303): Xaa is any amino acid
DKIDHQELQRILTDYGIVEMEGSGLPLAEILSEFRATGKSQTLVVRCVFDDPWLAADYVLCRERFQEIVEGAFIVAKAGSRIERVVFAVSCRERDIGDAMLSEAALYDIQSSLVLTGTKYPQRNYRELELVLRNYGKKEEIDLGSLLVLGPATLAAVHDAVKYHRPILERYVAVGGSAVVRPQVMRVRIGKRIGDLFEECGGFSGDPFRIAVGSPFSGITVRSLDEPVTKSSYAIFAMLESQAGHHPERDCICCGECRRVCPVGLDPEELYKRIIALRRGGAQQEAARQDAARQNAARQNAAQ

SEQ ID NO: 98667 - protein, 265 aa, Unknown
  Obtained from environmental sample
  misc_feature (1)..(265): Xaa is any amino acid
AEIDTVDYDPPRSVMANTSSTSTGWGDNYGNRSERYLACVAYLDGVNPSAVMCRGYYSATFLTAYRVIGGKLVKGASFRSIDYSSADRARYEAQGNHSICVVDVDGDGKDEIIYGAILFDSDLKPVYSTGLGHGDAQHTSRFIPSRPGLQTFSVHEHIDATYGWELRDTRTGQIIWGKKNKDEDVGRGMAAHIDSRYPGGQFWSSGIDEMYDTEGKVIGTRPKYSSNTVSYNFSIWCDGDLQRELLDGYSSASPIATILKYNPHQ

SEQ ID NO: 98668 - protein, 189 aa, Unknown
  Obtained from environmental sample
  misc_feature (1)..(189): Xaa is any amino acid
MDINEGFSLIKEFYEHAWHTLILIVSGAAAAMILIMGVVMPLILQWTQNRREKKEIQEIKDIAEKTIENKVTEIEKRFLQLEKEINFTTGGVYYVQAIYTHMPITSFYSFLLALEKFLKADNVKNINKTFFYSIESAKEIKDKIKDEEVMEIYNRVIKTIEEYNKDDIYTDRLRELKGIVEKLALPNKQ

SEQ ID NO: 98669 - protein, 92 aa, Unknown
  Obtained from environmental sample
  DOMAIN (1)...(92): Protein of unknown function (DUF497)
  misc_feature (1)..(92): Xaa is any amino acid
MRIIWDENKNHENIKKHHVSFEEAETVFYDPNGKLIDDPDHSEEEDRFIILGLSKMLRLLVVCHCYRENDETIRIITARKATKKEVKYYGGK

SEQ ID NO: 98670 - protein, 69 aa, Unknown
  Obtained from environmental sample
  misc_feature (1)..(69): Xaa is any amino acid
MRKEYDFTNAKPNPYVKKLRKQISIRLDIDTIGYFKKKAEETGIAYQNLINLYLSDCAIHSRNINIVWK

SEQ ID NO: 98671 - protein, 45 aa, Unknown
  Obtained from environmental sample
  misc_feature (1)..(45): Xaa is any amino acid
MSIQSEILNLFVPGRLCLFGEHSDWAGLHRIINTDIIPGAAIVTG

SEQ ID NO: 98672 - protein, 148 aa, Unknown
  Obtained from environmental sample
  DOMAIN (10)...(45): Sel1 repeat
  misc_feature (1)..(148): Xaa is any amino acid
MPPEKPQMTPDAQYFVGLKYYKGHEVAKDYQEAMRWFRKAADQGHDSAQWKLGYMYDMGHGVNKDPVEAVKWYRKAAEQGHAAAQCCLGCMYHDGDGVRQDYSEALKWFRLAAEADNAEAQFNIGHMYRCGHGVPLDHSEAVKWLRLA

SEQ ID NO: 98673 - protein, 155 aa, Unknown
  Obtained from environmental sample
  misc_feature (1)..(155): Xaa is any amino acid
MVARLNGYMPLELVAPAKNAEQGMLALRCGADAVYAGGPRFGARKGAANEIRDLERLAKEAHLWRARLYVTLNTILFEGELEDARRAAWAVFEAGADALIVQDMAFLEMDLPDIPLHASTQAVCDTPEKVSFLASVGFTRAILARELTLDQTAEI

SEQ ID NO: 98674 - protein, 279 aa, Unknown
  Obtained from environmental sample
  misc_feature (1)..(279): Xaa is any amino acid
TEIRFGGKRQMIAAGPADFDPNDLTRSPIRSSGLNYNMGIFGGMKYPDDRDNQTFNAKGSYFASWYGTHEIDFGFDYYKGTRAGINSQSVTDWTFFTQPNGFNADTRQGQPNYAIRWFGGGAEAYQTTMGIYVNDKWKLENNLTLQIGFRLDNYKATANDTDATSGAAGFSPRLGASYDVFGDQQLVLKASYCRYNSAVLEGITGQVSGAGSISQERWNYVPTGNSYPWLNLADLTNPATYTARAYTYDPTFNIMINPNMKAPTCDEIQLGAAYSLFTD

SEQ ID NO: 98675 - protein, 191 aa, Unknown
  Obtained from environmental sample
  DOMAIN (111)...(168): Threonyl and Alanyl tRNA synthetase second additional domain
  misc_feature (1)..(191): Xaa is any amino acid
ISRRKLSIIRHSVSHVMAEAVTRLFPGTLVAIGPSIENGFYYDFKFPLREGSQVPISTDDLPKIEAEMKAIIDSRVDFVRVEVSREEALKRFADEPFKQELIKGLPEGEAISIYENRDAEGKARWADLCRGPHVQNTREIHSGAFKLMSIAGAYWRGDENQPMLTRIYGTAWENPKDLKAHLAFLEEEEKR

SEQ ID NO: 98676 - protein, 301 aa, Unknown
  Obtained from environmental sample
  DOMAIN (98)...(301): TonB dependent receptor
  misc_feature (1)..(301): Xaa is any amino acid
GGGQGSFYFENNILETELHAYLGYQYLESRNNSVILSNYELSNTIFQASFAGTFAPVDFFNIRANAASRYSKQKLENGSVRTFYMDGEFKERSKDLYSGRASVNFGKADSKWSSFFAFGHYFRDPSVFELFSTAFGIVSNPNLKPEQGEQAEAGIGYKSKKSRVAATLFANTIRDRIIYYTSGMVTKPINAEKGKVYGVETELGSELFSWLKVSANATFQNPENLPNEPEQQYYSSMLFMLPFSFELTLDGEAHSELYRDKAQRKAIPAKSFYHAGLGYKPSQKTKFFFYARNINGGEYQN

SEQ ID NO: 98677 - protein, 112 aa, Unknown
  Obtained from environmental sample
  misc_feature (1)..(112): Xaa is any amino acid
MNISTYTVKPKLPVSLKPLEEIARNLWLSWNYDAIQLYIRLDYDAWMQSQQSPVRTLGMVSQERLAQVAKDDSYLAALKEVYTRFQSYKKGETWYRGSHKDVVAYFSMEYGM

SEQ ID NO: 98678 - protein, 277 aa, Unknown
  Obtained from environmental sample
  misc_feature (1)..(277): Xaa is any amino acid
IAELAKAQERLGVVSATAQINGAQELGTYIEKSETLKTLLPVMNDMVAQQYGINASQESAVGIATMLGKVMNGQVSALSRLGYSFDEVQENILKYGTEAERAAVLAEVVGQSVGGMNEALAQTDAGKMASLNTILDNTKIKVGEMANDFEAQIMGQMLPSIDSLTGAFLGVLSGEGSVDSMAAAFADVFSEIGNIINDFLPVVLELGGEILTAVVTGIADNLDTVTGAALNLIQMLADTISELLPMVADAGISLIFALLDGIIQALPALIDAALEAV

SEQ ID NO: 98679 - protein, 182 aa, Unknown
  Obtained from environmental sample
  misc_feature (1)..(182): Xaa is any amino acid
MNYLSMLTEDEIKYICSLIPLQKSVLYFKRYPKDFAKVKPGFRAKSLKSQEQVSALLYRSRNQAFISSFIEKHISRWLDEIQQEISLKTDKGESKETAWMQILPFCFFVDNIGVFFKLIGEEQPEEYISLINASIKRIKDLNNSYKKLEVALSDKKSEATHLGEEFKRIQSELDKSGMKLMT

SEQ ID NO: 98680 - protein, 245 aa, Unknown
  Obtained from environmental sample
  DOMAIN (157)...(237): Cache domain
  misc_feature (1)..(245): Xaa is any amino acid
MWINSEKNARELSIALIGEIGNSIANRTVNYFAQAKSANQSQIFLLYRYFEDPFNNPAHREMLFGYYADVLKEHSQFKTLYFADTVGNMVMLNRMRDGSFSKRGVINAGKEIHTQWDHTNPAYYGSYFNTSEPAATGYDPRKRPWYPAAVKERSAIWTPVYIFATDHLPGFTCAVPVFDSSGKLIGVSSIDIAVDELSRFLGGIRPTPGTMIFIQDKQENLVALQAEEEKDMERLFVQSGMTAVI

SEQ ID NO: 98681 - protein, 181 aa, Unknown
  Obtained from environmental sample
  misc_feature (1)..(181): Xaa is any amino acid
IPAAIARDALIFLQSLPQSAASGFSAPENWQLRRVCALSGMAPTGACLSVISEYRYHGEEGEPCAWHRTVNGRSETVYPAEYQAWFTASAREGSLDYGSRPLEIISPRENFVYLSSPGIGRDEIPAEVIGGSGDELRVMFNGRTFSVRRPFVFSLPRSPGSYTLRVQNGGEEEEVNFTVEP

SEQ ID NO: 98682 - protein, 258 aa, Unknown
  Obtained from environmental sample
  DOMAIN (98)...(257): ATPase family associated with various cellular activities (AAA)
  misc_feature (1)..(258): Xaa is any amino acid
ICSSISKNLGKETNGQNMYMEKPNGNKLQKVTKNVGLTEAVVQEKKKPPANIDVLFKELNGLIGLNQVKHEITTLINTVKINKLREEKQLKQSPLSLHLVFSGNPGTGKTTVARILGEIYHSLGILSKGHLIETDRAGLVAGCVGQTAIKTKEVIDNAKGGILFIDEAYSLSPQDAGTDFGPEAIETLLKAMEDYREDFIVIVAGYPDLMKNFLKSNPGLQSRFNTFINFEDYTLHELLEIFISLCKQHNYIVETGRN

SEQ ID NO: 98683 - protein, 263 aa, Unknown
  Obtained from environmental sample
  DOMAIN (1)...(251): SAICAR synthetase
  misc_feature (1)..(263): Xaa is any amino acid
LGDSLLLVATDRVSAFDVVMEEPIPGKGRILTQVANFWFEATKDILPNHLISTNVSDFPPELREYADQLEGRSVLAKKAKVIPIECIVRGYLAGSGLKEYQKQGTVCGIPLPGGLGMAHKLPEPIFTPSTKAEEGHDENINFEQMAKIVGSGLAERLKALSLAIYARGSQLAAARNIILADTKFEFGQLEDGSLILIDEVLTPDSSRYWPTERYEPGKNPPSLDKQYLRDYLETLKDWDKQPPPPPLPPEIIENISALYKDLL

SEQ ID NO: 98684 - protein, 269 aa, Unknown
  Obtained from environmental sample
  DOMAIN (1)...(175): Glycosyl hydrolases family 35
  misc_feature (1)..(269): Xaa is any amino acid
VTIQDAIDYFMYLKKTMEEFGIDVPKFANEAEFLRGKGIIDTRTYYPNIPGLWMWEFERFEEKLLNSKKSQSDSPVMILELQAGWFSQIGSPTYSPGMDVVEGVSKSVFITGASIVNYYMMVGGTSFPFIGARGDTALGGHGNITSYDFGGAPVGETGELHPEKFYWLKGFIRFAREFNRIIAESDGKRYAHIQSGGENIAVLNSDRAFPDASVDKSFENFTTYEEGDADGRFYFVRNCEDEPKELTVHVPQALTGAEFSFRASIAPKE

SEQ ID NO: 98685 - protein, 257 aa, Unknown
  Obtained from environmental sample
  misc_feature (1)..(257): Xaa is any amino acid
SSSAKSSSSANSSSSAKSSGSEAMCGGKPYNPAYLPADTRCVNGIPTFEFEDGRDHQTYKAVVIGSQIWMAENLNYKASGSKCYGEDGFVFNEEATGFDKILSNSELQANCSIYGRLYDWATATGSSTANQSGIQGVCPNGWHLPSDAEWNALFTAVGGLSTAGNHLKATNGWYEDHNGDNYSGFNALPGGYRLVYENVFEGIGYYGYWWSTPGHNHDSDDDIWVNALQITAFSDGVDFPNPFSTLYLLSVRCIKIR

SEQ ID NO: 98686 - protein, 286 aa, Unknown
  Obtained from environmental sample
  DOMAIN (106)...(271): AIR synthase related protein, N-terminal domain
  misc_feature (1)..(286): Xaa is any amino acid
EWQAEPGFPAIAAKVTGAASDEVAAIPLSRMDDEALMALSRENTLALNLEEMRAVRDHYARPELRAERAERGLPADPTDAELEMLAQTWSEHCKHKIFAARISYENRETGRKEEINSLYKSCIQDATALIRKRLGERDFCRSVFKDNAGVIALNEEWDVCIKVETHNSPSALDPYGGALTGIVGVNRDPMGTGLGAELVCNTNVFCFASPFYDAELPPRLLHPRRVLEGVREGVEHGGNKSGIPTVNGSLVFDERFLGKPLVFCGTAGILPRMIHGREGCAKRPKR

SEQ ID NO: 98687 - protein, 135 aa, Unknown
  Obtained from environmental sample
  misc_feature (1)..(135): Xaa is any amino acid
PARNGLLGDNGTDAPGLGFAQWESDGARVLDRISLHTDLALLGLPQPTDVIPGISLTVAGVSASAKRAHMLAQRYHPLSENMEGFAVALACARQGLPCAELRVFSNKVGSRAPEDRAFPLALAKLGALGQELFDG

SEQ ID NO: 98688 - protein, 288 aa, Unknown
  Obtained from environmental sample
  misc_feature (1)..(288): Xaa is any amino acid
LYDWELSIDTKKTFEDGPKVIWFKGLDGQGSIGVNAHLLLVNNTPPDVKIIFPDPAASVCGVFSIAGYANHRIGLSSLSWKAGKEGGDITILPGNPWWSADINIRDLKATSLDVEIRAVDVSGNVKVEKQKYKVDQNADLPIVTIETPVLGAITNNKGDLVVKGTAKDNDGVSSIFYSIGTYQNVEIKTSGYFQFIIPQIPEGTHNLDIWAKDITGVIGPKVQIKSITVPAPLLKPGIATVTTGTGSAARIERFYTGMNVTLEPKIRKTMEVEIKGSSPISSATITLA

SEQ ID NO: 98689 - protein, 103 aa, Unknown
  Obtained from environmental sample
  misc_feature (1)..(103): Xaa is any amino acid
MTGVTKALPFSNDEITAIVNRFETPFHIYDEKGIRENARRLLAAFSWAPSFLEYFAVKAAPNPYLLSIFKQEGIGADCSSLAELSMAVRCGISDEDVMFTSND

SEQ ID NO: 98690 - protein, 276 aa, Unknown
  Obtained from environmental sample
  DOMAIN (77)...(275): Baseplate J-like protein
  misc_feature (1)..(276): Xaa is any amino acid
MVYLTETEREYTPPEFLQNQSADEIHKRMLDALPSGTDKSEGGIAWDFTRPSALEKARFVQYELNETIQLIFPQWSYDEWLDLHAEKENITRRPANKASGEVSVTGVAGTVIPAGFQFATAANLTPSVLFQTLSEAKLEGTPDKQGRVTVSLPIIAVEGGNGGNVAEDTVKLMAQPISGISYITNGEAVTGGAPEESDESLIQRVLESMRRGMSYTGCDADYVRWAKEVPGVGAAFTQAEWNGPGAVRVFIIDVSGIPANSRIVEAVYNHIIKDNN

SEQ ID NO: 98691 - protein, 289 aa, Unknown
  Obtained from environmental sample
  misc_feature (1)..(289): Xaa is any amino acid
MWEEQENTLAQKAVLTIADIAAPEIAELAKLNRIIRIYGKLAGASRELAFEGSIWDWQYTTDGTRGKELTITAYDPLIRLQQSKDFKYFSPGMNTRDIIGSICADWNIPFEYKWERGITHGKKIFSGDRISDMIYEILNEARRQSGEKFVVYFRSGKLQIIGYGGNYYRFNDDNSVLTSDNLTLNNLVTKVKLLGKTNDEGRAPVEAELDGAIQYGVLQEIVRRDGASDSIAAAKAEAESILKERGQPQETISATVPDLPFIRRGDTVDMAAGNLVGRFNVLGVSHNAA

SEQ ID NO: 98692 - protein, 267 aa, Unknown
  Obtained from environmental sample
  DOMAIN (30)...(182): Thiamine pyrophosphate enzyme, central domain
  misc_feature (1)..(267): Xaa is any amino acid
DISASVCAASFVDSVDLPGYKIPGRAEQGFIEQAAATIKKSKKPLILAGHGAAISGAGRAVKELAEKLGAPVSSTLLGLGTFPASHDLSLGMTGMHGTVAANKAIHECDLLISIGARFDDRITAKLSEFAKQCEVIHIDIDQAEYGKIITPRHFLHGDAKIILEQLLPLVEKLDSAEWLKTISSWKNKYPLHYPKHGGLRVQHIVQTLYEVTNGKAIIVTDVGQHQLWTAQFFKCDYPGQFLTSGGAGTMGYGFPASIGAALGNKTG

SEQ ID NO: 98693 - protein, 201 aa, Unknown
  Obtained from environmental sample
  misc_feature (1)..(201): Xaa is any amino acid
MLIQYLYALTSNPIFDSRFFRAGLAAILASLLVFLTMPHYMAFLKKIGATADFKENAPPIMGGLLLVIIVVVVSCVTAIFNGYTVAALSILVLYSVVGAIDDIAKIRTKRLVDSGKISKKDYEEKANGISSTVRIFLYFLFSFIIAIFCYKFIPDLTGELYVPFVNPKDWYPHLPNWLFILFITFVVASSANGANFTDGID

SEQ ID NO: 98694 - protein, 267 aa, Unknown
  Obtained from environmental sample
  misc_feature (1)..(267): Xaa is any amino acid
MLSESRLYTLAKEKAQESAARGEWDDTIQFIAICERIWPKGPEHSHLKVEAEIRTEEQRLTSISLPDVSSVSQGVPESMPVNATEALSLAETALAEERYFDAHWLATLAGRLAKPDSVEVAAAVRLAGRAWSGVNSLEPTSRETSSYNVYRLKRDGYEALVSQEWIRSYYIFLELMTLSPGDPDVQKYFTLSEQGLKQAAFFVDEIEVTLGRILSGAVYSLPLGTGRLGMRISSLSTSPDTAYGIGVEIMAFDREGKYLWNLEAPLQ

SEQ ID NO: 98695 - protein, 65 aa, Unknown
  Obtained from environmental sample
  misc_feature (1)..(65): Xaa is any amino acid
MTDELCQCLCKNKTSKLIYVSCNPATLARDTRKLLNAGYTLESIKGFAFYPQTFHLEMMGVFTSH

SEQ ID NO: 98696 - protein, 119 aa, Unknown
  Obtained from environmental sample
  misc_feature (1)..(119): Xaa is any amino acid
MTDSRLKKVNKLCKAEGPVLRASTLRSAGFCGKDTEELIQLGLLQRLRRGYYASPEKLNDMDTYEILAALVPDAVISLFSAAQYHDLSSVIPQQIDVTFPVNKRVPVLPPDIHVKIHKA

SEQ ID NO: 98697 - protein, 291 aa, Unknown
  Obtained from environmental sample
  misc_feature (1)..(291): Xaa is any amino acid
GGDGVKREAQRINQDIPGIEMITLIDNAVYVERSMKSVAQSLLMGGAIAIFILLLFLRNISTTVIISTAIPISVIATFALVYFCGFTLNMMTFGGLALGIGMLLDNAIVVLDNIYHKREHGVAAYEAAVTGASEVWSAVTASTLTTLVVFIPVIFMRGMSGVMFQALAYVVAFSLVCSLFVALTLVPMLSARYLSAKSLRHEGGSIVTRAFRLSEAFYVAVEHKYRGLIHWALHNRAKVITAVAALFIAAFFALPLVGVELMPATDESEVRVTIEMEVGTKLARLDETVKK

SEQ ID NO: 98698 - protein, 181 aa, Unknown
  Obtained from environmental sample
  misc_feature (1)..(181): Xaa is any amino acid
MKKNYTMAAMLFAVSIIGANAQTKHQLSLQESLQRALKDNPLVKIERINTDIAASIVKDYDASAYDPSLRASYDISNRIDKPASTSHDLSLSLTESLPTGTDFGLSVRALGTSTSSTDTAPTFDKYQNTIALSVTQALLQGRGKTANLVTLQKSKIDLNIRKEELAAYALKLLSDTERAYW

SEQ ID NO: 98699 - protein, 294 aa, Unknown
  Obtained from environmental sample
  DOMAIN (1)...(294): Pyruvate kinase, barrel domain
  misc_feature (1)..(294): Xaa is any amino acid
SHGDYDEHAKRITLIKQVREELGVPIAIMLDTKGPEIRIKTFAGGSANLNEGDYFTLTTENIEGNNARVSITYPRLPEFIKPGTEILINDGNICLTALKITAKEILCEIKYGGTLTNRKSINIPGVEIDMPYLSDTDRSDIMFGLGQGIDYIALSFVRCADDVHVIRKLLETNKTRDVHLISKIENRQGVKNIDKIIEAGDGIMVARGDMGVEIPFEELPGIQKDIIKKCYRAGKKVITATQMLESMITNARPTRAEISDVAHAVYDGTSAVMLSGETAMGKYPVEAVKAMAKI

SEQ ID NO: 98700 - protein, 119 aa, Unknown
  Obtained from environmental sample
  DOMAIN (67)...(116): His Kinase A (phosphoacceptor) domain
  misc_feature (1)..(119): Xaa is any amino acid
MAVVISLGALASQAMLNPIKKMIKQLDSVTPDNLSARLHDIDTQDELKELSDRINSMLDDIESAYNRQAAFVSDASHELRTPISVIQGYSDLLRRWGKEKPEILEEGITAISREAESMS

SEQ ID NO: 98701 - protein, 216 aa, Unknown
  Obtained from environmental sample
  misc_feature (1)..(216): Xaa is any amino acid
VNNFWKTVSGSALAALALVCVFGIAAAVSAQDIEDALSAPDAKADTIMTPFGPQIVSGGNAVNPDKPGKGKSGKKTSVLMDELLGESDWTFVDKIAIRFVMNVVFAYILICMIFAKEHRIKEYAFCFFISNILIFMVTSLLAYVKVKTGFAFGLFAILSILRYRTEQINIREMTFLFASIIMGVINSMATDGLMLLAVFLADVVLCASIAICDSRF

SEQ ID NO: 98702 - protein, 282 aa, Unknown
  Obtained from environmental sample
  misc_feature (1)..(282): Xaa is any amino acid
MYQFDRRGNNGFFWLDGKGFGNEWVSQGSANHNFAFTMEMEFQFNAKRGMTFNFSGDDDVWVFIDKKLVLDIGGIHEELSANFSLDNVLPESEMGKTHYLRVFYAERHSTGSNIRIQTNIVAPPTGVGISTVGNTSSSVVSGANGSFDKAADSTRTLYSVVYDENGNPMDTSKYNCKNVTWTINGAVVGTGCSIQVKDSVARAEGVKIEVTYKDPEAGDLKGETKMNVKALTPKTIHIQRTETPKPTTEKNKSDDIYFGPSEDQVTVYAVLRDKYGNFAGYA

SEQ ID NO: 98703 - protein, 79 aa, Unknown
  Obtained from environmental sample
  DOMAIN (8)...(65): Protein of unknown function (DUF433)
  misc_feature (1)..(79): Xaa is any amino acid
MNELREHIVVDPEIRFGKPCITGTRITVGDILQWLSAGMTEQEIIADYPELQEIHIRAALAFAAERDAMTRVITHETVA

SEQ ID NO: 98704 - protein, 277 aa, Unknown
  Obtained from environmental sample
  misc_feature (1)..(277): Xaa is any amino acid
FQPVTALWIFLPFALFAGGGRQIETKTADGIEIWQTEFDVAGRRPGTYNVIINAKDAAGNIGVGGPYNIKVSPTAGLPEAHIVYPRPDMIVRSDIVEIVGTAESRYGIQQIVLSMDGGPYVPLEGLEYWDYRIPAEEIGEGKHTVRVKAVDALGVEGLNSRVDFILDNLPPQIELINHEVGDIITGGIVTIKGKVIEANGLQSLSLSKDGGETYVPLFHTGGRKGDPARYFSFSIPSKKLNDGAMIFYIRAINTTGVSIIRPILFFVNNVAPVIDIM

SEQ ID NO: 98705 - protein, 69 aa, Unknown
  Obtained from environmental sample
  misc_feature (1)..(69): Xaa is any amino acid
MKVKGIMCIFHYVPLHSSPAGKKYGKAASSMKNTDNASDTLVRLPLFYGMSEEVQNKIIDCTRKFLSNL

SEQ ID NO: 98706 - protein, 282 aa, Unknown
  Obtained from environmental sample
  DOMAIN (138)...(194): GHMP kinases N terminal domain
  misc_feature (1)..(282): Xaa is any amino acid
DGHAVKADASKKSGTSKEKIASKGSATSKKSAVIKGNDASEGLKQIVIAQAPGRLHFLGEHGYPGAGLYLSAAIDRWVKVAVSGRKDSSLRFYAADLGERKRTTLANLKFKREDRWANYIKVALRVFAELGFPVKGANFTIVGNIPQQIGLASSSAIEVASAVALRGFLHVKIDDMALALRLAGAHEFIFGTPGDLADYITGLTARSDQFLVIDEQGPSVTKIKSPFSRCKIIIMDSRVPRFGIDVELDNRQQDIKGRIGYALTGPRGGEFQGIRGYGFGRI

SEQ ID NO: 98707 - protein, 264 aa, Unknown
  Obtained from environmental sample
  DOMAIN (132)...(264): Phage integrase family
  misc_feature (1)..(264): Xaa is any amino acid
EQAAKKTKGELAANSFEAVAREWHTVWSKDKSPRHADYTMARLEKNVFPLIGKKPVAEIKASDAMDVCRLIEKRGAPEMAHRILTMVSQVMRYAVITDRAQRDPCPDLRGALQSVRAQPMPSITDPQQIAALLRAIDEYQGTLVVKSALLLAPLVFVRPGELRGAKWEDIDFDSAEWTFEYLKQRTNLRDKRKLVVPLSRQALAVLKDLHPFTGESVYVFPGLRPGRPISDGTINKALRTMGYDTRTEITGHGFRAMARTVIAE

SEQ ID NO: 98708 - protein, 250 aa, Unknown
  Obtained from environmental sample
  misc_feature (1)..(250): Xaa is any amino acid
MSANPFAPGSKLSKMSAVYNGWRRRDPLAPLNLVYESLSREHGVSVSSVKRYIFWIKVNGYQPKEHKPRPLVAWDAEALAHFKQFYLKVGREAGRCTVRNAYQQTLIAAAENGWKIGSEQSAYVHAREIHSALKLYVKGGSRALDNMFYIARDLSGLRPFQIVVGDQHRFDFWVTDDQGVYFRPECYLWLDMRTRLVYGIAFDRNYNTRTVLRALKQGVIRFGKFESTYNDNGAGEKSAVADYTIEQLQN

SEQ ID NO: 98709 - protein, 171 aa, Unknown
  Obtained from environmental sample
  misc_feature (1)..(171): Xaa is any amino acid
MAIFKYEIRQAGVFVAIWAVICAILIFTLFPNFASIVVNESGAPKTEVLESIDSNSFLKAAAVSAEFLSKPIGIYGFLAGWLFGLAFAVIAMYLGLSTHTKEFFFKSADFLLTKPFSRGQVFIAKLLAVFLQVLVIGAVFWLASFASLSVFAPRFDFKLFMLLSGAPILNM

SEQ ID NO: 98710 - protein, 176 aa, Unknown
  Obtained from environmental sample
  misc_feature (1)..(176): Xaa is any amino acid
MVAMKSKRNAELTRLYIAAVLAAVSYTFFKLYKLFSYSEESVLGASRWGGLLAIGLANTLVIGMIVFIVARALAKTYFEGRSGVLGSKIRAKLVIAFLAVGIVPSAMLFMMGRPFVLKNIERWFAPETDRLIHDGGAISRLYRDETLARVQREADAAARLHQTPQTVLSELALDLC

SEQ ID NO: 98711 - protein, 161 aa, Unknown
  Obtained from environmental sample
  DOMAIN (4)...(161): Type I restriction modification DNA specificity domain
  misc_feature (1)..(161): Xaa is any amino acid
MGEWRETTLGKLIECGDANLQTGPFGTMFSASEYCAKGTPVIAVQDIDINALRHDKLLYVNDETTERLKRYRVKKGDIIFARKGSVDRRALIKEYEDGWLQGSDCIRLRLNENIDSRFVSYQFGTDSFKDWIFQFSTGATMPSLNQDILKLLPISLPSLPT

SEQ ID NO: 98712 - protein, 256 aa, Unknown
  Obtained from environmental sample
  DOMAIN (1)...(255): Radical SAM N-terminal
  misc_feature (1)..(256): Xaa is any amino acid
MDYLGWDYVDVIIVSGDAYVDHPSFGHAVIARVLENEGLRVAILPQPNWQDDLRDFKKLGQPRLFFGVTSGCLDSVVSHYTANKRLRSDDAYTPGGKAGFRPDRAATVYSKILKQLFPNTPVILGGIEASLRRTTHYDFMEGRLMPSILCESQADLLVYGMGEKPIIEIAKKLQNGQNIHDTKQTAFLSYSPLSTLHSPLSTLHSQLKLHSHNDCLKDSNKFLENAKILEQNTDAILTQEIGDKTLMINPPFPQMQ

SEQ ID NO: 98713 - protein, 71 aa, Unknown
  Obtained from environmental sample
  misc_feature (1)..(71): Xaa is any amino acid
MNNEQCGLPPKYPIVLVHGIIAHDRPSVMKYWGKIPETLRKTGVGVFFGNTDSWGDIKSNAKLLKATIDNV

SEQ ID NO: 98714 - protein, 250 aa, Unknown
  Obtained from environmental sample
  DOMAIN (23)...(249): NeuB family
  misc_feature (1)..(250): Xaa is any amino acid
MTCSIVAEVGINHNGDIDLAKKIILAAKSAGADAVKFQNYQTEDFIANSELTYTYFSQGKEICESQFAMFKRYELSSEMLHEIIRFCRQEDMLFFSTPSSEAGVEMLRKAGVTVLKNGSDALTHLPLIQAMARTGLPTILSTGMATLGEIDDAVRTFREAGGTELTLLHCTSAYPTPPEDAHLRKIPALREAFGCPVGFSDHTEGLSAAIGSVVLGACMIEKHFTLDKNLPGPDHWFSADPAELRRWSPM

SEQ ID NO: 98715 - protein, 247 aa, Unknown
  Obtained from environmental sample
  misc_feature (1)..(247): Xaa is any amino acid
TASAGYTWLGWSDSANGEILTATASFNSNTTFYARYNRYVTLTYNLNGFPAGSTPTSIDVPYNAAIGAAALPVLSDSAGYTFTGWATSQNGTVITENQTFTANQTLYARYNRYVTISYDMNGFPGTKPENKTVTYDAAIGSGALPTFSAANYNWLGWATSSTGNVIAATQTFTANQTLYARYDRYVTITYNMNGHPGTAPTSKNVGYNEEIGATALPSVTAADTYTFTGWATTENGNVIASTAKFTD

SEQ ID NO: 98716 - protein, 263 aa, Unknown
  Obtained from environmental sample
  misc_feature (1)..(263): Xaa is any amino acid
MNGSPGTKPADLQVASGAAIGSGAITAITGTNYTWKGWSLSPTASIRQTITDTTTGATTIAVQEATYVAATATFTSNVTFYAHYESTAGTNITLTYDMNHFYMANRNNAIPNKTVASGRPIGTLALPNPTHPNMANFYTWLGWSTTKTGAVITGGQTFTANTTLYARYQITPPTYTHVPAASLSYNNSLPYGLQPLTKAVPSDFIRGVDISDCLEIEYYNGTTYRDFNNQLQDIMKTLTENGINYVRVRLWLDPERANSTSAN

SEQ ID NO: 98717 - protein, 277 aa, Unknown
  Obtained from environmental sample
  misc_feature (1)..(277): Xaa is any amino acid
LLTQDCLDWAQKERGWGWPWPRQAYAEIVDYMNTGGAKAVAFDVIFSEPSIYRNARQDEIIDNAVKYLEDAEYSGTPAIPEGRRGAANAAQPRVSRLASKVIIDALQSLSAREDDASFARAMSDYGKVVQAVFFSSQTGSIRSWPPGTEKPFFQTENFGSFLDRFDIAFEYENETGAQFPIKELTDAAAALGCVTGKPDSDGIIRRIKPLTLFDGKVVPGLSASLLMASGTGQKINYDERNSALEWEGYTIPVDKFGNALLRYRGELDRYIPYIASD

SEQ ID NO: 98718 - protein, 219 aa, Unknown
  Obtained from environmental sample
  misc_feature (1)..(219): Xaa is any amino acid
LAIPNKLAQFTKTLALMGSIGIFVIAALRLVPANPDSFGIFFREQRPLFTLINIPVDYHLSLDGLNLMLVLLTTFLVPISIAGTWNSVKERAGTFFALFMLLECGMLGALVAKDLFLFYLFWEAMLIPMYFLIGVWGGAERKKAANKFVLFTLAGSLLWLVALLYLAGRAGSFSPEILASAAANVPFNAQCWLFLAFALAFAIKVPLFPFTHGCPTRTP

SEQ ID NO: 98719 - protein, 280 aa, Unknown
  Obtained from environmental sample
  DOMAIN (22)...(105): B12 binding domain
  misc_feature (1)..(280): Xaa is any amino acid
GSKETSGDKEEDQKKKDEWRNLPIEDRISYALVKGIDRYIAEDTLDLHNSGKSYIEIVEGPLMRGIEEIGLLYGAGGIFLHQMIRSAQVMKKALAALDSCAASGKGITCAGKVVLATVRGDVHDIGKNIVAVILGCNGYEVIDLGVMVSAEKILETARNTDADCIGLSGLISSSLDEMVFVAEEMEKADFSIPLLIGGAAASVAHTALRIALAYSGPVVYLPDAGRTPQALASLLSPVLKSDFLRKLHLEQEEARRSHEAIAGKRLLLTMEEARANRPRI

SEQ ID NO: 98720 - protein, 237 aa, Unknown
  Obtained from environmental sample
  DOMAIN (1)...(235): D-alanyl-D-alanine carboxypeptidase
  misc_feature (1)..(237): Xaa is any amino acid
VVMDAATGTIVYYKNPDDEIPPASLTKLMTMHLVFKEIASGRASLNEMITPPREGWAVNQLPGSSLMYLAQGQTLTLRELILGMAVISGNDAATAAALRFAPTVNDFIKMMNTEAAAMGLSVTRFVDASGYSEENMTTARELAELCRIYLQAHPESLGDFHSVREFAYPKPENVPPERQGNPGTRLRRNNNNLLGRVEGVDGLKTGYIPESGYNIALTAERNGTRFIAVILGAPSEW

SEQ ID NO: 98721 - protein, 159 aa, Unknown
  Obtained from environmental sample
  DOMAIN (21)...(150): FAD binding domain
  misc_feature (1)..(159): Xaa is any amino acid
VEKFYSYPLTSLNTFGFEVLADYFIRTHSEQDILQLLRSKEVKGLPILIVGSGSNLLFTGDFHGVALQPLMSNVEEVEDNSDSVLLRVGAGVVWDDLVQHAVDRDWYGLENLSLIPGRVGASPVQNIGAYGVEVKNTIEKVQYIDMQDCTVNQLTNTQC

SEQ ID NO: 98722 - protein, 262 aa, Unknown
  Obtained from environmental sample
  DOMAIN (1)...(135): Trypsin
  misc_feature (1)..(262): Xaa is any amino acid
SQFEGTVIGVDPENDIAVVKFDPPRGTELRTVPYGDSRNLKVGQKVLAIGNPFALERTLTVGIVSGLGRPIQINRQHVVRDMIQTDASINPGNSGGPLLDTQGRMIGINTMIYSPSGGSVGIGFAIPVNTAKRVVNELIQYGKVRRGWIDATMVQLFPALVRYAKFPVSSGLLVSRTRKGGFADKAGLRQGSDPVQYGRSVIYLGGDIITAVDGVNINTLSDLYSALEHSKPGDMAKLDVIRGGSPMKLELTLADREEVLNQ

SEQ ID NO: 98723 - protein, 173 aa, Unknown
  Obtained from environmental sample
  DOMAIN (84)...(165): Transporter associated domain
  misc_feature (1)..(173): Xaa is any amino acid
LKDFHHEVIKKGRPPAEIIKPVVFVTKTMKISSLLKTLQKKQSHLAVLVDEFGGTLGIATIEDILEELVGEIWDEHDKVVEPFRRNADGSLNVLGSVKFQDMLEYMNEKSPEEEEIPNTTVGSWVLENSGRLPRTGERIVWHNLQITVSRMQRNRVMEVTVSVMKSSGNSQQT

SEQ ID NO: 98724 - protein, 75 aa, Unknown
  Obtained from environmental sample
  misc_feature (1)..(75): Xaa is any amino acid
MTVVGTPWMFGLNRDKPGVWSGGHVIDPDSGSMYKCRITYHSKTDTLEMRGEIGLGIGRSQFWRKSSREEASALK

SEQ ID NO: 98725 - protein, 138 aa, Unknown
  Obtained from environmental sample
  misc_feature (1)..(138): Xaa is any amino acid
DKLVAGFCLSKIVNQSEICDYLRIDQTNLPEYVKRADKIGVLKTIAVNNDFHRHGIGYALTLAAYNDLITRDIQALSSIAWKNGDRINADRVLSAIGLRPHIEIKSYWEADGIKNNYNCSACGPPPCKCSAVLYFKAI

SEQ ID NO: 98726 - protein, 73 aa, Unknown
  Obtained from environmental sample
  misc_feature (1)..(73): Xaa is any amino acid
MAITQAFNVADVTVVLAGNPSTDYAVHTVVNHLVDYGSTRFEMGYASAIATILFFTMIVSNAIIQKLLKRVGT

SEQ ID NO: 98727 - protein, 104 aa, Unknown
  Obtained from environmental sample
  misc_feature (1)..(104): Xaa is any amino acid
KTKWSFWKLFVYSLDGIIACSSKPLAIASVLGILLFLAALLFIIFIIIRRIVWGDPVDGWASTICIILFCSGIQLFTIGIVGQYMAKIYTEVKQRPQYIIREAK

SEQ ID NO: 98728 - protein, 218 aa, Unknown
  Obtained from environmental sample
  DOMAIN (32)...(192): MatE
  misc_feature (1)..(218): Xaa is any amino acid
MPIDDASPAKNEKFKRMTAAPVEKLVLSLAGPSIIIMIISALYNMADTYFVSSLGTSQVAAVGIAFPLMAVIQAMGFFFGQGSGNYISRALGAQDTENASRMAATGFISGFFIMAIIAGIGLVFLKPLVEGLGTTQTIRPFATEYVFFILLASPWMTAATVLNQQLRFQGSAAIAMTGMLSGAILNILLDPLFIFVLGFGVKGAAIATMISQITSFLI

SEQ ID NO: 98729 - protein, 143 aa, Unknown
  Obtained from environmental sample
  DOMAIN (12)...(114): Mur ligase family, catalytic domain
  misc_feature (1)..(143): Xaa is any amino acid
MGIREFLKSGSSVYFVGIKGTGVCALAELMLNAGLKVSGSDTGEVFYTDKILKELRIPYYENFDASHISRDIDIVIHSAAYSAETNPELARALELNIRVMKYTDALGNWSMRFDSAGVCGVHGKTTTTAMCGVCARAAGIPAQ

SEQ ID NO: 98730 - protein, 259 aa, Unknown
  Obtained from environmental sample
  DOMAIN (42)...(230): Adenylate and Guanylate cyclase catalytic domain
  misc_feature (1)..(259): Xaa is any amino acid
ELYSYAGSEKEKQFIRTAFSTYVSGDVVKEIISDPSRLQLGGSSRHMTAIFTDVQGFSTISEKLSAEDLVSLLNRYLSAMSDIVLSEKGTIDKYEGDAIIAFFGAPLDLPDHAIRACASAIAMKKLEAELNKTILENKLSPSPLLTRIGINTGTMVAGNMGTANKMNYTIMGNAVNLAARLEGVNKQYGTWLLASEQTVKETGNSLLTRKLDRVRVVGINEPVRLHELIEMEQSATEEQKKLVEVFHQALDCFEQRDWK

SEQ ID NO: 98731 - protein, 205 aa, Unknown
  Obtained from environmental sample
  DOMAIN (24)...(92): ATP synthase alpha/beta family, beta-barrel domain
  misc_feature (1)..(205): Xaa is any amino acid
MQIKAEEITKIIEGQIRNYEQRVEMSETGVVLYVGDGIARVYGVRNAMAMELLEFPGGLMGMVLNLEEDNVGVALLGEDTGIKEGDPVKRTGRIFSVPVGDAVMGRVLNPLGQPIDGLGPLNTKETRPVELKAPGIIARKSVHEPMMTGLKAIDAMTPIGRGQRELIIGDRQVGKTAVCVDAILAQKNTDVHCFYVAIGQKKASC

SEQ ID NO: 98732 - protein, 81 aa, Unknown
  Obtained from environmental sample
  misc_feature (1)..(81): Xaa is any amino acid
VDAEKGILRGTVITAVRLDAEKQKKLKAELAKKTKQQQLELVFSVDETILGGLMLKVGDRVLDASLRAQLAILRDTIKRGG

SEQ ID NO: 98733 - protein, 244 aa, Unknown
  Obtained from environmental sample
  misc_feature (1)..(244): Xaa is any amino acid
ENYLPIVNDAAALAAVDGFAGHFYGGAVAQRKSQLIATGKEIWMTEHLRNTNSNKTYDPTWAAVWSFAEDFHNCMINDYNAYVYWYAKRFYGLIGDSEAGVTNQRDGQPQLRGLLMSHYSKYAAGKYRYNANWVKNDWTTSSNEPDNVRATVYMDEETITMVLTNKSTVSGQNGNMWVHVKLPAAVKSGFAIVTYNSNGPDQTLSATASTMVKQQPITLQFNTDKTTASVKMPASSFVSIRFYK

SEQ ID NO: 98734 - protein, 271 aa, Unknown
  Obtained from environmental sample
  misc_feature (1)..(271): Xaa is any amino acid
VETPDPLVRELTVTLAPPSDADNLGDSDRLLAGLAEAHGLMNPEFELSALKDLPGALRQAGFEARVTLFQAPGDPAPPARLLSVLPGPDPRPPLALAVDIGTTTVWARLVNLATGECGPSRGDLNGQISFGEDVISRIVFAGRGDGLARLKDRVVENINRLLENLLADHGADRERLALAVVAGNTTMSHLFAGLDPKNVRLAPYVPAAAYWPILRAAEVGLKVPASTPLLVYPSVSSYVGGDIVAGVLASGMYKSPELTLFIDVGTNGEIV

SEQ ID NO: 98735 - protein, 90 aa, Unknown
  Obtained from environmental sample
  misc_feature (1)..(90): Xaa is any amino acid
MKAKIKSKSNKPNLFSVANTVREFVNNSPYVGASNKKSLKNWQPTFATADETLLPALDTLRARSRDANRNQPAAKGALKTMRTGVIGSGL

SEQ ID NO: 98736 - protein, 136 aa, Unknown
  Obtained from environmental sample
  misc_feature (1)..(136): Xaa is any amino acid
MNLTNSDLIRCLDRRQQDAYSENIGGNMPNITAEKEAWHSVQNHNILIVWQPSFNLGIPIVDEQHRGIVSTINSLCYAIQNKQGNQILQPVTSMVTEYTRIHFELEEDFLQKCGYPNLEAHRTLHKELTDALSHVS

SEQ ID NO: 98737 - protein, 209 aa, Unknown
  Obtained from environmental sample
  misc_feature (1)..(209): Xaa is any amino acid
IGSAAFSNCTSLTGITIPNSVTGIEDGAFSGCTSLASVTIPDSFTNIENGVFSGCTSLTGITIPDSVTSIGWSAFSGCTSLASVNIPDNVTSIAYQVFEKCTSLANITIPNGVTGIGFGAFSGCTSLANVTIPNSVQEIMADAFEGCTSLDSITFQGTIAANKLGTSGFDYVLPPSPFIGDLQKKYLAGGIGTYTTTAPVNADSKWTKQ

SEQ ID NO: 98738 - protein, 293 aa, Unknown
  Obtained from environmental sample
  DOMAIN (77)...(293): Pyridoxal-phosphate dependent enzyme
  misc_feature (1)..(293): Xaa is any amino acid
IDVMRNIKAAVCVKCGAEFEAPGDIYTCPKCGGILEIVLDYDYIKTQISREKFAGKKDFSMWRYLEFLPIEERSRLGPLRVGWSPLYKASTLGETLGLKNLYIKDDGLNPTSSLKDRASAIAAARALHSGKDTVACSSTGNAASSLAGAAASLGLKSVIFVPERAPQGKLTQLLIFGATVVSVKGDYEATFRLSAQAIEKYGWYNRNAAINPYLSEGKKTVSMEIAEQLGFIAPDFVAVSVGDGCTIAGVWKGFKDLYATGLIDKLPRLISVQAEGCCPINRAIENNTAIEKM

SEQ ID NO: 98739 - protein, 303 aa, Unknown
  Obtained from environmental sample
  misc_feature (1)..(303): Xaa is any amino acid
CHFYFDNSEGDAEDVKKHIEELLVELKDEYEKYFYDEALTSSPQSLFDNWELLSKTSIRDSFLWAYRQMMLDLNKIIIYVVDVSGLITDRDIESAYLIAAAFNELPQTQDRMVLIGNLLRTIQDGAFTQRRKTELLLNLELLMYSDNIRIQNRFHSVETIRDKNTNTFESFEALLKSCYDTIAYFSNSVENIINEPVIDIKVIPALFETATKANNTTYRLQVASLGRLENIIKERISLYRLRLILSLTAAIFATFFAFFIIFITAFGIRRSTDSMGVVFKRLNENDLSVVIESISSDELGDFM

SEQ ID NO: 98740 - protein, 202 aa, Unknown
  Obtained from environmental sample
  misc_feature (1)..(202): Xaa is any amino acid
VRAYASVQLAPPLPFTDEAYLSGDIDIRSYTHILGRYVWANRVALGASVGLGDGDAKTARRYFLGGNENWFNYDVNVENYNQNLGYSYYSSIISPLRGWNYFDIAGDKAALINSEFRFPFIREISTVWPIPMQIRYINGAIFMDAGYAWTGKIIPQEIAGGYGFGMRANLGIFVLRYDRGWPTDFKGLSRGPINYFSLGAEF

SEQ ID NO: 98741 - protein, 66 aa, Unknown
  Obtained from environmental sample
  misc_feature (1)..(66): Xaa is any amino acid
DLGQVERAIGEGIPYKGYFYWSLLDNFEWHWGYKYRFGLVYVDFETGERRVKDSGIYFSERISGNL

SEQ ID NO: 98742 - protein, 186 aa, Unknown
  Obtained from environmental sample
  DOMAIN (2)...(185): Glycosyl hydrolase family 1
  misc_feature (1)..(186): Xaa is any amino acid
MPFPKDFVWGAATAAYQVEGAAFEDGKGLGIWDVFCHRPNAIWQGHTGDTACDHYHRYLEDVGIMKELGVNAYRMEIAWPRVVPEGTGAVNPKGIDFYDRLIDALLAAGIDPWVTLYHWNLPQTLQQRGGWMNPESPKWFGDFASVVVDKFSDRVVHWMTINEPHVIINHGMFTGVHAPGYKLTMA

SEQ ID NO: 98743 - protein, 77 aa, Unknown
  Obtained from environmental sample
  DOMAIN (1)...(62): Global regulator protein family
  misc_feature (1)..(77): Xaa is any amino acid
MLILSRKTNEKIMIGDDISVSIIEIRGDQVRIGVDAPKSVKVFRQEVFDAIKAENRAAAQSASVLPVLTIDAKREPV

SEQ ID NO: 98744 - protein, 68 aa, Unknown
  Obtained from environmental sample
  misc_feature (1)..(68): Xaa is any amino acid
IFHIDAYRLAGNDDFSSLGGEDIVFGDGISIIEWCDRIPDFICGALRVDIQIMDDEKRQFHIYREDEK

SEQ ID NO: 98745 - protein, 192 aa, Unknown
  Obtained from environmental sample
  DOMAIN (61)...(192): Domain of unknown function (DUF323)
  misc_feature (1)..(192): Xaa is any amino acid
MIDGEATGTRVKAGGTAIVSNVGTGSTEVAVRGDDGKITKAQNTVMVRQGQTVAAVIEHPAPANMVRIQGGTFQMGSPASETGRKDDEVQHQVTVSSFFMGKYEVTQKEYQEIMGTNPSRFKGDNLPVEKVSWYDALVFCNKLSMAEGLSPAYSINNSTNPSNWGAVPTDMNSTWDKAVIVSGSNGYRLPTE

SEQ ID NO: 98746 - protein, 167 aa, Unknown
  Obtained from environmental sample
  misc_feature (1)..(167): Xaa is any amino acid
MIYEARGYQVMLDEDLAKIYQVETKVMNQAVKRNRDRFPPEFMFQLTQTEYDNLKSQFVTSSWGGRRKLPFAFTEHGVIMLSSVLNSKIATQINIAVVKAFIDMRRYIAKPVREKLDNLEKVLMLHIDDTSHNFSKHAAIINEIIANLSNLIETPPKPKRKIGFNPD

SEQ ID NO: 98747 - protein, 273 aa, Unknown
  Obtained from environmental sample
  misc_feature (1)..(273): Xaa is any amino acid
VKQLKAEIDRIGNTTEFNTKKLLEGSATGVRDEIKGTLRVNNNSSVVLDANKEKAMYNNIANDKSWAFDGAYMLIKTNQTYDASGNPVFRSDDFGLVGPDGSVYKFKAYTPDTVVLANGLDAGTIIAEGGGVENIAKAGAVGSDMILGENLTEKELKSVGSGSILASGSVFNLIDNGSGKLAVGGTSGVKEIKSTNGILELTTNAGSVKVEAGKSITLDDGTIIKNHGGGKVSIESGSLTTAGAIDNTVASSFTIASQSTIASSSETLQDDTD

SEQ ID NO: 98748 - protein, 306 aa, Unknown
  Obtained from environmental sample
  misc_feature (1)..(306): Xaa is any amino acid
SNVNNETNAAIFIQHDLIISGNGTLNVTGNEYHGIRAQDSLTIKSGAVNVTAAGDALRGRDGVIIESGTFSLTAGGDGIQSNNDANAELGYVTINGGTFTINAGDDGIQGESTVTINNGNFTITVKDDGITSKGSVLITGGTINIPECYEGIEGLNVTITGGDINISSRDDGINAREYVATNTNTRGRFMMTRRPTNPNIFVRVTGGTINIRASTDGIDANNNVFLEGGLLQISGPSRGMEGAIDVDGSVFVTGGRLITAGSVAGVSAQSTQPTLLRTYNQQLSTGALIEIRDASGNTLLDYTAKN

SEQ ID NO: 98749 - protein, 263 aa, Unknown
  Obtained from environmental sample
  misc_feature (1)..(263): Xaa is any amino acid
MSIFAEALSKCWNAAYLASTQFDPSQAVGQYLTGLVQLNGLLRKPGIKTQIAVDIDGIAGASVPMGTLLTDATTEHVFATDADIILPATVSATALVYSSWTPAPGQINLIQSPIPAVRTVNNTSILIAGEDAETDAALRFRQAVSTAFPARSTIESLYSGVMQINGVKYARAYQNLTMQDPDLRGIPAKEVCMMVLGGDDQEIAEVLFKRLPIGKQGYGNITKTVEDENGQAYAISFSRPTTVPITVEVTIRISAPDSPKPDT

SEQ ID NO: 98750 - protein, 93 aa, Unknown
  Obtained from environmental sample
  misc_feature (1)..(93): Xaa is any amino acid
VKNNSIGSSFDDFLEEEGLSEAVEAGAIKKIIAYQLQEAIEKERLTKTMLAARLETSRAAINRLLDPNNESITLLTLQKAASVLGKKLRFELV

SEQ ID NO: 98751 - protein, 159 aa, Unknown
  Obtained from environmental sample
  misc_feature (1)..(159): Xaa is any amino acid
MPNQKLGGTIALMKIAYRNIWRNLRRTVFCISAVGIAVFFIVFYQSFIDGMTESIDNVVQIFDTGSVRIVSAQYEAENEYMPVQYPVANGENVDDLVRQLKSIEGVREVFPRILSYATLQESVIKHAILWGLKTEEEMKANNFNLTDRSNGIVEGRYPK

SEQ ID NO: 98752 - protein, 104 aa, Unknown
  Obtained from environmental sample
  misc_feature (1)..(104): Xaa is any amino acid
GTGTAELAIMNVPTVVVYKTNWITALVFRLVVRVRFASLVNILKGRGIFPELLGRHANADEITAELEKMNREKTIAELRAADHLWHKAEPPMNIVVDEIVTRGS

SEQ ID NO: 98753 - protein, 204 aa, Unknown
  Obtained from environmental sample
  misc_feature (1)..(204): Xaa is any amino acid
MNDRVSQLRKHSLETVPSLSIERALIVTDTYKEFEGKVSIPVLRALSFKALCERKTVVIYDGELIVGEKGHKAKAAPTYPELCCHTIEDFKVINDRKKVFFKVDETALKAQEEIIIPYWKGKSIRDKLFGAVDGEWVSCYEAGLFTEFMEQRAPGHTVCGSKIYDSGFLDFKRTIEEELAKIDYVNDMGAFDRREELKAMAICC

SEQ ID NO: 98754 - protein, 94 aa, Unknown
  Obtained from environmental sample
  misc_feature (1)..(94): Xaa is any amino acid
MGTTVVFKPTTVQRKALALLKSGAKHILLFGGSRSGKTTVLVMAIIYRALMYAGSRHLICRYRAKDARSSVLRETLIPWLDNTIGKKRILLFSP

SEQ ID NO: 98755 - protein, 290 aa, Unknown
  Obtained from environmental sample
  DOMAIN (1)...(206): Transketolase, thiamine diphosphate binding domain
  misc_feature (1)..(290): Xaa is any amino acid
LVNRFGKLFEHKTVCLLSDGTVQEEIAYGVGRIAGHLKLSNLIFYFDSNSIQLSCPTSEVMSHDVAAQYESWGWRVYNVDGHSPDELRKAFTDAYAETEKPVLIIGNSIMGKGIKDAQNNNFENKVSTHGQPIDAAGASTAQTIKNLGGDPENPFVIWKDVEDAFNSRLEDLQKESDSWHHRYETWKQAYPQLAEELEHWQNNKAPVLDLSIIPQKQGVATRVNSSAVLAWLADNQKNMVCSSADLSNSDYTQSFLDKTGILKPGDFTGAFLQAGSAELYMGCAMCGIAL

SEQ ID NO: 98756 - protein, 231 aa, Unknown
  Obtained from environmental sample
  DOMAIN (1)...(138): Beta-galactosidase
  misc_feature (1)..(231): Xaa is any amino acid
MGTYPGIDYFRLAEVLDVVSWDNYPQWTGTDKDIDIAVLAAFKHDLTRGLKAKPFMLMESSPSATNWRPIAKLHRPGVHTLQSMQAVAHGADTVQYFQIRKGRGASEKFHGAVIDHEGTEKPRVFKEVASLGEKLKGLDALVGTDTPSAVAIVYDWNIRWALDDVKGFLQKNTNYEQTVVDHYSAFWQLGIPVDIIDSTTKRLEGYDLVIAPMLYMLRPGFAEALDAFVQK

SEQ ID NO: 98757 - protein, 304 aa, Unknown
  Obtained from environmental sample
  misc_feature (1)..(304): Xaa is any amino acid
DRDDGIYKAGQEIDIFLEFSKPVKLAYGNTPRENLWLELNTGEKAQYKSGQSDQNSRQYFTYTVRPGDNIARLNVTGLFVGTRNSTTGAYTGTSYTASTAYTGNQNYPFAWSRGSASEYEEVRLTMQTGKTGAEEGVGQTPVQGKGYYVRTLPTNTASGNADLQYTLYSAKDIKIDTAYPRVVSVNGVYVKALTNPGWYNSGDIYFSITFDEPVIIGSGANLPRFPVTLRSGNTVSTSAADADVRVNGNTVTFKYTIGSTDYSSGGMIYLSSFTGPGVGTITDLAGNAYPNEYSAGTIRALTNE

SEQ ID NO: 98758 - protein, 132 aa, Unknown
  Obtained from environmental sample
  DOMAIN (29)...(128): Anticodon binding domain
  misc_feature (1)..(132): Xaa is any amino acid
GVGSSIGLDRMIAALESLGKLPPAGGFAAAAIACIRQEDSGLYQALAGQFRQAGVPCEVFTDAAADGAAGDNKNLVKQFVLAEKKGLRWMIIPGEDPLHGSLTLRNLVTRQNREGLSVEDVVNIITSFPSPA

SEQ ID NO: 98759 - protein, 156 aa, Unknown
  Obtained from environmental sample
  misc_feature (1)..(156): Xaa is any amino acid
VSPNATDKDELMNGLIYATRILGYVNAPALMQRIVAELTDAAVDVSIYARRRDAFTAILDQAGIEYAVPEGAFYLFCKVPSKKVPVPSKKVPVPSKKGSTEPGDDLEFVNHLKQHLILGVPGTGFGKPGWLRFAYCVDEKNIRASAEAFKRAMESW

SEQ ID NO: 98760 - protein, 202 aa, Unknown
  Obtained from environmental sample
  DOMAIN (21)...(200): von Willebrand factor type A domain
  misc_feature (1)..(202): Xaa is any amino acid
MTAETRSIDELVAYLRKRVLTVFFILDVSGSMKGERLDALNTSIRGTLPALRKKEIEGREIRVAALEFSSAARWRTTAPEPISSFIWEDITNTGGGTNYGAAFHALGEKLTRGAFLSSTGEIYHPFILLVVDGKPSDLMLYGEELARLGENPWFRRSARAGIAIEEGASSPECRKALFDFTSEESTVFMVKNTRLLGGQMQI

SEQ ID NO: 98761 - protein, 45 aa, Unknown
  Obtained from environmental sample
  misc_feature (1)..(45): Xaa is any amino acid
MYGKKLGRVLGIVLAGGKGERLMPLTRYRAKPAVYFAAKYRIVDF

SEQ ID NO: 98762 - protein, 115 aa, Unknown
  Obtained from environmental sample
  misc_feature (1)..(115): Xaa is any amino acid
MKRQWYEDALIYHIYTLSLTGAPFINDYTQSEHKLAKIEKWIPHIRGMGFNTVLFGPVLKSRTHGYDVTDYFEVDNRIGTNDEFNALVKKLHDNGIRVLLDGVFNHCGRDFFAFL

SEQ ID NO: 98763 - protein, 196 aa, Unknown
  Obtained from environmental sample
  misc_feature (1)..(196): Xaa is any amino acid
NTTGTASEPQTVNGKPDASKQPESAAIPQTSDTAERQDVRQEEYARPSNNGGSGVVQQIITGGKPKPPPKQPGKYAEPSAPPPFQQQPVEPYNPEIAEPIPRMDIRFNIVTEQTELVPQSALKHDKPESAPQSALKHDGAVNDEPKNNTQPALKHDRPESPLKTEPKGELKFTRGETPQPASSRKKKKRRFKPADQ

SEQ ID NO: 98764 - protein, 78 aa, Unknown
  Obtained from environmental sample
  misc_feature (1)..(78): Xaa is any amino acid
MAIVPILLRLAGGLCMFLFGMKMMSDGIQQSAGDRLRKTLNYMTGTRFTGILTGFVVTGIVQSSSAVTVMVISFVNAG

SEQ ID NO: 98765 - protein, 164 aa, Unknown
  Obtained from environmental sample
  DOMAIN (6)...(164): Acyl-ACP thioesterase
  misc_feature (1)..(164): Xaa is any amino acid
MEKLPVWSESCQVRFGAVDKSDSMTLNSIFNFFQEAAISHAEILGVGREAMARTNQVWLLSRMSVQVDRRPKFGETVTVRTWPRGAEKLFTRRDYDILDANGQAAVRASSSWLIVDIVKRRPLRPQTLLENMPRNEGLDALPVAAVSLEETQPCKNAGNIQRCT

SEQ ID NO: 98766 - protein, 140 aa, Unknown
  Obtained from environmental sample
  DOMAIN (6)...(136): Enolase, N-terminal domain
  misc_feature (1)..(140): Xaa is any amino acid
MGETITITGLRGREIINGRGIPAVEADLFVSSGFRYTASAPSGVSVSSHEAVELRDGGKRLMGKGVLTAVQNINEKIRPALLGKTVTDQAKLDALLVELDGTKQKTALGGNAVTAVSLAVAKAGAAARKLEPYAYLGGPD

SEQ ID NO: 98767 - protein, 62 aa, Unknown
  Obtained from environmental sample
  DOMAIN (1)...(54): MOFRL family
  misc_feature (1)..(62): Xaa is any amino acid
ADIAGGIADGETADRARAAGKTLFAALKAHDSGTLLEALGDAVLTGPTGTNVVNLRILVIEE

SEQ ID NO: 98768 - protein, 137 aa, Unknown
  Obtained from environmental sample
  misc_feature (1)..(137): Xaa is any amino acid
MDARSRFLNYEALLAHGNAKSRAAALDCLAAALNAADTYAGARRVVRREGNALHVGERAYDLSRPFAVYVVGAGKGSYPIAKALDEILGSRITQGIVLVKGEAPPLAHIRVMETSHPVPDERSLAGREIVRRMAEQV

SEQ ID NO: 98769 - protein, 247 aa, Unknown
  Obtained from environmental sample
  misc_feature (1)..(247): Xaa is any amino acid
VERVIIENVPEFLSWGPLDKNGHPIKRQKGKTFEAFVSSLKSLGYQVDWKILCAADYGDPTTRRRLFVQAVKGRKRIMWPQITHMDGDGNNLMGYQPWIAARNIIDWSIPGTSIFDRKKPLADATIRRIAAGIEKYWGDYAKPFLAVLYGTNDVRSLDLPLPAVTGSGAHHALIEPVPLLMGHESGQTPKPVDDPVGTILAQGKKFLITPFMLGQQSGATARPVDQPVPTVAGAGGISVIQPFILPN

SEQ ID NO: 98770 - protein, 278 aa, Unknown
  Obtained from environmental sample
  DOMAIN (1)...(278): Nitrogenase component 1 type Oxidoreductase
  misc_feature (1)..(278): Xaa is any amino acid
DVIGGGEKKLREAVIYADRELRPDTIIVANGCVPALIGDDVDNILADLQEQTAAIIVPIHCEGFKTKVMATAYDAVYHGILKNYVRPPNREKHIVERDFEEMQRQYRISKNVNILNVGSMSRADELELQRILTCIGLNVRFIPCYAEPEDFPYSLETSLNVSICGTHDDYFVEHIKEKYNIPFIIDTIPIGRKNTDRWVLRIAKHFNLEKEAQRFIDNENKILDASLDKYRSILKGKKAFIAGGEVRIFATAEIIQDLGMKITGLKLHHFDQFVEPII

SEQ ID NO: 98771 - protein, 270 aa, Unknown
  Obtained from environmental sample
  DOMAIN (1)...(265): Glutamine synthetase, catalytic domain
  misc_feature (1)..(270): Xaa is any amino acid
TVGPEQEYFLIDKKMYLERPDLIYTGRTLFGSRPPKGQELEDHYFGSLKPRISAFMKELDEELWKLGVLAKTKHNEVAPAQHELAPIFSTTNIATDHNQLTMELMKSVADRHGLACLLHEKPFAGVNGSGKHNNWSIMTDTGINLLKPGDTPHENAQFLIFLAAVIKAVDVYQDLLRVSTASAANDHRLGANEAPPAIISMFLGEELTEILEAIDSGTNYKGKEKLQMEIGVTALPHFPKDTTDRNRTSPFAFTGNKFEFRMVGSSFSIA

SEQ ID NO: 98772 - protein, 129 aa, Unknown
  Obtained from environmental sample
  misc_feature (1)..(129): Xaa is any amino acid
VIGTEIDIVETFDYPRHVYNAALNWNGYGKNRKAVHSFTSKLPDIDIYDGEFHVFALDWSPSEYIFYVDGEIFWRVDGGVQFLNSGINQNPNYIKLTMESGEFSGAIPDDFTSGEMLVDYVRVYNQPRY

SEQ ID NO: 98773 - protein, 59 aa, Unknown
  Obtained from environmental sample
  misc_feature (1)..(59): Xaa is any amino acid
GQIIVRPWVQAFSLNVSYDRRYYNANYVRYQRDGVRTAGDGGLMYWNNSGRYEDIPAKE

SEQ ID NO: 98774 - protein, 286 aa, Unknown
  Obtained from environmental sample
  misc_feature (1)..(286): Xaa is any amino acid
GDLIIKEGAVISGNTAAWGGGIQIVGDRGATLMISGGVIENNRSSRNGGGIHTQNGAVIMLFGNAIIRDNEALNSSYGGGMCLSDSVCTIRGNVVITGGKAGNGGGIVISGEAASVDISGGSIENNHAEISGGGVLVADDSIFNMYGNSMIRNNSATFGSGVYISEGKLFIESGMITGNKAERSGAVYYEGGNHELSGGLISDNTAEYGGGILVGSDTRLIIGGSVRISGNTSRETGGGILLLKDCSLTMNGGVIENNASSTMGGGICLAANDTFIMDNDAVIRNN

SEQ ID NO: 98775 - protein, 283 aa, Unknown
  Obtained from environmental sample
  misc_feature (1)..(283): Xaa is any amino acid
VTIGDIVTYDVVVSFKQTSLPQAQVMFGAAGAGGTLKAAVDGVPITPGSLVSIGKKVVFTAVPDKGYGTLDWTVAGAKIVDSSLADRREVEISEKAVEVSVSFERIFIPRVQVTFDGGADGVLTAVVDGAEIISGDSVFVGKSVVFTAVPDNGYVIAGWTINGADTSSARSLTVRISDTASVNVTVSFDIFVPTRPVVKIGPNPVKAGGDAVIYWFGGYAVSGGLSIFDAVGYKVAHVNVNGVRKIGAWKVGNIARGTYLIKGVLKDKGGKKIDVAVPVGVVR

SEQ ID NO: 98776 - protein, 285 aa, Unknown
  Obtained from environmental sample
  DOMAIN (81)...(154): HAMP domain
  misc_feature (1)..(285): Xaa is any amino acid
GTANRQSLEVTGRAMGTLKRYVDRLGVQMELNYPVIENEHMLDEIRGVSALVSDLLQNFIVREIESAAAESQRIKKRAIILGIGEFAIIFTAVYFAVLMQRSVAKSVDHSIGSLVSLSSSIAEGDLDARAELPNVQELQALTKDLNVMAYKIKTLVEENIREQRNLQKSEMRALQAQITPHFLYNTLDSIVWLAEGNKNEQVISITRAFSDFFRISLNRGDEWVHVQDEFKHIESYLTIQKIRYRDILDYSIEYENEMEHKVMLKLLLQPLVENALYHGIKNKRG

SEQ ID NO: 98777 - protein, 77 aa, Unknown
  Obtained from environmental sample
  misc_feature (1)..(77): Xaa is any amino acid
LRYRLFYKGIDVGQRRVDFLVAEEISVEIKAVVNMENVHLAQAMNYLEAYNLQTGLLINFGAKSLQFKRLFNKKYKC

SEQ ID NO: 98778 - protein, 78 aa, Unknown
  Obtained from environmental sample
  misc_feature (1)..(78): Xaa is any amino acid
MNAIELLDIITSGETSKVQFKLEFDNQDKIAAEIVVMSNAMGGIIIFGVDGKTGIIVGLDYNNLQYITSELATIASDL

SEQ ID NO: 98779 - protein, 198 aa, Unknown
  Obtained from environmental sample
  DOMAIN (85)...(121): Sigma-70 factor, region 1.2
  misc_feature (1)..(198): Xaa is any amino acid
MQNTEKKKQDQAAPEAFMKADPDEIPAPAQDAEILSDDEPDPENAAEEHDEPELLDIVDCDISDDAPDTETLPLPAQTRLPAPSLDALHLYLREIGRFPLLKPDEEFELARRVQEHGDSEAAFRLVSSHLRLVVKIAMDFQRRWMQNVLDLIQEGNVGLMRAVNKFAPEKDIKFSYYAAFWIRAYILKFIMDNWRMVK

SEQ ID NO: 98780 - protein, 290 aa, Unknown
  Obtained from environmental sample
  DOMAIN (207)...(289): B12 binding domain
  misc_feature (1)..(290): Xaa is any amino acid
IVVDALALAVASGADAAREGMKTIRWCADQGIPALIGLSNISFGLPARELVNAAFLNMCAGAGLSGCIANPGSARIREAVAASDVLLGRDKGAGRFVSGYAGWNEDSRIGTGGAASAPAQSATLEQAVINGDQDCVEALVDAALAEGADPFALVRERLIPAIAEVGARYERKEYFLPQLLRSAQTMQTAFERLKPLLEQAGEAARRPVVVLATVEGDIHDIGKNIVGLMLGNHGFEVVDLGKDVRAADIVDAAERRQAALIGLSALMTTTMVRMEDTVRLARERGLAARI

SEQ ID NO: 98781 - protein, 130 aa, Unknown
  Obtained from environmental sample
  DOMAIN (64)...(97): Tetratricopeptide repeat
  misc_feature (1)..(130): Xaa is any amino acid
MIKKIIHGFFFVLTLSFSLVFSACETPASAQEYFALGMAYFDLGKFDEAEKWLNRAKQADRTMTASTYNLGRLAYERRRYEEAVKYFETILKKDKDNVMALKAAAYARIRMGDIETAEKHYSRLLTLVPE

SEQ ID NO: 98782 - protein, 268 aa, Unknown
  Obtained from environmental sample
  misc_feature (1)..(268): Xaa is any amino acid
LGNIKANETISVEIRCAQLLRFEQDQIRVKIPTVIAPRYGDPHQSGGLASHETDKVDLSAKYPFSVRLDILGETAQAKITSPSHPHTAITATENGVNVLLESGAMLDRDFILLLQGLAGHSFALSVPDEERHTILASFCPKLPIKADPVLLKILVDCSGSMGGDSIVQAQRGLQSIIRELSRQDFISFSRFGSEVEHNFSRMEQCASGTLQKFSAMVNSLSADMGGTEMTAAVLSTCQEVALPKETSLRPSILLITDDLYWSDGSLLR

SEQ ID NO: 98783 - protein, 263 aa, Unknown
  Obtained from environmental sample
  misc_feature (1)..(263): Xaa is any amino acid
KTTLFSVRCLQPCEGELGKPNSSLFAELHKAYMDARKHKRNTMNQLKFERNLESELLSLCQEIQDRTYEIKPRICFISKVPVKREIIAASFRDRVIHHFIYNRIYHIFDKQFIYDSYSCRIGKGTLFGIKRVHKFLKSQNEWVLRLDVKGFFMAIDRNILFNLIMKGLSKKNKVCDLMEFLINKVVFNEPLKNARFKSPPNDWIDLPKDKSLKFSAPDCGLPIGNLTSQIFANVYLNPLDQFIKRDLKIKCYGRYVDDLVLIH

SEQ ID NO: 98784 - protein, 219 aa, Unknown
  Obtained from environmental sample
  misc_feature (1)..(219): Xaa is any amino acid
MRRIQTLTREELAQKAKALAEIDERIQEYDVNLEELLKMSGNVQENLNRLSEESAYVEDVEKKVIEINDKFDSAEGDIDALGERLASIEAKFELENAAALEKAVEASVSNARSIIQDMETEAQTLSQKVEEHREAIDRLERGRVERLARDEERIEKLLTEAVERAGSRASKVEEAAMAKLHEQAQERVNHIKSNFEEKIKNVQETVKTKVAEINEHIKE

SEQ ID NO: 98785 - protein, 249 aa, Unknown
  Obtained from environmental sample
  misc_feature (1)..(249): Xaa is any amino acid
VVNGDFARFENEVRDSWEEASGKMRESWENETNKMSESWENETNKMSESWQNETNKMSESWQNETNKMNESWQNETNKMSESWEKEAGKYNADLQALRQGITGIDDELRKSMQETVSLVNGDFARFENEARDSWEEKSNILRDTWETETNKMRESWENEIGKMRESWESASGEYTANMQALRQGITGIDDELRKSMQETVSLVNGDFARFENEVRDSWEETSGKMRESWETETNKMRKSWEKETGKLTL

SEQ ID NO: 98786 - protein, 260 aa, Unknown
  Obtained from environmental sample
  DOMAIN (46)...(256): CobQ/CobB/MinD/ParA nucleotide binding domain
  misc_feature (1)..(260): Xaa is any amino acid
MEDQAEKLREIMRQKKNSSGGSGDRTGRRSANAETLSRDSRKTRIITVTSGKGGVGKTNLSVNMALAFARLGKKVVVMDADLGLANVNVMLNMIPKYNLYHVIKKQKSIHEILVETEYGISIVAGASGFSQIANMSEQERQDFISELDTLSFADIIIIDTGAGVSSNVLDFIAAADDAIIVTTPEPTAITDAYGIIKIIAMEYDPVNIGLKLVVNRAKGAAEAKSVADRMTNIAGQFLNLKLDYLGFIYDDQAVPASVRS

SEQ ID NO: 98787 - protein, 168 aa, Unknown
  Obtained from environmental sample
  DOMAIN (24)...(93): ATP synthase alpha/beta family, beta-barrel domain
  misc_feature (1)..(168): Xaa is any amino acid
MGSIFEKYLEMAERIDPIKCVGHIIRVQGILIESRGPQAIIGEICRIELKRAASVDKKFIQAEVVGFKDEIVQLMSYGETGGIEVGCRVIASGSCLDVAVSKKLLGRVLNHLGKPVDGKGDIESPVRYPALADAPDPYRRPRIRERVSTGIRAIDGLLAIGKGQRLGI

SEQ ID NO: 98788 - protein, 192 aa, Unknown
  Obtained from environmental sample
  misc_feature (1)..(192): Xaa is any amino acid
MPDFYALLSGYIHYYPLAALVCLLLAGCNIPISEDLIIITGALLSEEKPFLLVPNLIAIYIGVIASDFIIYWIGTRVRKGTSKSSFFSGLVPEKAIEKMHNKLDKYGILTFIICRFIPFGVRNTLFFTSGFFNLRPRVFALYDLIAAMISVNTLFFLAYFLGDDVKKRDKNSRSRPFYFTRLRRYNAVVRII

SEQ ID NO: 98789 - protein, 83 aa, Unknown
  Obtained from environmental sample
  misc_feature (1)..(83): Xaa is any amino acid
NSAIEIQQYMYYLVRLDNTKERLLKEAAIAEMKVEEAREAFLEASRERKVLDKLKEKKQKEYHKIKLNEETRILDDRRYGITA

SEQ ID NO: 98790 - protein, 247 aa, Unknown
  Obtained from environmental sample
  misc_feature (1)..(247): Xaa is any amino acid
MLFYTYMDKLIIKGAREHNLKNIDLELPRDKLIVISGLSGSGKSSLAFDTIFAEGQRRYVESLSAYARQFLGRMDKPDLDYIEGLSPAISIEQKTTHRNPRSIVGTVTEIYDYYRLLFARIGVPHCPVCGKEIREQPIDQIIETILQMKEGSKIQLLAPVIRGKKGEHQKIIEDAKKAGFARARIDGVPVNLDEKISLDKQKKHTIEIVVDRLVMGAGIRQRLAESCEAALQAADGVMLVLCQGQDS

SEQ ID NO: 98791 - protein, 261 aa, Unknown
  Obtained from environmental sample
  DOMAIN (6)...(119): Response regulator receiver domain
  misc_feature (1)..(261): Xaa is any amino acid
MPEIRKKAIMVDDNPLNLKVARNTLMGKYDVFTVPSAEKLFELLEKTLADIIILDVMMPGMSGYEAIKVLKTNPRTANIPVIFLTSKADAKSELEGFIYGAVDYISKPFSPQVLLKRIDVHVLVESQKKELEYINQNLMQLVDEKTEEIQELQSAILRTMSNLVEYRDDVTGGHIERSEHFLRLLTEEMIKQKVYYDEVKDWDLKLFLKSAQLHDVGKIAIRDDILLKPSALTTEEFNEMKKHTLFGEKVMKKYRKVPGKA

SEQ ID NO: 98792 - protein, 141 aa, Unknown
  Obtained from environmental sample
  DOMAIN (4)...(120): CrcB-like protein
  misc_feature (1)..(141): Xaa is any amino acid
MKLALIIGIGSFIGGFSRYLLSLLIQAKTASPFPLHTLIINIIGCFWIGIVFGFFDKGQISEEWKLFFATGILGGFTTFSAFSIETLTLFKEGYACYALVYIFSSVFLGLLLTYLAYSMVKHFLYYPKTQKEAIKWQRSKM

SEQ ID NO: 98793 - protein, 291 aa, Unknown
  Obtained from environmental sample
  DOMAIN (7)...(276): HMGL-like
  misc_feature (1)..(291): Xaa is any amino acid
IYDTTLRDGTQGEGVAFSVQDKIRVAMKLDELGVHYIEGGWPGSNEKDAEFFRQAVGVNWKSAKIAAFGSTAMAKNRPDNDPNLLALVEARTPVITIFGKSWDFHVTDALRISLARNRELIHDSVAFLKAQGREVIYDAEHFFDGFAANPEYALHTLKAAAEGGADMIALCDTNGGSLPSHVQNAMRGVQAEISIPLGIHCHNDSELAVANTLAAIECGAVMAQGTMNGYGERCGNANLCSIIPNLEIKMGYKTIGQERLKLLTGTSRFVSQIANLPHRRDLAFVGESAFA

SEQ ID NO: 98794 - protein, 196 aa, Unknown
  Obtained from environmental sample
  misc_feature (1)..(196): Xaa is any amino acid
MDVLNPYVDKGVLQVIGPYPRSYTDNANFQRIATENWQAPIAKTRMENLLNNDARNVTLDAILAPNDPIARAVIEACKADAKYRTKLPVVTGQDAEYDSMVSIKAGEQTSTVFKDTAKLAEAAILLVDQLLKGQPINIPGTVLAAGGTTEIANTGKGYVTTYLLDPILVTNSNRNVPIDAGFFDADKSAAEINAIR

SEQ ID NO: 98795 - protein, 152 aa, Unknown
  Obtained from environmental sample
  misc_feature (1)..(152): Xaa is any amino acid
MREIANVEYFYDRCNSLLGTNYTSNDWGGEVNKKKAINIEWAVNAVNKVYQKIHQPKNGCRLLLSTRFNAGISRMAVNEEVVNSVVSYLSKLNKKCDNDCACATDRNCNCVCASHCNCKGATECKAKGNCSSSSNCNCNCVCTCSVCNCTGT

SEQ ID NO: 98796 - protein, 171 aa, Unknown
  Obtained from environmental sample
  DOMAIN (63)...(162): Protein of unknown function (DUF1524)
  misc_feature (1)..(171): Xaa is any amino acid
VDKNIAIGGIIQEFNAHINQNWEKKEIEDLISEYDKNILVFLNDYLYAKSKGKKFDFNKNVTIEHIMPGSGRNIEMIRENAGITDIEKFNALVNKIGNKILLEENINKSLGNDWFRTKIQTTVGGKTGYKNSSFTIAQTLTMSTKDTWGINDIEEATKKASERIVKFIFQT

SEQ ID NO: 98797 - protein, 262 aa, Unknown
  Obtained from environmental sample
  misc_feature (1)..(262): Xaa is any amino acid
MKSAASAALGIDIERIFLKQRQRQRGDAQYEKTGDARFEKIVSEGNLVFKVNLSDYLDTGLFPDRRLLRVMVKDEAKEKKVLNLFSYTGSFSVYAAAGGASSTDSVDLSNTYLNWARENYSLNGFSAQILQIWDFFSNKEPQGAHNFIRADALDFLEKAAASRKRWDIIILDPPSFSNSKKMTNDFDLQRDFYELTGKCINLLAPGGKLFLSVNQKQFKLNVTEMEEKLELRVTDLQNKITDEDFHGKKTPQSFLISLSPVT

SEQ ID NO: 98798 - protein, 197 aa, Unknown
  Obtained from environmental sample
  DOMAIN (70)...(193): RadC, DNA repair protein
  misc_feature (1)..(197): Xaa is any amino acid
DKELLAILLNTGIQGKNVIELAEDLLGLLDRSKEIPSIKEISGLTGIGLSKACAVAAMLEFGRRQFGAFSACIKKPQDIFTHVRHFADRKQERFISLSLNGAHEVLAVRIVTIGLVNKTIVHPREVFADLIQDRAAAFCVAHNHPSGKLQSSPEDDEVTDRLQSAADILGLQFIDHIIFSETNWWSYRENGKLSGMV

SEQ ID NO: 98799 - protein, 46 aa, Unknown
  Obtained from environmental sample
  misc_feature (1)..(46): Xaa is any amino acid
MGQAARISDKTAFFLHGEIVEFGKTIELFSRPKDKKTEDYITGRFG

SEQ ID NO: 98800 - protein, 77 aa, Unknown
  Obtained from environmental sample
  misc_feature (1)..(77): Xaa is any amino acid
MAKTITLRVDDSIYNTLKRAADGDRRTMSNFIENATINYIFNNNIVDDDEMNEILTFEKDLKTGLNDIKRGRYKIVG

SEQ ID NO: 98801 - protein, 155 aa, Unknown
  Obtained from environmental sample
  DOMAIN (2)...(144): Resolvase, N terminal domain
  misc_feature (1)..(155): Xaa is any amino acid
MIYGYIRVSTDKQNVDNQRFEINRFCASNNLNIDQWIEETISGTKSPEKRLLGSLLAEVKAGDLIICSELSRLGRSLFMIMSILNHLMTNDVRIWTIKDNYRLGDNIQSKVLAFAFGLSAEIERDLISHRTKEALARKRAEGKTLGRPHGAKSAH

SEQ ID NO: 98802 - protein, 148 aa, Unknown
  Obtained from environmental sample
  misc_feature (1)..(148): Xaa is any amino acid
TQAAPPQVSSANRDSPPAQAQGTIPAPQAVTPPVTTAEMQPEVKTPAAEKQEKLPPEEILKKAQDAFKEGNAAAAIALLDQYTEYYPGGGDELYWLYGQFYEANTPSRNILLSLDNYRRLVNEYPQSRYYSDARRRISYLERFYINIQ

SEQ ID NO: 98803 - protein, 117 aa, Unknown
  Obtained from environmental sample
  DOMAIN (13)...(115): GtrA-like protein
  misc_feature (1)..(117): Xaa is any amino acid
MIIKMLFDKVFLKFLLVGVINTIVGYAIMFVLHNAAHMSYWFSSGCGYFLSAILGFFLNKHFTFTVKRWSVFMVISFIVVIVVSYYLPYWIAEYAVKIIFPDNTENFNGNVALVAGT

SEQ ID NO: 98804 - protein, 272 aa, Unknown
  Obtained from environmental sample
  DOMAIN (6)...(244): Glycosyl transferase family 8
  misc_feature (1)..(272): Xaa is any amino acid
SVKTIPALFCIDDNPRYLPLLRVAVRSLRRTQGADAPCLCVYAGSDQAVLDSLDREGIPCARYTPVLDKATIPQRFHRAIGAFLKLELALLPELADVPYCLYCDVDVMFLRPLDELLARRPRYMAMAKEQTAPFYHDHERLNYTWRGKDYTVPMPFPIWTFSSGVVLFHLHQLRNHDYIHNFLAFCAQNLERIGNLDQSLLNYFFGKRIEKLESRWNCPPYRHNAAQEGHIIHFHGPKPWEVRRPLWNDLRIHDFWTLRETWKSFLDADELE

SEQ ID NO: 98805 - protein, 104 aa, Unknown
  Obtained from environmental sample
  DOMAIN (15)...(102): Sigma-54, DNA binding domain
  misc_feature (1)..(104): Xaa is any amino acid
TESVGAQRGAKRPVHTHIAAARNGGAAEAAGAGDTVCGGVDVTAERIKNKIRQLIDGEDAASPLSDQKIADILGKEGLSAARRTVAKYREQMRIPPTRMRQKYG

SEQ ID NO: 98806 - protein, 174 aa, Unknown
  Obtained from environmental sample
  misc_feature (1)..(174): Xaa is any amino acid
MKVAIIHYWLVNMRGGEKVLEALLDIFPDADIFTHVYNPKAVSSLIKKSRVITSYINRLPFAKKLYQLYMPLMPNALNDFDLQSYDLVISSESGPAKGVIPNPNAYHICYCHSPMRYLWDMYHEYFKGTNIFVRFFMKRLVPKLRLWDAISANQVDFFIANSNYIAQRIRRCYN

SEQ ID NO: 98807 - protein, 246 aa, Unknown
  Obtained from environmental sample
  DOMAIN (4)...(172): Glycosyl transferase family 2
  misc_feature (1)..(246): Xaa is any amino acid
MKLLIMVPTYNEALNIERFMLAVFEHIPQDADVLVVDDNSPDGTAALVEALIARYQDRLHILNRQEKQGLAMAYLAAFDWGLLRNYDFFLEMDADFSHNPAYIPEMLEKIQTHDVVIGSRNIKGGGVEGWPAWRNFISKGGSLYSRVVLACPVRDLTGGFNMWRKSALERIGLKNIISRGYSFQIEMKYRAFCSGCSIKEIPILFADRKLGKSKMSKGIFLEAMINIWKIKKILGKDSSVDQFIKF

SEQ ID NO: 98808 - protein, 92 aa, Unknown
  Obtained from environmental sample
  misc_feature (1)..(92): Xaa is any amino acid
MVSVWPQIDLKSENYAEMCERGLLVHTERGVNVQMRFGGESVFFDATNPAARDYVWQKCKKSYYENGIRIFWLDEAEPEYGEYDFENYRYSM

SEQ ID NO: 98809 - protein, 286 aa, Unknown
  Obtained from environmental sample
  DOMAIN (126)...(158): Ankyrin repeat
  misc_feature (1)..(286): Xaa is any amino acid
CHVDKPEIVSLLLRAGADVNAKENEGWTPLMWVVGRDESNPEIVSLLLEAKADVNSEGNDGETPLLQAAGKGNPKVVSMLLQAGANINAKNDDGETPLIQAAGKGNPEVVAILIEAGADVNAKNNKEQTPLMQAAGKSNPEVVSILIEARADVSAKDNKGWTPLMWVVDRDDSNPEVVSILIEAGADVNAKDNKGQTPLIKAAGKGNPEVVSPLLKAGADVNAIDNKGWTPLMMALARNDPAVVSMLLDAGADVNLKANDGWTPLMWVVDRDDSKPEVVSLLLKAK

SEQ ID NO: 98810 - protein, 256 aa, Unknown
  Obtained from environmental sample
  misc_feature (1)..(256): Xaa is any amino acid
MNYKWIWFIAARYIFRKRKISPAPVLSILGIATGVLALIVILAVMNGFQLGFIESILEISSYHLRIGPVGDIEDARKAVLAVPGIKAVVPFREFQGLVQGRRGGQQAAIIRGLPQNALEMDAAMADRLIFEEGSFGFKKKSDALLGAELARRLGLKYGDEFTLFTIPSIFNAAGDEGSGLQAFTVAGIFRTGFYEYDTSWIFIDIDGVAAFSESGPVLGLKLKNRFHDQQALELIRKSLVNNPAFADAAFSSWRDY

SEQ ID NO: 98811 - protein, 228 aa, Unknown
  Obtained from environmental sample
  misc_feature (1)..(228): Xaa is any amino acid
LGTTAFANCSKLTNVTIPSSVTKIGDAAFGDCTSLISVTFSGSIPSSGFNDDAFWGLGDIRDKFYATDKTKGTAGTYTTTAPVGKNSVWTKGGSTAATPAAAGTPGLEYKLISDGKGYIVSRGTLSAGFANNLVIPDTYNNLPVKAIANSAFQDRAMIPSVTIPASVTEISLAAFSSCVNLKSVTFGGADTRFGATEFPDGNDLRTKYRAGGAGTYTRDISSKTWTKK

SEQ ID NO: 98812 - protein, 120 aa, Unknown
  Obtained from environmental sample
  misc_feature (1)..(120): Xaa is any amino acid
NADAIVLGSPVYMGQMSAQAKIFTDRLYACTSPQFSPHYKENARKKKMVLVFTQGNPDTALFQTYFDYTKNMFQVLEFDVKGVQVIAGMRTKRAHERNDLLTAMNDIGSSLVLESVQKVP

SEQ ID NO: 98813 - protein, 144 aa, Unknown
  Obtained from environmental sample
  DOMAIN (46)...(144): Phosphoglucomutase/phosphomannomutase, alpha/beta/alpha domain I
  misc_feature (1)..(144): Xaa is any amino acid
MSNVDSKVLERANAWLNGNFDEETKAQVKDLMQNNEKELVESFYQNLEFGTGGLRGIMGVGTNRMNKYTVGMATQGLANYLKKSFAKLPHIKVAIAHDCRNNSPFFAKTVAEIFAANGFHVYFFDSLRPTPELSFTIRLLGCQS

SEQ ID NO: 98814 - protein, 86 aa, Unknown
  Obtained from environmental sample
  misc_feature (1)..(86): Xaa is any amino acid
LVNLTEEAKDLANDYIAEKVIGKTSLEDCQHIAMATINKVDILASWNFKHIVNINRIRGYNSVNLKKGFQTLEIRNPKDLVEYEEN

SEQ ID NO: 98815 - protein, 265 aa, Unknown
  Obtained from environmental sample
  misc_feature (1)..(265): Xaa is any amino acid
MLSGDLANELGGRYIEFTIHSLSYMEFLQFHKLENNDDSLEKYVRYGGMPYLIHLPFEEEIIREYLNSVYSTIILKDVIARKKIRNTVFLEQLVKYLAGNVGNLFSSKSISDYLKNQRTEISTNQVIEYISALLDAFVIHKVDRYDIVGKKVFERGEKYYFENMGIRNAIAGYKLQDRAMRLENVVFNHLLFCGYDVKVGILQSEEVDFVCSKNGETLYAQVAMELSKAETIDREFGNLLKIKDNYPKIVISADRSLKTLTKAWS

SEQ ID NO: 98816 - protein, 279 aa, Unknown
  Obtained from environmental sample
  DOMAIN (67)...(279): Cys/Met metabolism PLP-dependent enzyme
  misc_feature (1)..(279): Xaa is any amino acid
MFYNRAVCRVHDDDDVSERRILAWSDRRLVGVYAQATGIPYKRGSPFFYASYNSWEGYKLSKNWHFETLAIHGGQMPDPATLARGVPVSRTSSFVFKSVKHGADLFALKELGNIYSRLTNPTVDTLEQRVTLLEGGAASVAVASGTSAVHYAIATLAQVGDEIVSGINLYGGTYTMFDAIFPQFGLKTHFVDARDPKNFKKAITSKTKALYIETIGNPALDVTDVAEVAKIAHEEEIPLIVDGTFTTPYLWRTIEDGADVVINSLTKWMGGHGTAIGGI

SEQ ID NO: 98817 - protein, 150 aa, Unknown
  Obtained from environmental sample
  DOMAIN (14)...(149): ArgJ family
  misc_feature (1)..(150): Xaa is any amino acid
MKTISGGVCAPKGFKAGGIWCGIKADSKKRDLALIYSEKACAAAALFTTNRVQAASVLVSQKHIMGGKLHAVIANSGNANACTGEAGLTAANCMAELAADEFAISPRTVAVASTGVIGVPLPIDAIENSISALANSLRGDEAGHAAALEA

SEQ ID NO: 98818 - protein, 278 aa, Unknown
  Obtained from environmental sample
  misc_feature (1)..(278): Xaa is any amino acid
MPFPANAHALPEIPRELQGTWIEESIKYSYKNDATADALTRQLDKAARFSRERGDLSLFCGEFGVFIPNSLPEDRVRWYQTVTRLLVERGIARTSWDYFGGFGIFKTDRGGSINSDLNVEVVKALGFSPPRQKPANPFRGGFTVFDQYPLFPAGRVIHWGCDVDLYHEDEGKFVLSWGNASRYDSFYFNFKQTIDWEYLSSHGYAVTFKAKADTIARFDVRFIDREDDGIPWRINATVSVEADGEWHTLRIPLASMKEQGAWLNATQQWLNPRGQFSW

SEQ ID NO: 98819 - protein, 168 aa, Unknown
  Obtained from environmental sample
  misc_feature (1)..(168): Xaa is any amino acid
MLNTSLDRLSVTYERDKWKLQAGRQRVNWGQTFVWNPNDIFNTHSFFDFDYPERAGCDAFRGTYYHSETASSELAVSANQDGKLTAAFLHRWNRNNADYQLIAGEHAQTDLVIGGALTRDFNGLNFRSELSYFHPIKNLADTSGIVAVSVGSDYIFSNSLMLQAEVLY

SEQ ID NO: 98820 - protein, 216 aa, Unknown
  Obtained from environmental sample
  DOMAIN (9)...(216): Dihydroorotate dehydrogenase
  misc_feature (1)..(216): Xaa is any amino acid
MSENTANTDLSVNIAGVHFRNPVIAASGTFGYGREYSSITDVSVLGGICTKGLTLTPRSGNTGIRIWETSSGLINSIGLENPGIPYFIENDLPYLRQLGPAIIANLSGAEAEEYVDGAALLNESSVDMIELNISCPNVKVGGMAFGLDPGTAAALVAAVKRVCTKKPLMVKLSPNAPSLSAVSLSCIRAGADALSLVNSFKAMAIDTVNRKPVFDN

SEQ ID NO: 98821 - protein, 149 aa, Unknown
  Obtained from environmental sample
  DOMAIN (1)...(149): PET112 family, N terminal region
  misc_feature (1)..(149): Xaa is any amino acid
MYQTFIGLEVHIHLRTQTKVFCSCRSAFGDTPNTNICPVCMGYPGVLPSLNIEAMRMGAMVARALNCRIPEKTWFERKQYFYPDMTKNYQISQFASPLGQQGYVDIEGKIGGTPIRKRVRIRECHLEEDAGKMIHAGAVSLLDYNRAGV

SEQ ID NO: 98822 - protein, 200 aa, Unknown
  Obtained from environmental sample
  misc_feature (1)..(200): Xaa is any amino acid
MLLQRLPEVAEAQYSSHNVVPLIWQGVAVLMFIISIFCVYFLSEHAGAAYAEKYRYNVRESLYNKFSHMTSAQIDEVGSARMIPMIINDSTWLRNYNRRVVTMVIYFPVTILGAFAMLFGLNIWYALIALASVPIAVVFFWLNVRRMGKVLVESIPAYDEYYFSIQEGVKGAREIRILGKADERSEDFAPHVRANRNQAF

SEQ ID NO: 98823 - protein, 213 aa, Unknown
  Obtained from environmental sample
  misc_feature (1)..(213): Xaa is any amino acid
MNYSDLDKTSAYKRLLERASAGKDFNFKEMLTAERVKQCEVPLAEGLVFNWAAKAVDEKTLDALQALADEQELIAKYRALLEGETMNTGEGRKVLHQLLRSPDGKAATGKTVSHDGRDLGEFYHNEFKRFSAFAEKVRSGEIGPAPGKRFSAFAQIGIGGSDLGPRALYLALDNWAAGEGRKALRAEFISHVDPDDASKIAASLPLAETLFVL

SEQ ID NO: 98824 - protein, 298 aa, Unknown
  Obtained from environmental sample
  DOMAIN (125)...(204): Helicase conserved C-terminal domain
  misc_feature (1)..(298): Xaa is any amino acid
IARVMEGKISERQLATWQSRSQHDVFEDKTADDEDYDGSGLEENEKAEDEALGNIVASTLAELMAEREHVNVLAALAKRVLAKGAESKFEKLREVIADARFGGEKILIFTEHRDTLVYLNNRLSALGYAGRLANIHGGMNYLERQEAIEQFRMPTGEHGAQYMICTDAAAEGVNLQFCWIMINYDIPWNPARLEQRMGRIHRYGQKHDPVFLINLVASNTREGKVLETLLKKLERIRGQLSSDKVFDSIGRVFNDVSIKTYMERALAAAKANTFDELTAELDGRITAEQIHAALSKER

SEQ ID NO: 98825 - protein, 122 aa, Unknown
  Obtained from environmental sample
  misc_feature (1)..(122): Xaa is any amino acid
MHSNYDNFEDLHGTARKNPFLGACISVCLASLAGLPVAAGFLAKFRIFASLVNASFESPVIWGIAIVAFVLAVISATYYLRIIYFIWSHGRTEAKKRNKTSVLLNASLGTAVIALLALAVRL

SEQ ID NO: 98826 - protein, 221 aa, Unknown
  Obtained from environmental sample
  misc_feature (1)..(221): Xaa is any amino acid
MMEVNNDTQKDIVLSEGLIRKTGQNSANISINDGVVNVAPLSTVSVPINITVGSDSPLVLRLQTQTKVGTEGVNVVQPPPGPDVPSSSVTYGGITIDNLPSNAPLPEFTPPPVPKRVDDMAVLNLVFSDGTTAKLPAITDSNLFTARQYNLAEVARGKTITSLNIENTNTHREVSIGKVEVLDPTSSGGLKPLNAVSNARDAIIAMEGIEVTRPTNIIDDL

SEQ ID NO: 98827 - protein, 292 aa, Unknown
  Obtained from environmental sample
  misc_feature (1)..(292): Xaa is any amino acid
YQIRDLRDVGNSTDFLIITHAEFLDAALRLAAHKTSVGFGNPKIVLLGDILDQFGGGNTDPAAIRNFLYYVYGNWGGGDLFSYVTLMGSGHYDYKNASSRVANYMPVPYLSGRINEDFYVFFDRGHPNSQDYCYYLMGRLPVESLSEAYVMVDKIREMEDPRLADFESWRSRVLLSADDDQQGARADRTTPTHTASSEDVSRIISGGRPDIGQKKIYLFEYGWDERYQKPAATRALINEINSGVAVINWFGHGSPSQVADEVLLAKEHISSLDNKRRYPLFSMFSCSVGKYD

SEQ ID NO: 98828 - protein, 286 aa, Unknown
  Obtained from environmental sample
  DOMAIN (23)...(250): Respiratory-chain NADH dehydrogenase 51 Kd subunit
  misc_feature (1)..(286): Xaa is any amino acid
TPPSSNNSTGLCVIIDAEEGNFSEEFMPPLDPFTCTKEDALTRIREAGLVGLGGAGFPTHIKLSPPPAKPIDLIIANGAECEPYLTTDEAAIIAKSDMLVKGLEIVMKITGVKKAIIGLEDNKKELIPLIERELRINEIKADISVDLCKTLYPQGGEKMLITALTGREVPSGGLPMDAGCIVQNVGTLISVAEAFLLGKPVIDRDLTVSGGACNTPKNIRVPIGASIKDLPPEFMNIDYSKIAKIIFGGPMMGSAVHTLEVPVQKNTSGVILMTREETIAGEEGPC

SEQ ID NO: 98829 - protein, 129 aa, Unknown
  Obtained from environmental sample
  misc_feature (1)..(129): Xaa is any amino acid
MKTNILGMIKLGLILAVFAAAACVMLAFVYNGTTAIIAQRQQADLDAALKELFPDADKFEKIDNITSQDNTVVVEVSYAAYKSNRIMGAALRVSRASYSGPITSLVGVSSDGLITGVKILEHSDTPGLE

SEQ ID NO: 98830 - protein, 70 aa, Unknown
  Obtained from environmental sample
  misc_feature (1)..(70): Xaa is any amino acid
MVNWIKVERGIRYREHPTWKYGVPRHPDRYYVIRIAVDGVMRQEALGWESEGITLEKARVEGRAALAVLT

SEQ ID NO: 98831 - protein, 81 aa, Unknown
  Obtained from environmental sample
  DOMAIN (4)...(42): Ribbon-helix-helix protein, copG family
  misc_feature (1)..(81): Xaa is any amino acid
MQPVTTVRFDPEIREQLDKMAERMDRPRAWIIKEAVAQYLERETWYLAEVQKGIDDMKAGREISHDEMAARLKTKGFNVAT

SEQ ID NO: 98832 - protein, 282 aa, Unknown
  Obtained from environmental sample
  misc_feature (1)..(282): Xaa is any amino acid
VQEITDRILSLDAGVKFQILAPVVNNRKGAYKELLAKLQKSGYVRVRIDKTIHNIDDDIRIDQNKKHNIEVVIDRLVNSPTVKARLAESIETALSVSAEETVIVDVAGKEELLFSQRLACPVCGISCDEPTPAMFSFNSPLGACEECHGLGFLMEVDPDLVAPDQTKTILDGAIIPWNGAYIDGGWNNHMLHAVCKRYKIPMDKPYKSLSQKQKDILLYGSNGEKVEVLFEGKDGKSRASFNRVFEGVAPNLLRRHKETASEDMRRWIEGFMTQRACPACKG

SEQ ID NO: 98833 - protein, 194 aa, Unknown
  Obtained from environmental sample
  misc_feature (1)..(194): Xaa is any amino acid
TFAGIIIISDEVKPDSRCAISALKDRGVQKTVMLTGDNPSIAQSVASELGIDEVYGGLLPHEKVEILEKLIEKKNPKSKLAFTGDGINDAPVLSIADIGVAMGALGSDAAIEAADVVLMTDEPSKLAQAVDISRFTCKIVTQNIIFSLGVKIVFLVFGAFGIAAMWEAVFADVGVCLLAILNCMRILQIKIKTK

SEQ ID NO: 98834 - protein, 155 aa, Unknown
  Obtained from environmental sample
  misc_feature (1)..(155): Xaa is any amino acid
ATLNGAQENFSLNNFSADILQIWDFFKGGSNCAHKLIRADVLEFLEKAKTGKKQWDIIVLDPPSFSNSKKMTDDFDLQRDLTELLGKCLKLLAPAGKLFLSVNIKRSVPAASELKDSLSQYASNLHITELGEKLIDEDFKGRKTPKAFLLDKLDK

SEQ ID NO: 98835 - protein, 275 aa, Unknown
  Obtained from environmental sample
  misc_feature (1)..(275): Xaa is any amino acid
PGLLASVTRLESIRALDKLDSLNEDAEAALINDVVNNPFTTAYISARILGNHGCVSAIPILRELVSSSDYMLAGEAMIALAKMRDLAFHPQIENIILEMQNPKLKIMGVEALGIYALPDSLNTFIKIIKNTDPPPYLLYEILLAMSAILGTQDQFYRILVRFIADPSLVSALALDEAESAVAYCKSNIGWRKGGKKKPELPILERQAGNLQAAVSAMEQDSKVLSDWIQALPAFAFSDEPSFKTAQTLFSEILVDDGMASQKCLRLLIVHWAASQ

SEQ ID NO: 98836 - protein, 193 aa, Unknown
  Obtained from environmental sample
  DOMAIN (31)...(147): CBS domain pair
  misc_feature (1)..(193): Xaa is any amino acid
VYANGPDNITGILNARDYLVLKDRSRQNVLEHALRPAHFVPLSVRTDKLFRQMKKSHNHFSVVVDEHGSMRGIVTMNDLLEELVGDLEDDSSAPQEKPLMESAGEDKWYINGAVPLDKISRELEISLPVEKYDTFAGFVFSLLGHIPEDGIFTESAAVELEVPELEAPWKLTITILEVREHRLEKALVKKTPV

SEQ ID NO: 98837 - protein, 117 aa, Unknown
  Obtained from environmental sample
  DOMAIN (10)...(115): AMMECR1
  misc_feature (1)..(117): Xaa is any amino acid
MSTNFSLTDREKHALCGLARWGILCGFAGKRPDSPDIPTPPEGVLREQLGSFVTLKRGGHLRGCIGTIIPQEELYKNVARMGYASAFHDQRFPPLLREELDDTEIEISVLGPITPCP

SEQ ID NO: 98838 - protein, 106 aa, Unknown
  Obtained from environmental sample
  DOMAIN (1)...(99): Ribosomal protein S7p/S5e
  misc_feature (1)..(106): Xaa is any amino acid
CGKTSEDAMRSFEKAVENAKPQLEVKARRVGGATYQVPMEVRPERQIALALRWLINYARARGEKGMISKLSAELLDAYNNRGGAVKKKEDTHRMAEANKAFAHYRW

SEQ ID NO: 98839 - protein, 166 aa, Unknown
  Obtained from environmental sample
  DOMAIN (8)...(166): Elongation factor Tu GTP binding domain
  misc_feature (1)..(166): Xaa is any amino acid
VARAVPIDRQRNIGIMAHIDAGKTTTTERILYYTGVSHKMGETHDGGATMDWMEQEQERGITITSAATTCFWKDVRINIIDTPGHVDFTIEVERSLRVLDGAVAVFDAVAGVEPQSETVWRQADRYGVPRICFVNTMDRTGADFFRCLRMIHDRLGAKPVPLQLPI

SEQ ID NO: 98840 - protein, 271 aa, Unknown
  Obtained from environmental sample
  DOMAIN (1)...(59): Bacterial Ig-like domain (group 2)
  misc_feature (1)..(271): Xaa is any amino acid
ATLIATVHPSNAANKNVTWNSDETGVATVNNGVVTALAAGNVNITVTTEDGEYTATCTITVQAATVPVTGVSLNHTTLTMTVGGTANLTATVAPSNATNKNVTWSSNETGVATVTSGGVVIAHAAGSAIITVITEDGGKTTECSVDVNDPSLSTLSGTITISPSSGVTVGTEMTAVYTGSETVTYQWEKDGSGVGTNSNKYTPTDVGSYTVTVSLTGYNNKTSAPVVVSSGTLSGTITISPSSGVTVGTEMTAVYGGSETVTYHWEKDGSS

SEQ ID NO: 98841 - protein, 246 aa, Unknown
  Obtained from environmental sample
  misc_feature (1)..(246): Xaa is any amino acid
EKGRAIAVIGDGALTGGLSYEALSHAGHLELPLIVILNDNNMSISPNVGALSKYLSRLSMKAKYQSFRRSFDAMAKKLPFIGDVFYDVVVRLKRAVKAVFYIDNFFVDLGFEYVGPIDGHNIRLLERVLRDVRQLDRPVVVHTVTSKGKGYAFAEDDPGGYHGVGAFSISGGLPPKSFKNTARLTFTNSFANALLAAAGREERVVALTAAMEQGTGLSLFRKTYSHRFFDVGIAEGHAVTFAARLA

SEQ ID NO: 98842 - protein, 297 aa, Unknown
  Obtained from environmental sample
  DOMAIN (1)...(295): Bacterial extracellular solute-binding proteins, family 5 Middle
  misc_feature (1)..(297): Xaa is any amino acid
IVFSDGSKMTMDDVLFSFERSRDPDGGTYFSDFFNDVESFSVNGWQFTIKLSQPSAVFKYIPAIGAGRIISKAYYQKHANDFGSATGGIVATGPFVYEKWTSGQEIVLKKNTRYWNKDKLAGNIIDTLVFKIIPEDTTRVIALQTGNVDFSANLPQDMLDQLNSDQNLSFTSVNSFSLTYLALNTQRAPMNDVNVRKAISRAMDIPEFQRRIIKDAGSAGTILPFGRALYGDNAAKWQQYLNNTQGYTYDLAAAKQHLARSAYPNGFTCDLIVSENSLANQRALYIQESLKALNINV

SEQ ID NO: 98843 - protein, 205 aa, Unknown
  Obtained from environmental sample
  DOMAIN (1)...(173): Phosphofructokinase
  misc_feature (1)..(205): Xaa is any amino acid
MEKLNLNILFTIGGDGTQRGMLDIAGEVDKRKLKIAIIGIPKTVDNDFALIDRSFGFNTAVQKAVEVVSAAHMEASSAINGIGLVKLMGRDSGFIAAHTALASHEVNFVLIPEVPFNLEGYNGFLYHLEKRILERKHAVIIVAEGAMQDQLIKEKKTDAGGNIKMEDVGVYLKGRISKHFEEKGIEINFKYIDPSYAIPSAPANP

SEQ ID NO: 98844 - protein, 135 aa, Unknown
  Obtained from environmental sample
  DOMAIN (46)...(112): Peptidase S24-like
  misc_feature (1)..(135): Xaa is any amino acid
DEKEKRIPYVWDIAAGPPITQSDDPGETIPVPLRLLRKGEQYYVASVRGDSMTEAGIRDGDMLLIRCADVPKDGAIQVVRYKDKSTLKRLHKTEKGWDMYYEDGSGRVISGDSADYEVQGEFIAVLPVTANLKDK

SEQ ID NO: 98845 - protein, 155 aa, Unknown
  Obtained from environmental sample
  misc_feature (1)..(155): Xaa is any amino acid
QCYGEGSKDVKVTEIDPYEGKIYTKTYKALSTAEIQANCVKYGKLYNWEMANWICPKGWHLPTKYEWGILTEAVDWNSGFSALPGGVGYSDGFFNGVGKFGYWWTSSEYGYDKKAYYAIVIGNNGGISYQDNYMYDLLSVRCLQDTPAPPKGEAK

SEQ ID NO: 98846 - protein, 75 aa, Unknown
  Obtained from environmental sample
  DOMAIN (1)...(75): Transporter associated domain
  misc_feature (1)..(75): Xaa is any amino acid
GSFLADGTLNIDDAAKELGLTGFGEEKEFHTLAGLILYLAGELPQVGDSFNYQGYKFKVIDKDGNRIDKILITKL

SEQ ID NO: 98847 - protein, 282 aa, Unknown
  Obtained from environmental sample
  DOMAIN (93)...(172): Bacterial pre-peptidase C-terminal domain
  misc_feature (1)..(282): Xaa is any amino acid
SGEIIDTPEGAIRFYTRLIRTEDRAVDASFHFDIERNEQIVALLSSGSSQGGRSSSSVASDALEPDSFENPVPYEIGADANAQTVNRTIHSGDEDFFLLVPTNDGSLIMETTGGTDTYMEFYNLETREKLAQNDDGGSSSNARIRYSVQTGKSYIAKVRGYDGSTGSYGFRAYLTIRTSSGSFENPLAYEIGSDENVPVMNRTLDNDDEDFFLLIPADDGQLIMETTGSTDTFMEFYDAETRQKLADDDDGGRGSNARIRYNVQAGKRYIAQVRGYDGDTGS

SEQ ID NO: 98848 - protein, 160 aa, Unknown
  Obtained from environmental sample
  misc_feature (1)..(160): Xaa is any amino acid
EDAPHPRCTAIDAVLADEKGEKILQPSSSIKFKPEERIPDYVFPDTPENKEKEYNRNLLRMLMLSAGISPINKEWFHFQLPNTELYPIITVDDVHNMSKKETQISGLPINYYDISIDYWKNDHKSKKRFWIFDDSYFNSLPIMDFHKLIERLENDKNSMF

SEQ ID NO: 98849 - protein, 291 aa, Unknown
  Obtained from environmental sample
  DOMAIN (94)...(284): ABC-2 type transporter
  misc_feature (1)..(291): Xaa is any amino acid
ERLELCDRLVYIQSGKTLFSGAPDAICGHFGVPSLSQVYEKSGDGSLGADADAQTARTTAALATAAAASAQELPRRDWAAALRHPLRSLRFFSRQSYALTARYVKVYVRDRRNMLLLMAQTPLITLLLGFVYKMSIMQFPISFYFCLTVTGIWVGGLDAVREVASELPLLAREARCGMNRWAYIVARIAVAAALSAAQALLFTASAVAVFRQLEFSWPLLILLFAAIFSGNLLGLAVSACSGGVGRAISTLPIVLIPQIFFSGILVMFEHMAELGRQISRLTISRPVSRAA

SEQ ID NO: 98850 - protein, 141 aa, Unknown
  Obtained from environmental sample
  misc_feature (1)..(141): Xaa is any amino acid
MTTKKDYKTLVLPDKYVPKKTEKYMCVEHKAFFYQMLMAQKREMEREVVEIEEAPRLGQNLAAAGAMDEGDAATLSIEADLNVTMQERDMSALKRIDDALQRLEDGTYGYSIYSGEEIGLKRLMVRPIAVATVEEKSATEK

SEQ ID NO: 98851 - protein, 160 aa, Unknown
  Obtained from environmental sample
  DOMAIN (2)...(160): Maf-like protein
  misc_feature (1)..(160): Xaa is any amino acid
MEPIILASSSARRQDYFKLLGLPFSILPAKIDESLCKHKDPKKLTSELAVKKIENVLEEMRNRLPWWVFGADTVVAMEGKIFGKAQNRDDAASMLKELSGREHQVITSMALYNGKEKKTDCRTVSCTVVFDRMSEAEINWYLNTNEWQGVAGAYRIQGLA

SEQ ID NO: 98852 - protein, 213 aa, Unknown
  Obtained from environmental sample
  misc_feature (1)..(213): Xaa is any amino acid
GKKGIPSYKAPDGISRIDMASTGIEISSFEEDPVIDVNEVEKTITIKGYRQPYVPIAVFKCFVKMALSVIPYNLLSNFCDTKKWLLEDNHEVSCYNIQPIFTITSFVPGVKPFGELLIIVLCRKNDTLEVPFMQMIIYFGNMSFQIIVPCSSKDFYLTNKPLNIIPFPHPTWSSNKSLGNLGIGYIDLSGKQLIKNEPISVIMGYEHSEKTQN

SEQ ID NO: 98853 - protein, 266 aa, Unknown
  Obtained from environmental sample
  DOMAIN (155)...(232): Helicase conserved C-terminal domain
  misc_feature (1)..(266): Xaa is any amino acid
MKAADRRTALERIADGRAGYVVGTHALFQDAVEFAKLQLVVVDEQHRFGVKQREAIKEKGIDPHWLVMSATPIPRSLALALFGDLDQSVLDELPPGRLPVATRLLDPADAERAWDLVERELSQGRQAFVVSPAIDPGEETKISLRDIKAMECLLQARFPDTAIAVAHGRLKPADMNARMAEFVSGQARILLATTVIEVGVDVPNATVMVVDHAERFGLSQLHQLRGRTGRGAHGGHFVMISGSETERLRALVETSDGFRIAQRDLE

SEQ ID NO: 98854 - protein, 186 aa, Unknown
  Obtained from environmental sample
  misc_feature (1)..(186): Xaa is any amino acid
MTNIVIAFKDYNFFFGVWDSSHSPWVGLKWFAQAFKRVDFHDSLRNTLVLNILDLIMGFPAPIILAVLLNELIFKNYKKFTQTVVYLPHFLSWIIIAGIARELFAPAGGVINIILGKMGVGPIGFLMTPGKWIATYIGLGVWKEMGWGTIIYLAAITGINPELYEAAEVDGAGRLRKIWNVTLPSI

SEQ ID NO: 98855 - protein, 281 aa, Unknown
  Obtained from environmental sample
  misc_feature (1)..(281): Xaa is any amino acid
DEWLKSEEFWHYLLARMARARFNRFCLILGFDTAYMSPPYPFFVETPGFPKVSVNGLSEKTKKENLAALRRLGVLCHEYGMKFVFATWQQRPWTTIQDQLVTNLPEDVKGLSDYCYEGIKELLKAVPEIDILQFRVNHESGVGDQVSAEDFWNHCVDAVADTAAEMGRRLTVDLRAKGLTERMIAHAFSRGLTVEVPTKYWCEHAALPYHLSVMRSEELARLDNLNHSRRYSYADMLRKPRYYDVIYRLWNYGSTNLFLWGDADYARRFSLSCGLSGSAGF

SEQ ID NO: 98856 - protein, 251 aa, Unknown
  Obtained from environmental sample
  misc_feature (1)..(251): Xaa is any amino acid
LDEFKTTDVENFEKAWKKTVPFVQENYKSHVFDTEFYYGEFQKSLSTKENGKSFISFQSVKEHFTDKWDGLLFQKKLKWELDIIEKLRKEFCEKLYEQIDRLKKLQELLWPFIGELGRLWDMSKGRWQRVNFDVMEKYAKLLERDESLQELAEMLGRMRQAEREYEEEIFAEMVMKPTWKIERAAKSELVGIHESNDISSILPVEAALLANKTTELLFYKKFAEKKLQTFEFQAKIPSLKNEEIKNKRLKE

SEQ ID NO: 98857 - protein, 213 aa, Unknown
  Obtained from environmental sample
  DOMAIN (11)...(188): Bacterial trigger factor protein (TF) C-terminus
  misc_feature (1)..(213): Xaa is any amino acid
KTKKLKVTLTALKTKKLPELDDDLAQDVDEKYQTLEDLKNSIRDRLNKDLEQRLRDVKITKLLEKIMEKTPVEIPESMMRMELNDRWQNLAMRLNTDANGLYKMIGSKQAELAIEEWRPEAAKALHSRLIVETLIEELKIDVNDEEVEKELERLAKESQVSVEDVKKYYEEGQLMEYVKEDIKKRRFFDILLEKNTVKFGEKKSYIDLFSNNV

SEQ ID NO: 98858 - protein, 162 aa, Unknown
  Obtained from environmental sample
  DOMAIN (13)...(157): Phosphoenolpyruvate-dependent sugar phosphotransferase system, EIIA 2
  misc_feature (1)..(162): Xaa is any amino acid
MSDLNLTEESLAQLVMRGGIYYNTPGSSKEEVISNIIDSLSVMSAQKKETLLQAVIEREALISTGNENGVALPHPRTLMLEDNEEPFAAIAFSEKPLDWGTPDGSHVHTIFLIVSKSPKQHLGVISKINFLCQQEAFFNLILKRAPKNEIIGMIETTEKFWR

SEQ ID NO: 98859 - protein, 149 aa, Unknown
  Obtained from environmental sample
  misc_feature (1)..(149): Xaa is any amino acid
MLPPADRLIDARLDWYIRDSLYWVLHAPRQTGKTTFLQNWAREMNSGDDVVACYITIERCQLMSDPEQCFPNLCAAIKEHAHKSDLPVPDVKDAPAGSMLSQILRNFSEIVAPKPLVLLFDEVDALEGPALIGFLRQLRDGFMGRGVGT

SEQ ID NO: 98860 - protein, 85 aa, Unknown
  Obtained from environmental sample
  DOMAIN (12)...(81): IS66 Orf2 like protein
  misc_feature (1)..(85): Xaa is any amino acid
MAGARNMTFDISKARIFIRPGHTDLRKAVNGLSVMVEQQMAGEPFSGNVYLFCNRGRRLLKAVWWDKNGVLAGAEEAGKGQVSVA

SEQ ID NO: 98861 - protein, 88 aa, Unknown
  Obtained from environmental sample
  DOMAIN (5)...(38): Tetratricopeptide repeat
  misc_feature (1)..(88): Xaa is any amino acid
FPNFDLAFANRGQAYYGKKEYDKATADFNAALKIDPNNVGAYFNRGLTYRERKEYDKAIADIEAALRIDPSYPNAKQTLEDIKKERGR

SEQ ID NO: 98862 - protein, 90 aa, Unknown
  Obtained from environmental sample
  misc_feature (1)..(90): Xaa is any amino acid
MIRVEIIANRSVEENILEALAKEGVAKYYTKIPNVLGTGACGPRMGDAVWPEENFALIVWCEEEEAQGIKRAIVRVKEKFPGEGIKLFGV

SEQ ID NO: 98863 - protein, 141 aa, Unknown
  Obtained from environmental sample
  DOMAIN (28)...(104): Surface presentation of antigens (SPOA) protein
  misc_feature (1)..(141): Xaa is any amino acid
RITIVNYAEKPFGTEEKDMEMDKVNPIVAGALSSAFMRVSVELGATFKTVKEVYAIGEGSILELDKLAGEPLDVIVNGVLIAKGEPVVIDENFGIRIIEITGNHDASAQSAPQQSAPEPSAEARTGRGSPPVPPEPTIKDL

SEQ ID NO: 98864 - protein, 208 aa, Unknown
  Obtained from environmental sample
  misc_feature (1)..(208): Xaa is any amino acid
MNSLESVFKSLKTAQATLALQDRNAKDQALGKAAGAIKAASEEILAGNKADVEKARTGGMKESLVDRLMLNPARIQEIIEGLNQVIRLEDPVGRIKSGWRTPEGLLIEQIAVPLGTVSIIYESRPNVTVDAFSLAYKAGCAILLRGSSAALESNKALVKAIKKGLEEGGIPGAVELADSGSRDEVDEILSARGWIDAVLPRGGKELIR

SEQ ID NO: 98865 - protein, 252 aa, Unknown
  Obtained from environmental sample
  DOMAIN (1)...(196): Caspase domain
  misc_feature (1)..(252): Xaa is any amino acid
MASALRELGFTVDKVLDADRTQMEDAIERLKGNLSKSTNSYGFFFYAGHGVQNNGVNYLIPAKAEIRGANYLGDRAVSVQAMLAELNDAGNGLNIVVLDACRDFPASWMRSMDRGLTVVANQPADSIIVYATSAGSTASDGTGRNGLFTSHLLTQLKTPGITVRDVFDRTGEAVSRASGKKQIPAIYSQYFGTAYLGKPPVAAPAVAVQPATAPSASQKPVFEGFEYTVADGKVTITKYREDAATVVIPDNI

SEQ ID NO: 98866 - protein, 263 aa, Unknown
  Obtained from environmental sample
  misc_feature (1)..(263): Xaa is any amino acid
MLKRTISSTILKTSSAWPVLFLTGPRQVGKSSVFQMIKEKGRKYVSLDDMSARDLAQSDPQAFLQKYSPPVVIDEVQYAPGLFPYIKIWVDEHRFENKTGGGKPVSPAGAFWLTGSQKFALMKGVKESLAGRIAIIDLLGFSYREISGTPEKSKPFWPDKIQAGKGPKKRTVPDVYRDIWNGSFPELITNPSVGRDRFFSSYMQTYIERDVKDYQGITNELKFYKFVRAVAVRTGNLINYDDLARDCDIDRRTAQKWINTLQA

SEQ ID NO: 98867 - protein, 64 aa, Unknown
  Obtained from environmental sample
  DOMAIN (1)...(57): 6-O-methylguanine DNA methyltransferase, DNA binding domain
  misc_feature (1)..(64): Xaa is any amino acid
INAPKSARAVGAACGKNKVWIIVPCHRVIGANGSLTGYAGGLECKKWLLDHEDKVLKKNHSIRL

SEQ ID NO: 98868 - protein, 156 aa, Unknown
  Obtained from environmental sample
  misc_feature (1)..(156): Xaa is any amino acid
ANTSVISFLLAVSAAAGFIASPLIGKLIDKVGYKAIMVGDTLFLIVVCLLYGFSHRIFPMHIAFYVVCVNYIIDAIISVASMASNVYVQSIAANQEEITATISTGISVNHVISVLIALLGGLIWKIAGIELLFSLSAFLGLLNSLYAASIKTGSRE

SEQ ID NO: 98869 - protein, 273 aa, Unknown
  Obtained from environmental sample
  misc_feature (1)..(273): Xaa is any amino acid
ETDGNGSLLAGLLPLTVQARLFRWNSILTGVTFSLVSAPSGISVNPTSGVITVAANAALGGTNKITVGASYQGAAYTAALSIDKSINNSAPRYLGTVEALTTASPTVIIIKGPAVGVAQARQGDYVLAVAAVSGRVAGSVFQWSGTAWEYRAPQNYANLYISCFKDGLEVPALTQDIGWFGGVLAALIVAQKGFIEELETQIIKLNAGGAIYGGNKYLPNGNVNPLAPAGAKGFWLGANGEAKLEEATVSGTINAKSESIPRAREAEEGYFKG

SEQ ID NO: 98870 - protein, 268 aa, Unknown
  Obtained from environmental sample
  DOMAIN (4)...(240): Glucose inhibited division protein A
  misc_feature (1)..(268): Xaa is any amino acid
MEGKIFIGEYDAPEGRLGEKAALGLGSFLRRQNFPMGRLKTGTPARVDGNTVDYSNMERQDGEEFAPFSFSFEKITDRKSVPCWICYTTSETHRIIRENIHRSPLYGGKIKGIGPRYCPSIEDKVMRFPDRDRHHIFVEPEGLYTNEIYLNGLSSSLPEDVQEQFIHSIPGLEKVFIVRPAYAVEYDYIDPLDLYPSLESKRLEGFFSAGQTNGSSGYEEAAAQGLMAGINAAAKIRGEEPLVLGRDEAYIGVLIDDLTTLGTTEPYR

SEQ ID NO: 98871 - protein, 261 aa, Unknown
  Obtained from environmental sample
  misc_feature (1)..(261): Xaa is any amino acid
MLLSGFRYIENRAAAVVTEHKTDNGWKTGGTISGLGKARYFRDGVIGIRSALHNNCIVYEKFDGEREVLFTGNEKLMFSGPQALDNERIVFIALREGKRELWLFNYVSRELFIIENTQDDNEYWAYMRDLNVSEGKIFFGYNSDDRMYKLGMIDLDAMQAVFSGRDFSGGVLSPVSTDGNVYYLATFVTRNSLMRFPETTDSLSGNKIDLRLTKLDNQTYKTIPESPYTGASKPYVGLRYTNPFQLWLPLPLIRVSEDVLL

SEQ ID NO: 98872 - protein, 258 aa, Unknown
  Obtained from environmental sample
  misc_feature (1)..(258): Xaa is any amino acid
GAFPTGDDISWKEKDFEDSKWEEIKTNLPWERQGYDGYDGYAWYRIRFFLPSSLLENSAWKAQINFNLAKIDDADEVYLNGVLIGKTGSFPGSAEGFVARWNTPRLYTAPADSKYLIWNAENVLAIRVYDGDGDGGIFDGTPFAYIPDLIDNLNINFGKDNRTIELVNTANVEQNGNLKIVQISNKTEISEELTIFSGKVKVQPQQTYSSHLDYKQENGTRTQIVATYTDETTKKIKQKKLVLSYILTPPASAKPQIN

SEQ ID NO: 98873 - protein, 260 aa, Unknown
  Obtained from environmental sample
  misc_feature (1)..(260): Xaa is any amino acid
TTVNIPAKIQNCPVTEIGNGAFESVKNSIASVTIPNGVTSIRSNAFQECGKLTSVTIPNSVTSIGNMAFRRTGLTSVRIPNGVIGNNTFENCKSLTSVTIENGVTGIGDAAFNGCEKLTSITIGNGVKSIGKMAFFECTSLTSVTFSGSIPSSGFNADAFNGLGDIRDKYLAAGGGAGTYTRPNGTSTAWTKGGSATATPAAGSPDLKFDLTSDKKGYSVSKGPSFPASFGRDLVIPNTYNNLPVTKIDSMAFQRFYISG

SEQ ID NO: 98874 - protein, 201 aa, Unknown
  Obtained from environmental sample
  DOMAIN (1)...(92): ABC transporter
  misc_feature (1)..(201): Xaa is any amino acid
YHGNRWRYGCFQRLIKNLSKGYKQRVGLAQAMIGDPQALIMDEPTAGLDPKQILEIRDLIRELGKDHTIILSSHILPEVSAVCKRVLIINEGRIVADDTPENLAKRILGGSHILLRMDASETQISEALAKVPSIKKLEFRESQEAGTVEALAEAAEDTDIRRDLCRALAAADIPILMMRSQDMSLEEIFLNLTTKEDGEAK

SEQ ID NO: 98875 - protein, 78 aa, Unknown
  Obtained from environmental sample
  misc_feature (1)..(78): Xaa is any amino acid
MFAIFKREFRAYFQTPIGFLYMGLFLLLTGVFFFFDNLISGRSEYTGFLGSILLIYLFAIPLLTMRLFSEEKRQKTDQ

SEQ ID NO: 98876 - protein, 302 aa, Unknown
  Obtained from environmental sample
  misc_feature (1)..(302): Xaa is any amino acid
MDVAMSDAVVARTGTPAAGFDYLVKVTGGSIYTSGANLTSMAVNTAAGSPATTSLGIGLFAAKNQGGIATGIGGDVYVDGGSVHGKSGAIEAVNVTVNVHNFGGALGAGVADGDRKSTDIKSTDGVTIKASGPILIDNPAANITNTNGVFGNAAVQSTDDNITVTTVGTILGTTQATALLTTSVKADKGLITVNGGTIKSGTGPAIVASNVVQVDKTTNVVVLVTSGSAGVTAANPWNSTIYVDAARVASNTIASPVSNVGSSGVTATALNTFAVRIGSATVEATAANGYASAIRTINKGDV

SEQ ID NO: 98877 - protein, 112 aa, Unknown
  Obtained from environmental sample
  DOMAIN (13)...(112): Response regulator receiver domain
  misc_feature (1)..(112): Xaa is any amino acid
MVVRDGNDNNNKKKILLIDDNEVQLSMTAIQLKKEYEVTSAKSGKEALDYLFHGLVPDLIILDILMPEMDGWEIFGRLRAVSALKEVPIVFMSSINEKDEIDHAIDIGVADF

SEQ ID NO: 98878 - protein, 293 aa, Unknown
  Obtained from environmental sample
  misc_feature (1)..(293): Xaa is any amino acid
AVLVRDGIVWKGVLNAAPANPQINWAYYNTSTNKSYIWDGSSWQIMAESGNTNITVPITWKGSLTAAPFSPEIGWMYYNSVLGKSYIWDGTSWNIVSQDGQDGKDGQSGQGGTSPEGFLITWKGTLASAPLSPQKGWAYYNTAQKKSFIWDGSVWQILAQDGADGQGGNSPEGFLITWKGGLAESPSSPQKGWAYYNTSEKKSFIWDGSVWQILAQDGADGEGGGGGGTVTQGPWLYVLFYTKEGNYTQLIQTVLTNANFGKVGIGSSSRTTTFYITLNGGASNTTLNLTGPI

SEQ ID NO: 98879 - protein, 157 aa, Unknown
  Obtained from environmental sample
  DOMAIN (8)...(141): 3' exoribonuclease family, domain 1
  misc_feature (1)..(157): Xaa is any amino acid
MKVETKFGDAVVSIETGKVARQAGGSVIVRLGETMILATAVASNDKREGLDFVPLTVDYLERFYAVGRIPGNFFRREIGRPSEKETLTSRFIDRPCRPLFNKNWTYETQVIVQAISVDDKYDPDLPAMLGASAALTISDIPFAGPIAGARVVRVDGN

SEQ ID NO: 98880 - protein, 89 aa, Unknown
  Obtained from environmental sample
  DOMAIN (6)...(88): Ribosomal protein S15
  misc_feature (1)..(89): Xaa is any amino acid
MSITTEKTRELIENYRTHDSDTGSPEVQVALLTERIANLTEHFKTHHKDHTSRRGLLKLVGQRRRLLSYLKNQDINRYRDLIGRLGLRK

SEQ ID NO: 98881 - protein, 281 aa, Unknown
  Obtained from environmental sample
  DOMAIN (172)...(281): Response regulator receiver domain
  misc_feature (1)..(281): Xaa is any amino acid
KPIKFNLNIPDDLPNKLFGDDLRVKQILTNLLNNSAKYTHRGSIELKVNCTREDKTVWMEIFVIDTGIGIREVDVEKLFLDYFQVDTKANRNIEGTGLGLPITKRLVEMMDGEIDAKSEYGKGTTFRLRIKQGFVDDTHLGANVAEKLRNFRYIDDKRTAAKRLVRLNLKYAKVLVVDDMQTNLDVAAGLLRKYKMQVDCSSSGRDAVERIRKGNPVYNAIFMDHMMPGMDGIEAADKIRELDTDYAKKIPIIALTANAIHGTEDMFYAHGFQAFISKPID

SEQ ID NO: 98882 - protein, 291 aa, Unknown
  Obtained from environmental sample
  misc_feature (1)..(291): Xaa is any amino acid
GRRVPAKPPVVAAIIERLNEVYNKKNPIRGKILVTGFQHDAVENIISRLSVNSLPAVKFGNRPGESEESENITGEKLRLWAENIIEKMEDPKKNPQIKPAADQLKLQVLLRNYGINPAKSVAESILELILSLPRDIITADIVEKAESLRRSLQSETVFIGENENKTAAIRALRSTKKTFEDDGSRNAMRLLALPRDSLSARETGILQAAAGWKDGDPMPFLKDIAELQDSLLANYNVPAVFSIEKPRQEILDLIAKVNAAFFRKKGGDKKDEILAGFINELNTNPEGIREA

SEQ ID NO: 98883 - protein, 283 aa, Unknown
  Obtained from environmental sample
  DOMAIN (16)...(281): AMP-binding enzyme
  misc_feature (1)..(283): Xaa is any amino acid
TALLWTDDTELVKSFTFAEIKRLSDKAANALLSLGVKKGDVVKLILKQRPGVWVLMCALSKIGAICIPGTYQLTAKDLDYRCNIANVKLLITVDDKDLLDNIALARPNCPNLEKIAVIGNTIPQGFIDMRAEIQKAPENFKRMPTVAKDPMLIYFSSGTAGMPKMVLHNHSLPLGHIVTAKYWHCVEDNRVHLTQTDSGWAKFAWGKIYGQWICGAAIGVYDTEKFTPKGMLDAIQRLKPTTFCAPATVFRYLIKEDLSHYDFSFIRHTSVAGEPLSPEVYNK

SEQ ID NO: 98884 - protein, 99 aa, Unknown
  Obtained from environmental sample
  misc_feature (1)..(99): Xaa is any amino acid
MAITQNKSIAQTSIYRSAVEAILKSEQEALIAIRNNAPDSAFIRLNLVESMLNLASNYIIIDGVVQSVLKVKNEDSLNEARKALYKSIIYLEEIVSNFM

SEQ ID NO: 98885 - protein, 183 aa, Unknown
  Obtained from environmental sample
  DOMAIN (8)...(183): ATP-NAD kinase
  misc_feature (1)..(183): Xaa is any amino acid
VRGDMAQKVILVVNLHKEHAQAAAAEIRGELENRGAVVTVFAFEGRPETAPSGTWDIALSLGGDGTVLYAARILAPAGTPILPIHLGTLGFLAGVERHEWLAVYEQWQNQTARISPRCMLGFSVNRGGQSVYRNTCLNDTVISSSGKAKLIRLRVKTEIAAGEYADLGCYRSDGLVIATPTGS

SEQ ID NO: 98886 - protein, 280 aa, Unknown
  Obtained from environmental sample
  DOMAIN (230)...(280): Elongation factor G C-terminus
  misc_feature (1)..(280): Xaa is any amino acid
DAGPGDIVALFGIECASGDTFTENGLNYAMTTMYVPEPVISLAIKPVDKQSSDNMSKALNRFTKEDPTFKTFVDPESNETIIRGMGELHLDVYIERMRREYKVAIETGMPQVAYRETVTAAARFDYTHKKQTGGAGQYGRVAGILEPNHEQDYEFVDNIKGGVIPIEYIPSCDKGFRACLAKGKIIGFPIVGVKLTIDDGQFHPVDSSDIAFQQAAIGGFWQAFEKAKPEILEPIMKVAVETPTEFQGSVLGSVNQRRGIIISTTEENNFSSVEAEIPLS

SEQ ID NO: 98887 - protein, 274 aa, Unknown
  Obtained from environmental sample
  DOMAIN (12)...(274): Domain of unknown function DUF140
  misc_feature (1)..(274): Xaa is any amino acid
MLSGNDGPLLAPLRFLAAVGRAARMWAGKGRAFILGTRNYAGLATQTSVRVPLIVKNFDITTNHMYTLGIESIPLVTMIAIFLGSATVTQAVYQMSGMIPFRYLGALVCKTTVTELAPVITSMVFAGRVATGIAAEIASMKGSEQIDAMNVLRLDPLRYLIVPKFVACVVMLPVLTIWAILMAFSGAAFTVAVSVDVTMYTYLSGMKLFFKAYDVYVGVGKTAVFGAIVAITGAYFGFQAKGGAEGVGNATTKAVVVSAVLILIFDFIIAVMVM

SEQ ID NO: 98888 - protein, 83 aa, Unknown
  Obtained from environmental sample
  DOMAIN (7)...(83): NAD binding domain of 6-phosphogluconate dehydrogenase
  misc_feature (1)..(83): Xaa is any amino acid
MRESVDKCDIGVIGLAVMGRNLILNINDNGFSVAVYNKTVSDVDEFLNNAAADRKTVVGAYSLEQLCGRLKSPKKILLMIKRG

SEQ ID NO: 98889 - protein, 131 aa, Unknown
  Obtained from environmental sample
  misc_feature (1)..(131): Xaa is any amino acid
MTDAAARLQAIQPGTPVTHAEYGQGVAMDAELNGYVRVFFASGQRSVSVASLRFGQSRADLVLGAVAGGRERAQKAWLSLEAHALPLMDSAAALTSAKIDLLPHQVVLTHRIASVSPRRFLIADEGAWQDH

SEQ ID NO: 98890 - protein, 138 aa, Unknown
  Obtained from environmental sample
  misc_feature (1)..(138): Xaa is any amino acid
MKKICLILAALVCAVAAQAEPAPKPCDRQLFSVSANAEINVKPDRVHMTLGVDERSKDLQAAKARMNEILKKAIAFCKSKGIQDKHIQTAYISIHPNYHYDDDKMRSLLRFYALTQAFTVTLEKPELYETLCTAADWA

SEQ ID NO: 98891 - protein, 71 aa, Unknown
  Obtained from environmental sample
  misc_feature (1)..(71): Xaa is any amino acid
MEKIKAAIVGLGRIASLLEEDALREKPCTHAGAVASNGDCVLSAGCDIDEERRASFAEKWQVPVFADAAQM

SEQ ID NO: 98892 - protein, 254 aa, Unknown
  Obtained from environmental sample
  DOMAIN (40)...(211): Calcineurin-like phosphoesterase
  misc_feature (1)..(254): Xaa is any amino acid
MRKSGIIKIIFILFFITSCATISTKTYQVETPLLEERNNIKIVLISDLHSTIYGKDQCLLINKVKDINPDLIVLSGDIFDDIVPMIGTQLFLSGISGIAPVFYVTGNHEYMGRNIRKIREVLSSFGVIILADDYKTIEINNIKIVIAGIEDPYKKKYEAPRYNQKDNMERAFRELDEIKLYKILIAHRPELIENYKKYSFDLILSGHTHGGQVIIPNIINGLYAPNQGFFPKYAGGVYTHGNITHIISRGLSIS

SEQ ID NO: 98893 - protein, 245 aa, Unknown
  Obtained from environmental sample
  DOMAIN (23)...(244): Capsule polysaccharide biosynthesis protein
  misc_feature (1)..(245): Xaa is any amino acid
MPNKTRNLLELLSEDVEPLFIADAFLRSVISASDAEELESSIYKAGLGVIFDDLTCYYDATRPSRMELVLNSDFELTDEEKRRAQDVMQYIIRNKISKYNSQPDYVMNLGREKAPKALVIDQSYADQSIVKGMADENTFKIMLDCAIKENPDADIIIKTHPDAFGKKSLRPKCYYENVENKGNIYRMTKPINPIALIEQSDKVYVCSSQFGFEALMLDREVHTFGMPFYAGWGLTADAQKSPRRA

SEQ ID NO: 98894 - protein, 117 aa, Unknown
  Obtained from environmental sample
  misc_feature (1)..(117): Xaa is any amino acid
MKYNMLILIALLAGHCFGQQEQKSWKDLNYADDDKVYHRLDIHLPQIEKPVYPVVIYIYGSAWFSNNGKGADMNTIGKALLEAGFAVVTPNHRSSMDAKFPAAMNDIKAAIRFVRAN

SEQ ID NO: 98895 - protein, 291 aa, Unknown
  Obtained from environmental sample
  misc_feature (1)..(291): Xaa is any amino acid
CQRDREFRQQFAMINTIILQRIFAQVAKKFTPLHNGKEYEPALCGKEKYNPATHFCTKSENNPAVFEKCGGKGYDTRTKVCVNGEVQNVLPTFKDARDGKEYKYTTIGTQTWMAENLNYAAVGSKCFDNKEENCDKYGRLYDYGAALPGCGSTACYTLEVGPEPQGVCPDGWHLPSVDDWLLLRDFAGAGDSKVAEEKLRANDYGGTDNYRFSILQSNGNNQPRFWSSTNSQDMAVNMEIYLGRGVQLTYSPKNYALSVRCLKSTLPKCGNKGYNPETHFCTKSESNPEIV

SEQ ID NO: 98896 - protein, 225 aa, Unknown
  Obtained from environmental sample
  DOMAIN (3)...(222): Domain of unknown function DUF140
  misc_feature (1)..(225): Xaa is any amino acid
VVPVGFIEKSGEAVYALYYELRQITYLLSESVYWSTLGRFDKMRLPFKGALSLQMIRLGSTATTIVFLLTFLVGVTLSFQSAVQLETLGAGVYLVRGVAVTMFMEIGPLITAIILAGRSGSSITAEIASMVVQEEVKALRVMGIHPVQYLVLPRFQAMSIATPMLTMLADIAGCFAGYLIATLYIGLPTSLFFSELREALSIIILIKSLFKGFDFRMANILDSRS

SEQ ID NO: 98897 - protein, 117 aa, Unknown
  Obtained from environmental sample
  misc_feature (1)..(117): Xaa is any amino acid
MNTKEEISGFIPAKEFFVGIDSDGTAFDSMNIKHIKSMFPAAVEVWNINEGRDQFEKNWYRFNLYSINRGTNRFSGLLYALEEQQKSGGKAIAPDLSPLRDFVEKKRALSNAALRSW

SEQ ID NO: 98898 - protein, 211 aa, Unknown
  Obtained from environmental sample
  misc_feature (1)..(211): Xaa is any amino acid
MAEGLLRLKEYGIRAAIFDIEYIDRGPQGVDSVYLNQGLSNDFNRGFSEISSNAQDIFSALKAGRIGRNDIDHYANSFTGLVNGTQKDLFTKAQGIARDNDHFLAQSLSLLGVGWSTLNLRETPLDGEQAQRRPIAERFSYPVEASANAHLGGGFIDILPSLPIFAQAAKGAGFTNVEVDDDGIRRRIYLAQKIDDYWYLQLSFAPLVDYL

SEQ ID NO: 98899 - protein, 204 aa, Unknown
  Obtained from environmental sample
  DOMAIN (2)...(191): 3-dehydroquinate synthase
  misc_feature (1)..(204): Xaa is any amino acid
LNRQSNCKPLNILFIADENTVKIAESIRGKENIPVCILKSGEENKNWQAVETILSAAKSAELGRDAVFIGVGGGVIGDLTGFAASVYMRGCRLVLAPTTLLAMVDASIGGKTGFDLFGVKNLAGSFYPAEIVYMPVNSLSTLPDRELKSGLAELIKTAVLSGDDFLAMLAETKKEKLLNDGELLTFIEKSVFYRGTRNSEDFRE

SEQ ID NO: 98900 - protein, 301 aa, Unknown
  Obtained from environmental sample
  misc_feature (1)..(301): Xaa is any amino acid
IDTILQFKKGTRIQLLAPVIRGKKGEHQKIIEDARKAGFARARIDGVPVNLDESIKLDKQKKHSIEIIVDRIVIEQDIRSRLAESAETALQTADGLLLVLASDEDKSSEHFFSQKNSCPDCGVSIPELQPRLFSFNNPFGACPSCTGLGAKLEFDPDLVIPDHSLSFNEGGIVPYNPDSAWHRSRFESLAKHYKFSLDTPLKSLPKKVQDAILYGSNDEIKVRYENREGTGRFEYQSKFPGVLEDLKRRYLETQSPGIKEWLEKFMSQKPCEDCGGKRLKPEVLGVTIAGKNIWEISRLSV

SEQ ID NO: 98901 - protein, 136 aa, Unknown
  Obtained from environmental sample
  misc_feature (1)..(136): Xaa is any amino acid
GQENGRSCQKTRCEKTRSKETRCEKARSKETRRGEKARGEETRSGEKACGKETRSGEKACGKETRSGEKARGKETRSGEKACGKKTRSGEKACGKETRSGEKACGEKARRSGSASAVLRFPVYLKLVFVLCRKPGN

SEQ ID NO: 98902 - protein, 146 aa, Unknown
  Obtained from environmental sample
  misc_feature (1)..(146): Xaa is any amino acid
MRSCFLPVFYFFPIVLLLCLFSTEAGAEDFAYRHQKGDKYRILSTVHEEVYINDQLSHRAEILNRITGEVIDEADGKWKQRAVFQTSERAGIAADRSYQWSKEYESEFERDRLGRITIDKKYFMPVVRNVPVFPGKDIPVGETWSH

SEQ ID NO: 98903 - protein, 286 aa, Unknown
  Obtained from environmental sample
  misc_feature (1)..(286): Xaa is any amino acid
MILRREASDARVLVVNHHLLFADLAARRDGAGYTASVVLPPYTRVIIDEAHTTEEAATSFFSSEFSRLGIYRSLGRLYRKRRSPQSTLLMRLKSLLSYKVDDAYEDRVADGLEKIRSAADSLDEAALELCSSEGVFRLTPQRDEVIRARLSPEFSSLRKSINSLASFIRELLEHIPKENEDDPVVWEIRSTLRRLDSVSSVCTSFLEYMENTDDVMWIERRGAEAGSLSNGRKRVSEGPWAVFNVTPLDVAPHLKEALFEPNKTVICVSATLTTGRSGGSSFDYWK

SEQ ID NO: 98904 - protein, 307 aa, Unknown
  Obtained from environmental sample
  misc_feature (1)..(307): Xaa is any amino acid
GCDPNESADDWTVTGETRTPGAAIYVAGGVDEQQDIIVYNVSSINAGKTASALRTAFGDITVYGGIIKAASGTAIAAGGNVYLNSDEEQVFEGTTRVPEAYEGLITSVEKIASIAVGEGGAPVVVGSPLTTITVSTNGTAAYGAIVAKNGSKNGGLATVFVGKASVLSTGAAVAIRDSLGVVTIDHRNAEVASAGGSAVATKNADVNLRRGTVTSQATTPAWSATQIGPAAIFVDNGEVNVGIIENAVPADSSIINTTAAAVCIFARGARGNYKVNVGERARMVVSGKVVGAGAITTMDDIEIVMNG

SEQ ID NO: 98905 - protein, 264 aa, Unknown
  Obtained from environmental sample
  misc_feature (1)..(264): Xaa is any amino acid
VETIRLTGGWQLFPQLYGDMEAALRREIAVEWSNAMTLIRLGRLYPKNLIRNLAYFGRAETDSPDWFSAGILALGAGPSLDPFLGELSGLFGGKIPGPGERRFRIICVGACLPALADWGILPDLAVVLESQHWNLRCFIGLQGQKVDAAIDLSALPASTRALKGRRYFFATPWAELAFLSRLKESCLLPETFPPMGSVGLNTVALALKIGSGPVITAGIDFSFSIDTCHARSTPGRTDLENRQTRFRSLIDTRAALKDGTYAAV

SEQ ID NO: 98906 - protein, 87 aa, Unknown
  Obtained from environmental sample
  DOMAIN (2)...(71): Phd_YefM
  misc_feature (1)..(87): Xaa is any amino acid
MIEAKKSMDFLNNLSEILEYCRNYREPIIVSNNGEGKFAVMTEETYEELIGKSKNELYNSLQMGLDQINNGDFITGKEFFEFLDKLE

SEQ ID NO: 98907 - protein, 279 aa, Unknown
  Obtained from environmental sample
  DOMAIN (114)...(147): Tetratricopeptide repeat
  misc_feature (1)..(279): Xaa is any amino acid
AIAINSELEDAYFYRGLAYYAKQDYDRAIADYNQAIQLNPDNPDNTVVYNDRGLAYYAKQEYDRAIADYNQAIQINPNNAEAFNNRGVAYRSKQEYDRAIADYNQAIQINPNYADAYYNRGNAYYAKQDNDRAIADYNQAINFNSNNADVYYNRGAAYGNKKDFDRAIADYNQAIQLNPNNADAYINRGIAYKSKQDYDRAIADYNQAIQLKPNDAVVYNNRGNAYRNKQDYDRAIADYNQAIKLDPKYATAYVNRGTTYEDYKNDLNRAIADYEAVLK

SEQ ID NO: 98908 - protein, 282 aa, Unknown
  Obtained from environmental sample
  misc_feature (1)..(282): Xaa is any amino acid
MNASLSDNDAPVIPCLYLASIGINWEIYLNGTPIKKEMHKANGRITEQHYERNVIVPINNNLLQKGDNVLVFRIVGDPTDYTTGFTYKSPYYIADYDFITRRHNETAQIILISILAILGIYHFLFFAIFRERRYSLACGFFTIEMSLYYLFRTHWIHQIIPNTAVVVKLEYFTVYFIILALMVYTDNLCNGRYSNGRYSIITKIYGVFCSILAVTNLFFSRTYGSEAAAVWQIVSIFVLMWIYIHNIVFPFTREIEKGKNFTDTLVNTYPGNLLFAVTVVIL

SEQ ID NO: 98909 - protein, 295 aa, Unknown
  Obtained from environmental sample
  DOMAIN (1)...(295): Alpha amylase, catalytic domain
  misc_feature (1)..(295): Xaa is any amino acid
EREWNGEKTRGKLGGAIRGITENVDYLSDLGVNCVYINPFFAAGEYHKYDLIDYYNVDPCFGTNAEFMEMVNTLHRNRIRIIIDGVFNHCGWRFFAFDDVVRNGRASRYADWFYRLEYPVVRPDSGEDIPGYECFAYERLMPKLDTANHEVVKYFTGVCQHWLREYGVDGWRLDVADEVNNSFWRAFQIAALEAKPDAFLIGEIWVKANYWLDGSMFHSAMNYDFRKHCRDFFAKGIINAEAFIARVTLMLTRYRTNLTNVQLNILDSHDVSRFLSLCGGDKRRLKLAVLFQMCF

SEQ ID NO: 98910 - protein, 289 aa, Unknown
  Obtained from environmental sample
  DOMAIN (62)...(222): AIR synthase related protein, C-terminal domain
  misc_feature (1)..(289): Xaa is any amino acid
MIDGPLGAAAFNNEFGRPDICGYFRTFEQEINGEIRGYHKPIMLAGGIGNIKHSHIQKGSLKAEDLLIVLGGPAMLIGLGGGAASSMATGSGGEDLDFASVQRGNPEMQRRCQEVIDRCWALEEKNPIAFIHDVGAGGLSNALPELVKDAGFGGKFRLRDIQSEEKGMSPLEIWCNEAQERYVLAISAESLPVFRELCKRERCPFAVVGEAIAEQNLLLSDTHFKNNPIDIPISLLLGNPPKMRRRDETNSEKKEANAGLQQNSKTGVSSFCERLSEVNSEKKEANGGY

SEQ ID NO: 98911 - protein, 291 aa, Unknown
  Obtained from environmental sample
  DOMAIN (1)...(59): His Kinase A (phosphoacceptor) domain
  misc_feature (1)..(291): Xaa is any amino acid
MSHDLRTPLNAIVSLSQLSRTIHEKPEVFKEHQKKIYESGMTILGVVNDLLDISNIEAGKFGVISAEYNLPDFIMATAISNIRHIGGSKDLALAIIPDDKLPAKLIGDSLRIRQIFNNLLRHAISHSKKGTIEWKIWTEKGEGDEVWVVSSVLDPGQEISPDEVDKLFLDYSSLDTQKKRSSEGTGLGLSLTKKIIDLMKSSIAVQNSFGKGTLFTVRLLHKYVNDDVISAEALGKLKSFKSSTGRKQDELSDMQRVQFQDTRVLVVDDVEINLEVAKGLLEPYGIKVDCV

SEQ ID NO: 98912 - protein, 259 aa, Unknown
  Obtained from environmental sample
  DOMAIN (79)...(235): Semialdehyde dehydrogenase, dimerisation domain
  misc_feature (1)..(259): Xaa is any amino acid
LLPVIDRGIKVVDLSADFRLRDAKVYKEWYCDEKHPEHVAPRLLERAVFGLCEHYREKIAQAEIIANPGCYVTSVLLPLLPLYKAGAQIDWVIADSKSGVSGAGRGLKQNTHFPEANENFSAYSIGHKHRHTPEIEQELSIAAGKPVTITFSPHLLPVNRGILSTIYLKTDISATECNDIVKKFYSGADFVRIREPSDLPQIASVVHTNYCDIAFTGGGNGQPVIAVSALDNLVKGASGQALQNMNIMFGLKETMGLLR

SEQ ID NO: 98913 - protein, 275 aa, Unknown
  Obtained from environmental sample
  DOMAIN (147)...(275): Bacterial sugar transferase
  misc_feature (1)..(275): Xaa is any amino acid
MHSLYQNLYKKGIANQSIAVIGATESGINIVNEINNFPQLGYKFVGFIDNDSENKNFHGYEILGKVKDIPNIIKEKKIGGLVISHITNSANEIIEIMRYCDDENLTIYMIPSLMDIISGNLKTQQICGIPLVVLLQEHLPRWQSQIKRFLDIFTALFFLVPFMPVWIIVAILIKLTDKGPAIYAQERIGKNGKPFIIYKFRSMYVDAEKRSGPQWATKNDPRITPLGRFLRKSRIDEIPQLWNVLIGEMSIVGPRPERQYFIDKLSQEIPWYIKR

SEQ ID NO: 98914 - protein, 83 aa, Unknown
  Obtained from environmental sample
  misc_feature (1)..(83): Xaa is any amino acid
MSSSVEWKEIKYTEVFEEELRGLERRRESDPHCTVGDIEGLLQHLYIMDGADWYGRGDVQDITMAATIAAYELFIAQWKASAR

SEQ ID NO: 98915 - protein, 168 aa, Unknown
  Obtained from environmental sample
  misc_feature (1)..(168): Xaa is any amino acid
GKITNFAKDAPTAPLGTAFLVQNIATAPLGTAFLVQNIATAPLGTAFLTQNIASAPLGTAFLVQKAPSAPLGTAFLVQNIATAPLGTAFLVQNIATAPLGTAFLVQNIATAPLGTAFLVQNIATAPLGTAFLAQNIAAARAAKYKNEKICSCYIKKNNKRNANFVCDM

SEQ ID NO: 98916 - protein, 225 aa, Unknown
  Obtained from environmental sample
  misc_feature (1)..(225): Xaa is any amino acid
MERSSQIGIIEDVMTSIKLLPGVGYTGMFNALPSIRGGDPGDLMAALDGFYIENPYHWGGSFSIFDPHMVASAQLSHGIFSSRYGHTISGLLEVSSRKAATDYAELELGISTSAVNLNAAFPIGRRGGLMLMGKVTYWDPFVWSLQQLSKVWDDETLQMMNAVTTAPYIRSSAASFFYRFNADLEMNLNAFVGTDGVGADYLNESPNTFSTTALVESRSHMVFDW

SEQ ID NO: 98917 - protein, 73 aa, Unknown
  Obtained from environmental sample
  DOMAIN (1)...(73): Transcriptional regulator
  misc_feature (1)..(73): Xaa is any amino acid
MTISSRGRYALRMMIDIAEHCGVGFVPIKDVSKRQAISVKYLEQIVSQLTKAGLLRSGRGSQGGYTLVKTPKE

SEQ ID NO: 98918 - protein, 161 aa, Unknown
  Obtained from environmental sample
  misc_feature (1)..(161): Xaa is any amino acid
MKIEVYSPTIRRKEMDAVLTAMVEDKIGVGDRNRLLIQTAKEQVKFDYAIALRSPAVALHLALKAALKTQNVQAGQAVVISALSPRYYYQVIEDLQLTPLYCDVSYDFPCMSRETIENAVSQKPSGVEICAVVLHHTLGFQPDSKAIAELGFPLIEDVSHS

SEQ ID NO: 98919 - protein, 67 aa, Unknown
  Obtained from environmental sample
  misc_feature (1)..(67): Xaa is any amino acid
MEGEPVYAKELSGRTALVIGSEGSGISRVLRERCDGMVGIPSMGRIDSLNVSVAVGVLLYEVRRQRS

SEQ ID NO: 98920 - protein, 283 aa, Unknown
  Obtained from environmental sample
  DOMAIN (24)...(282): Amino acid kinase family
  misc_feature (1)..(283): Xaa is any amino acid
MSSTPSHVDLIREAFHYRSRFEGCTMVFKIDFPVTEDPGFPYLVKDLALLARTGFRVVIVPGAKEWIDAVLKRYDIVPSYTNEHDLAGDGYGKIGYPLRITTTQSIPFVEMAAFNVATRFMTFLSGSRVEALIGNFVRARGLGVQHGVDMEHTGTVDKIYADSITRVLNLGMVPILPCIGWSPAGKPYNVPSDEIALAVSSALGAVKLFIVSAHDGLRSNIFTLPEKSEVRADGSLVRLTPQEAESLIAANADSGIGLEALRGLTLALRACRAGVDRVHIIDC

SEQ ID NO: 98921 - protein, 185 aa, Unknown
  Obtained from environmental sample
  DOMAIN (1)...(184): Phosphorylase family 2
  misc_feature (1)..(185): Xaa is any amino acid
YDTQTITFPIRVLALLGIKSIVLTNACGAVNKHFSPGDIMIIEDHLSFLCPSPLRGINLDDFGDRFVDMSAAYTPAYIETAEKAAKELNIKIQKGVYGYWHGPTYETAAEIRAFMALGADVVGMSTVAEAIVARHCGMKILGLSCITNMTCIYSKSGTSHEEVMEMGRLTADRFIALLTKIIPRL

SEQ ID NO: 98922 - protein, 273 aa, Unknown
  Obtained from environmental sample
  misc_feature (1)..(273): Xaa is any amino acid
MEEEHVQNQTYWETNSKILRERYPGLIDQLTQEDQRLAAEDIKIETSASGEPALMIKGLYVHSPRDPVKEGKRLASSAIAETAAANKTSSSVFIVLGFGLGYAAQSLAELTPQSPVIIVEKYPSLLRLAFELRNMETLLSRNNLAFVLEENGITTALSHFEKRGKIKVEVLRNRPLTDIDEQWYVSAENKIRAWAMKDDVNSATLQKFGKRWVRNILRNARAIRDVPGISHFAGLADDGTTPLPVFMAAAGPGLDKVGSLLPEIRRRCIIVAV

SEQ ID NO: 98923 - protein, 62 aa, Unknown
  Obtained from environmental sample
  misc_feature (1)..(62): Xaa is any amino acid
MSDMLLEGLTVVEYTHSVAGPYCGMLLADMGARVIRVEPPEGDASRKIGPLVKGESLFHLTL

SEQ ID NO: 98924 - protein, 197 aa, Unknown
  Obtained from environmental sample
  DOMAIN (6)...(119): Acyl-CoA dehydrogenase, N-terminal domain
  misc_feature (1)..(197): Xaa is any amino acid
MAVLFTPEEKKIFEKARAFAMDYINPRAAKWEEDRKLPMDALDEVRKNGYFGIGCSKERGGQGYSWYETALAYEGLAHGDGGFSFFVQLHNTLSMGLEKGYDELNDNVKSLLPSFAKGEKLLGFAFTDDSGGSDPFQTTAYAVKKDDGYHLFGPKSWVSNSLNADYFIVIMHLKEGDDIVGMIMFLVPKGIPGLKSG

SEQ ID NO: 98925 - protein, 73 aa, Unknown
  Obtained from environmental sample
  misc_feature (1)..(73): Xaa is any amino acid
DPHIGGAREMSPEIDHPKAGKVRITGSPIKIPNAPSPTIKPAPALGADTDAVVKYLELDDAKIKKLRADKVVL

SEQ ID NO: 98926 - protein, 209 aa, Unknown
  Obtained from environmental sample
  misc_feature (1)..(209): Xaa is any amino acid
MATALSPYKLGKARDIYNVFNIFNAISWAFLAGNIVTLFALRLGANSTYIGIISAVLYIAFFFLPLGKILTKRFSIVKIYSFTWGSRAIGMIPLLLAPLVFAFGYRDLALFLILIGVTLFHVIRGIGMIANNPVLSYLSQGPDRGSYMTQIQIINSAVGMFAGFIIAMLLGRDPPLFLYAIIMAVGIVCGVFSGILVGKIPEPEREEGL

SEQ ID NO: 98927 - protein, 175 aa, Unknown
  Obtained from environmental sample
  misc_feature (1)..(175): Xaa is any amino acid
VEGNISRTRIYPIPAGGKRTISIGYEEELDLEKGLLYYRLPMAYADSIEKFSVKASVWNSSQKPLVPESGNELSFDVSGDNYVASFTRENYRPSQALNFALPAPTNIPRVIMQSAQGSHYFFASVAPRMQAQKKQWDNDLAIIWDVSLSGSQRNLQREIEMLDVIFAENKDAKAS

SEQ ID NO: 98928 - protein, 226 aa, Unknown
  Obtained from environmental sample
  misc_feature (1)..(226): Xaa is any amino acid
MRDAFTLFDQIASFSAGSIKSDVIREKLGITGLEKLNALAEACAVNDSPTAFALMDEILTSGVAIEQFVIDLAGFYRSLLLLKNGVTRESLLGYRPSLFSTKALETYDSIRLEQALDILLDCYRNNRYSVSPRFELETAVSKLTWLSKWVSPTELKEAVDDARSVLGIAGNHVSPDTYRTQTSAVSHNGASPTTARGGVNASGSHAAQYQSSTGGNSLVDEFNRMI

SEQ ID NO: 98929 - protein, 281 aa, Unknown
  Obtained from environmental sample
  DOMAIN (32)...(281): Bacterial extracellular solute-binding proteins, family 5 Middle
  misc_feature (1)..(281): Xaa is any amino acid
VDAGIYLQHTHEGIYKYEDAGIPATAGINYAKAVPGMAASAPQKTVHSDGTVTLVYTLRSGLKWSDGSALTAEDFVYSWQRLVDPETAADYSYMIDMIENANEIMEDEMNKSALGVKAINATTLEIKLTYDCPFFDEIMAFPATFPVKKSVIDKAGDQWTFAPSTYVSNGPYRMKEWVHNSYILLEKNPNYYTAVNGPEFLRFVLMEDENAILANFRTGDLDFIQNFPVDEIPSLLKSGDLKVSDYLGTYFVSLNTQRAPFTDARIRKAFGLSIDRNYIIN

SEQ ID NO: 98930 - protein, 217 aa, Unknown
  Obtained from environmental sample
  misc_feature (1)..(217): Xaa is any amino acid
MPKRSKIITNFYRDSVSLMQLSAMLGSSEGIRQFSAFMASENNIELLIAAGLLDGKIDAGPNDLLLAAEGDTEAALDRVMQAADSALRQKSRQGGEREKTLPKSIAQAKAEIETGSLTLIATPGEHAASEALKALRLGMHVMIFSDNVSLEDEVMLKREADKRNLLVMGPDCGTALVQGTPLAFANSVRRGKIGLVGASGTGLQHLCCHIHAMGGGI

SEQ ID NO: 98931 - protein, 296 aa, Unknown
  Obtained from environmental sample
  misc_feature (1)..(296): Xaa is any amino acid
KLIRGCLALAIVVSMAALLAGCGDGGGGGGGGPVVINIAAIPGVTAPVTGAEPVTAITPTAQYTGTVAWNGNPSTFAAKTVYTATITLTAKTGFTLTGVGANFFTVAGGATATNPANSGVITAVFPSTAGTADDPVTIDDAVIEGVAAPVSGAAPVTAITEATQFTGTVTWEPAVSGAFAAETVYTATITLTAKEGFTLTGVEANFFTVEGAEATNEADSGVITAVFPETESTPGTPTYGISLSSTGTHVFTTAEPDYTAQTPLTVTVTNTGNQATGDLTVALSGTMRRVLRITTS

SEQ ID NO: 98932 - protein, 111 aa, Unknown
  Obtained from environmental sample
  misc_feature (1)..(111): Xaa is any amino acid
VAVYNSSTGKIIVSGTALVTSAYTEATRGTIYLRDSGTATNVRLEITGGTIQNTSTTTGNAIRNDSPGAVSITGGTVSKAGSTGNAIYNNSTGVVTIGEGATIVGDNYGVE

SEQ ID NO: 98933 - protein, 63 aa, Unknown
  Obtained from environmental sample
  misc_feature (1)..(63): Xaa is any amino acid
LEGVSLIDSSGLGMLVAVKNSVDKAGSRLHLCCIPPQVAKVFDQTNLTNHFSIFAAEQDAMRG

SEQ ID NO: 98934 - protein, 216 aa, Unknown
  Obtained from environmental sample
  DOMAIN (8)...(127): Response regulator receiver domain
  misc_feature (1)..(216): Xaa is any amino acid
VPNQQTKGVVLIADGQAAIRDVLHFYLKRSGYQVIQVADGHEALVELSKVQPDMIIADLGLAELSGDRLCRTVKHNPETKNIYFILMLPMSEVVDMDIDTTVDALRIGADDTITKPLRSHELLARVGSAFRIISMQKEITQQNRELAAWRENMQRDIELAAHLQASLLPEAGGLGPYRYTYRNQPFVGIGGDVFAMVELPYGGVALMVADVSGHGV

SEQ ID NO: 98935 - protein, 268 aa, Unknown
  Obtained from environmental sample
  DOMAIN (37)...(239): Cytochrome C biogenesis protein transmembrane region
  misc_feature (1)..(268): Xaa is any amino acid
AHILPFADDTPTTAEPGAASPEPNPSRSGLLVALILFFLGGIGASLTPCVLPMIPITMAVIGARGAGKSRGVLLGVALTQGMALTYTILGVAAALTGAVFGQFAQRPAFLIPVSAIFALFALSLFGAFEIRLPESWTAKLQSSGPRKGFLGAFVMGLILGPLSAPCVGPLIGTALVDIAENHHVFEGALKMFVFAQGMGVLFIIGGTAVSALPKSGDWLIRFKQTLALIVLAFAIWTVRLIVPEWANYTMWSAELLLASGVYGAFEPA

SEQ ID NO: 98936 - protein, 281 aa, Unknown
  Obtained from environmental sample
  misc_feature (1)..(281): Xaa is any amino acid
MFPGRQEVPKTIVFAKTDSHADDIIQIVRDEFGEGNDFCRKITYSVDKADGVLSNFRNDYNPRIAVTVDMIATGTDVKPVECLLFMRDVRSRSYFEQMKGRGTRTLDKDNLRKVTPSARSNKTHFIIVDAVGVTKSLKTDSRHLERKPDVSLNELMMSVAMNSRDEDIFLSLAGRLTRLDKELTTAEQSKYTESSGGITLRVTVQRLLDAFNADAIEERARKENNLTAEDTGANGFALTEEQIQETQKAMTEEAAEPFYLPAVRTFIENARKAHDQIIDSV

SEQ ID NO: 98937 - protein, 96 aa, Unknown
  Obtained from environmental sample
  misc_feature (1)..(96): Xaa is any amino acid
MEPAIHSGSVLVVNRMQYGLRFPGQQGYLVRWAAPKQGEVVVFYAPSGNIAVKRCGVGEREGVFMAQGDNSLRSYDSRSYGPVSADATIGKVLGKK

SEQ ID NO: 98938 - protein, 161 aa, Unknown
  Obtained from environmental sample
  misc_feature (1)..(161): Xaa is any amino acid
MNSLPKRRFLFAVSALFAAALYILIRYAMRIEPGNSGNADGPKTAIERGPIVDRNGKILAGQVRRYDIYIIPPKERNQNRQNEKIDNLANRLAPVLEMDEEEIRQRISASKKDFVIKKYVTPEAYNIIKTMQEEKGRPLAGVIARPVPFRVYPEQSLASQI

SEQ ID NO: 98939 - protein, 289 aa, Unknown
  Obtained from environmental sample
  misc_feature (1)..(289): Xaa is any amino acid
GPPGFDRPPKTRDEFLACVKTISAADKGILADVAGAARALNEQSLSRDIFSWIWAAGGNFWPNEDSAPVINTRQIISDFDFLGRLYREETLSPKSSSVPQNRALSPNGFKMAEEQALEDFAQGKIAMLITSTRAIPALREEMGDEIFGITTIPSAGTAGKYSVSLTGIFAGINKNCVFPEAAQVFLDFLVAQSPLFCAQLKAVPGYVPELLSTDNKNYIKEDPFYAKAWDIFESSVVVKGFLGVPDAQEYENAACEEIQLFFESSRTARETVTAIQQRWDKIFASSVPK

SEQ ID NO: 98940 - protein, 294 aa, Unknown
  Obtained from environmental sample
  DOMAIN (54)...(213): Thiamine pyrophosphate enzyme, central domain
  misc_feature (1)..(294): Xaa is any amino acid
MLKQAFHIARTGRRGPVLVDIPIDISRATLDGYEYPSEVSIRGYKPTFEGHPKQIEKAAAMIANAKKPIIFAGGGVVASGAHEELKKLAEATNIPVTLSFMGLGAFPGGHPLFIGMPGMHGAKCANRALQECDLIISVGVRFDDRVTGFVARFAPNASVIHIDVDPASVSKIVQVDVPVVGDAKNILTTLNKLVKPREADVWNETVKEWRGQKLFTYQDSDTEIKPQAVIEKLYEVTGGNAIICTEVGQHQMWTAHYYRFDKPRTLISSGGLGTMGFGLPAAMGVALACPGRTV

SEQ ID NO: 98941 - protein, 123 aa, Unknown
  Obtained from environmental sample
  misc_feature (1)..(123): Xaa is any amino acid
MSILNTQRIESYYNTFKGIDITFTKDMIQVTGLITEQVHLKCGSDFWPCVFFSTSFQGAKIVANIKSGLLDKLQKANNSVSLRFCFKDLETGNPLTFFVAGRVLGVAPYKNSEDVSLLSVQFT

SEQ ID NO: 98942 - protein, 161 aa, Unknown
  Obtained from environmental sample
  misc_feature (1)..(161): Xaa is any amino acid
STAGHIKGMDMLSALRPRPWLAVSLNGSTDAQRQGLMPLALRYPLAELRLALDRWGLAHGEKLLIEYVLLEGVNDAPEDAERVAEWLGGLKSVSNVNLISFNEFDGAVFKAPNDRVKSAFAAALKNSGCFVTFRKSRGSDIGGACGQLAKRASFLQNDGER

SEQ ID NO: 98943 - protein, 255 aa, Unknown
  Obtained from environmental sample
  DOMAIN (1)...(203): Asp/Glu/Hydantoin racemase
  misc_feature (1)..(255): Xaa is any amino acid
ILSVPKQSEKLVYAADRENFPYGPRSRENVIELALSLVKKLSAIYDPKILVVACNAISVSALQALREGLPGLSVVGTVPALKPAIEKSRKRRIGVIGTQRAVEDPYIAELAAQFGPDCAIVGQAAPELIDFVERRWLEADRAERLEAVEPWIKKIVDKGADTLVLACTHFLLLKEEFLRAAGDSLMIFDSIEGVIKRVETLLDEAAGELRSGAAKEAGPPVPTAPQLMVVTGKRPLEAHWEKLCLSFGFVLEAGW

SEQ ID NO: 98944 - protein, 91 aa, Unknown
  Obtained from environmental sample
  misc_feature (1)..(91): Xaa is any amino acid
MLTVKNLSARIEGNQVLRGVDLEVGPGEIHAIMGPNGSGKSTLGKVLAGHPSFEVTGGEASFEGKNLLGMPADERARAGLFLGFQNPIEVP

SEQ ID NO: 98945 - protein, 192 aa, Unknown
  Obtained from environmental sample
  DOMAIN (1)...(163): Uncharacterized protein family (UPF0051)
  misc_feature (1)..(192): Xaa is any amino acid
RGVCKGPRSKISWTQVETGSAITWKYPSCILLGDDSVGEFYSVALTNHRQQADTGTKMVHIGRNTKSTIISKGISAGSSSNSYRGLVKVSQKAGGARNFSQCDSMLIGQSCSANTFPRIEASNPSATIEHEASTSKIGEEQLFYFQQRGVPAEEAISVIINGFCKEVFRELPMEFAVEASRLLSLKLENSVG

SEQ ID NO: 98946 - protein, 73 aa, Unknown
  Obtained from environmental sample
  misc_feature (1)..(73): Xaa is any amino acid
MEYGTRLISLALRLFGNILGGFVLMHLIEGLIPLVIPMIFSLYIEFFDGMIQAAIFVFLTSLYISEAVKTNEE

SEQ ID NO: 98947 - protein, 76 aa, Unknown
  Obtained from environmental sample
  DOMAIN (6)...(74): ATP synthase subunit C
  misc_feature (1)..(76): Xaa is any amino acid
MELQYLIALGVGIAVFTGIGAGIGIGIATSGFLQGIARNPEATGKMTPMFFVGVALAESTAIYGLVIALLLIARLG

SEQ ID NO: 98948 - protein, 269 aa, Unknown
  Obtained from environmental sample
  misc_feature (1)..(269): Xaa is any amino acid
MKTLSLPYGKEHLTAEIPESRYKGEMVSSLHSYQAEMSAEYLVDQALTNPVGTPPLHVMAQGKRKVVIIASDHTRPVPSRIIVPRMLAEIRKGNPDAEITILIASGCHRAATNAELEDKFGNEIFGKEKIVIHDCDSKDMVNIGKLPSGGEIIINRLAVEADLLTAEGFIEPHFFAGFSGGRKSLFPGIASRKAVLYNHNAEFIAHPKSRTGVLDGNPIHIDMLHAAKKAALAFICNVVINADKKIVYAVAGDCDAAHRKGTDFLLSKC

SEQ ID NO: 98949 - protein, 295 aa, Unknown
  Obtained from environmental sample
  DOMAIN (1)...(295): Carbohydrate phosphorylase
  misc_feature (1)..(295): Xaa is any amino acid
GRAHDLRIRQQYFLVSAVIQDIIRRHKQNGNNIADLGAKTAIHLNGSRCALAIPEMMRLLVDQEGMEWKEAWKMTQSIFSYSSSAVQREHVETWPVFKITQLLPRIMQVIFDINLEHLDLIRSRGCNDLELLRNLSLIEEGEVKRIRFADMAVLGSNSVNGVSAAHTEILKKHLFPNYYSQYPEKFYCKTNGVSHRRWLYCANRPLSALISRPIGDGWVRRPEELSKLEFYAESPEILKGFVNVKSRAKSELCAELREKVGVAVDPVMLFDINCRPIHTSKRHVLHILYILHCYL

SEQ ID NO: 98950 - protein, 286 aa, Unknown
  Obtained from environmental sample
  misc_feature (1)..(286): Xaa is any amino acid
YLRPGSLDYENDPVIGTYNGVTYRTKTFAMKFAVTTGTTNYFKLDFHSEATPNYETAVFIANLKVIQELQSENPIGPVVYTNLADKVPSLAERYKDMFMIGSTNFVNAPYYIKHVNTTTHGNELKPGSIHPRGPSFLVDSGTPYGERFAAQRPDAQRSEWEFTAADSQFGDARNHNFNFHGHTLAWFSQSAQWMVNMVPTGITGGEFNPQGNYISRGTSPGPSGDANGTVQVDKETARRAYYDHIVRAMRHYSSDDPRYAGSRLNNPNTAGCFFPGFLGCAKRRSK

SEQ ID NO: 98951 - protein, 274 aa, Unknown
  Obtained from environmental sample
  misc_feature (1)..(274): Xaa is any amino acid
LITAHLKEGMAGLEKGLEELRNASHENISEKLRTFEDEFFTDINKRSNDMNLKIAEWQSVIEGRLSVIGENSVTALRELEQSRTEEMKKNLSALDARLVSELEHLKSETGAFEGGILDQMKAADDSVSSFKEQLDRDLEETRKEAEISIKAEIGNYSITAAETVKKYQRELDDAWNGLSARLRELDENVEEARRRIGDLTAETDNRIASVRVSVEDAERHIREAVDQTKLIDRADMMRLEMERRIEDLKSDIDRLDQRRAEAARIENEFIKIKR

SEQ ID NO: 98952 - protein, 130 aa, Unknown
  Obtained from environmental sample
  misc_feature (1)..(130): Xaa is any amino acid
MKRIVAVIFIAVFSALSITGCESVDELVPDDLNNPNNPNQPGPEDPDVSHPILSVDPKPIIPIDPTHPELGIDPKPVIPTDPTHPILTIDPKQPIIHPGIVDPTGESYKVTIQPSINGEVKVNRLNGLYR

SEQ ID NO: 98953 - protein, 236 aa, Unknown
  Obtained from environmental sample
  DOMAIN (33)...(216): Peptidase family M48
  misc_feature (1)..(236): Xaa is any amino acid
QEYYIGRAVAANILSTYKLYGGKQALTYYLNEICAVITINSPRPEIYNGYHVAILDNNEINAFATSGGHIYVTLGLINAAKSEDALAGVIAHEVAHIQLRHSIKAIKNSRITQALLVTGTSAAGAAAGMDVKQLTDVMNESVGEIVQTLVNNGYSQAQEFEADNTALSLMASAKYNPSGLIEMLKSLSSVQTTGSGFGKTHPSPAQRIANAEKSLSKYKVTDSSALRQPRFTTATR

SEQ ID NO: 98954 - protein, 272 aa, Unknown
  Obtained from environmental sample
  misc_feature (1)..(272): Xaa is any amino acid
MSLPKIYEWALIKPAHDSAPVITINENCASLANGKIKAVVERKNWPDGLELSFYNQKGKLLFKERETGGALKLKARKYTPLSGGSFKINAFFESETGEHLYGMGQYQQEYLDLKHCSLELAHRNSQSSVPFVLSSLGYGFLWHNPSVGKVSFGENYTEWVSECSEQLDYWVTAGDTPREIMSAYADASGHAPMMPEYGLGFWQCKLRYWNQEQLLEVAREYRKRNIPIDVIVCDFFHWPHMGDFRFEEEFFPDPKAMVQELDKLNIKLMVSV

SEQ ID NO: 98955 - protein, 170 aa, Unknown
  Obtained from environmental sample
  DOMAIN (5)...(154): Glycosyl hydrolases family 31
  misc_feature (1)..(170): Xaa is any amino acid
VMRLHGDRKPSSAVYRKDGSVSLFTGSDNEVWSFGTEAYEIIVKYIKLRELIRPYTRSLMQDAHENGAPVMRPMFLEFPEDQESWLLKDQYMFGPDMLVAPIMEAKAVSRRVYLPAGAEWAELHSGNKFSGGNYINAEAPLDVIPVFIKNNAHPEFIGRRARVARKLAFA

SEQ ID NO: 98956 - protein, 281 aa, Unknown
  Obtained from environmental sample
  DOMAIN (23)...(89): S1 RNA binding domain
  misc_feature (1)..(281): Xaa is any amino acid
SAKHTAHQSIREIQKDSLFSEYKDQVGEIIIGYYQRERNGSIYVDLGKTEGVLPRKFQSPRESYHVNDRIKAYIAEVKKENAGLQIVLSRTHTEFVKKIFELEVPEIYDKTVEIHKIVREAGFRTKLAVYSNREDVDPVGACVGLKGVRIQAVIKELEGEKIDILKYDPDPRRFIKNALSPAEVRDVIILDEGKHTALAVVNDSMLSLAIGKQGLNVRLANKLVDWNIDVKTESQFSQMDIAAESRRAVADLFGDADSDVNEFFHISEMPGVNSGVAQTLL

SEQ ID NO: 98957 - protein, 208 aa, Unknown
  Obtained from environmental sample
  DOMAIN (2)...(163): Transketolase, thiamine diphosphate binding domain
  misc_feature (1)..(208): Xaa is any amino acid
MFFDSNDIQLSTTTDQVTSEDTEAKYRAWGWSVYVVDGNDDGQIRGALKAAVNERERPTLIIGKTVMGKGALAKDGASFEKKVSTHGQPISDAGASAEETIKNLGGDPADPFTVFPDVAEHYRAALDKKRAYAREKKAEQAAWEKANPELAKKFAAYMNRELPDIDWASIKHKPGVASRAASGTVLAEFSSKIGNMIVSSADLCNSDK

SEQ ID NO: 98958 - protein, 74 aa, Unknown
  Obtained from environmental sample
  misc_feature (1)..(74): Xaa is any amino acid
VDTLRSLDLAETALGYAETTLARGGNLVIKVFQGGDTGKLLKAIRGLFETGKSFKPQACRAESFETYYLGLGRK

SEQ ID NO: 98959 - protein, 291 aa, Unknown
  Obtained from environmental sample
  DOMAIN (201)...(286): MutS domain I
  misc_feature (1)..(291): Xaa is any amino acid
VDALLAEMQPIYLNTIEEDRYYNTRKAAWDSLNEYRDGTYTLFPGLENLPDPDAVITTRFNGTRRETVIDLSDSPSIGDFSSIPANTVQMSLFDDSPLPILPSAEEQRAKIGETLKQEAEKREALADAPFLSISDADKERIAAQFTTAPRSRDAVNLVKEVYGDSLDMPLPQAVKRITELVADGKYAVAAPELTDAQKRRQAILAEVAAIKAENGGAMVAYQVGEFYEMYGDDARIAADTLGLSLITLRDVPEAVDMAGFPRHSLGDSARTLNEAGHTLAVLWEHEDGRKT

SEQ ID NO: 98960 - protein, 88 aa, Unknown
  Obtained from environmental sample
  misc_feature (1)..(88): Xaa is any amino acid
NAFDVILPGSISAIMSGATIGLSFSFILLTSAEMIGATSGMGWHVKYFSDFADYPRVIVGILFIGIVVTIITFFFDKLEKYLLRWRKT

SEQ ID NO: 98961 - protein, 205 aa, Unknown
  Obtained from environmental sample
  DOMAIN (8)...(205): Pyridoxal-phosphate dependent enzyme
  misc_feature (1)..(205): Xaa is any amino acid
MKSVAKNLTELIGNTPLLELSNYGKKKSLSARIVAKLEYFNPLGSVKDRIGYAMIADAEDRGLIKKETTIIEPTSGNTGIALAFVCAAKGYKLILTMPETMSLERRNLLKALGAELVLTPGSEGMKGAIKRAEELSAQTPNSFIPGQFVNPSNPEIHRRTTALEIWNDINGELDIFVGGVGTGGTITGVGEVLKEKKSGIKIVAV

SEQ ID NO: 98962 - protein, 263 aa, Unknown
  Obtained from environmental sample
  DOMAIN (98)...(156): GHMP kinases N terminal domain
  misc_feature (1)..(263): Xaa is any amino acid
MENESLGYTICTIEAPCKINLHLGIGKRRNDGFHPIESIFTTLAFSDTLRLEFSGSDGEIRLFINWETPAEAISDKENLILRAISLFRERIGFKRGLVVRLDKRIPLGSGLGGGSSDAAAALLALNTLSGAHLPMQNLSEMASILGSDVPFFLTGGTAFVSGRGETVEPIKSPGQLWVVLVPPPFKSDTSSAYSLLDSLREQGSIEEKKAIPRETLLHALEGKSEKWPFFNDFLPVFLCQDSVNSVIYSGILESLRGLGASFA

SEQ ID NO: 98963 - protein, 264 aa, Unknown
  Obtained from environmental sample
  misc_feature (1)..(264): Xaa is any amino acid
MARMTEEEADALDKEKNEYLTQQLITYIGNKRTLLGFIGDGIKKVQKRLHKEKLKMFDVFSGSGIVARYFKQFSELLIVNDLEKYSTLINKCYLSNENELNIFSLRKRYFEIIEEIDRNPKKGIISELYAPINDENIKSYERVFYTSRNAMYIDTVRQIIETIPRKEQKYFLAPLLSEASIHANTSGVFKGFYKNKETGIGQFGGLNKDALFRIKGNIKLPFPIFSNFNCETIVYNGDSHKIIKDLPEVDVAYLDPPYNQHPYG

SEQ ID NO: 98964 - protein, 264 aa, Unknown
  Obtained from environmental sample
  misc_feature (1)..(264): Xaa is any amino acid
ASTLTTALVFVPIAFLPGPLGSLFGDMAVSLVTAILTGWLYAQFLLPSLYRMGISISNSLSLSNAESPRQDGGKTARIAGVCGTRSDKLLEKEYRKLLGSSLRRPVRVFVIAAVASITGAILLVIRPFVFISPDAAEEICVSVIFPPGTLLESALDIGTDISGRVCELPSVKTVYGRAGAEEEDTGRRADIDYRKEEFIFHCVLEKGSKPEDVLEEINLTLRSFPGMPPFTTYFPMDRTEVMLGLSREDNFIISGKDREELSER

SEQ ID NO: 98965 - protein, 257 aa, Unknown
  Obtained from environmental sample
  misc_feature (1)..(257): Xaa is any amino acid
MAGSQKHAPRLQWGEQLILFRYILGLFGKETLADLAGRLNSTEFEGLNENQNTFFWQELDSLLSHQGNNAKISRSELREYDERICRYIKQIGQNRGNIKLKYFQYVACLFAEIYLDRYFSDNDGFAAKLNKFAKLAHIESLGGINVEPFAPANMNKLAFMCATGSGKTLIMHINILQFQHYLERTKKLNPRTRINKIIVLAPNEGMSNQHLDELKLSNISAEPFAQSGFGSGADVIVIDMNKLKEEGKVKTVSVDSF

SEQ ID NO: 98966 - protein, 167 aa, Unknown
  Obtained from environmental sample
  misc_feature (1)..(167): Xaa is any amino acid
DAEYAGESEPPINKWIKQYPNLLCTRTFSKLYGLAGLRIGYGIASTEIIGTLKKIKLPFNSSYPAQIAAAAALEDTEFIEKSLKMNAEGREHLTQRLQDLGFDVLPSAANFICAKIGKRAAELVAWLESKGVIIRHLSSFGMPEHVRITVGTETENAELLARLVACG

SEQ ID NO: 98967 - protein, 122 aa, Unknown
  Obtained from environmental sample
  DOMAIN (21)...(121): AzlC protein
  misc_feature (1)..(122): Xaa is any amino acid
MGFSRGFSRKPVFIEALRYSIPVLLGYVTLGFAFGLVAAGTGYPWWLALFMSVWMFAGAGQFFAIGLFAAGTTIWEVCLIQLVLNIRHAAYSFSMLNKFSGPFKPYLIFSLSDETFALFSAM

SEQ ID NO: 98968 - protein, 165 aa, Unknown
  Obtained from environmental sample
  DOMAIN (6)...(147): Ketopantoate reductase PanE/ApbA
  misc_feature (1)..(165): Xaa is any amino acid
MKINSVLLAGAGAVGLTVAETIYNYDPACVSILAKGERLERYRKNGLKVNGAKPDFCFTQEKKSELIIVACKFGHLNQIIEDIAPSVNKDTIILSLLNGISSEEIIGAKFGRDRLPLAMILGTDAFHKAEETNFTKRGVIHFGDSDGKNGEKEQAIAEFFDRAGV

SEQ ID NO: 98969 - protein, 199 aa, Unknown
  Obtained from environmental sample
  misc_feature (1)..(199): Xaa is any amino acid
VAFTDVTANGSATETTTKLTLNFNKDITGLSADDITLTGSTGAVKGTLTPTKTGVYELAVSGISASGTVSVSALKAGYAISGGTKTAYVYSATHGTTGITINLWVNESDGQILASNNNITINNITISKSGGTKSFTATVNSGYTNIQWIMLGTPLPGSGGAQSITVNAADYNAGTYRLNVIVYKNAVPYSTEIRFTVTN

SEQ ID NO: 98970 - protein, 90 aa, Unknown
  Obtained from environmental sample
  misc_feature (1)..(90): Xaa is any amino acid
RRWDGTDDYGFSALPGGIRFYDGGGDFNHAGNMGFWWAASVASYHDVYYRSMQSDNDDVHEYYFYNNLGLSVRCLQDEMLIDDMDDDEDE

SEQ ID NO: 98971 - protein, 225 aa, Unknown
  Obtained from environmental sample
  DOMAIN (20)...(225): Phage terminase large subunit
  misc_feature (1)..(225): Xaa is any amino acid
TTALNFIYRLIEYPQSNLLVVRKTFRSLKDSCFTELKWAIHRLGVDQWFDVKESPLEITYTPTGQKILFRGLDDPMKVTSITVEVGVLCFLWIEEAYEITNKTDFDMLNGSIRGELPPGLFRQVTLTFNPWNEHHWLKKRFFDNPPDPEDVSVFTTDYRCNEWLSADDLKLFETMKKENPRYYAVAGLGDWGVVEGLVYEKAHEEIFDVDEIRRHPGIKSVFGLD

SEQ ID NO: 98972 - protein, 270 aa, Unknown
  Obtained from environmental sample
  DOMAIN (132)...(249): Glycosyl hydrolases family 2, immunoglobulin-like beta-sandwich domain
  misc_feature (1)..(270): Xaa is any amino acid
GELPPWQRVSVPHTWNDKDAQSGQGMYQGYGWYRRSLDVKAEWEGQRVFLRFGGVGSVADVYVNDKHVGQHKGAYSAFCFDITSALKFGGANEIRVRADNRAKPDVIPVNHYLFAIFGGIYRPVAMIIAPPVHITPLDYASPGIYIKQNKVDRAEANIEITAKLANTKKTPSDLTLLFEVRDAQSKVVATASPKARVRPSGVQAFRQGLAVPKPRLWHGKKDPYLYSVTVSIKDGEKTLDSVTQPLGLRTFSFDEKKGFILNGELYPLRG

SEQ ID NO: 98973 - protein, 265 aa, Unknown
  Obtained from environmental sample
  misc_feature (1)..(265): Xaa is any amino acid
DIAFYGCGKLTGITIPASVSSIGLSAFSGCTGLTSVTLSEGLTSIGECLFVDCGSLNSVNIPTSVTSIGFRAFEGCNSLKSITLPEGLTSIDGAAFAGCSSLPGITIPATVTSIGAGAFSNCVSLTNITIPASVRSIGGGAFSGCSNLTGITISSTVTSIERYAFSGCSSLTSITIPATVTSIGAGAFNNCVSLKSITLPEGLTSIGNIAFAGCGGLTNITIPATVTTIGYWVFYEWTNQQTIYIDGNSAGWDADWDTDCEAVIK

SEQ ID NO: 98974 - protein, 207 aa, Unknown
  Obtained from environmental sample
  DOMAIN (46)...(143): PPIC-type PPIASE domain
  misc_feature (1)..(207): Xaa is any amino acid
IQKYLLAKKQDLFSSVKEPTNEEIANFYNLNKAKFIRPDTVRFSMIQFSYGSDTASKNRAKEAADRLVREIGSDPSKFDEAVIKSRVPNSGYDAGDVGYVPLDAETQQVIGANLMNAARSLKQGEVSKLIEGNQGYQIIKITEALPMKTLGLDEIAILGSSVTVRQYIAAGLLEQKQQEILERATRELTTELRAGNPFRIMENNLNW

SEQ ID NO: 98975 - protein, 229 aa, Unknown
  Obtained from environmental sample
  misc_feature (1)..(229): Xaa is any amino acid
MTYYQRIGDNKNITIKTRQEYNLSTGLVRRQLPDIQFRASGSLFESDMSGENIDPPFWEKINYSYQNHLNNHVVRAYDSLKAVDTTAYYTGFSDNLSFNYTGTLFKVLNVTPSLNLAGDWTAREYTSPDDSVNNKRNRFAFDPSKNEYGQYYLKGNGSLQLATKLYGFWLPEWGRFTGVRHTLSPTVGYTYAPELDTNKAFYPHPLLGQRAFQNKQQTVNFRLGNDFDM

SEQ ID NO: 98976 - protein, 264 aa, Unknown
  Obtained from environmental sample
  DOMAIN (1)...(263): Sodium:neurotransmitter symporter family
  misc_feature (1)..(264): Xaa is any amino acid
ILVCVLGFGICAGGLVKSVEKVAKVMMIGLFIIVAILAIRVVTLPGAGAGLEFYLKPNLSAIREQGLFTVLFAALGQAFFTLSLGIGSMAIFGSYINKDKRLAGEAITVTILDTGAALLAGLVVIPACFAFGLSPTGGPGLIFMTLPNVFNGMGLGQLWGALFFLFMTFAAMSTVVAVFENIIAFAMDITGCSRIKSTCINFFVVVILSLPCALGFNVLSGFSVMGGVLDLEDFILSNNLLPLGALVYALFCVSKMGWGFDNFL

SEQ ID NO: 98977 - protein, 259 aa, Unknown
  Obtained from environmental sample
  DOMAIN (42)...(198): Anticodon-binding domain
  misc_feature (1)..(259): Xaa is any amino acid
MDKDSFKLGSKFANKVWNASRYILMNLEGRNLVENPVLLPVDKWIYARLNSTARAMEENFLSYRFNDAAGAVYEYFWNDFCDWYVEATKLSIKKESGWKSESSGEKDRATTVLLDVLATSLRLLHPLLPFVTEEIYAKLPNVKNELLITAPYPVYQKELANEKAEKDFAFLQDLVRQVRTLRSECTIPPDQKIKVRLRVSAPESEVLVKENTALVKLLAGIGDLDIATGQEAKPQGSIGIAGNGFEAFVFIADAVDVKL

SEQ ID NO: 98978 - protein, 260 aa, Unknown
  Obtained from environmental sample
  misc_feature (1)..(260): Xaa is any amino acid
NGGETTTTENWTIPLTGVTGGIWPFTDSPTLSDLPDGNYYLFIRVYDRLGNDSSIGFKAFRVNRFAPQIAVTSPNPVPEIIGKTPTTVSFEGTIVDGNLKNSTVTYQINNNAAVPMSTSPASLTGTSPDFTWKLPPSLALNANGFQEGSNTVTIYAEDEMGKPANKEIKFLIDTGAPTVSLTNIKPQVISQNTWRNGTQTDKDNAVAGITTLNSDLSIKGTFNDTVSRLGYNNGAAIENSYQYRVYTGADLIKTTPSNEV

SEQ ID NO: 98979 - protein, 246 aa, Unknown
  Obtained from environmental sample
  DOMAIN (165)...(243): Transporter associated domain
  misc_feature (1)..(246): Xaa is any amino acid
EISRKTYESLETEKKEMIQGIFELSDTSVKEVMVPRIDVEFISNKLSREELLARIVESSHSRFPVYEETIDKVIGILYVKDVLKSLVKTDKGMLDIKDLVHKPFFVPESKRIDDLLRELRRRKVHIAVVVDEYGGVSGIVCMENILEEIIGDIQDEFDNESEDVLELGGGAWLCETRVNLEDLSERIGIKFPVEKFDTLGGFVFDLFGKIPVKYEKAVWEGHDFIIQDVEGHKINSVKIILSKKED

SEQ ID NO: 98980 - protein, 253 aa, Unknown
  Obtained from environmental sample
  DOMAIN (149)...(253): Pyruvate flavodoxin/ferredoxin oxidoreductase, thiamine diP-binding domain
  misc_feature (1)..(253): Xaa is any amino acid
SRASLVVLGGTESASGIDRVNDAINNGADISAIDHDGYGSDSTQSFKLDFGLCPHIHTHPQLKSSFVLGVLSAILGIPENLTLDLITKKLKSKNLTEQNTESFKTGFGSAASDILPPMRTINKYVMRLASGRPTTEDRVILDGNQAVALGAISAGCRIYASYPISPATSIGVFMATYLPAFGGFAYQTEDEISAIGAVAGAWFFDTPAMTATSGPGLSLMQEFLGYCSMTDTPAVIVDVQRAGPSTGMPTKHS

SEQ ID NO: 98981 - protein, 250 aa, Unknown
  Obtained from environmental sample
  DOMAIN (49)...(197): Thiamine pyrophosphate enzyme, C-terminal TPP binding domain
  misc_feature (1)..(250): Xaa is any amino acid
MSDTTQNRYMNENAPSWCPGCSYFTVLSALTECFDERGIAPDEICVISGIGCSSRLPLFLNTHGMHTLHGRPLPVAIGSRLARPDIPVIVATGDGDLLSIGAAHFVHAARKNFDITVICLDNRLYAMTKNQTSPTSPLGYKGSLTPYGKLSVPLNTTELAISSGASMVCRSYAYDKAHVKKMIDAAMNHHGFSLVDVIAPCRTFGDHQNEISKRLYDLQEKGHRVDDRESAMSVATRVYDSDSDENAGIP

SEQ ID NO: 98982 - protein, 95 aa, Unknown
  Obtained from environmental sample
  DOMAIN (1)...(90): CheB methylesterase
  misc_feature (1)..(95): Xaa is any amino acid
GPVNSQKPAADFLFKSAAEQFGSSLVSVVLTGMGNDGAEGTRFVKNCGGITIAQDQATSMIYGMPEAAVETGCVDFVLPLNEIALKLISLTGGEC

SEQ ID NO: 98983 - protein, 156 aa, Unknown
  Obtained from environmental sample
  misc_feature (1)..(156): Xaa is any amino acid
MWRYSGNPIIPRNLTAHSNSIFNSAVVPFNDGFAGVFRCDDTSRRMNIHAGKSSDGINWNIKDEPILFIKSYPDLPDSEYKYDPRVVFVEDRYYIIWCNGYFGPCIGLGYTKDFEKFYQMENATMQYNRNGVLFPRKIHGNYAMLTRPSDSGHTPF

SEQ ID NO: 98984 - protein, 189 aa, Unknown
  Obtained from environmental sample
  misc_feature (1)..(189): Xaa is any amino acid
VLQEQNRAEEYRREAERLKTALEREQEKFNQQREKILAQAKEEARQVLWAAKEQADQMMKALQQQIRETSLKDADAARVRIRDAYQTIENEIAAGAAGAGGARKDRGAVPKMLKKGDGVYIHSMHQRGVVSLPPDGSGEVLVQAGIMKIKVNLQDLSLDEREESIRVQGKQVSQHLKAGKAQHIAPEID

SEQ ID NO: 98985 - protein, 247 aa, Unknown
  Obtained from environmental sample
  DOMAIN (1)...(247): 4-alpha-glucanotransferase
  misc_feature (1)..(247): Xaa is any amino acid
GEENAFWLDDYTLFVAVKNQCIEKRRNTRNSEEYKAFSKLNKTLLKENAIQDNFYGAVWNSWPSDIKHREPKALEREKKALEADIDFYRFLQYTFFKQWDALKAYANQHGILVIGDIPIFVAMDSADVWANPDLFYLDDKGYPTVVAGVPPDYFSATGQLWGNPLYDWDAHAKEGYRWWINRISSMLKMVDKIRIDHFRGFESYWAVPYGEPTAVNGKWRKGPNDKLFLELRRVMGDLPVIAEDLGI

SEQ ID NO: 98986 - protein, 154 aa, Unknown
  Obtained from environmental sample
  DOMAIN (37)...(154): NeuB family
  misc_feature (1)..(154): Xaa is any amino acid
MSRSFFADGTAYSPQNPLIIAELGTAHNGDLSRAREMAAAAAQSGASCVKLQMVFADEILHPNTGEVRLPGGKIRLYDRFKQLEMSPQFYADVKEYVESLGLLFLCTPFGLKSAKLLKELKPKIVKIASPELNYTALLREIAGWGLPVLLSTGV

SEQ ID NO: 98987 - protein, 256 aa, Unknown
  Obtained from environmental sample
  misc_feature (1)..(256): Xaa is any amino acid
MKVTAIAIRPPVAAKECPAVTPELLASVLARYSRSNKGLDAILASVDQSNPDASVDAIFRFVDYGHASIAGMTGGIAVAIDGLSMFLAYKLFEIAQLCDGQESSTRYIKLDKSSIPAPDEVGIPPNCVKPWELFTARAFELYREVYDMLDDDVRRNPEIVALPTGVDEKVVDRIRRNYALDRARYLIPFASKTNAAYVMTARAWADTLCKLDSLPLLEAKVCAALVRAELERFVPRMTRHSFKTKAGESQAGQLLS

SEQ ID NO: 98988 - protein, 209 aa, Unknown
  Obtained from environmental sample
  misc_feature (1)..(209): Xaa is any amino acid
EFRLKSHCLKDALRLEEYQAIDSRPRLRPQARPEFEAERYLADLEHAQMKAAFTPPAENLTEIRPRRGLTATDSSVRAYSGWRHPQALLTGLLANAQPFRKETRPQVELCLLPDEEGENYHLIKLFETESGRTDVPSDHLLDDGLKFECGLGFSPWGATGYLNCLKALAAVQEVEDLQRCARLYGTVSLPKSGPEGWYFHPVLGFNVKK

SEQ ID NO: 98989 - protein, 257 aa, Unknown
  Obtained from environmental sample
  misc_feature (1)..(257): Xaa is any amino acid
KSSAIKHKNLYRHEWVSLRLFQAFVGGATADAEWLKRLAALAEREEGDWPAGLYRDGLDNASKTPALDSMPPAAKAVAWLILSHHRLPHPSDKNYLRQESQLKNFWFDLDPSWNQHSPAPANRNGEEIPSGKKANPKAYWTFPHGWPTALPAWRKRAAALAEELRQLLEPQTLGPPLDDPFVMHLARLSLMLGDHYYSSLDDPRRRLAAHPAGRLYANTDKKGERKQKLDEHLLGVEKQGDRVGRSLPRLAEALPAL

SEQ ID NO: 98990 - protein, 255 aa, Unknown
  Obtained from environmental sample
  DOMAIN (178)...(255): Polyribonucleotide nucleotidyltransferase, RNA binding domain
  misc_feature (1)..(255): Xaa is any amino acid
ERYYSAGKIPGGFIKREGRPGETAILSSRVVDRSIRSLFDDAMRNDVHVVATVMAVDQIYPPNVLAINGASAALAISGIPWGGPVGAVRIGRIDGKFVVNPTEEQMAVSELDLLVAGYDDGVTMVESGSDELSEELLIDALELAQSEIRKLIALFRRMKEEVGKPEIEIVPPPTYPEIDTWIEAHLGAEISAAVRIHEKKPRAQKIEKSKQHAQEHFAESHPGLDDYVSAAVDERVKKIMRSIIVNEGVRVDGRA

SEQ ID NO: 98991 - protein, 253 aa, Unknown
  Obtained from environmental sample
  misc_feature (1)..(253): Xaa is any amino acid
FVNLVNDIRKFAMEDIGLAMSKNYTRYVELDRDYLAAVVSASEKDSFRRHEWHFPVVGAMPYKGFFNIEDARKERAKLEKKDLDVWVRKVEAFSTLGWFKDPLYSYMSNYSVGRLADLLIHELVHATVFIKGQVKFNEELAEFIGSEGAKLYVISRYGADSEEYRESFSSDSEYKNYVAFIQELIAELDALYSSEIDREAKLKEKEMIISAAKERFNAEYETRFSSDNYRGFSSLPVNNAYLELYRIYHAQDN

SEQ ID NO: 98992 - protein, 228 aa, Unknown
  Obtained from environmental sample
  DOMAIN (1)...(228): Initiation factor 2 subunit family
  misc_feature (1)..(228): Xaa is any amino acid
MYEAIQVLRVRGAPAIGVAAAFGLYLGVRDFNGGDVSSFLGHVNDRAAYLAASRPTAVNLFWALDRMRKFAHDQVKSCTGIDIDTLKKRILEEAVRILEEDKRMCRAIGEHGFELIKDKECILTHCNAGGLATSELGTALAPIYVGQERGVTFKVFADETRPLLQGARITALELSEAGIPVTVICDNMAASVMASGQIKACIVGADRIAANGDTANKIGTYGVAISAA

SEQ ID NO: 98993 - protein, 247 aa, Unknown
  Obtained from environmental sample
  DOMAIN (181)...(243): Elongation factor Tu domain 2
  misc_feature (1)..(247): Xaa is any amino acid
ERGLRQALAVIKETYGNSAAPLTIPIGKGAAFRGVIDLVTKDAYEYTKEGDGCGKKIEIPAEMQESVGNLRKALMESVAETSEELMNKYLDEGGLSDDEIRAGVAKGVLDGSVCPVLAGSGLLNIGVDQLLTKIVNLCPSAASRTEIDVIESEEQKTVSVKTDDPTAVSFVFKTVSEEHLGELNFVRVFSGKVSTGHELLNVNKGTAERIGNMYFIRGKERVDTDEIHGGDIGGLLKLKATHTNDSL

SEQ ID NO: 98994 - protein, 199 aa, Unknown
  Obtained from environmental sample
  DOMAIN (1)...(179): Type II/IV secretion system protein
  misc_feature (1)..(199): Xaa is any amino acid
FRRPADKIFKLEDYREEGRLSNELYDKLIHHIEKRSNIVVSGATGSGKTTFTNACIEKMCEFTPDERIYIVEDTPELQCNSRFKTQLYIRKDQAVAAIQTALRFTPKRIIFGELRSGEVAVELLEAWNTGHPGNFTTIHADSAASTIPRIEGLLRQVIKGQLPDLADSIRLIVHLSSRAGFGPVVDEILTVREIQEGKL

SEQ ID NO: 98995 - protein, 116 aa, Unknown
  Obtained from environmental sample
  misc_feature (1)..(116): Xaa is any amino acid
VNKKPETGLSSGALLSAAGAQALDKEAQTQWGLNPFALVEAAGRKCAAAFAHAFAHIYTQKELSIIVFAGKGNNAADALVMLKALILDRYAQSSACAVFAVQIPEDSSGGDRTPLS

SEQ ID NO: 98996 - protein, 224 aa, Unknown
  Obtained from environmental sample
  DOMAIN (1)...(215): Branched-chain amino acid transport system / permease component
  misc_feature (1)..(224): Xaa is any amino acid
MCAIGGHPLLAIPAGLIAGAAAGAVTGLLQTKGGIHPILAGILTMTALYSINIFVMGGSPNLSLLGKATMFSIVQAAMNLEDRNTARHILILIFSCSSVVILAWFFKTSLGLQIRATGNNERMVRASSINTDGMRIIALAIANGLIALSGTILAQYQGYGDINGGTGIVIIGLASVILGEVIIRRGAILFRLIAAAAGATLYRFIIALALHLNVFPAYMLRFLS

SEQ ID NO: 98997 - protein, 258 aa, Unknown
  Obtained from environmental sample
  DOMAIN (2)...(258): Glycosyl hydrolases family 8
  misc_feature (1)..(258): Xaa is any amino acid
NAYSTGLVHRPKSETPGDAVSEGVGYGMLLALYSNDQETFNRIYNAAKSKRLNFCEDWHLPVNGNKGVNDGGSATDADEDITLALIFADKLVKKGKWTNGNYAGDAQNGVNCVWGSMNNGLLWPGNNWKPGYNVGYFAPAWYKIFNDFDSQKRNWTNAVNKSYEFIKSISSYDIGMVPDWNQTNGALGLGGGAGYNGYMSGKTFFKDAIRILWRVANDYIWFKDSRAKEFLENSLKFITDKGGPSEANFYQLEGSNKG

SEQ ID NO: 98998 - protein, 250 aa, Unknown
  Obtained from environmental sample
  DOMAIN (1)...(126): Glycosyl hydrolase family 3 N terminal domain
  misc_feature (1)..(250): Xaa is any amino acid
MGEYFIKGVQENGGAACMKHFLGEGQTVDGRNQGNALLDNDGIEKILPPYRASINAGAMSLMPSFSSINGIKMHQNKELLTDLLKEEMGYKGFIVSDWSAIKQLTGGSYRMQIANAINAGVDMCMAADGRENWINFISNLTKLVEDGIVPMSRIDDAVVRILRFKQKLKLFENPLITQAGKIGTDENRAAARELVSDSLVLLRNEQDTIRKLSESKRILVTGQGANNIGMQCGGWTITWQGGNGAITKGT

SEQ ID NO: 98999 - protein, 207 aa, Unknown
  Obtained from environmental sample
  DOMAIN (102)...(124): MORN repeat
  misc_feature (1)..(207): Xaa is any amino acid
MTWNMGDIYEGDWEDDTQHGKGKFTHYNGAVYEGDFVTNWSQGKGKMTWADGSVYEGDFVDGNLHGKGKMTYPDGKVEEGEFVGKEEKTMIKKLTYGNGAVYEGEVVDGKPYGKGKLTSKDGEVREGEFKNLLKLNGKGKLKDQGGNVYEGDFLNGNFHGKGKMVWPDGRVYVGDWANSERNGKGKRTYPDGRVEEGEWKEGNFIGK

SEQ ID NO: 99000 - protein, 274 aa, Unknown
  Obtained from environmental sample
  misc_feature (1)..(274): Xaa is any amino acid
DLFSKWNTEADGSGTDFTGTTAVTESVTIYAIWNQTFYVITFDSNGATFPIPAGERVKTVVLPTTTVTVPVAADNPKRTGYTFGGWNAMADGTGVNFTSATINVSRTQTFYAKWNRNEPADYRQWVAAYFDLEKYNLWDYDSDTPYQLNDFYFHAGGHDTSPYWTAYVNGTLDIQKMYVSPTMSLKPETNPTLVLDFTAKNLPSANDMSFTDFNNAGWWSNCKSYRYIHYKKGYSYGALGGSGTGEFNNIETNGYLRIKRIAGPHLYMGDLQTP

SEQ ID NO: 99001 - protein, 70 aa, Unknown
  Obtained from environmental sample
  misc_feature (1)..(70): Xaa is any amino acid
MNIDKCLCKKYEKKPLKEIAKSPVDAIQGVSENDAKLLKEAFNVKTVADLANLKYVRWAQAICTLAEGEA

SEQ ID NO: 99002 - protein, 88 aa, Unknown
  Obtained from environmental sample
  misc_feature (1)..(88): Xaa is any amino acid
SLVFLRPKTGRTHQLRVHMRFLGHPILGDPVYCCDDKKFKDASLMLHSKKLEILLPGEVKTRVFSSNIPERFLKIIEKLDMEVSANGK

SEQ ID NO: 99003 - protein, 171 aa, Unknown
  Obtained from environmental sample
  DOMAIN (14)...(170): RNA pseudouridylate synthase
  misc_feature (1)..(171): Xaa is any amino acid
MENNVPFIVDETDDFAVVFKPSKMHSDKLKKKEGGTLLEWLVSQSSPVYSIMHRLDFETHGLVLFAKNVKSYEFFKALQENDGFIKEYSAVCNSNVNKNTSSGDSTGQGFPQPPGLNMENYNFSIGKPLVIESYFRPFGTGRKLVRPVTEIKNRFEIAKDKGNFYRTEIIN

SEQ ID NO: 99004 - protein, 101 aa, Unknown
  Obtained from environmental sample
  DOMAIN (1)...(100): YicC-like family, N-terminal region
  misc_feature (1)..(101): Xaa is any amino acid
MISMTGYAYCEKNGENFSASVEIKGYNNRYLEIYVNLPSWLSALEMKIRSLVSSVCGRGKIEIHARVHEHNAPVKIDVNIITAKAYYDAITVLKDKLVSKR

SEQ ID NO: 99005 - protein, 171 aa, Unknown
  Obtained from environmental sample
  DOMAIN (13)...(101): Mur ligase family, glutamate ligase domain
  misc_feature (1)..(171): Xaa is any amino acid
KSIKNALDNFKSTKRRCEILGKAGGILFIDDYGHHPTAIKTTLDGIKSFYPSCRLVVSFMSHTYTRTSALINEFASAFGDADILFLHKIYASARENYKGGVDGRILFEKASAVRSGETYYIDEPDDAFAPLCEILRNGDIFITLGAGNNWPLGEKLFTHFKMTSGAEVHHD

SEQ ID NO: 99006 - protein, 262 aa, Unknown
  Obtained from environmental sample
  misc_feature (1)..(262): Xaa is any amino acid
MPLARKALDEAGFPQVPIVTTDIKDSKNAHPGRRFTEITFIKGILGMIQTDALEFLRRRIRPYELQKGETDKVVENAFDEICEGLAKRGIPGSNAAFKKAINDLCAVRYDRSKLRDRVFIQGEYYLTFHPGSNFEIENYLEKNGMEVILPRMNTVYRHLFLQHALAEMDEFNVRLPLYDNLFARIGYKVMDIIEKYVDRIASKHPLYEPEISLEEAAKYSDDIIHHSILSGESFLIAAHTLHHAEKGIRSFIILQPFGCLPN

SEQ ID NO: 99007 - protein, 163 aa, Unknown
  Obtained from environmental sample
  misc_feature (1)..(163): Xaa is any amino acid
MSTKQHIVDLYDTTLRDGNQALGISLSLKDKLMIAEKLNELGMRYIEGGWPNPTNTVDTEFYAKVKKMKLKAKIAAFGSTKRPGNKVKDDPFMQALTTTGAPVATIFGKSWDLHVKKVINTTLDENLLMINESIHFLKKHFDEVVYDAEHFFDGYKSNHEYAI

SEQ ID NO: 99008 - protein, 180 aa, Unknown
  Obtained from environmental sample
  DOMAIN (55)...(180): ATPase family associated with various cellular activities (AAA)
  misc_feature (1)..(180): Xaa is any amino acid
MTTNADAIPNTANDAQTAKDLAAAVSAIKSEIGRRVVGQTEVVDDLLACFLAGGHCLLTGVPGLAKTMLVQSLARCLDLGFNRIQFTPDLMPSDITGSEILMEDRASGRREFRFVQGPIFSNIVLADEINRTPPKTQSALLQAMQEQEVTSSGTTHALPRPFWVLATQNPIEQEGTYPLP

SEQ ID NO: 99009 - protein, 259 aa, Unknown
  Obtained from environmental sample
  DOMAIN (57)...(222): Radical SAM superfamily
  misc_feature (1)..(259): Xaa is any amino acid
EKSGRAALAAHAILGASAPENAVTASDGTKKYLFHTIDGHFVESVYIPEEDRATLCVSTQAGCRMGCRFCMTARQGLGAQLGAADILNQYYSLPEREEISNIVYMGMGEPLDNTDAVLASIAALTAPWGMAMSPRRITVSTCGILAGLERLLAETEVHVALSLHNPFDAERARLMPIARREPLEPIFALLKRYNWRGQRRLTLEYILFEGYNDGEDHRKQLVRLTSGLGSARVNLLAWNALPAQPGRAPAQKSDLPLSL

SEQ ID NO: 99010 - protein, 87 aa, Unknown
  Obtained from environmental sample
  misc_feature (1)..(87): Xaa is any amino acid
MAKSEKLLKRLLSSPKDFTFDELDTLLTGFGFKLSNAGNTSGSAVRFINKNTGQIIRLHKPHPSPVIKQYMIKLIIDELKKGGYLNG

SEQ ID NO: 99011 - protein, 232 aa, Unknown
  Obtained from environmental sample
  DOMAIN (28)...(232): ABC transporter
  misc_feature (1)..(232): Xaa is any amino acid
MLASLNHAHLSFGPLEVLKDITWVLEEGEAWGVIGRNGAGKSTLFKLLLGQLEPDKGTVVRPTRERSVRLGYYSQDLEPATDGDMLEEALSAFGNVEQLAHEMRQLEHAMAEPGIELDPIMARYQAAQEAFERLDGFSIRARAESILFNLGFSKEMLEKNVRELSGGQKCRVMLAKAILQGQDLLLLDEPTNHLDLPSLRWLEDFVQNSSATVAVISHDRYFLDSVATSILE

SEQ ID NO: 99012 - protein, 178 aa, Unknown
  Obtained from environmental sample
  misc_feature (1)..(178): Xaa is any amino acid
MIDFHVHITPPEISANWLKYAEKEPYFALLSNAPYNRFANAEDIIAALDESGFDHAVVFGFAFRDLGLCRVANDYVIEKVRQFPERLSGFISVSPNAAGMEQEIDRCHRAGLKGVGELYPDGQGLAIDDEQETRALTGVCRELNIPLIVHTNEPVGHSYTGKNKIGLEKIERFIEHSQ

SEQ ID NO: 99013 - protein, 96 aa, Unknown
  Obtained from environmental sample
  misc_feature (1)..(96): Xaa is any amino acid
MEMNMINKYRVRFEELQEQLIMLENTKHKDTGYFNTATDYVNNELLNEWRVKVKNLIVNACGKESEHYKDFIESEKPVSYGTNYDKLLRMKAVFNA

SEQ ID NO: 99014 - protein, 202 aa, Unknown
  Obtained from environmental sample
  DOMAIN (5)...(58): TRAM domain
  misc_feature (1)..(202): Xaa is any amino acid
MAADDVIKIRLESIAPGGDALGRLDGKPLFVEGGAPDETVLCRIIEEHKTWARAELLEIAEPSPVRVKSVCPFYGKCGGCSLQHIEYNAQLAVKAAILKDSFLRIGGFEINELPQLEIVPSVPLEYRNRMQFHCLREKAKNDSRIFGLMGRRSGEIIAVTDCPVAENGIRKLLQEGRNLPLPPEKDRFTVFSCDGIFLSENG

SEQ ID NO: 99015 - protein, 98 aa, Unknown
  Obtained from environmental sample
  misc_feature (1)..(98): Xaa is any amino acid
MAAPQKPLALVFMGTPLFAAKVLERLLAWEGGEVRGVWCRPDRPAGRGNRLTPPAVKLPAQSYGLPVHQPEHFKTVESRDELAACAPDVLVTAAYGLV

SEQ ID NO: 99016 - protein, 221 aa, Unknown
  Obtained from environmental sample
  DOMAIN (16)...(221): Arginase family
  misc_feature (1)..(221): Xaa is any amino acid
VTPAFLASEYAPAAPEKALFHIIPAPLEHTVSYGAGAARGPAAILEASQQLEAWDGYSCPGALGIHTAGAVDCSGNIETALKHIAQSTHEALAHNALPVLLGGEHSATLGALLALKERHGHFGIVQIDAHADLRPHYQGSKYSHASVMRRATEDLGLRLAQFGVRELCLEEVQARREFNVSFLDAPELVRGGLPATPLPGDFPETVYVSFDVDGLDPACIP

SEQ ID NO: 99017 - protein, 128 aa, Unknown
  Obtained from environmental sample
  misc_feature (1)..(128): Xaa is any amino acid
YVPYTSLESVIEANKESYYLALRQSQGTIRTDISNWQPWLLFFLRSLVEQTRRLEKKIEREKIVLAALPSQSLQIIEFAHEHGRVTMAEAIKLTGASRNTLKQHFRSLVERKHLEQHGSGRGAWYGLK

SEQ ID NO: 99018 - protein, 286 aa, Unknown
  Obtained from environmental sample
  misc_feature (1)..(286): Xaa is any amino acid
MAAQFYDKYKQIKEDSEKHKIRLEINSDNIQQGEAKHIFYNNASERESLIFDFIMDSCRIKFSIMPYKPNSLKMETDTMRVEGLELFDIYKNDDQEEQEIDLENDEIKQFLNTSSSLKDIRYLGPFRDSLQFSSKKDDKYVNSDGSNTFAVLRNLYTTNQDFPYCLPADIKKKKYDYKDTSQFRHTFDCWLKYCELADTFKIDNNELLFNIDGRYYTLQQLGSGFSQILPIFGMCIPAPINSTIIIKEPEVHFHPKIQSRLADFFLNIALSGRQCLIETHSEYLIY

SEQ ID NO: 99019 - protein, 73 aa, Unknown; identical to SEQ ID NO: 98726
  Obtained from environmental sample
  misc_feature (1)..(73): Xaa is any amino acid

SEQ ID NO: 99020 - protein, 179 aa, Unknown
  Obtained from environmental sample
  misc_feature (1)..(179): Xaa is any amino acid
LPAQDPVITTQPASTTIAPNAAMPALSVAATGNGTLSYQWEKADSAAGPWTNVGTNSTTFTPADSTADAKIYYYRVTVSNVKDGVTKTTVSNTAVVTIVAANEVFVTFDVNGGTPSIASKTVQKNAALGAITTVTRAGYIFDGWWDYTGLNVEEYTAASIVKDAVTLTAKWVTPFEDGK

SEQ ID NO: 99021 - protein, 258 aa, Unknown
  Obtained from environmental sample
  DOMAIN (3)...(223): Amino acid kinase family
  misc_feature (1)..(258): Xaa is any amino acid
NCGHRGPTQKRGKPFSKTAERKAAIADISGLLSELNRILEGIALLGELSARTLDLVMSFGERLSATLIARIFRANGMEAAFLDTRTLIVTDDRFGNAQYIPPQTHDNIRSFFYKQEKKAKVPIYIATGFIASTKEGQTTTLGRGGSDLTAAIFGAALEVEEVEIWTDVDGIHTADPKLVKNSFRINEMLYAEAMEISHFGAKVLFPPTIRPALEKGIPISIRNTFNPAGEGTRIVNEAAEGEYPIRGISSISRIALLR

SEQ ID NO: 99022 - protein, 279 aa, Unknown
  Obtained from environmental sample
  DOMAIN (225)...(279): 60Kd inner membrane protein
  misc_feature (1)..(279): Xaa is any amino acid
LFYVNRVSEYSVEFYRDFSIPGNEAAQFRLTKRYDFKPRDYMFELTISLDGGYTVPGFNFGGSAYTLSFGPQIGPQFEKLDNRYDYRQYITFNNGKRKTEKAGESAIINSNPKWAAISGKYFTCIAIPLLAQYDINFSEKPEPGIASASRLNIIRPVLNSPRAIDIYRFYLGPKNQEALNVYNNGNNGFGLTDMQLVEVANTRGILSPLENILKWLLLIFYGLIPNYGIAIILLTLLVKILFFPLTKKSSEATLRMQSVAPKIKELQEKYKDNRQKLNV

SEQ ID NO: 99023 - protein, 85 aa, Unknown
  Obtained from environmental sample
  misc_feature (1)..(85): Xaa is any amino acid
MVIRPWLKEISVIPRFEYAGSRYGDMLGDEKLPGYFLLHLKIKADIGAYVSVSAAVNNILDTSYELRRYSPQEGRSFHFTLECHY

SEQ ID NO: 99024 - protein, 259 aa, Unknown
  Obtained from environmental sample
  DOMAIN (18)...(211): Calcineurin-like phosphoesterase
  misc_feature (1)..(259): Xaa is any amino acid
YSPLYTFKTEDTNSSNDFSVIHITDPQIGTADKNKIDAEAWKQVIETAIAKFPDAAFVVDTGDVVDDVKETRIPFYFDYAQEILAKYAFVYSLGNNDSLDWYDRYFYITGNRNNDDSGVLYSFDYGNTHFISINVKFGSSDDDVDSDVPLSAEQMTWLKNDLENTSKKWKAVMTHKPDFGRKSKGDAKTEVTKLFDQYNVNLVMAGHYHFYARSKPIDWAGDDKKNGTVWTIPNAVGTKFNGVSGRTYWLGTNNQNCPC

SEQ ID NO: 99025 - protein, 216 aa, Unknown
  Obtained from environmental sample
  misc_feature (1)..(216): Xaa is any amino acid
MQNVTAKVNGAVKPDMDPKAAEEAKNQALQAAVQEMNASTGLNCSPVRLYQGGEFWVYGYETFDDVRLVAAPELQAAAFGGDYDNFTYPRHDLDFTLFRIYKDGKPYNPMHFLKWSVEGLKDGDLTFVVGHPGSTARGWTYGQMINARDVTSPVSIKNSERSRSVLLEYGRKSPENMRAIQTQLLGIENSLKATKGYYAGLLDVEAMKQVKAKEDE

SEQ ID NO: 99026 - protein, 274 aa, Unknown
  Obtained from environmental sample
  DOMAIN (59)...(137): OB-fold nucleic acid binding domain
  misc_feature (1)..(274): Xaa is any amino acid
MFENFPEISRLEKLKIEKQLIGFYFSGHPMDEYRDLWEKTVKINLGHLAALNTIEPGNQILVGIIKTIRTVNSKSGKMAYITIADYNGEIDMIFFSHVWEAWQGRIQEDQIAIVKGRIDYQKDRDKYSFIAEGLLDSREVETAIAEEDALRRKREKFHSTWLYMADLKSGGLANAGKGTYTVIGQLISLKETKDKNGDDMAFGTLRDFEGDIELVFWARTWKENRELLSPDEFVALKGSLDPERDRNPRKPSLKVSKVDDLAALTRSAARKAGA

SEQ ID NO: 99027 - protein, 235 aa, Unknown
  Obtained from environmental sample
  misc_feature (1)..(235): Xaa is any amino acid
MILSNLKNCSIVLASVLGLAFVGCGGPSGTDAGSPPKDIPAQAGAPVQYDFYTPATEADLKKDTNYGYLIARVRPLFSESVFKNLGLEIVGKIPSAGATFYYLNKTNKAGDVLKTMHDLRKYSGVMYVEPDIKYQLHDVNTNPITFDNPDPNLVNKMLWAPYVTQAKDAWEQYGFGDFKPVVASVDSGVRYRHEDLRDVVKHAYSWFTEDGTEWHSSAPNSNYYIWDPVTGRPRA

SEQ ID NO: 99028 - protein, 267 aa, Unknown
  Obtained from environmental sample
  misc_feature (1)..(267): Xaa is any amino acid
KKNYGDTDVAKTALPMFIEKLEVCRDLFHGFDYSGFMSEAATDLVRVNAIRDGVNFLTEVKPAKPKLVADRVLPYYEEAAESSDVAYGESSRKSKPPNKVEPLSKKDAFIKEAMLLRQALSLCRSLLTPAQRFEAAYFEAVRILLTRIIGEGTPISLRDINNRINELLKASIKSEGVINLFSDLEFSIFDPKFLEEIAKMKEKNLALEILRKLLAEQVSKYRRTNLVKSEKFSERMQQCMKSYLFGLISNEEVIEELIKMAKEMADA

SEQ ID NO: 99029 - protein, 245 aa, Unknown
  Obtained from environmental sample
  misc_feature (1)..(245): Xaa is any amino acid
MDKQSPDVRRYLAQRAELLGAVRLPNNAFKANAGTEVTTDIIFLQRRERQVDIDADWIHRGTLENGIPVNSYFAEHPEQILGEMRRGNKLYGDDNSTSCYPIEGTNFAEDLRRALSSIEGRITEPSFDDMPEISATNSIAADPSVRNFSFAVIDNTVYFRKDSIMTPVDKPVKTLERLKDMVSLRDCARELIDYQLNNYSETDITAKRRELNDRYDVFTQKHGLINDAANKRAFKEDTGYYLLSA

SEQ ID NO: 99030 - protein, 263 aa, Unknown
  Obtained from environmental sample
  misc_feature (1)..(263): Xaa is any amino acid
SVARMLYGGNTLLAHEVGAGKTYSMIAAAMEGKRLGLCNKSLIAVPKHLTEQFGSDFLKLYPAANILVATAKDFEPGNRKKFCARIATGDYDAIIIGHTQLEKLPLSQERQAKILREQIRDITDGIAELKESRGDRFTIKDMEKVKASLKEKLNSMLAEEKKDDVVTFEQLGCDKLFVDEAHGFKNLYLHTKMRNVAGIAQTKADKSLDLFMKCRYMDEITNGKGVVFSTGTPISNSMTETYTMQRYLQYDALEKPGIEALDA

SEQ ID NO: 99031 - protein, 236 aa, Unknown
  Obtained from environmental sample
  misc_feature (1)..(236): Xaa is any amino acid
MLFEAMQEPKNFEHLDGLCEIYFDKPQIAITQQQDILTPFLIAQYLQILKRIVQKGLKKTYYPVVQNLESKIKGKILVNQTLKTNIFKNRLTKNICKYDEFGYNGEENKILKMALLFSQRVISSYEFKNERDNINNVLNYINPAFENVSDDILVEKIKHFKPNPMYKEYGQALKLALLILKRFSYNITETENNDETKLTPPYWIDMAKLFELYVFKKLRDIFPNENEVIYHKKAHY

SEQ ID NO: 99032 - protein, 161 aa, Unknown
  Obtained from environmental sample
  DOMAIN (53)...(87): Ankyrin repeat
  misc_feature (1)..(161): Xaa is any amino acid
MVLLIAMVTVGGISAQESDCDRLFLKAVRENKIADVELHLSHSWGNLNAQDGAGKTGLMYAIEAGNVTFVEYLLNPPAKANLHNPNNAVSNPNLEDRNGKTALIYAVERRNPVILRILLSNRSVTVDYIPIRDAKQWTALHYAVETGWDEGVQLLLDKGAN

SEQ ID NO: 99033 - protein, 260 aa, Unknown
  Obtained from environmental sample
  DOMAIN (9)...(164): GTPase of unknown function
  misc_feature (1)..(260): Xaa is any amino acid
GRGRPNRQLIIPVVGEFSAGKTSLLNAVTDGKQLETGITPTTAVVFEIYFSQPKIEAVVVNKDGSERRVENISSLSNAGLKDASLVRIYDTSSKIPGSVILADTPGLSSLDPAHQRALTEYLPKSDAVFMVTDANQGVTRSMTDFINTAEIARRRIYAVVTKTDTKSASELQEVTAYLQKNTKMPLKRIVSVAAKKGEVDAFIGLIGEIQREKNKIVEEIFESQIAGVKSELAEYVDQILENSKLSTKEIDGKISETNRT

SEQ ID NO: 99034 - protein, 265 aa, Unknown
  Obtained from environmental sample
  misc_feature (1)..(265): Xaa is any amino acid
KRVLVFEVASRPIGLPVQADGKAWWRKGDSLVPMPPEVMRKIFSESGHDFSGDICPDITIQDLDANAIEVFRSKWEEKSGNKRIKSISAKQLLSDCGAITDNGITYAALILFGSNSAIGRFLPQTEIIFEYRSSDASGPAQHRVEFRAGFFSCYDNIWELINLRNDKQHYQDGLFVFDIPTFNERVVREALLNAISHRNYQLSGSVFLRQYNDRLIIESPGGFPIGVTLDNILDRQSPRNRRIAEILALCGLVERSGQGMNLIYE

SEQ ID NO: 99035 - protein, 263 aa, Unknown
  Obtained from environmental sample
  DOMAIN (22)...(223): Trypsin
  misc_feature (1)..(263): Xaa is any amino acid
MISQGFHPDIITFLRKLKSEFDKRGYNAQARSLENFMKGDSGTGFLYVGSDGKNYILTNYHVISQAYTLSITFETQDGEKTKFSDLRIVGADEDMDIALLAFAGGQNPFKDGLSLLSRPVEEGEDVYSAGFPGTVTGSAMIWQLGRGIISNASVRLPIEDDKMIGPFIQHTAQVDPGNSGGPLLVQVRGVPTGYAVAGINTFKLLGRQAANYSIPTSRIRSFLDTSLKPPAADQRPILEERVNAFIKDLSAPKAIYPHIAQFL

SEQ ID NO: 99036 - protein, 267 aa, Unknown
  Obtained from environmental sample
  misc_feature (1)..(267): Xaa is any amino acid
AKLSAGRRNRFFTIFREQRSNLWYIRSSKDIAERGLFAALNGYETQVFLDIQEKEDAPDAQPGSWKTRWASLNYELNGRGVKSLEETLLDIFLKEIYSPVREILSKDRLEALAKTFAAKSKKSQDASLELIESFKEPIKNFEAAVKKYLDGADGKFEPLGKSGLKSGGLNSDEKKSSGKTKSKAATVKNPNSDPFSEWSSFFENLLALAETSDKKEHKFLYGLKKNITDQPAMLLMALGYNTLTLLRSILNGIDGVDDNSGKEAAAL

SEQ ID NO: 99037 - protein, 66 aa, Unknown
  Obtained from environmental sample
  misc_feature (1)..(66): Xaa is any amino acid
MKALPVGTQIFETIVKENLLYVDKTQRIYEIISNHSSSQYFLSRPRRFGKTLLCWTFHELFCGRKE

SEQ ID NO: 99038 - protein, 63 aa, Unknown
  Obtained from environmental sample
  misc_feature (1)..(63): Xaa is any amino acid
LRETNHPLAQAVQWLLKIVVWFKHNTKSWQYSSVRVHDSVAVNKDGSVTIKPLDGLTPEVIEG

SEQ ID NO: 99039 - protein, 65 aa, Unknown
  Obtained from environmental sample
  misc_feature (1)..(65): Xaa is any amino acid
MGMKHRVNSAVYVTYGSISPQLAEKTGFSDADAEKIKAALTTLFEGDESSARPSGSMAIKNSGLV

SEQ ID NO: 99040 - protein, 176 aa, Unknown
  Obtained from environmental sample
  DOMAIN (7)...(106): Mur ligase family, catalytic domain
  misc_feature (1)..(176): Xaa is any amino acid
MFRRKRHIHFVGIGGIGMCGLAEVLLNLGHQVSGSDLKSSDITRRLAEMGAEITIGHSGFNVRGAEVVVVSSAVPGDNPEVVAARRDLIPVIPRAEMLAELMRLKYAVTVAGSHGKTTTTSLVGTVLTRAGLDPTLVIGGRLNHLGVGARLGQGELMVAEADESDGSFLILSPTIA

SEQ ID NO: 99041 - protein, 262 aa, Unknown
  Obtained from environmental sample
  DOMAIN (1)...(261): EPSP synthase (3-phosphoshikimate 1-carboxyvinyltransferase)
  misc_feature (1)..(262): Xaa is any amino acid
SGTIKASGNKNAALPCIAAALLTDEPVVLRNIPDIEDVQVMLAVYRSLGGKSESIGPNTWRLSTGNIGSSEIPAEHAVKIRASILFAGPLLARTGRAVLPPPGGDVIGRRRLDTHFLALTELGAQVEVKDTFVFSSPGLKGADIFLDEASVTATENAVMAAALANGETILTNAASEPHVQDLCRMLCAMGARIEGIGSNILTINGAEKLHGCEFTIGADFMEVGSFIGLAAATGGELYIEGTRPSDLRPAKTAFGKLGIVWK

SEQ ID NO: 99042 - protein, 255 aa, Unknown
  Obtained from environmental sample
  DOMAIN (1)...(254): Aconitase family (aconitate hydratase)
  misc_feature (1)..(255): Xaa is any amino acid
LCAVGGTINEDDHLYGLSAAKKYGGDFLPPHMAVIHQYVREMIAGCGTMILGSDSHTRYGALGCMGIGEGGPELANHLLGRGYALASMPEVAAVWLEGAPQPGVGPLDVALSLIKAVFADGLAKNSVLEFLGPGVENLSVDYRLGIDVMTTETACLSSIWRTDEKVRQWLAVHHREADYRELKPADGACYARALRMDLSRVQPMIALPFHPSNAWPIEEFLENAEDLLAGIEKEAQAVSGCAAGSLRSKLRNGGF

SEQ ID NO: 99043 - protein, 270 aa, Unknown
  Obtained from environmental sample
  DOMAIN (2)...(220): HMGL-like
  misc_feature (1)..(270): Xaa is any amino acid
RCLSQVTGWIRAAKEDLRLAKDMEFKEVGILTSVSDYHIFLKLGWDRRKAFDQYVAMAAQALEWGISPRCHFEDLTRADIQGFCLPLAAKLMELAKGSGLPVKIRLCDTMGYGVPYPGAALPRSVPRLVRAFTDEAGVPGECLEWHGHNDLHKVLVNGVTAWLYGCGGVNCTLLGFGERTGNSPLEAMVIEYISLTGNDDAANPKVINEIGRYFETALDYRIPDNYPLMGRDFNATSAGIHVDGLAKNEEIYNIFDTKAILGRDVPIIIT

SEQ ID NO: 99044 - protein, 152 aa, Unknown
  Obtained from environmental sample
  DOMAIN (1)...(147): Calcineurin-like phosphoesterase
  misc_feature (1)..(152): Xaa is any amino acid
VKIIAISDIHDNYSAIKDLGKEFSDADLIIISGDITHFGKEKDAKKIICEFEQYNKKIMAVSGNCDKKGVEEYLIKKDISLHKKIKNIPDLNLTITGFGGSITTPVPTPNTSPESDYKKYLEAIEISPDIFVVHQPPLNTIADIVPSGGGKH

SEQ ID NO: 99045 - protein, 246 aa, Unknown
  Obtained from environmental sample
  misc_feature (1)..(246): Xaa is any amino acid
LQWKKIAPVIGIDEGGGYRDYFDFLIDILIPEGFEPPPANITSCCLLDLPQKIKSEQDAKNSNLKILITFGQEDAAGLGLSAIKKLAQMNLKEAEITLLKGGLNNSKLPIPGNVKVLDSIPNLADHLYEYDIVITHYGITAYEALCAGVKVFLDHPTTYHKKIARAAGFSDINQIKNLTTNITNHTNQREQQQAFGQQHINNCSRPTSIHESLAHPSSFAPCSCGSWSKPKEKSLLNLINSFSPQV

SEQ ID NO: 99046 - protein, 102 aa, Unknown
  Obtained from environmental sample
  misc_feature (1)..(102): Xaa is any amino acid
VSALLEVRDLKKYFITPHGPLHAVDGVSFTIDKGKTLGVVGESGCGKSTLGRVILHLLKATGGQELFDGKDITNIEKGELKKLRQDMQIIFQDPYSLINPRM

SEQ ID NO: 99047 - protein, 265 aa, Unknown
  Obtained from environmental sample
  DOMAIN (86)...(265): metallopeptidase family M24
  misc_feature (1)..(265): Xaa is any amino acid
VTEVLPYDKSLGEILPPVLKRIASRNVALNISQTDPIADGLSYGLYLTLEDMIGRERLREIEVSSEQIIQELRSVKTPSEIGCLRRCIQVTNDIYDEVFQKIVCGMSEKEIGDLFIGAMQRRGVCNGLGKPFDYPIVCLVRAGLAHRGPGDTKSVPGDIVIMDFSVRSEGYVSDIARTGYFLSDGESKAPAEVQHAFETTRKAITAVIEFIGAGKRGWEVDAVGRKVVEEGGYPTVRHSVGHPIGRECHDSGTRLGPLKEKGIPV

SEQ ID NO: 99048 - protein, 259 aa, Unknown
  Obtained from environmental sample
  misc_feature (1)..(259): Xaa is any amino acid
DTIKGLLQEYGVVAISMQMDTNAKYYNSSNRAFRMVQSGTTSTNHGVNIVGWDDTFSRTKFPADNQPTVDGAWIIRNSWGTSWHDAGYFYMSYDTTIISIGVYIGTEGADAKTYQHDMFWRQGGIGYGSDTVWFSNIFTANGNHSIKAVAFGATQPGATYEISVRKGVGATPTTGGTLVLDRQSGSLGVPGYNRISLNSPISVSAGERFAIIVKLTDPGYTYPAGYSCATPNWKTENATATPGVGFISFSGLSWSDITN

SEQ ID NO: 99049 - protein, 255 aa, Unknown
  Obtained from environmental sample
  DOMAIN (1)...(255): Dihydrouridine synthase (Dus)
  misc_feature (1)..(255): Xaa is any amino acid
MAGITNSAFRRLVADFGGYGALYTEMLSGAAFLHENALQSPFTKWREEERHVICQFHLSGREDVEGIFAKAQEMGYLAIDINLGCPAPEIQRMGCGVALFRDFERLKSLLIKIRRVYHGPLTAKCRLGDTENWRGPFKERLSLLEDNGICALTVHPRLSTERLKRRAKWEEFPWIVSMTKMTIIGNGDICSPSDVDAAPNCFGPLSGLMLGRIASIKPWAFREFAGIEFMPIDYVEVWTRHYEYTMEDLPPEKAI

SEQ ID NO: 99050 - protein, 93 aa, Unknown
  Obtained from environmental sample
  misc_feature (1)..(93): Xaa is any amino acid
MWVADMDFATPPCVIDALVARAKHGIYGYSEPDAEFFSVVQKWFRERFDWNVERKWLIATPGVVSALYIAVRALTEPGENVLIQQPVYPPFES

SEQ ID NO: 99051 - protein, 266 aa, Unknown
  Obtained from environmental sample
  misc_feature (1)..(266): Xaa is any amino acid
FFDINIDGIPYRLGESRVFSTRVDRENDEPVVIYDSDFLTVKTSFTPVKTSNSPNANGIRVTIQIFNNSEKEHEAGLRLLIDTTLGEGRKNIPFVTENFNIKKEKIIESSSEEKFWISRGKDISLMGSIVDPTDDTAARPDYLHFANWKKLSDVPWKASYHEGRSFNKLPYSIDDSAVSYYWNPVALEPGRVLTYTVYLTTEDAAWYQQPKSYAVPVRPSPPKPAPVIEEIIPELTPELAALVSAVEEEQLIAAENNIAVIEKEAK

SEQ ID NO: 99052 - protein, 231 aa, Unknown
  Obtained from environmental sample
  misc_feature (1)..(231): Xaa is any amino acid
MVIFAVEKYLKRGDNIKAMNEFIVCSTRSMHNYASNVISCLSQYLSFIKISEQINGVELLHTDRFADGETEVTVNSSIRGKDVIIFSSSARNEAGICVDEAKNELYHAVDALKRAQAHKIIVFEPYISCSRSDRTTRRSSVGLWVHLKTLSGLGAKHIVTFQLHSDKSQTMVDPAVSAIDNIPALTLLEQYLCDNYIKTKEKLENEVQNNWAFCSADAGGEKLARTFANSF

SEQ ID NO: 99053 - protein, 162 aa, Unknown
  Obtained from environmental sample
  misc_feature (1)..(162): Xaa is any amino acid
MKPIAELTAREAKGVRYFLMDIDDTLTTQGKLLSSSYSALWKLKEAGLKVIPVTGRPAGWCDLIAREWPVDGVVGENGALVFWEEQGQALRRVYHHNAVKNDHSVLAKIKEKAFVEFPALRLAKDQFARLFDVALDFAEEDPVLPLSAAQRIREIAEEEGAV

SEQ ID NO: 99054 - protein, 239 aa, Unknown
  Obtained from environmental sample
  DOMAIN (48)...(202): Poly A polymerase family
  misc_feature (1)..(239): Xaa is any amino acid
MGAPSPSDIDIATNAAPADIRRLFGRTVGVGEQFGVMIVLEGGTSFEVATFRADVGAGDGRHPESVVYTDAENDALRRDFTINGMFYDPISEKVIDYVGGRDGINARIIKAIGDPEQRFREDYLRMLRAVRFAARFGFDIEERTFTAIRGNASRITAISAERIYAEMCKALTGPNPHRCVKLLHDTDLLKHFLPETENLRGVEQPAQFHPEGDVFVHTMKALSLLPENPSLALAWATLL

SEQ ID NO: 99055 - protein, 258 aa, Unknown
  Obtained from environmental sample
  misc_feature (1)..(258): Xaa is any amino acid
TNLGVMTSSASGWKQLLTSIESTGAYINLDLSACTMSGTSFNPDPTVETGKKYIVSIILPAVATSIEARQSLLIDSTFENFSNLMSVSGDNIITIGKYSFCNNSKLKSVNFPKVTTIDEGAFYRCGLENVNFPLAQTIGVDAFRYCSSLESISFPASAELGLSSGSYSNPFTNCYKLTFNLIGTDSLSVIENGKALVQNNTILVAYPSASGNITMNSITALGVKVFYGCSELTDISFPQVTSIGSYAFYGCNNIQDVT

SEQ ID NO: 99056 - protein, 253 aa, Unknown
  Obtained from environmental sample
  DOMAIN (14)...(188): Glycosyl transferase family 2
  misc_feature (1)..(253): Xaa is any amino acid
RKACKTGRQDPKVSLIVPIHNEGRRMNALLESLLKQDYLAEIIFVDDRSNDESPAMLAKFAKDAAEQGMENCKIITLGDNPGPNYKQFALSAGIAQARGDYFLFTDGDCEAPPGWIRAMSRRMGDPETGAVIGPVFKKKQGKGFFSLYQCYDHAVRYNYLAGAIGLGAAGGGFGNNLIVSRAALEAAGGYDAVPVSPTEDAALISLIRSQRKYRVHAIALPDAAVETVAENTWRGFISQTLRWNNGGLSAPSQ

SEQ ID NO: 99057 - protein, 260 aa, Unknown
  Obtained from environmental sample
  DOMAIN (167)...(199): Ankyrin repeat
  misc_feature (1)..(260): Xaa is any amino acid
RRRRKTMLHSVIRNKGIPRHIGIILDKRAIVDARNREGDTALHIAVRMNLREDGEFFISRGASIFSANAAGDSPLYNALTSSGGIRYWIINPNTVNAKDGLGNNMLHYAAGWKLNNAIPAIIQRGVSVESVNATGETPLFMAVKANSPSTIKALLDNRANIKAADSQGYNLLHAAVRWNAVDAVSFLIANGIDINAHSLSGDTALHIAVSLGLTDIDSLLISEGANLEVRNIDGNTPFMEAVRIGLLPTIEKLAANGVDP

SEQ ID NO: 99058 - protein, 187 aa, Unknown
  Obtained from environmental sample
  misc_feature (1)..(187): Xaa is any amino acid
MAMVTRRMKKLSRKTPHGGKGPNFKTVWASLQEIAEMHKEIDRINKEVAESQKETDRIVRRNGKQMGELHRRFGQLAEHLVAPGIAKRFNELGYSFDLVGTKGAKLYDAKTGKIKTEIDLFMENGKYIMAIEVKTRPVTQDVEHHITRLEILQGHYRGIEDQRKILGAIAGAIYEDDVQKAVREAGM

SEQ ID NO: 99059 - protein, 222 aa, Unknown
  Obtained from environmental sample
  misc_feature (1)..(222): Xaa is any amino acid
MKKVCLVVQTKDAKDSLDKLRKIGVVHLENKQASSDDLSKLIDKKNKIDGALGILRPYVEKNKKNKQEIPSSGKNARPQQRRASDFLTPDGVPLSIEAVNCLDRSDLATAVLNFAESRKGLQDRITQLLRERSRIEEWGEFNPGDFSVLAEKGLKIFLYKFSQKNFDALDKDVNYVLLGNDKNSVYLAVLNNEIPGEAPFAIPEHSIKEIDGLVENAQKEIE

SEQ ID NO: 99060 - protein, 120 aa, Unknown
  Obtained from environmental sample
  misc_feature (1)..(120): Xaa is any amino acid
YDWNAAKTACLSGWHLPSRKEWKDLLSAVGSSSTAGKKLKAAPPDWNGTDEYKFSARPGGLRETSFIKIGKDGGWWTATPGSDSRKASYIQYMGYDYGFVIEVECDKNSGISVRCVMDDR

SEQ ID NO: 99061 - protein, 67 aa, Unknown
  Obtained from environmental sample
  misc_feature (1)..(67): Xaa is any amino acid
MPGIDGWNTYDRIRAISGLHDTPIAFFTASNDQKDIKRAKDAGAVDYFKKPFEANDLIYRIGKIIEK

SEQ ID NO: 99062 - protein, 75 aa, Unknown
  Obtained from environmental sample
  misc_feature (1)..(75): Xaa is any amino acid
VGANQHARGRRVSLPILSANTIWRFFHNYFFRREFLDGRYGFIASVLAMAYTFIKYIKLWDLNRLEGLRRKSTAG

SEQ ID NO: 99063 - protein, 125 aa, Unknown
  Obtained from environmental sample
  misc_feature (1)..(125): Xaa is any amino acid
MDIGIACNHFRLVGGMERHALALATAFKEMGHRVTIICRSFDPQLAARTGVIPVRLRNWLPRLWRNTFFSWRVGKAKPRLGLDFLVGCTRVDSADIAMCGGAHLSFMRWMGQPMRAYDRWELTLE

SEQ ID NO: 99064 - protein, 269 aa, Unknown
  Obtained from environmental sample
  misc_feature (1)..(269): Xaa is any amino acid
VSGFPGASDFTGISGFAGASDFSTGFDDIGTQGADFTGGDFGISGDFGFDNYDNFDNGMTAGIEEPGYEINNDPGDGVGSIERDAQEGMSTQLLMKIADELSSIRTELTTLKNEFTGIRAEGGFSGADKSKSGFFSEDDDEKIALSGDEMDNILSSSDLSSIDEEIPLTGDEMENIPFDPLREEDEAALKRLSEQNETSSPEEALSPEEALSPEGDAAPEEIEIDFDNLGVDLNSDTDEQSMDDLRTVETLEGSPLLDDDVALSELTGG

SEQ ID NO: 99065 - protein, 67 aa, Unknown
  Obtained from environmental sample
  misc_feature (1)..(67): Xaa is any amino acid
MLWEDYQKAYAAAIENCSSQIAPWYIVPAERKWFRNLLITKVLVETMESMDLRYPEAKFDPKTIVIP

SEQ ID NO: 99066 - protein, 67 aa, Unknown
  Obtained from environmental sample
  misc_feature (1)..(67): Xaa is any amino acid
MQLSYTYWEVKEGGYVGYLNQYPDYWTQGDSLEELEKMLVSLYGDIMQFDDIHPAVPEHTGLVAVPA

SEQ ID NO: 99067 - protein, 231 aa, Unknown
  Obtained from environmental sample
  misc_feature (1)..(231): Xaa is any amino acid
LGNFRFTTQHCSLGWRVLRLSCETLEQKIPLAVFSALVPASGTTVSWQREIVEGEEGIFSVYTIDTDGIKEIEFFVYGAIFTGLDTSQDRTDSPAQAAENQVNAALKEGWDGLLKRHKDHWDKIWRTVDVVIEGDEYAQRCLRYSLYHLWIIAPRHCEMTGRALSIPARGLSGQTYKGAVFWDTEMFIAPYFLVVRPELAAQFIRYRIHTLPGAKRKAAEYGYRGAFFAWE

SEQ ID NO: 99068 - protein, 243 aa, Unknown
  Obtained from environmental sample
  misc_feature (1)..(243): Xaa is any amino acid
MRQIIRNNKGDELMRMLENERIELSAFVNNEIAFAVKMAESPLIRRYIEDPSDSEFGRVAVEELKSYRNAVQSASVFWVSDKDKKFHMDDNAPYVVDPEAPENYWYKMTLYETKEYNFNINHNPDLNVTNLWVNAPVFNAERTKPLGMVGMGVDVTAFIEKLYDRHVGRADIRYFNAGGEITGSRDVGHVVAKKRVEDVLGAVGADALNRARKLSEGEIVTYDTKSGTAAVCAVPALGWYAMT

SEQ ID NO: 99069 - protein, 64 aa, Unknown
  Obtained from environmental sample
  misc_feature (1)..(64): Xaa is any amino acid
MADGIAEKLARIEEKIEAACARCGRKRQEIRLMGVTKFHGVEVVEAACKAGISLFGESRRSGSN

SEQ ID NO: 99070 - protein, 249 aa, Unknown
  Obtained from environmental sample
  misc_feature (1)..(249): Xaa is any amino acid
MLSGMKPYVALIGIALFLALFAVAFEGLSLWFSASLVQTIFSHEAPVLSKPEYTLSNANDVLKYWTSKAIGSREPLVALQLVCAMMSLSFLFKNVFIYLKGVVMTRLNLSVVRDMRNQLFAHALALPVSYYDRTKSGNVVSLIVNDVSSINNSMTGTFDKIFVEPMRLLFFVCTLFLINYKFTLAIFLIFPVLGYLITLIGRTVRRRSKRVMEHMAALLSILHETVSGVRIVKIFGTQETESAKFKVEN

SEQ ID NO: 99071 - protein, 128 aa, Unknown
  Obtained from environmental sample
  DOMAIN (1)...(128): Fumarase C-terminus
  misc_feature (1)..(128): Xaa is any amino acid
MPTKRPINLTFPIVNKDVLTPLRAGDRVLLSGTVYTARDAAHKRFIKLFEKGKLLPFSLEHQALYYCGPTPPTKTSVIGSAGPTTSSRMDKFTPDMLRKTGLAAMIGKGDRSYEVIEAIKECGAVYMA

SEQ ID NO: 99072 - protein, 208 aa, Unknown
  Obtained from environmental sample
  misc_feature (1)..(208): Xaa is any amino acid
VGSLYGITDNWAGMTYFLLSITNRCNKACGYCVVKQWLNKPEYPDKMKLGDLIAFLEKELHEGDVAELTGGEPTMFPGLEKLLNWLKERGAKAILRTNGLNLGEWRKQYDNLIVVLAKHDSGEGYMSEREKHLLPWDLVLGSIPDDVRQKEPNKPVFIGDETTPRDYPFSKAFFVTNDGKIRFMPCTQRDMGTVWDYKPGGLPLCQGC

SEQ ID NO: 99073 - protein, 243 aa, Unknown
  Obtained from environmental sample
  misc_feature (1)..(243): Xaa is any amino acid
VNITSTTVFFSDVYGGRAVGGDGGDGGSRGTGVYGGITGTAGIGGNADAMRNIVTISDGTTVYGNVYGGHVKGGTGKIDGKVTATYNTVTISDSEVTKNVYGGFIDGAVKGDAFTSNTLNLKGNTKLFNVGNFETINFNNAGNDNKFTLDTTPTGASAGTLVKLNTDGNSINFTGKITGSGGIDKLGTGTLTISGVNNYEGMTEVREGTLALVGSGNISDKLALYGETTFDTGTKNVILSQLN

SEQ ID NO: 99074 - protein, 255 aa, Unknown
  Obtained from environmental sample
  DOMAIN (15)...(251): VWA domain containing CoxE-like protein
  misc_feature (1)..(255): Xaa is any amino acid
MSLNGRIPEKSKETARAVVQAVVDELNKRLAEGLRRAVTGAINRREHSPMPSVSGIDWKRTIERNMKNYNPELKRIVPERYYFFDRSKRRNKWTVILDMDQSGSMADSVVYGSVCGCILAGMNSLKTHVVAFDTEVVDLTEKYGSDPVDMIFGVQLGGGTDINQSVTYCRQFITEPKNTLFILLTDLYEGGNQARLYQQCQELAESGVKMVGLMALSDSGTPSYDERSAKKLASLGVPCFACTPTLLPDMLEAAL

SEQ ID NO: 99075 - protein, 253 aa, Unknown
  Obtained from environmental sample
  DOMAIN (1)...(252): Cell cycle protein
  misc_feature (1)..(253): Xaa is any amino acid
MGILFIYSSGITSAGVQVSDEYIKQIIWTAIGLIIALVLALVDYRRFYNISVYIYLASLLPLLYTLFFMRISHTQTTRWLQIGSFGIQVSEFVKISVIILLARFLADTDRNKDAFSRFLISCIIVFIPMLIVIMQPDLGTALVYIAILITMTFMAGVAMRYVSFMLFSIALTGIFLVLPLWQSYIQKKSIPLLALLTNPKILLIVLIFMFLIAAISLFGYIKFKRNYFYWIVYASAIIVFSLGASYAGRVVLK

SEQ ID NO: 99076 - protein, 268 aa, Unknown
  Obtained from environmental sample
  misc_feature (1)..(268): Xaa is any amino acid
VLDASFIPLRCDKRTEAHPIVIAGGPAVSNPAACSAFVDAFWIGEAEAGFFELASDLAMMKESGKGRGALLEKISAHPNIYVKGKEKALRAIAKDFCADDETAAAVFPVPSMKIVQHHGVVEIMRGCPNGCRFCHAGYWYRPMRQKSSELVEKQVMEMVTKGGWHEISLSSLSSGDYAGIDNLVENLNIKFRNAHVSFQLPSLKVSSFSLSLLEKISVTRKSGLTFAVETPMDAWQMSVNKEVTLDSVTAILNEAKKRGWKTAKFYFM

SEQ ID NO: 99077 - protein, 261 aa, Unknown
  Obtained from environmental sample
  misc_feature (1)..(261): Xaa is any amino acid
YRSLSKAISYLTSSTFTPQGDGKYTLVLSAAENDSDVNAFISSGAITLNKNDLNLTIISSSVAQRTIKSTATSGVFLTLTGNTSLTLKNIVLQGSGNEVDDSLVRVQNGAKLTLGDQSAVRGHKNNTTQGSGTKGNGSAVCVVGATLIMEPGSVVEDNESTGVSNNKNLVGGIYTIESGSTGPTLKITGGQVVNNKSTTGQTTDVYATEGGTFEFGGNVKINEITINGDAANIPTTAANAATAKRTVITITNLGTEAAVKL

SEQ ID NO: 99078 - protein, 75 aa, Unknown
  Obtained from environmental sample
  misc_feature (1)..(75): Xaa is any amino acid
GPDNKSYAVGGEVGIDTAPEDDAGATIIKMQAVRAAALAPSDPSAQDRAVAAAAAGNENLARADLAAEKQNDDEN

SEQ ID NO: 99079 - protein, 146 aa, Unknown
  Obtained from environmental sample
  DOMAIN (40)...(145): CDP-alcohol phosphatidyltransferase
  misc_feature (1)..(146): Xaa is any amino acid
MNLATVLTTSRVVIAPIFAMVFVHGYRSDTTSVSWIYICFGLAVLIELSDMFDGMAARARKQVTDFGKVYDPIADSVSRQTVFISFMYTGIIPLWMYMVFFYRDAFMQLLRIVCASGGYVLAARLSGKIKAVLQGIAAFCMLAVIL

SEQ ID NO: 99080 - protein, 262 aa, Unknown
  Obtained from environmental sample
  misc_feature (1)..(262): Xaa is any amino acid
MMKQIFTLLAAAAVFASCQRKALTVDAVNPTDLERTNETVEIPWATIAERLGEVEPQRVSVFSSEGKQQVVQVLYKGTNEPQSLIFQANIPAQGNAVYVVKKGRAKHNLNVPSKAFGRLVPERKDDFAWENNRIAFRMYGPALMVSDGPSNGIDVWCKRTEELIINRWYKQDLSGEASYHVDHGEGLDCYKVGRTLGCGALAPYINNKLILGDNFVRSNVLDNGPLRISFELMYAPLEVDGSMVAEVRRISLDAYSQLNRIA

SEQ ID NO: 99081 - protein, 205 aa, Unknown
  Obtained from environmental sample
  misc_feature (1)..(205): Xaa is any amino acid
VINVGEYNGIKVEGLCEIQYNAAPSNTVTLEVQPNLREYFAVEVQNGELIVRTTKRINYNSGKAPVLTVSTPALNSLTITGACTFKTIDKIKTDTFYLEVSGAGEGKAELDVNRLKTNMSGAGSFELSGKADNAEISVSGAGELKAFSLQIREASVNFSGAGAIRISCSEKLSVEASGAGMVEYKGSPILISVNTRGPVSFKKVD

SEQ ID NO: 99082 - protein, 50 aa, Unknown
  Obtained from environmental sample
  misc_feature (1)..(50): Xaa is any amino acid
MLTKQDATREVKENILPFWQGLADEENGGFYGETDFFGNPNKTATKGCIL

SEQ ID NO: 99083 - protein, 114 aa, Unknown
  Obtained from environmental sample
  misc_feature (1)..(114): Xaa is any amino acid
CSQGKFISIYESDYEKIKQELDILHFKSADEAWLDFVMLNRRSTYDGKKYDVIYGPVANDTVYRTLIAYENGLLSSAETIARLKVRQLFDQMTFATEKSLAFLKFSGFEEAVDA

SEQ ID NO: 99084 - protein, 79 aa, Unknown
  Obtained from environmental sample
  misc_feature (1)..(79): Xaa is any amino acid
MPDPQFKATLEMLIPLVIREIMKSRNVGESEAFELLYSSFLYSKLETESTKLWHLSQLTLANLLNEEIETGIITFPEEA

SEQ ID NO: 99085 - protein, 264 aa, Unknown
  Obtained from environmental sample
  misc_feature (1)..(264): Xaa is any amino acid
KKDLRYLAHEYLEIHNEPLLFREFLSHMNEVELTYLGDAEPSSMVRHLTNPALQEFFKKHSPGGLAETEQAIDIITGRTFRQSLMVKGSRKTKMNRALTPEFFKNLHIQARLAKTTDQDGQVKYAHQRHGPLNATPPYGTGALDILIELAGMPAPYKLLFDKFVETTQGTEPIFAEILFSLLGMNAIDIFADPYMPELPKGATTLAILDAESGRNVTTNAVGEAIGLDPLQALILPLLKGDWDRDEAIAKLMSMHIKGLFNITP

SEQ ID NO: 99086 - protein, 270 aa, Unknown
  Obtained from environmental sample
  DOMAIN (122)...(270): Glycosyl hydrolase family 10
  misc_feature (1)..(270): Xaa is any amino acid
NVTLTAKWTYKPPAKPVTDFKLGKTSTTLTLYSSEQLTWTFTPPDATYQTITWTSSAPNIASVDANGKITATGVTNSLTDKYATTPATGTATITGTTVEGKSAGITVNTTMVPQVSIETLPAMKDRFKNYFLMGNITKDSGDIAGSGTTATISNARLTRHYNILTAENAMKPSSYGTNAGSLSFTSSDTFVNAVRNSGFKVHAHVLLWHSQNSTWINNHANSTKDVALTAMKKYINDVCTHFKGKIYSWDVLNEVFPDSVKATDDWKTAM

SEQ ID NO: 99087 - protein, 163 aa, Unknown
  Obtained from environmental sample
  DOMAIN (1)...(120): Domain of unknown function (DUF1605)
  misc_feature (1)..(163): Xaa is any amino acid
AQLEEILANLKIPVLEGGGVITGGEDAADYLCCIGMGMIQFVCVREGATKGGGKKHGGSKKNVTYRSLTADRITIHPGSVMFRTDPMYIVAGEIVRTSRMYAMSVSPLSGEIIERLGIGIGTGDWGSGTGEKRKEKRRMKREESHAENAEAQRKRRRKPKKRE

SEQ ID NO: 99088 - protein, 264 aa, Unknown
  Obtained from environmental sample
  misc_feature (1)..(264): Xaa is any amino acid
EAVDRRFARAGTGAVLFGSDSFTRNDPITVKPQDQEALFSSGSRIKDFTVEFWLYPLNLENGEHIMTWAASGLVNGKYAVQRILCASSKNRLQWSFENFFASPNNSSYKDIVFSGDSFVVPKKWSHHLVRFDSVTGMIEYFVDGKSETIVYATSTGHESSEVFTPIVGNGGAFILGGRYKGMMDEFRIHGVCAGRSSVQKYAPAGGRAETSYVDLGCVNSAVLRVDVSGGRTSINGTRISNEFRENGRFRFSDDSEMSFLSVLR

SEQ ID NO: 99089 - protein, 142 aa, Unknown
  Obtained from environmental sample
  DOMAIN (3)...(142): Exonuclease
  misc_feature (1)..(142): Xaa is any amino acid
MDFVVVDIENTSLQPPNNEIIEIGAVRLQKKNGVYKLTERYSRLVKPFHAIPPVVQHLTGITAQTVKDAPRFREIAEEFRDFVGDSIFVAHNALFDLSLIDDSFARLDQPPLGRPCLDTQDMVALAFPAQGSHRLGDLVKNL

SEQ ID NO: 99090 - protein, 86 aa, Unknown
  Obtained from environmental sample
  DOMAIN (9)...(86): Hpt domain
  misc_feature (1)..(86): Xaa is any amino acid
MSQDFMDQELFADFIVEAKEHLETIEPNLLELEKAPGNLALLNDIFRPMHSLKGASGFLGLNRINQLAHRAENILDELRKGTMVVT

SEQ ID NO: 99091 - protein, 250 aa, Unknown
  Obtained from environmental sample
  DOMAIN (82)...(224): Histidine kinase-, DNA gyrase B-, and HSP90-like ATPase
  misc_feature (1)..(250): Xaa is any amino acid
EEGGPGSDVAQIAQNLTETTYGMARISDDLQDTIMKVRMVPVSSVFSRFPRLVRDLSRKSGKEVDLILEGEETELDKSVVEVIGDPLVHLIRNSVDHGIEPEAERIARGKPVKGQVFLRAYHKGNSVAVEIEDDGQGLDPEVLRDVAVRKGLMSADEARQLDDAAARELIFMPGFSSSEKITDISGRGVGMDVVRTNIKNLKGSIGINTEVGKYTRFTLLLPLTLAIIDALMINVAGEVFAIPLDAVPKP

SEQ ID NO: 99092 - protein, 275 aa, Unknown
  Obtained from environmental sample
  DOMAIN (1)...(137): BPG-independent PGAM N-terminus (iPGM_N)
  misc_feature (1)..(275): Xaa is any amino acid
IIDQDLKEFVIAENGKPIGTIEDGDSVVYFNFRGDRALEITAAFEEDKFDKFDRKRRPKVCYSGMMEYDGDLHVPKRYLVSPPSIDRTMGEYLAASGVRTLAISETQKYGHVTYFFNGNRTGKFDDKLENYVEIKSDVIPFEQRPWMKCADITDQVIEAIGSGKYDFIRLNFPNGDMVGHTGIYQAVVCSMEAMDIQLGRLAKAVEEAGAVMVITADHGNSDDMFEHDKKTGNVSRKADGTPKAKTSHSLNPVPCIVYDPEYKGEYVNEPKESCL

SEQ ID NO: 99093 - protein, 296 aa, Unknown
  Obtained from environmental sample
  misc_feature (1)..(296): Xaa is any amino acid
ARAYYKKGQTNQNSRQYFEYTVGAGNTTGTNYLNVTGLYHNGTTYTISTPHSGDAANYPFAWYKEEINGEVTKREAVRLTMQVTDPNNSNKPNDGNSLVGTDPNQYYARTLPTTTNSLDPNGDYQFTLTAAKHIVIDTGAPTITGITSNTPAGDYDAGSDITVTVNFSKPVNLGTPTPYLILNIANSVTQDNGSNTTVRTVTTDGSVTVNNTANTGSITFRYNIKLNDTTSGSSVAITSFGGIINDLANNALASNAFNGRSDTTLTGRYVDAVALTVAPTVRILTEANTAKVVKTP

SEQ ID NO: 99094 - protein, 65 aa, Unknown
  Obtained from environmental sample
  misc_feature (1)..(65): Xaa is any amino acid
LKVVLDTNIIVSALLSPQGLSAKLLNLVFDEKLTIVYDNKIFAEYSEVLNRDKFKLDKELVNLIM

SEQ ID NO: 99095 - protein, 307 aa, Unknown
  Obtained from environmental sample
  misc_feature (1)..(307): Xaa is any amino acid
ADAMLYLAQYAMIGKNGSVKPLKVVFLHDPDQKVPFHIVNESTKKRYLTGGDFDPESFQFTHDAIWIGDEFGPYLIKTDFNGRVQAVFETLVDGKVVKSIDNPTMVMPGSPDGKPDFQVSRSKGFEGMALSKDGTKLYPLLEGALWTGTEYENVGGKRYLRLLEFDLVSEKWTGRSWQYVLEDNQYAIGDFNMIDDTHGLVIERDNGEGTEDKALPPGGSPERYFTNVAKFKRVYRIMFSEANAGRPVEKQAYIDLMNISDPDNLSRVPLNNGKFTFPFFTVECVDVVYNKHSRRGQRQQLSSFVQP

SEQ ID NO: 99096 - protein, 283 aa, Unknown
  Obtained from environmental sample
  misc_feature (1)..(283): Xaa is any amino acid
NIIANMPKIEVNEQVFYTLAGCPGGKSRWKSRDEFEEALVCAKAELDEDSDKSLPEGERTLKIELNDTNRPDLWGTAGCARQLKIYHSGKIPDYEFFSRPGDIKKTARKVKVQASVKQVRPYLAGFVAKGKPISDPLLRDMIQTQEKLAWNFGRKRRTISMGLYRTSLIKWPIIYKGVDPDSVSFVPLQWDVPLTLREILKQHPKGKEYAFIQEHEPIHPLLTDAEGFILSYPPIINSNDLGAVQVGDSEVFVELTGTDIACLNLAASIVACDLADNGFTIEP

SEQ ID NO: 99097 - protein, 300 aa, Unknown
  Obtained from environmental sample
  DOMAIN (13)...(300): Major Facilitator Superfamily
  misc_feature (1)..(300): Xaa is any amino acid
MNELEIRRLNLHGMLIQAVFWFALCTYSAFMVTTLIDYGWSAGAATLAMTGMSIIIMLVQPIYGYICDKYHLEKKLSIFLMAMAVICFFLLPFSLASGSKRIVLINMIGITITGTQIAGLLDAWIVGLKQEFQSINYGLIRGTGSLAYALSAQIAGAVTIAFGHNVRLWLGGGFFIIAVFAARHFRPARRVYHPGDAEKEIRRLSGREAFKLIFSSKQYCLLLGVSFCLLLNNSAMTTLIQLLIRNFGGTTAHIGTTSAVTAVSEVPLMFLMAFIIKKVGVKKLLVFCSAVYAFRMFITA

SEQ ID NO: 99098 - protein, 266 aa, Unknown
  Obtained from environmental sample
  DOMAIN (63)...(266): Respiratory-chain NADH dehydrogenase 51 Kd subunit
  misc_feature (1)..(266): Xaa is any amino acid
LSQYALDDSLGNSPGAPTDGDRVSQKFTEIYGDIEFFKLQKRIAMRNSGVIDPESLDEYVRFGGFKALATCLSKGDPEWVINEVLKSKIRGRGGAGFPTGKKWQIMASQPEKTRYLICNGDEGDPGAFMDRGMLESDPFNVVEGMMVAAYAVGAVKGFYYIRAEYPLAIRRIQNALDLCRANGLLGENVMNSGWSFDLEIRLGAGAFVCGEETALIRSIEGKRGQPKVRPPYPAVKGLWGKPTIINNVETFANITAIINFGGDWFA

SEQ ID NO: 99099 - protein, 259 aa, Unknown
  Obtained from environmental sample
  misc_feature (1)..(259): Xaa is any amino acid
MAGDGNLESAEPTRELIRMASQVHNIPELEELLLETEPERAMETLRQSSYSDFLKCVEQYIHKYGFRCMSEMKLEQKDLHQDCAPFFVFLANLLRNGRVDLETIEAREHEIRCNAEKRMKQNLGGIKRLIFKFSLHHARKAVRNRENTRFCRTRVYGIVRRMFWNMGADLANRGILEHDCDVFYITLDELKGALEGTNTIQDLKRLVKLRQDEYQHYQSIEPDSRFITRGPVYWNNRTQAPCEANVQDGCLRGKGCSAG

SEQ ID NO: 99100 - protein, 278 aa, Unknown
  Obtained from environmental sample
  misc_feature (1)..(278): Xaa is any amino acid
WEIIDGAANGTIVSSATDPQATVRKTGKTGAFTVKLTVTTTDPDTGVTTTKTAEGRVDPTPYKGVTGVTISGDGSVKNGRTVTLNAVLTPADATYPVYTWLVEGEGAVIDGSAAGATVKIRGAADSGSVTVKLTVKTEGYDGGVTAEKNAADKVITLEAGSGGDGAYEWDATTSESFSFSASDLTSTINGKTWRRTGGTITFTAGSEGFTLGNGRFLIGSNLSTDTSSTAYDPNGELDFSTRKKISITYTAASASGNFIVYINNNTTSQGNSVLGNLN

SEQ ID NO: 99101 - protein, 277 aa, Unknown
  Obtained from environmental sample
  misc_feature (1)..(277): Xaa is any amino acid
KGLNWNSSDENTATVNSAGVVTAKAAGSAVITAVSQDNPGLSCNVTVTVTAVTDAIMSPAEIFNSLKGQKAVTYGWADKANDGAGLSYANPSNFILIDDADYPNAENKYKAFINANVTNANINSATGVISGGTVNDNPKFIILSGDIDLSNGRITDDDKSFYDQFNSSSPYGRINGDIILNLGSNTTIIGINNARIKFGGIRINNKSNVIIRNVTFWDAHGSTERDTTTSGNGESKASIDALVIQGTSDGVWVDHCLFTNGTCTDMTRNYNHDGALD

SEQ ID NO: 99102 - protein, 173 aa, Unknown
  Obtained from environmental sample
  misc_feature (1)..(173): Xaa is any amino acid
MNPIAFYANVTGNVEDVFTRDKIDSQLKSEIITVLGPSLAKLGAGLEYHMISAQTDKLAELLNEALTAKWREGRGIEIVNFGITCTATEEDENRIKQLQTAAVMRDPTMAAASLVNAQSDAMRSAAGNTSGAMAGFMGMGMANMAGGMNSQNLYAMGAAQQAAVPQQSAPQPQ

SEQ ID NO: 99103 - protein, 203 aa, Unknown
  Obtained from environmental sample
  misc_feature (1)..(203): Xaa is any amino acid
KDFNLLTHAEQYWINTEEGESKQIKPRYEVGDILWVRETWRVSHVGIAGNEEWANIVYKTGEDKTIEINNSESFFYTTKAKWKPSIHMPRKAARLFLKVTSVRIEQLQDISEKDAIAEGMITNEQYAELSGEAVPEAYCPQCNGTGIHLAFGENLGIMEVDCCKCDTAKKRFSLLWDSLNSKRGYSWESNPWVWVIEFERIVK

SEQ ID NO: 99104 - protein, 73 aa, Unknown
  Obtained from environmental sample
  DOMAIN (7)...(61): Helix-turn-helix
  misc_feature (1)..(73): Xaa is any amino acid
MNFNERLIEIRKKKGLLQQEAAKLIGITPIRLCQYESGRREPDISMLRKIILALGVSADYLLCIDEELNDVRV

SEQ ID NO: 99105 - protein, 230 aa, Unknown
  Obtained from environmental sample
  DOMAIN (1)...(230): RecF/RecN/SMC N terminal domain
  misc_feature (1)..(230): Xaa is any amino acid
MLEELSIRNYALIDSITLSFRPGFNVLSGETGAGKSIIVGSLSFLMGGKTETDVIRTGCEEASVSAVVSINKNNGGALAWLKCRDIECEEDTVIIRRNLKNNGRGSVYIQNVPVTRGDIAEFSGMLFDLHGQHNHESLLRKENHRRYLDGFAAIEDEVLDYNKVFNELADKRKALEASLSSDRDREQRLELLRYAVDEIAQAAVKTGEIKDLENEAQRLSEFEKLAGYVK

SEQ ID NO: 99106 - protein, 144 aa, Unknown
  Obtained from environmental sample
  DOMAIN (45)...(144): Respiratory-chain NADH dehydrogenase 51 Kd subunit
  misc_feature (1)..(144): Xaa is any amino acid
MSKLIHLLTENSGSTEPSNPADSPNPVDSPNPESSLSVEYYMKSGGFKGLKKAVLMTSEEIIAEIKKAKLLGRGGAAYPAGNKWEHLLHIPETPKYIVCNADEGEPGTFKDRLIMEKLPMKLLEGIIIAGFVFQAKAGYIYVRG

SEQ ID NO: 99107 - protein, 258 aa, Unknown
  Obtained from environmental sample
  DOMAIN (1)...(255): Iron only hydrogenase large subunit, C-terminal domain
  misc_feature (1)..(258): Xaa is any amino acid
DNREGHVAAELAPSMGKALCEAFNLAPESITQGKLITALKQMGFDKVFDANFFEDISISEEIDELLYRIKNSGTLPMVSGCSPGLCKFVENGFPDLKNHLTARGSSGKIFGALAKENCVSVSFMPCIAKKFETRVLENGSSPNVDFSLTPRELAQMIRAAGITFDNLPESPFDTLSIPIQRGTQFDTSLINIHEEEAPKGGQKGITERVLNIQGTNVKVMRVRGLSNARNVLESIRNGKCDADLIKIMSCPGGCMLRL

SEQ ID NO: 99108 - protein, 282 aa, Unknown
  Obtained from environmental sample
  DOMAIN (1)...(200): ATP synthase alpha/beta family, nucleotide-binding domain
  misc_feature (1)..(282): Xaa is any amino acid
GKGQRVGYFAGSGVGKSTLLGMIARNTSADVNVIVLVGERGRELKEFIDNDLGVEGLRRSVVVVATSDQTPLLRLRCALAGTAVAEYYMQKGKDVMMMMDSVTRFAMAQREVGLSAGEPPSSRGYTPSVFALLPRLMERAGNFEGKGSITAIYAVLVEGDDMNEPISDAVRGILDGHIILSRKLAAKNHYPAIDVLGSISRLFSTLAVPEHKQLVAKIRDLMSTYSDAEDLIQIGAYAKGSSPQIDQAIQFNPEIQAFLKQAVSEESSFNQTLWTGQGLEGF

SEQ ID NO: 99109 - protein, 289 aa, Unknown
  Obtained from environmental sample
  misc_feature (1)..(289): Xaa is any amino acid
KRNDSDEDSSIKQNVEFFVNETNSVIGLLASDLWLKPLDNEETVMYLHSTISFNRHPIRFNHTRILLDRILPDSELDTTQPMKLGDRFIPIIGVNDFPEESYPAILDSLNRARLEYRWVTRYICLDKEEGKKEAKKKEKHHIGSRTTFLQSFVASTSGEAAKTSNHGASVKEQDSIDAFIEIENDEAALGYLSTCVIVWDSNLKKAEKKADIVRTIINSKGFTCIDEKHSALQTLKGSLPGEVYANFRALPVMTNTMAHVVPLSSVWTGYNFSEHAYQVTGVGIPHVIC

SEQ ID NO: 99110 - protein, 280 aa, Unknown
  Obtained from environmental sample
  DOMAIN (1)...(280): Phosphoglucose isomerase
  misc_feature (1)..(280): Xaa is any amino acid
TTQETLANELYVKNKLEKAELDSAKHMIAVTSETSPLANNPAYLESFYIDDYIGGRYSSTSAVGGCVLSLAFGRAAFREFLTGAEEADKLAMEPDITENAALLDALIGVWERNFLGYPYTAILPYSQGLSRFPAHLQQLDMESNGKRVNRDGQPIAYDTGPVVFGEPGTNGQHSFYQLLHQGTNIIPLQFIGFALSQRGADVIVDGSSSQTKLNANLAAQIVAFAKGQGDASNLNKDFPGGRPSSLIYGQSLTPAVMGSLLAHFENKIMFQGFVWNLNSF

SEQ ID NO: 99111 - protein, 289 aa, Unknown
  Obtained from environmental sample
  DOMAIN (1)...(274): SecA DEAD-like domain
  misc_feature (1)..(289): Xaa is any amino acid
VFLNALAGKGVHVVTVNDYLSRRDSEWMGPLYEFHGLSVDCIDKHQPNSDERKEAYRADVTFGTNNEFGFDYLRDNMAINPGELVQRKHHYAIVDEVDSVLIDDARTPLIISGPTPKGDDQQFNEFRPLVEKLYNAQRTLATQLLNDAKKLISEGKTEEGGKLLLRAHKGLPKYTPLIKFLSEAGNKQLLLKVENFYMQDNNKQMHIVTDDLFFVIDEKQNSVELTDKGIDLISGNLSDQQFFVLPDIGMEIAEIEKRDISAEEKLTVKEEMLNDYALKSERVHTVNQL

SEQ ID NO: 99112 - protein, 128 aa, Unknown
  Obtained from environmental sample
  DOMAIN (10)...(111): Hpt domain
  misc_feature (1)..(128): Xaa is any amino acid
MSDFIHDDPSFYEDFLVEAQEHFEQIEQNFLTLETNPSDLDILNGIFRSVHTIKGASGFLGLDAIQSLSHIGENILDELRKGRMAVTPDVMEALFQTVDVLKILVNDVGVALHQQGEPTNPDTSELKK

SEQ ID NO: 99113 - protein, 205 aa, Unknown
  Obtained from environmental sample
  DOMAIN (115)...(148): Tetratricopeptide repeat
  misc_feature (1)..(205): Xaa is any amino acid
VSTEDYKLALEEYLEIYERHKNVTAAVNASYIYEYLGESQTALRFMQKVYDETKDNVTVLGEGKWQMKETRPRDRIKELKDYLGIKTEEDQTETTTPATSTTTPTENKPDNTALADEAYNRGVAAFEQKNYDKAIADYTQVIQLAPNEAKGYAGRGVAYVQKKDYDRAITDLETALKIDPKNTTLKEFLEEIRFKKMMLEALDDY

SEQ ID NO: 99114 - protein, 86 aa, Unknown
  Obtained from environmental sample
  misc_feature (1)..(86): Xaa is any amino acid
MRRVVITGSSVISALGSEWSDILKNLKSGKNCIQRMNDWDKYPRMNTRLAAPVDCALPDYPRKIIRGLGRVAQLAFASTDKALSNA

SEQ ID NO: 99115 - protein, 197 aa, Unknown
  Obtained from environmental sample
  DOMAIN (1)...(128): short chain dehydrogenase
  misc_feature (1)..(197): Xaa is any amino acid
EKEIHDRGGIIELVQFDISDRNECQEKLEKWQEENGAFWGVICNAGISADDSFPGMSAENWDAVLRTDLDSFYNVLHPLIMPICRKKQGRIITLSSVSGITGNRGQVNYSAAKAGIIGATKALAVELASRSITVNCIAPGIIETDMIREAPLDKILPSIPMGRIGKPEEVAALAVFLLSEEASYITRQVISVNGGMV

SEQ ID NO: 99116 - protein, 83 aa, Unknown
  Obtained from environmental sample
  misc_feature (1)..(83): Xaa is any amino acid
MEKMSLRKAYGDSLVELGKTNPKIVVLEADLGKSTMSCLFKEAFPERYFEMGIAEQNMASVSAGLALTGKIPFYSSFAVFASG

SEQ ID NO: 99117 - protein, 196 aa, Unknown
  Obtained from environmental sample
  misc_feature (1)..(196): Xaa is any amino acid
LNILYLIGNGFDLNLGLNTKLSHVVEKIKEDKIDNPDILKFKESLLKNKDLWWSDFELQLGQHTKEFSSETIAVYENQYNYFVNNIIDLFKKQENRIDYQNKTSFIASSFMKHITTFYNYLPDKNKQIVFNIMEKIEMNGNIYYDFITFNYTSVLDNFVKCSLNEYHKNKYTSPIQLNPQKQVSHFLQKIIHIHST

SEQ ID NO: 99118 - protein, 149 aa, Unknown
  Obtained from environmental sample
  misc_feature (1)..(149): Xaa is any amino acid
MGYMVDDEYEILEDIDETKNVEIDEDDNDPHTHMLLSSSLNPFKTSFLPVLIINKKFKIIYANEACETMFSGFTSLNGKYFFDLFGKAFNIEDARKIRDMILNGGSGLSWKGSAQLKTRSMTSVHIRVYIFPLEMDLKASSDFVIMFDD

SEQ ID NO: 99119 - protein, 286 aa, Unknown
  Obtained from environmental sample
  misc_feature (1)..(286): Xaa is any amino acid
YFDAVKIGAEEAVAQLNNPKRNVQFLYDGPPQDQATNQRQVDILEGWIAQKVNVILVSPNDPNAIAPTLQRARQRGIKVLTFDADARTDARDLFVNQVVSAGVAAGLVKGAASKLQEKGYGPGKPANLALVSSARTDANQQDWLAEIKKLLATSQYNWIVIRNEATDVYYPGPDETTTQSQSGTLIGRMGPNANQIQAAIGLTSMATPALGSQFQAAARKPDATRIVLTGLATPNAIKSYIKNATNPMDNGVLWDCMDLGYLAIQAAYQLARGNITTNSASFTAGR

SEQ ID NO: 99120 - protein, 299 aa, Unknown
  Obtained from environmental sample
  misc_feature (1)..(299): Xaa is any amino acid
SGTGTFWFIEGASRPVTVTRKDNNSSPGTVTVRYTNAATPSVNSTSAPKEIGAYAVSFDVAAAPGWNAAIGLSAGPVNITNPGFNDPLAGDYTITGIGEFTYDGIPKAVTATPLSGKSQGARTYTYTNAASGAGTSTAPSAVGTYNVTFTVAADPANNWNAVSGLIAGTLVINAAPTYGISLSQTGAYTFPPATVGYAAQTARTITVTNPADNQATGTLTVALSGTNANSFTLSTTSISSIVAGGTGTFTVRPNTGLAANTYTATVTVSGSNGITAAFNVSFTVNTVTPTGIEMIYVSG

SEQ ID NO: 99121 - protein, 68 aa, Unknown
  Obtained from environmental sample
  misc_feature (1)..(68): Xaa is any amino acid
EGLFDDIFTKYTSSVRLEKVITTDMGSLFELTYTVRLKSSSKPFIDELRCRNGNLNITLSRIRTGEEL

SEQ ID NO: 99122 - protein, 204 aa, Unknown
  Obtained from environmental sample
  misc_feature (1)..(204): Xaa is any amino acid
MKKIILLTVALSLLVFLSAGSSESSSADYRQAVFSNGICRITSGGTYVLSGKQEGQVFIQAGKNDVVVLVLDNLTLHNPNGPAIYAPRSKSVELILVDGSVNTFSDGKHSNDNSNDNSAVIFVQNDLLISSNGTGNGTLNITGNFQHGIRAQDTLTIKSGVLNIKAVGDALRGRDAVIIEAGTFSLTAGGDGIQSNNDVNAERG

SEQ ID NO: 99123 - protein, 263 aa, Unknown
  Obtained from environmental sample
  DOMAIN (1)...(263): Beta-galactosidase
  misc_feature (1)..(263): Xaa is any amino acid
MDMLAENGITAVLATPTGAKPAWMSKKYPEVLRVNRDRTKNLHGGRHNHCLTSPVYREKTTAINTALAERYKNHPTLGVWHVSNEYGGECHCPLCQERFRAYMKDRYKTLDALNEAWWSTFWAHTITDWSQIESPSPLGETCIHGLNLDWMRFTTEQFVDFFLCETKPLKAITPGVPCTTNLMGTYLGVDSFRMAQVLDVVSWDCYPQWTGTEKDIERGIEASFTHDMNRSFKGKPFMLMESCPSATNWRSVAKLHRPNVHML

SEQ ID NO: 99124 - protein, 93 aa, Unknown
  Obtained from environmental sample
  DOMAIN (1)...(53): Holliday junction DNA helicase ruvB N-terminus
  misc_feature (1)..(93): Xaa is any amino acid
MRPVSPENESAEEAATEQNLRPLSLADFTGQEALKEGLSIAIEAAKKRKDALDHCLFSGPPGLGKTTLAGIIAKEMGVQIHITSGPVLESQAI

SEQ ID NO: 99125 - protein, 54 aa, Unknown
  Obtained from environmental sample
  misc_feature (1)..(54): Xaa is any amino acid
EQINTGIGEVARMVQQNSTTAEESAAASEEMSGQAVMLEELTAQFQLRDEVQSL

SEQ ID NO: 99126 - protein, 273 aa, Unknown
  Obtained from environmental sample
  DOMAIN (1)...(210): Glutamine synthetase, catalytic domain
  misc_feature (1)..(273): Xaa is any amino acid
MKELDEELWKLGILAKTKHNEVAPAQHELAPIFSTTNIATDHNQLTMELMKSVADRHGLACLLHEKPFAGVNGSGKHNNWSIMTDTGVNLLKPGETPHDNAQFLIFLAAVIKAVDVYQDLLRVSTASAANDHRLGANEAPPAIISIFLGEELTEILEAIDSGTNYKGKEKLQMQIGVTALPHFPKDSTDRNRTSPFAFTGNKFEFRMVGSSFSIADPNAILNTVVADVLQEFADKLENSKDFNGDLAALIKSTVHEHKRIIFNGNNYSEEWVR

SEQ ID NO: 99127 - protein, 280 aa, Unknown
  Obtained from environmental sample
  misc_feature (1)..(280): Xaa is any amino acid
KEKQYIYIVQASLEPSRCKIGKTNDLERRLKEYNNMTGKSKNNIYTYLFTCEVKDMTRVENAIKSMFPNLREENSKEIYFYNKELFGDYVEFIKLHELFIKEIFIQEPPIKQIVKIVKKTAPSLEERGLSSKDVMQRAKRVGNDEFYTRIEDVENELSMYDKRIWKNKVVFCNCDDAVGDDIKNSSVFSLYFLRNFNDLGLKKLICTHYSGRVDLFNQGSKGYVFTKDGFTEIKEYPKGYTGSFDDPLSLKILKEDADIVCTNPPFSRMIEYWDTIITAE

SEQ ID NO: 99128 - protein, 175 aa, Unknown
  Obtained from environmental sample
  DOMAIN (2)...(174): ATP synthase
  misc_feature (1)..(175): Xaa is any amino acid
MASLRDVRLRMRAIEQTLKITKAMNLISTAKLRKGRKMLADTVPYFSRIQKSMYDILSSEKYIGSAFFRKPDPSKPSYTAIIVVTSYKGLAGGYNANIYRNVKELSEKVENPVLIIIGGNVAYRYFVHSQYTILENFSFHPEIPTVEHAADVSEYVVSQYLSGVFDSIHIVYTHM

SEQ ID NO: 99129 - protein, 273 aa, Unknown
  Obtained from environmental sample
  misc_feature (1)..(273): Xaa is any amino acid
WAWYKDKRPLSEHLKEILLKEGFILKELDFEEVYKKIVDTSKDKYIFKMVEFLLKFIAQFKTCGYDAGGFRVLKEKTDNLRTQLFLEIAEPVYNYYQEKLEEQNRIDFEDMINFAHFYLAEIERQQLEMPYKYIIIDEFQDIARQRFNLTKRLSEITKAKVVAVGDDWQSIFAFAGSEIGLFTRFLELMGSGIEMKITHTYRNSQELIDIAGGFVQKNISQIKKRLISPKHIANPIILTEFDDTFKPDYAMAAAAEKTIERIINEYGKNTSIC

SEQ ID NO: 99130 - protein, 236 aa, Unknown
  Obtained from environmental sample
  DOMAIN (1)...(117): Beta-ketoacyl synthase, N-terminal domain
  misc_feature (1)..(236): Xaa is any amino acid
MNATTYIKAMPQTCAANIGVILGLTGRIITTNTACTSGSQAIGFAYEAIKHGHQDLMLAGGAEELSAADAAVFDTLFAASCKNDTPEKTPAAYDKNRDGLVVGEGAGTFILEEYEHAKKRGARIIAEVAGFGTNTDGSHITQPNRSTMGIAMQLALKDSHVDPSVIGYVNTHGTATDAGDVAESWATVDIFQRPVPVSTLKNYIGHTLGACGAIEAWISVMMMKEEWFCPNINLLV

SEQ ID NO: 99131 - protein, 291 aa, Unknown
  Obtained from environmental sample
  misc_feature (1)..(291): Xaa is any amino acid
VIMDHNEILSLGKGLGLSDQTLDVLHKAFGGSSRLELTPHEVERLLSPLQHELGERQAQTEKLAASFEKALSPVAQEARMRIAAEESAASRDARNIRHSVVLIEDTVTRNGLTRKNSVNAPHADAAADSSDSADTAQDAFARKGAVRQNSATARQTGAETAAAAQDAPARNGAIRQNAATQTQAEAAAATPRMENPLQRGGDEARGESRQEGADGGNQNKRSDWADLLDRIRYQDAGASNQSRMSDFLQAVSAQPGASQPVLQPGQPGQAAQPALPPYAPQVLRQVEQGVL

SEQ ID NO: 99132 - protein, 244 aa, Unknown
  Obtained from environmental sample
  DOMAIN (138)...(244): Stage II sporulation protein E (SpoIIE)
  misc_feature (1)..(244): Xaa is any amino acid
MILHLEEEEEEKGVEENADEENAVPFRREKDMLRTIYFAVSGIFVFDCSSRDDIETDDNILLAKKLIHLAAITIKHILILKRFLQETEKNKKELEQARLVQEKLLPEKLPCNDFLQSFAFYIPVVEVGGDYYDLFALKEGIYAVFIADVSGHGVSAALVMSATKILLKTYASADLTPSQTLRKINEVLVNHFPTNHFVTAFYAVIDTKKQCVTYTCAGHCPILLLNKDTKKYMQFQSDGFFLGM

SEQ ID NO: 99133 - protein, 235 aa, Unknown
  Obtained from environmental sample
  DOMAIN (6)...(234): RNA polymerase Rpb1, domain 1
  misc_feature (1)..(235): Xaa is any amino acid
MLVRNPNDFKCIKLGVASPEMIRFWSHGEVKKPETINYRTFKPERNGLFCEKIFGPQKDWECSCGKYRRVRYRGIVCERCGVEVTHSKVRREHMGHIELATPVTHIWFLKGVPSYIGLMLDLQYKNLERVVYYESYMVTKVDDSISDQLKVADLLSEEEYYAYKDKYKNKFQAEMGAQAVKDVLENIDLDKLIKDLRKQLVKSTGANYLKLTKRIRATEAFRDSGNKPSWMVLDC

SEQ ID NO: 99134 - protein, 151 aa, Unknown
  Obtained from environmental sample
  misc_feature (1)..(151): Xaa is any amino acid
LCVIGQDIGSYKSGASGLPELLASIAEIPGDFWVRLLYMHPDHFSMAVLDLMEKDSRFLPYFDIPFQHGSKKILSAMNRRGDAESYIALAETIRKRLPSAVMRTTFLVGFPGETEDDFAMLADFQEKLRPDWAGCFAYSREEDTPAYTMKA

SEQ ID NO: 99135 - protein, 302 aa, Unknown
  Obtained from environmental sample
  DOMAIN (3)...(302): DNA polymerase family A
  misc_feature (1)..(302): Xaa is any amino acid
FKIDLNALNAVQNEYNAEIGVISKRIFELSGSEFNINSTQQLADILFNKLGLKKGKSKGTAIDVLTDLQNAHPIVPLLMRYRKLAKLQSTYIVGFKKLLDKNDFVHTTFDQTGAITGRLSSSEPNLQNIPVRTDEGRALRKLFVSRFDGGQIISADYSQIELRLLAHLSNDENMVAAFRAGEDIHTATAQRVFGVAKVDANMRRNAKAINFGIIYGISAFGLSENLGCSPAEAQRFIDLYFAKYPTIKKHLDDTIDLARKLGYATTIFNRRRYIPEIYSQNKNIANFAARAAMNMPCQGSAS

SEQ ID NO: 99136 - protein, 212 aa, Unknown
  Obtained from environmental sample
  DOMAIN (2)...(193): 5'-3' exonuclease, N-terminal resolvase-like domain
  misc_feature (1)..(212): Xaa is any amino acid
MNKLLVIDGNSLINRAFYAVPPLSVNGMPSNAVYGFANMLVKAIVDIKPNFCAVAFDVKAPTFRHKIYKDYKGTRKPMPDELASQMPIVKEMLTAIKIQILEKAGIEADDIIGTLSKRFFSHCEERPAAKSAGHTCGESDVAIHNNNEVIILTGDRDCLQLIDEHTKVYLTKKGLSDIKEETLDTLGMSPEQFVDLKALMGDASDNIPGCAG

SEQ ID NO: 99137 - protein, 281 aa, Unknown
  Obtained from environmental sample
  DOMAIN (1)...(258): FAD binding domain
  misc_feature (1)..(281): Xaa is any amino acid
TGRELEATLLKKLRGLSNVTIFENHCAIELITGHHIKSVPNQYECFGAYALDSVNKKISAVGAKVTCLASGGAGRVYLHSTNPAIATGDGVAMAYRAGASTANMEFIQFHPTTLFHEKGESFLISEALRGHGAVLRNAAGEDFMPRYHPQGSLAPRDIVARAIDNEMKVSGLPCVYLDIRHKDSRATVENFPQIYNKCLSFGIDITKDLIPVVPAAHYTCGGVLVDYNGNTDIENLYACGETACTGVHGANRLASNSLLEALVFSHRAAADAAARLNSAAP

SEQ ID NO: 99138 - protein, 233 aa, Unknown
  Obtained from environmental sample
  DOMAIN (1)...(221): Aminotransferase class-V
  misc_feature (1)..(233): Xaa is any amino acid
VPKPSELQVSPDAAFVHFTSNNTVEGTQWHDFPKTDKPYICDMSSDIMWRPVDVSQFGLIYAGAQKNLGPSGVTLVIIRDDFLEMCEAQDLPSYLRYKIHAEKNSLYNTPPTFGIYILRNVLAYNKSIGGLKAIEANNRKKGELLYGCIDKHASFFKPFVTEKSDRSLMNIDFFLPTEELTDAFVKGAKKNGMVGLKGYRDIGGIRVSAYNAVTVENIQTLVEFMEEFVKKNG

SEQ ID NO: 99139 - protein, 266 aa, Unknown
  Obtained from environmental sample
  DOMAIN (1)...(247): SecA DEAD-like domain
  misc_feature (1)..(266): Xaa is any amino acid
MDNDQRKENYARDITYGTNNEFGFDYLRDNMHRSMESRVQRGHNFCIVDEIDSILIDEARTPLIISGAAEDDTFKFAEVDKLIGGLREIEKKENGEYPDETQGEVVSGDYKINEKNKSVSFSNQGLAKIEEILQKRGLIKGAIVDEENFEYIHYFTQSLKAHKLFHIDVDYVVQDGEVQIVDEFTGRILHGRRYSDGLHQAIEAKERIKIAQRNRTLATITFQNYFRMYKKISGMTGTADTEAVEFNKIYNLDVVVIPTNLPVARI

SEQ ID NO: 99140 - protein, 198 aa, Unknown
  Obtained from environmental sample
  misc_feature (1)..(198): Xaa is any amino acid
MIQSINKYRNELKKIIDFGGSLNETTIRRCFISLVNDFAEDKNLKLVEELEYRTPQGTTIYPDGTLKDRFRLSYGYYEAKDPKDNLDKEIEDKVRKYYPLINTIFENSITAVLYQNNLEVMRIDMSDDQQLDQMLKSFIDFERQEIFQFHKAIEQFKNDLPNLLLWCRDEIDNAKSNNEFNRKNSVFLDQCRNEINPD

SEQ ID NO: 99141 - protein, 262 aa, Unknown
  Obtained from environmental sample
  misc_feature (1)..(262): Xaa is any amino acid
MFAVKNPKDRQDNPIISYYTMQDDDTKEEKLAFLKANSLNSIPWERLYPDNQNNWVNISTSDYATLLQLSKKNKDEDAIFYECFPAVNTARNDWVFDFSEQTLKKKVKYFIKKYNESIDSNKIDTSIKWSESLENNFNRKIKDKYIDKKIIFSLFRPFVKKYYYAGSILSDRLTSNHLDCLSIENNIYITFSGKGYNHVFSLLASKYIPNLDCIEKGQCIPMYIHNKSKKKTSNVTGWALKEFITYYRDNTITKEDIFHYVY

SEQ ID NO: 99142 - protein, 62 aa, Unknown
  Obtained from environmental sample
  misc_feature (1)..(62): Xaa is any amino acid
MEGEAERAGLTSEEDIIALCREVREPFDYTKWQENLFEDMTVEEISKRAMEYRNKNEQGTSI

SEQ ID NO: 99143 - protein, 81 aa, Unknown
  Obtained from environmental sample
  misc_feature (1)..(81): Xaa is any amino acid
MGSKELRIVELEKLIQRYQASYYNGEAEISDGEFDLLWDELKALSPYSAVLKKVGTGPDVDGFPKARHLIPMGSQEKASDP

SEQ ID NO: 99144 - protein, 254 aa, Unknown
  Obtained from environmental sample
  DOMAIN (66)...(179): Response regulator receiver domain
  misc_feature (1)..(254): Xaa is any amino acid
MYGKINVKSAVDEGTSITVRLPQKTDGIGISGIIGKEMAENLCQFKLNNSIQSKKAQITREYMPYGQILIVDDVETNLYVAKGLMTPYGLKIDLATSGFEAIDKIKEGNNYDIVFMDHMMPKMDGIEATKQLRKMGYTKSIVALTANALAGHAEMFLKNGFDDFISKPIDIRQLNTTLNKLIRDKQPPEIIEAAQKEKAEMDKKQDPGQGFQQADSQLAKIFARDAERAIDVIQNSIRNDLNDEQDIQMYIINI

SEQ ID NO: 99145 - protein, 123 aa, Unknown
  Obtained from environmental sample
  misc_feature (1)..(123): Xaa is any amino acid
YIFDTNTPVKDGDKISIGPFSVEVISIPGHSADSVVYRIDRLLFTGDVLTSGKVGSTASAYGAATQINKLRSRLLSLPGDYTVLPGHGPPSTLEAERRYNIGITRHYEMRTRKPSFRLSFLKD

SEQ ID NO: 99146 - protein, 85 aa, Unknown
  Obtained from environmental sample
  DOMAIN (1)...(64): Phosphoribosylglycinamide synthetase, N domain
  misc_feature (1)..(85): Xaa is any amino acid
MANLGKCLPVDVANPKAIAEIAKNEKADFTVIGPEIPLVAGVVDEFKKQGMQIFGPTAAAAQLEGSKAFSKEFMKRHKIPTAAYE

SEQ ID NO: 99147 - protein, 152 aa, Unknown
  Obtained from environmental sample
  DOMAIN (1)...(140): SpoU rRNA Methylase family
  misc_feature (1)..(152): Xaa is any amino acid
YAVLVHNVRSAYNVGSIFRTADCFGFSEINLSGYTPGIEHPALKSAARGCETWLKSNRWESPLDCINFYKERNYSIIALETGGESINNFKFPQKFLLVVGNEELGIAKELLTLCEHKISIQMKGRKASLNVSCAFAVAASFSTFSKFTKFPK

SEQ ID NO: 99148 - protein, 289 aa, Unknown
  Obtained from environmental sample
  misc_feature (1)..(289): Xaa is any amino acid
SRSGGTSKTTHKVDVVKTVVGSSFNAGENLYVLSEGDINITGSRISAGGDNYLEAKGDINVTAANDYEEHSVTVRKNNNGLRKRGKEDRVLDEKVDGSELNIAGDFISSSAGDTNIKGSKINAGASADIMAEGDINITAAYERHDESHLKTTNGAGVGGMYGAKLEANGKGSADAAGLLISADSLYMKSGGDILLEGSAISAYYVDIAAGGNFVEAAAQTSSYEYSIKKKMSLNLDYTAIINAHKDYYFGFKNKILKELKNMFVEGKRISLNVMDGKYSSLRRGYICRA

SEQ ID NO: 99149 - protein, 142 aa, Unknown
  Obtained from environmental sample
  misc_feature (1)..(142): Xaa is any amino acid
VTIPNSVTSIGYGAFGNNKLTSVTIPNSVTYLSGFNNNQLTSVTIPNSVTYLSGFNYNQLTSVTIPNSVTSIEYAFAFNPLTSVTFEGTIASENFKANAFNYDLYNFTIGDLRAKFYATNPTNGTPGMYTRPSTSNKTWTKQ

SEQ ID NO: 99150 - protein, 282 aa, Unknown
  Obtained from environmental sample
  misc_feature (1)..(282): Xaa is any amino acid
FSATYNDEILVISDIPGTDISNLSAVKDGVNIQGIMPDLTGTVTISNTSPKVGDTLTATYSGGNGSGTATWQWLRGDSAIDNSNSNTYTVAVADEGKVIRVQVSYANQKGIVTSQNFTAVSVRPELNGNVTFANSPTTSLTPKVGDTITAVYEGYEKGQGTGTPAWQWLRDDTPITDATNSSYTVVNADVGKTLKVQVSFSSHSGNVTSGMTAIVRGSGDNSPPTFTDTYTFISWLVYQPNNTRETPYDVALNISSLSELSEHFKFTQSWPYINLDLSGSTF

SEQ ID NO: 99151 - protein, 252 aa, Unknown
  Obtained from environmental sample
  misc_feature (1)..(252): Xaa is any amino acid
MHLGYERSKGASVRDAYELILPPKLLRHAKDSRELVYDLGNDESDWISAQSKELRTHLDTMGVQLMVLLLADDQPHSILLLGGKYAELGYHREDRELLRDVAIAAGIVIESAIMHRQVLDKTRLDQELLAAQKIQQSLITSAPPVVPGFQIASRLVPAAETGGDLLWIKQRAAGRWIAVVGDVSGKGLAAALYMSQSVALIEHASQDPDAPMEIILASMDKALRNLMSNTDFLTLSIIEWSNDGYFKVVRAG

SEQ ID NO: 99152 - protein, 246 aa, Unknown
  Obtained from environmental sample
  misc_feature (1)..(246): Xaa is any amino acid
LFIVDDEADAASLNTLVNKNKQSMINKRLEEIKNTAASSIYLQVTGTPQALLLQPHNSGWRPYFTHYFAPGNGYIGGNILFPQDKPPYIILTDNEEASDLLKDDEIAENGLLQALLYHLVSSADIFLNGGKVSNFLIHPSMETAQHKQFAEKVGTYLNDIAKAIEERGDGEVFKAVYNDLAATKPHIHSFSEIMKKIVSFIEKNEVKILILNSKELYTDNRNYESGINIIVGGNSLGRGITFLNFK

SEQ ID NO: 99153 - protein, 153 aa, Unknown
  Obtained from environmental sample
  DOMAIN (29)...(153): ABC transporter
  misc_feature (1)..(153): Xaa is any amino acid
MASIVLDDMMKQFGDHTVVDHISLTIEDGEFFTLLGPSGCGKTTLLRILAGFTAPDGGDVRFGDKSIIRTPPHRRETGMVFQNYALFPHMTVADNVAYGLKARNAPRAEIRDRVASVLESVFLDGYADRYPRQLSGGQQQRVALARALSSGPR

SEQ ID NO: 99154 - protein, 281 aa, Unknown
  Obtained from environmental sample
  misc_feature (1)..(281): Xaa is any amino acid
MPFTTDAIWRNLRLEGALSKESDPVSVHLTDFPLPRAERRDKALEFRMATVRRAVSMGRSLRSQYNIKVRQPLRMAELVTRNSDEKNALLEMAEIIREELNVKDVVFRDNEEDLVEYEVKANFRVLGKELGKDMKAAAARIEALNHAEIQGVLEGAALSLDIETGDGNVRTVVITADKLDIRRNEKANLRVINEGTLTVGLDTEITRELSREGDIRDLIRGVQNNRKEMGFSVTDRIRLTVYGSDKLKEAWDNLSGTAAAETLAIETAWAQVKAKLQGSGG

SEQ ID NO: 99155 - protein, 276 aa, Unknown
  Obtained from environmental sample
  DOMAIN (1)...(192): ATPase family associated with various cellular activities (AAA)
  misc_feature (1)..(276): Xaa is any amino acid
VLIGDPGVGKTAIAEGLALRIVRGDVPEGLKSKSVVSLDMGSLIAGAKFRGEFEERLKAVLQEIAERGDVVLFIDELHTVVGAGSAEGAVDAGNMLKPMLARGELRTIGATTLDEYRKYIEKDKALERRFQTVLINQPSVGDTISILRGLRERYELHHGVKIKDNALVAAAVLSDRYIAERFLPDKAIDLIDEAAAKLRTERDSSPVELDEAMRRQMRLEIEIEGLKKEKDKGSKEKLSKLQEELAVVRETASSLKNQWETQKSQSDRLHKVREEI

SEQ ID NO: 99156 - protein, 281 aa, Unknown
  Obtained from environmental sample
  DOMAIN (1)...(281): tRNA synthetases class I (R)
  misc_feature (1)..(281): Xaa is any amino acid
MVEFSSPNTNKPLHLGHLRNDVLGESISRILAACGADLRKVCIINDRGIHICKSMLAYMEQGQGKTPESENIKSDHFVGDWYVCFNNILKKETEDLMRGKGLKKEEAEAQSPSMARAQELLRKWESGDPDLTALWKKMNSWAIEGMKETYKRTGVSFDQYYFESDTWQLGKEEVLKGLERGLFYREPEGAVAVDLSAENLDKKILLRSDGTSIYITQDFGTAINRHKDWPFDRLIYVVGSEQQYHFKVLFTLLEKMGYAWAKNLYHLSYGMVKLPEGKMKS

SEQ ID NO: 99157 - protein, 282 aa, Unknown
  Obtained from environmental sample
  misc_feature (1)..(282): Xaa is any amino acid
VKQYAPRYGISPDFMIDEERCRQIASEESLPFLITHRHHPAIERLFSDNRPNGIVNNIFAAVLFNHCRIDKPRDFTADVKTQFDIVCAEWEKQINKIGNLLNEMENLISENNVLLPDLVPLMKKNKKTTFPKTEELKKYFEYLLGLPVESSIEKSESHSLQKQMITLLGFLSEICSLNLARGKRSENIVKENIKEIRAIFGQFSSLAVSCMQAGLIISIMSLLSELQERYLERKRSEGVLTFNDVANLSKTILLEQHDIRQSEKESFKAIMIDEFQDNNDYK

SEQ ID NO: 99158 - protein, 292 aa, Unknown
  Obtained from environmental sample
  DOMAIN (1)...(292): Receptor family ligand binding region
  misc_feature (1)..(292): Xaa is any amino acid
MAMADANKNSDNKYYYKLIIDDDRFEIKNDAVLAGKQIASDSVHAIIGFASPGGLVVAPIADKNKVIYMNVGASNHEIVKGDYAFIHWTMPERTADRLVKFFAAKGYKNIALVSEMNAGVSVLDKAISAAAQNVGIKTKIFQVNPTERDFRPVLSQIAQLKPDTLVVGVWGAQLPILIKQYHESGLTMPISNAETFSMAPDFSILEGAYFSDVAQSPAAFNDRLRREYKSTASDFATGNFYDAVMLLVRAFETANAPDDAVAALSAIKEYDGIVGHLIQDKNGIFQSGAIMK

SEQ ID NO: 99159 - protein, 127 aa, Unknown
  Obtained from environmental sample
  misc_feature (1)..(127): Xaa is any amino acid
MNARSLLIIPALILILTAGGLSGRAPAADHGSHGAGHKTTKAKEDAKHVYTTTGVIVSVDTAEKKAVITHEPIPALSWPTMTMGFTFEDASLPAGLKAGDKVRFDFRTRAMFPSSWILKFRTKQYEK

SEQ ID NO: 99160 - protein, 263 aa, Unknown
  Obtained from environmental sample
  misc_feature (1)..(263): Xaa is any amino acid
ANRFCVLLGSALLSVWGIWAVYNTPVDALPDLSDTQVIIRTSYPGKAPRLVENQITYPLTTAMLSVPGAKTVRGFSAFGDSFVYVIFEDGTDPYWARSRVLEYLNQAQGRLPAGVNPALGPDATGIGWIFEYALVDRSGKHDLAELRSLQDWMLRFELSAVPGVAEIASVGGVVKQYQIVADPVKMAQYRVTFSDISTAVNNSNQEAGGSVIEQAEAEYMVRAGGYLGKLEDFRKIVLKSSPNGTPIYLEDVATIRIGPEMRR

SEQ ID NO: 99161 - protein, 117 aa, Unknown
  Obtained from environmental sample
  misc_feature (1)..(117): Xaa is any amino acid
MKNSLTSLTPWKDKILFTPGPLTTSPGTKQAMLRDLGSRDTAFIQLVRDVRSRLLEIAQVPKNEYACVIMQGSGTFGIESVISSAIPKDGKLLVLINGAYGRRILSIAAIHGIARES

SEQ ID NO: 99162 - protein, 59 aa, Unknown
  Obtained from environmental sample
  DOMAIN (3)...(25): MORN repeat
  misc_feature (1)..(59): Xaa is any amino acid
DVYEGDWVDGKQTGKGKMTFHDGNVCEGDFVDGKPHGKMKICSPNGGYFVSNFVNGIPQ

SEQ ID NO: 99163 - protein, 274 aa, Unknown
  Obtained from environmental sample
  DOMAIN (41)...(274): Hydroxyethylthiazole kinase family
  misc_feature (1)..(274): Xaa is any amino acid
MGMDTDYTGERFAEHVNIHGRETYLINLIQENVMQKYAALLDVVRSKTPLVHQITNYVTVNDCANVTICIGASPVMSHAVEDVKDMIAIADALVLNIGTLDEIQIKGMLEAGKAASKKGIPIILDPVGAGATPYRTQTAAMLIKELSISVIKGNAGEIGTLAGVDAFVRGVDSGRLSGDPAETAKNLALSASCVVVISGADDIVSDGRRVAVISNGDPLMGKISGSGCMASSVCGAFAAVSEHFEGCVAAMTAIGIAGELAAEKSTGSGSFKPA

SEQ ID NO: 99164 - protein, 294 aa, Unknown
  Obtained from environmental sample
  misc_feature (1)..(294): Xaa is any amino acid
DHYLWVFYEILKKIDVSLDIILETLVLYSINKQSKHDFIGIHNPISILEKKLYDKINQLTTEQYLLFSEYFLNKDTLLEMHRFFEITKSEYFDNLKIYLLKRIYSEKINISRWALESLLAKLLNLSDINRAKEQFDMINDLYNKEEYIGIYKGVIYGINLDTQHILHDVEKIKNNYQILFAERIKIEKKHNEEKIKIKDNINKMLNNELHLMLNNNALLEELSKAIDYLNNPENLSENKTFIGKIRSLESEHILNSLEYFLGEEYKSPPISSNTVLFIIEKIIDINYMEKNIDK

SEQ ID NO: 99165 - protein, 267 aa, Unknown
  Obtained from environmental sample
  misc_feature (1)..(267): Xaa is any amino acid
MKNITRDGRNEFRRDRPGKNSGPAFSFLHKIVPALLIAASLIAATQDLARKLRYDPRIVGRPWFVLNGKYPVYYPFLILPLTIKGLSAQDLELGNMIFNSTMIFVGGIFLAVMLYFILVWARNVLHKDQNIHGTSRWGTVKDIKAIGLFEEAGVVIGQEESARVDYSITNGSVKLSLREPGRILRHSGQTSTIMFAPTRSGKGVSSVIPTCLDFPHSLITIDPKGENFNITAGYRRKFSHVLRLSPVSRDTLRFNILDELTADSAYR

SEQ ID NO: 99166 - protein, 289 aa, Unknown
  Obtained from environmental sample
  misc_feature (1)..(289): Xaa is any amino acid
KKLYIYNWTYTRPDSVIEKFEKEYNVRVIYDEFASNEDMYAKLKSGGSGYDIVFPSADYTSIMIKQGMLEKIDKSLIPNLVNVDPVVLKFAKYDSNMEYSVPYYFGAAGVCVNTEKVPNFERSWSIFAREDLHGRMTMLDDMREVMGDALAFYGYSVNTTDKEQIARARDLINHSWKPNLVKFDADAFGKGFANGEFWVVQGYPEVVFEEIAEDKKMLVNTVFFFPVEGGPAYIDSMCILKGAKNIKLAHQFINFIHKPEIYAEFTDEFGFPATANINARKLKKEFQCT

SEQ ID NO: 99167 - protein, 213 aa, Unknown
  Obtained from environmental sample
  DOMAIN (3)...(192): Plasmid replication protein
  misc_feature (1)..(213): Xaa is any amino acid
MIMKIEKKKIQGRSWQIIAPAEWENINAIKDVGRHISRNYYYMLHNNDTNELKELVKPHWHLLLTMSSSRDLSTMQNYFKDFPELLENSFEKIRSIHCAKRYLVHADDPSKYQYNPDNVETNDTSYKDLFITFASKIDEAKYIIEVFDQAGEIETFSQFRSYFINQLASMNTYSRMSMLMSLERYWKEKRSNDSFSGSYDKTFTPVKASDLPF

SEQ ID NO: 99168 - protein, 115 aa, Unknown
  Obtained from environmental sample
  misc_feature (1)..(115): Xaa is any amino acid
MARFKYTDNSQGMFLTVNLNEQLIPGTFEWTLNYLIDKMDLSLYEQNYHNDEKGACAYPPKVLLKIIFYCYSAGILSSRPMEKACRDNITVKALAENCEPDHDTIATFISANHEA

SEQ ID NO: 99169 - protein, 68 aa, Unknown
  Obtained from environmental sample
  misc_feature (1)..(68): Xaa is any amino acid
KDISAVRQIELVMKDGVIYYPSEIYQALGIKPFALPPPLTPARGADRAAKAAASAFPVAKSASGFEAE

SEQ ID NO: 99170 - protein, 271 aa, Unknown
  Obtained from environmental sample
  misc_feature (1)..(271): Xaa is any amino acid
MGGPVSEHARWKDGVESWVSQADKGQINSPSPRLYIGNDASPWALELYAQLLSKTPGGTLDVMPSGHLHLQKLRDVTIGDGAQKLQLRAYILSGVDLTPALLLLDEQGNLFAQLSGDVLVRAGYEKQYAVLKDLGESLTLELLESMQRKLAHAYAVPVRIRNVRVFDPQTLTAAGPVSVVTYRGLITTTEREAGDAPHPDEVIIDGRGGTLVAGLHDMHAHNSLWSGPFYLAAGVTTTRDMGNVNFVLQDLMKRLDAADLPGPHIIPSGFI

SEQ ID NO: 99171 - protein, 217 aa, Unknown
  Obtained from environmental sample
  misc_feature (1)..(217): Xaa is any amino acid
LAFRNLVDAETDLRGKDIFLVGENGQGKSNFLEALYFCSYASSFRGSKDKEMVREGERDCSASLSIMDALYSTVSVAFKEQKKIIALDGKRIEDRKELLSVAPTIVFCHEDMEFVAGSPERRRWFFDQTRSLWDSLYLEDLRKYRRILKSRNALFRSEGRLDSQTVATLDALDPQLARYGLELIIKRRETAREFSAVFEPLYGEITGLTGIRVKYLS

SEQ ID NO: 99172 - protein, 281 aa, Unknown
  Obtained from environmental sample
  DOMAIN (2)...(281): Peptidase family C69
  misc_feature (1)..(281): Xaa is any amino acid
MNEHQLSIGETTFGGREELEKPNGIIDYGSLMYIALERCKTAREAVQLMGRLVEEHGYASSGESFSIADPNEVWIMEMIGKGEGEKGAVWVAQRIPDGYISAHANQARIRQFPLNDSQNCLYSKDVISFAKGKGWYSGEDKNFSFCETYAPWDPASLRACEARVWSIFNRAAPSLKIPVDFAMGNVKAAPMPVWIKPDQKIGLRDAMELMRDHFEGTPMDMTKDVGAGPFALPYRWRPMRFDVEGQAYVHERAISTQQTGWSMVSQMRSWMPGPIGGILWF

SEQ ID NO: 99173 - protein, 186 aa, Unknown
  Obtained from environmental sample
  DOMAIN (23)...(110): Divergent AAA domain
  misc_feature (1)..(186): Xaa is any amino acid
LEDQSTEWKETWRDDCLKTICAFANASGGTLEIGRRDDGEIVGVTDTVKLLDYIPNKIKNTMAIVADVAVRASGGKRYIVITVGDYPFPISYHGTYYLRSGSTTQELTGNALDEFMLRKQGRTWDEVPVPFVKSSDFESDAFRAFRKKAVESTRLAKHYLEASDEELLDTLRLTVGGYLKRAAVLL

SEQ ID NO: 99174 - protein, 272 aa, Unknown
  Obtained from environmental sample
  misc_feature (1)..(272): Xaa is any amino acid
SGSGMADMMQTDGNNIKVVTGSRDGFTDEYTIEGIKDISRNENYNDTVGCSIGSGGGIVKTYKADGKVIGVNVNGGGGGGSFSSGRNSQTAGFIDVNGDGLPDYIEGNAVRSMNLGRQKWKPVLGGYDGIELSKGVSDTLGFSMSLGKTTSPGRTEDNGNYTAPLNVGVSGGINYSATVTQTGSMLIDMNGDGLPDQVAIGAGGKWGVRYNLGNKFQEEVTFDAPGWNLDARQKKNFTMHSDGEIKVGMFGSVPLLGDIINSAGLGALIPGN

SEQ ID NO: 99175 - protein, 94 aa, Unknown
  Obtained from environmental sample
  DOMAIN (2)...(86): OmpA family
  misc_feature (1)..(94): Xaa is any amino acid
VLKRVAEILNKFRDYKITVEGHANPVLGTAKEETETLMPLSLARAQYVIDYLAGVGVGRSRLSPIGRGGTKNVARPQDQANNWKNRRVEFLLVK

SEQ ID NO: 99176 - protein, 288 aa, Unknown
  Obtained from environmental sample
  DOMAIN (1)...(288): Dehydratase family
  misc_feature (1)..(288): Xaa is any amino acid
AGGVPKEFSTIAIDDGIAMGHNGMLYSLPSRDLIADSVEYMANAHCADALVCISNCDKITPGMLMAAMRLNIPAVFVSGGPMEAGRATLSGGKEVHLDLIDAMVAAANLDVSDDDLKKIEDSACPTCGSCSGMFTANSMNCLTEALGLSLPGNGTVVATHTERKKLFEQAAKLAVELCDKFYNKNDSSVLPKSIATKAAFENAMRLDIAMGGSTNTVLHILAVAHEAGVNFTMKDINELSRTTPCLCKVAPSVSHIHIEDVHRAGGIPAILGELGNAGLLNSDVNLVH

SEQ ID NO: 99177 - protein, 273 aa, Unknown
  Obtained from environmental sample
  DOMAIN (184)...(204): SEC-C motif
  misc_feature (1)..(273): Xaa is any amino acid
VNAQNEEQTTADEVYTILLPNVHKFGWYGFYKDYIVHYAILRDFDWVLYLERTQAGKPRYIPEKEKFLQYEWEEYEDSNHWYDVQKFMLEAFGYNKSTSEGFDEIKNYVRHSIGLKELDTIMQKHNLFCNSEKQFHKFIHFLVSAKNNTRMWENSGHTPDEIMKLFADKRPKEPDVNQPLKVGPNEICPCGSGKKYKNCCKLIELNRTAQLSFSECKLFYETWYKILNFVNQKHSIFNIRIEPVYPAFHDETQLYKIREKLWSCPQIIGEFIN

SEQ ID NO: 99178 - protein, 296 aa, Unknown
  Obtained from environmental sample
  DOMAIN (1)...(155): Phosphoglucomutase/phosphomannomutase, alpha/beta/alpha domain I
  misc_feature (1)..(296): Xaa is any amino acid
MILSASGWRGIFSSCGNEEGSTDKIDEAHRIISCAAVYVFSEYMCALSANSRKSLVLLGTDTRPTGKAIIDAMIPVLIASCCDVKYAGVTAAPEIMAWAKKHGSEGAAAGFIYVSASHNPIGHNGIKFGLVDGGVLAAEETMKLIVSFRSFLEKDDFINKIESLVSAASTEIIEKVYSNITPAKKEAFDAYYNFCGDVAWGGKAADGAFDIAAVIKNNIAKQPLGIVCDFNGSARTISVDKDFFTSLGLKFECINSEPGQIVHRIVPEGESLEPCRLLLEKPMNVTRHSCLAMFLT

SEQ ID NO: 99179 - protein, 56 aa, Unknown
  Obtained from environmental sample
  misc_feature (1)..(56): Xaa is any amino acid
SLNSRETARDSLMDEMALLYPQYGYEKHKGYPTKTHRELIKKYGPSPIQRMSFKVR

SEQ ID NO: 99180 - protein, 291 aa, Unknown
  Obtained from environmental sample
  misc_feature (1)..(291): Xaa is any amino acid
DYDWELGRGFLVAVGAQEMFTRYSMDGDQQGAYLISFEDLGSQDKAIILNLLQSQLGTFTSPPAFLKDLHISKAASYSLNAENFLFTTSGYTLVEYATPNKRFGAELGLRVDHYYLLGDGFSLSTEPVLNPRLNMDFNVFKNLWIIESLDLSAGTGLFSTMDNTVFMAEKRYDIEEIKPNRSWTSVIGTRITFPEGLIFNIEGYYKYIFDRFYLPIDIGIANGVNPNPQFNGEGNVWGIDLMLQKLQSRYLDGWISYSYSWARYRDPAGALGDEWYFPGFHRFHNLKLVVN

SEQ ID NO: 99181 - protein, 74 aa, Unknown
  Obtained from environmental sample
  misc_feature (1)..(74): Xaa is any amino acid
DDDLRNYGSAVEILRFFGITKVNLLTNNPKKIEALERAGISVHRESHQVGQTPQNLGYLKTKARKSGHLMRFEE

SEQ ID NO: 99182 - protein, 102 aa, Unknown
  Obtained from environmental sample
  misc_feature (1)..(102): Xaa is any amino acid
MAIAGASRFPVFILSALLWAAGASAQEVTAPKYQPIGAAKEFFDRGEGLKVRYEWDKAILDYTSAIRADPSYSDAYFGRGVSYYAKSDYGKAIVDFSKAIDL

SEQ ID NO: 99183 - protein, 131 aa, Unknown
  Obtained from environmental sample
  DOMAIN (7)...(131): Indole-3-glycerol phosphate synthase
  misc_feature (1)..(131): Xaa is any amino acid
VKNPPGILAKIAASTAVRVTKAKELLPEEKAKQDAVALAEKEKTSMPFPFERSLSASGLSFICEVKKASPSKGIIAEDFPFLEIAKEYEEGGASAISVLTEPEFFLGSGEYLREIAAAVHIPVLRKDFIID

SEQ ID NO: 99184 - protein, 107 aa, Unknown
  Obtained from environmental sample
  misc_feature (1)..(107): Xaa is any amino acid
FNECRYYVSSLNPDPELFATAVRAHWGIENSLHYVLDVAFREDASRIKTGCAPENWACFRKIALTVARSDKQSTYSMKKRIKQMTWSDEYLEHLLFHSSFASEPAHS

SEQ ID NO: 99185 - protein, 95 aa, Unknown
  Obtained from environmental sample
  misc_feature (1)..(95): Xaa is any amino acid
MEEEETKRIGPIMEYFSVIPDPRKEISRKYPLYEVIAITILAVMSFAQGWEDIERYGVAKKKWLSKFLELKAGIPKHDVYRRVFTVLKPEWSLPQ

SEQ ID NO: 99186 - protein, 270 aa, Unknown
  Obtained from environmental sample
  misc_feature (1)..(270): Xaa is any amino acid
VVVKIDLAKLLIFQVAIDKISIENLTLLYEVMPDGRTSIDGLGGEPDTTAKKDTAKLDLSKIELPGSFALNSFQIKNAKVIFNDRSQKRKIILGSINLNTSFSLNKTLENVKTSTSLTLKEISMEDAGLGVRKGGIGVFLNADVNANVRTQHLDIQKFSAGLQSIKINASGTIGRFMEDIKVVDLKIESNQINLAELIKDIPAGINPEISKVNASGTIAFNTAVKGAIVPDKVPPVNGSLVLSNIAVSHSDLPAGVSSLTGNITFTENTV

SEQ ID NO: 99187 - protein, 265 aa, Unknown
  Obtained from environmental sample
  misc_feature (1)..(265): Xaa is any amino acid
DDGDRRASLTACLNLAKKHPGSFVLVDEAERLLDTSWHSKDKAWLNSFLEQPGNRVIWITNWIEHIDPAVRRRFSFSVYFRALGKQERQCLWDQIVARHKVKSYLPESQIEAFAENYQVSAAVIELAVSQAKELGYGKEDKQDKQGKQGGQGKQKFGGAVERVLQAYVTLCNDGKAPNPKAKAEEEYTLSGVCLDGSVDELLDKCHRADAMYTSKGSLRRGGGTMLFYGPPGTGKTALARHIAHELGRECFVQRASDLLSPWVGT

SEQ ID NO: 99188 - protein, 124 aa, Unknown
  Obtained from environmental sample
  misc_feature (1)..(124): Xaa is any amino acid
MKNYGSVTYQNQTYKTVVIGTQTWMAENLNYEVEGGKCYGEGGLIYIGPANSSYDEKYLVALTNAEIQANCEKYGRLYNWATAMGFEPSCNRDYCTTDPNALYQGICPTGWHIPSDMEWTTLIN

SEQ ID NO: 99189 - protein, 287 aa, Unknown
  Obtained from environmental sample
  misc_feature (1)..(287): Xaa is any amino acid
GPYPVALAPEGQVSYTTDAVPRLEPGVIRIGFQAAKQLAAKGSDCPLEILPISVHYRFGSWGSFTLEFLLKKIERVCGLSGRGRKKIPFTERVKQCRAHVLEVIERRYQIIAETSATFEERLDRVINTALETAERMLGEKSEGDFFARMYRMRQICWDRIYIPGVDSFEGMSKVQRSAADLKAGEAWYIARHVELVDFCWYFRIPLPTEETVIHRKVEYVQNLWDFASRSMGGAFWNRVNIFPRKVIIHTAGAINLSERLSSYSKDKKAEISLAMSDLERAFLDCIA

SEQ ID NO: 99190 - protein, 265 aa, Unknown
  Obtained from environmental sample
  DOMAIN (96)...(265): DNA topoisomerase
  misc_feature (1)..(265): Xaa is any amino acid
VWGTSGDLPKKLGVDIENGFQEEYEIPASKAKVVAGLKAAAKTAGELILATDPDREGEAISWHILEALKPPKGTTVKRVRFNEITQAGISKAMANASGIDSHLVDAQRARRVLDRLVGYKVSQVLWDKVRRGLSAGRVQSVAVRLIADREKEISAFVPVEYWALKAQFDAGTPPVFWMRLVKLGGDALQIGNKETKRRVENEAQAKRLKEQLERAAWSVTALDTKEKRRNPAAPFTTARLQQEAANKLRFPVSKTMQVAPKLYEG

SEQ ID NO: 99191 - protein, 214 aa, Unknown
  Obtained from environmental sample
  DOMAIN (68)...(211): Glycosyl hydrolase family 3 N terminal domain
  misc_feature (1)..(214): Xaa is any amino acid
MATWNGMGMDKTELLWRGVWGLDGQDALGAAASKPGGIVIFARNLDSNAERGPQRLFDMIQALQGEWGGACPLAVAIDQEGGTVSRLKKWVGETPSLRQIWLGGGAAECERWGRLWGRGLSLLGINVDFAPVFDLFDGREGTGMGCRCASEDPAETATAATAFLDGLESTGVCGCLKHFPGLGGTAVDSHVAMPSIGDPLAIEKKRCAILAAAR

SEQ ID NO: 99192 - protein, 269 aa, Unknown
  Obtained from environmental sample
  misc_feature (1)..(269): Xaa is any amino acid
ERFTHDGRPLAAAFAKSRLEYRGENFTVFERILWLPVPDGEDGQIELLLDGRQAGLQNTAEEVRQAFAPLPPNERDLPVEAQVVRKFVQSPAADRFRDAWLFIDKDNQADDNAEQLYRWVAKHHPEINAWFVLAEDSHDWPRLAEEGFKLIPFGSVEHKALFVLCANLVSSQMDRYIYTIPDEHCFADLSNFRFICLPHGVTKDDVSGWFNSIPFDGFVAATQDEVDSIVNEGTPYVMTAREVFLGGFPRYDQWMTPGSRKSFFHHAHW

SEQ ID NO: 99193 - protein, 249 aa, Unknown
  Obtained from environmental sample
  DOMAIN (1)...(249): Carbon starvation protein CstA
  misc_feature (1)..(249): Xaa is any amino acid
MNGLLLLLISGITLFLAYLLYGRFLARKWGIDPSLKTPACELEDGQEYVPTSPAVVFGHEFASIAGAGPINGPIIAAMFGWVPVLLWLLFGSVFFGAMHDFAALYTSVRNKGKSIGYVIECYVGKTGKRLFLIFVWLFSILIAAAFADIVAGTFDGFDSGGMHNSINASVASSSCLFVIAAIGLGFFIRKRKASGLASGIIAVDLLIICIVMGLFFPVFLNKTVWLYLIFAYIFIASIVPVWTLGQPRN

SEQ ID NO: 99194 - protein, 114 aa, Unknown
  Obtained from environmental sample
  misc_feature (1)..(114): Xaa is any amino acid
VTLNRIDASGVLTGKRVMDGKTLLQTLWPEVTFGEHVQVLGVNETCIGNGSCIGDGAWLNSNFRDRKRHLTIGACVMVGRYSVLSSHSLVELGDYALLASRVHIADNNHVFSDI

SEQ ID NO: 99195 - protein, 180 aa, Unknown
  Obtained from environmental sample
  misc_feature (1)..(180): Xaa is any amino acid
KYNTDKKIIKEIIGDGDLVNIIKRMEKSLEPDIMHEILSSCACTGGKKYLKYCENIGKEIAGKSLKEKVDFLNKDSESEKIILKSANTMTFILTNKDNKKYKCVCSATVKKGIKVADLTLKSNDSDDCVMPLSYCFCCAGSMHLHLQLKLSIEIKTKEIVSSPINSKGAKPCEIMFEIIS

SEQ ID NO: 99196 - protein, 119 aa, Unknown; identical to SEQ ID NO: 88166
  Obtained from environmental sample
  DOMAIN (50)...(119): PCRF domain
  misc_feature (1)..(119): Xaa is any amino acid

SEQ ID NO: 99197 - protein, 180 aa, Unknown
  Obtained from environmental sample
  DOMAIN (44)...(179): Protein tyrosine kinase
  misc_feature (1)..(180): Xaa is any amino acid
MEDSERQQQDSAVLRIPQGASGVANPYSERLTAMPAAGAKLGPYIVRERIGEGGSAAVFKVWHEELETVRAVKVLKQGGKLDARERFFTEAKILADIRHPNIVEIFDIGYMERGEPYLVLEYVEGISVKELIRGGRLPVAVALSIAYSVSRALHYAHLKSYTLYGKVYKGLIHRDIKPEN

SEQ ID NO: 99198 - protein, 77 aa, Unknown
  Obtained from environmental sample
  misc_feature (1)..(77): Xaa is any amino acid
MVIHRNEMITEDKEKLRDGEGNTRLTYLLDGSTQKNARMFAEITLDKGCSIGYHRHDSETEYYFILSGTGIVNDDGK

SEQ ID NO: 99199 - protein, 288 aa, Unknown
  Obtained from environmental sample
  DOMAIN (37)...(208): DEAD/DEAH box helicase
  misc_feature (1)..(288): Xaa is any amino acid
MKEHVEDTLVRQLPLNSSVETIEGFGLEDVDCPMVKFPVFTIEMETGTGKTYTYLRTIHELNKNFGFKKFIVVVPSIAIYEGTIAAFNQTRSHLNTLYENENSNLVEYDGSHPEKTRDFAGSQIIEIMVITMQSFNTAGPRGNNIYKRSDKLTDGLLPYQYIQKTRPILILDESQNYQSEKSIKALQTLNPLFAINYSATPVKKYNLVYRLSPVDAFLFNLVKKIKVLGVTQETNNNIGKIVLKKIDKNLRAVLLLPVIQDGKKVKKEMTFKKDDDIFFRTQEPLILQ

SEQ ID NO: 99200 - protein, 257 aa, Unknown
  Obtained from environmental sample
  DOMAIN (113)...(257): DNA methylase
  misc_feature (1)..(257): Xaa is any amino acid
MEKFSSKYKLNEEQLNQLKQIVPEAFKDNELDFNSLYEALSDFTEKEEDDIEQFGLSWPGKRAAKRAAAIPPVGTLVPVPGEGIDEENTRNIYIEGDNLEVLKIIKKAYQGKIKMIYIDPPYNTGDDFIYPDDFSESVESYQKQTGQVDKDGVKMTTNNRSDGRFHSKWCSMIYPRLRLARELLREDGVIFISIDDNEVAQLRKICDEIFGENNFEGHIHWRRRHNQPNDKTKMIAIVAEHIIAYAKNSKDLRIAGV

SEQ ID NO: 99201 - protein, 265 aa, Unknown
  Obtained from environmental sample
  DOMAIN (67)...(106): RNA-metabolising metallo-beta-lactamase
  misc_feature (1)..(265): Xaa is any amino acid
MPSKIMILCTGTQAEPLSGLARILKSEVKGATPWPGDRLILSSRAIPGSEVPISRMLDRAARLGMETSLEGLGPVHVTGHAHQEDAARMMDLLDPEYVIPVHGTYRLLQGHAKLAQSKGWVSKNTPLLDDGRCMQLFSDGTARLAGCVPVGKCFVDQRVEHRVDARVVHDRLILQEDGIVVATVQLDKKGRLVGEPSIVSRGFVILNDDQAYSTLLKETVRKTLDDAPSEVRGDREMLSELLRQSLKRIIKKTTQGRPMIVTMLL

SEQ ID NO: 99202 - protein, 231 aa, Unknown
  Obtained from environmental sample
  misc_feature (1)..(231): Xaa is any amino acid
MPAILNLIWLLPILAVFASLLIPRQQNLALKMFHATCALANVVLCVFFVIKIYGLALSSQAPIGNALQLQYLTDVSWFPVLNIRFIIGADALSILMCFLASIIVFTGILMSWEVERPKEFFAMIQILGAGVMGVFLSFDLFLFMIFYEVEALAMYLMIAGWGTGRKDYCGKKLTLTLALGSAFALIVVIAMYFEGGIGSWDIRKLADVAFSEKFQMWAFPLLFIGFAISGS

SEQ ID NO: 99203 - protein, 267 aa, Unknown
  Obtained from environmental sample
  misc_feature (1)..(267): Xaa is any amino acid
QEKKEREKREAEKRERERIEKEKREADKKEQKRLEKARKEAEKNEQERLKREKKEQEKRDKEKKAQEKRAGGTAASAPAPAPAAEAPAQTEPQPEPVKPAVPAGAKKQPEPAKPAAPAEAKKQPEPVKPETPVKTAPADDDDDALTAPAKPDGSAKGDGLTKPGDAPKAESPPKPAEPAKADAAPKPAEPAKVDAAPKPAEPAKVDAAPKPAEPAKVDAATKPAEPAKVDAAPKPAEPAKVDAAPKPAEPAKVDAAPKPAEPAKKAD

SEQ ID NO: 99204 - protein, 183 aa, Unknown
  Obtained from environmental sample
  misc_feature (1)..(183): Xaa is any amino acid
MLRGVAIGNSVWSLNEYANIALNDSADYARLRADGFNAARFYLSYKFFESDLNPYSYKQGGWDFLDKNLQWAQENGIKFILNMHVPQGGFQSNAEGAALWEVEENQKRLIALWREIAKRYANQPAIAAYDILNEPVVSKEKSQWQKLAQKIVNAIREVDNNHLILVERINGIIPNDYSNDSEM

SEQ ID NO: 99205 - protein, 274 aa, Unknown
  Obtained from environmental sample
  DOMAIN (119)...(195): Helicase conserved C-terminal domain
  misc_feature (1)..(274): Xaa is any amino acid
MEISFLVLDEADRMFDMGFYPELRKLIKVVPPVDRRQTMLFSATLNAWVKNLAWEYTKTPYEIDIKPEIVTVEEITQILYHVPSEEKMQLLLGILKREQPESVIIFCNTKKYTEIIAKRLQMNGRTCEFIMGDLPQVKRLKIIDDVKTGKVKILVATDVAARGLDIESLSMVINYDLPIEAENYVHRIGRTARAGKTGKAITLASEQDVYELPAIERYIGKKIPSEIAMQELYEKDLSAGQIIHTDFYEERSHVTSHSGTKTTVGKTRETGIAV

SEQ ID NO: 99206 - protein, 280 aa, Unknown
  Obtained from environmental sample
  DOMAIN (1)...(68): Bacterial Ig-like domain (group 2)
  misc_feature (1)..(280): Xaa is any amino acid
AGIIIGNTITLTAAINPSDATNKNVRWNSSDTAVATVSEGGVVTAKNVGTTNIIVTTVDGGKTALCTVTVGKAAVVVTGISLNKTSANILVGAIETLSAAIMPTNATNQDVTWSSSDTTVATVSAGGVVTGVSAGTATITVTTVDGNKTASCNVTVSPIAVTGVSLKESTFILVNKTEPLYAIVEPDNATNKNVTWKSNNTAVATVSTTGVVTGVSGGTATITVTTVDGNKTASCIVTVSLYAVSVTGVSLNKTSASIIVGSTDDLTAEITPYNATNQNI

SEQ ID NO: 99207 - protein, 259 aa, Unknown
  Obtained from environmental sample
  misc_feature (1)..(259): Xaa is any amino acid
MIENFEKMVSSLFVKKNIDLYITGSNALLLSGELSTLLTGRYIAINITPYSFAEYREAFNKETNTDKLFRQYMNASHFPEAVNISQTTPELVNDYIRSIYDTVINKDISQRYKLRVVDNLRRVIDFVFNSIGNPISASNIANALNRNSDKEISHNTVKNYLDYLCQSFVLYKARRYDVKGKELLTTCEKYYLVDLGLRQITSGDKFDSELDHKLENLVYFELLRRGGEVFVGKNKDQEIDFIVQKNAKEREYYQVAYTV

SEQ ID NO: 99208 - protein, 111 aa, Unknown
  Obtained from environmental sample
  misc_feature (1)..(111): Xaa is any amino acid
MIDTGGSVETLIHALAPLKPKDINVIAVHPIFSPPASERLFSLSKESLLNHIIVTDTVSCSDSFIKSIPNLEVVHSAELSAKIIKSIVNNESMSKLLRTFNAGIYLGSKEK

SEQ ID NO: 99209 - protein, 82 aa, Unknown
  Obtained from environmental sample
  misc_feature (1)..(82): Xaa is any amino acid
NLSGGCHKEIAAPITPDNPRGLPILRQYYHVAVLVPYFNERGVFQVAVFESAEETSFNAFKTRYPGQFINLLRIPIDGSFNP

SEQ ID NO: 99210 - protein, 172 aa, Unknown
  Obtained from environmental sample
  misc_feature (1)..(172): Xaa is any amino acid
MKIKETLKEQRQKKGLLIAAHRGTYGGDIMFNTIAAYENALRHKADIIELDAAMTTDGVFYCFHDGKEILVLGTDRNIRTMTSSYVDEQYMRNPSLGITSEKVNRLEDALEYLRGRCLINVDRAWFYWKEIITLIKRMGMEEQVILKSPPKAEDLALLEAMAPDMGYMPILN

SEQ ID NO: 99211 - protein, 273 aa, Unknown
  Obtained from environmental sample
  DOMAIN (37)...(180): GAF domain
  misc_feature (1)..(273): Xaa is any amino acid
GIGAQHPKALKALERREKMSDTLNKVSVMFLSQREDTFEETMTAGVREIADLFDLDRLSIWRNLKRPDAMHASQIYRWDRNAGGTTVPTAGLEDVAYTKLAPRWETLFAKGEIINSPINLLPEAAMLRSFGVVSAFIAPIFFNNDLWGFALLEDRRKERFFEKDCAEMMLSAVLLCANTVMRADMEREIINANEFTRAVIDASPLGFNIFDENARIIECNDVILKIFGTTKEYYLEHFYEFSPEYQNDGAKSKDKAVEVVRRALNGENLVLEW

SEQ ID NO: 99212 - protein, 294 aa, Unknown
  Obtained from environmental sample
  DOMAIN (126)...(239): MMPL family
  misc_feature (1)..(294): Xaa is any amino acid
GFLGSRAELDNNNIRFLPAGNQAKIISEYIDDTFGGQVMILAGLERPYRTVFEKGFLARIRDFSRAVENVAYVKSVNSIMSTQYITGDGDSIVVADLVTEDFSGTDEEITELKRRIASWDLFRGSLVSDDLSAAQVLITLDALTADFTRPEVTRSIETIRKIADELFAGEAEVYFTGQPIVNATINKSIIADNLLLIPLVVIVVLAMLFLSFRRFTFVVLPFLTVIIAVVWTVGLAALLGIKLSVLTTILPVILTAVGSAYGIHIVTHYMEDTRGKTFTAAAHRGLVVDLVKKL

SEQ ID NO: 99213 - protein, 191 aa, Unknown
  Obtained from environmental sample
  DOMAIN (1)...(191): Alanine racemase, N-terminal domain
  misc_feature (1)..(191): Xaa is any amino acid
MSIVENLAQIEERIQKACSAAGRKRDEITLMGVTKFLTRDKVEEAYTAGIRCFGESRVKEAAEKFGPIKAEHPFQLHLIGGLQRNKAKTAALLFDCVQSIDREEIITELEKHSAGREKPLEVLLELHTGEETKSGFADIDAVLKAAQTVTDSKFLKARGLMTMAPFTQDTELIRGSFRQVVKVQKELKGVS

SEQ ID NO: 99214 - protein, 278 aa, Unknown
  Obtained from environmental sample
  DOMAIN (224)...(275): CarD-like/TRCF domain
  misc_feature (1)..(278): Xaa is any amino acid
SADESAIRKLEHQWKTVGDLDGAEWFLHWFGLNSASILDYLPTDAIVLWDDIVPIRRRLGEAVDNYAHHQERVPEAFAPLVSPPSELLLDEKTIAEELSCYDVVYLDTVDFPKDTTIFPVSFLPQPPLQQEMSLIVNDLRERAGDGYRCVIACHSAGHAERMAELLGNDVGAVTEVVTGALHSGFICSDIKLLAYTESQIFNRPYQAVKVKKQKTGIPLGSFDQLSVQDIVVHEEHGIGRFVGVERVKTGDSVSDCMVIVYADNAKVYVPIEDFHKVQ

SEQ ID NO: 99215 - protein, 294 aa, Unknown
  Obtained from environmental sample
  misc_feature (1)..(294): Xaa is any amino acid
EYVRQVISDTKKLADPFINRPVGEQPVPIQACAYNKKLYLIDNPERETFVNSELKSFGGVDCEDDEISTERILFYSAIYGLFPYDLLKFSPSRKSQTATLEAGEYNKAYFDMISRIGPNPLDTPVITPHLHKHWHLISEMPDLNNELQEEQEKRIFKALVLGILYKRIRYEKAGEIYKYSLWLKDSIKEIQLVVSNGSPCDAFYEIIDALTINPVVVKKIEDAINNELETARKKNKINFEQSALAEGINTLTLRELSGDGRSMSIFGIAAAFKATMPPDEFIVDQGLMLMETHA

SEQ ID NO: 99216 - protein, 80 aa, Unknown
  Obtained from environmental sample
  misc_feature (1)..(80): Xaa is any amino acid
MRRKAAGIGFVPVIPPKRNRREPWEYDKERCKKRNEVKRLFLHLKRFRKIFTRYDKLDVVFAGFIYFAMVADAIISVNRL

SEQ ID NO: 99217 - protein, 159 aa, Unknown
  Obtained from environmental sample
  DOMAIN (4)...(117): Oxidoreductase family, NAD-binding Rossmann fold
  misc_feature (1)..(159): Xaa is any amino acid
MQKLKVAVCGVGSLGQHHARVVAASEMAELVAVVDTDADRGKEIAAKCNTSWVPDLGAVLQSVDAVQVAAPTGAHLDVGIQILESGKHLLMEKPLAANLGQGRELLELFNKKKTVNSQLIGAVGHLERYNPAVVALRNSEMRPRFAEAIRVSPFPMRSL

SEQ ID NO: 99218 - protein, 124 aa, Unknown
  Obtained from environmental sample
  misc_feature (1)..(124): Xaa is any amino acid
MATYTEMEDFINIGEYKSGSNPVVDEAIAKHVPIEEFLVQEVDEPSSLEDTLTAMSEIAGIQIPTEEMKDNNAKLVSAARPAQVKKEKQQAQKTTSAQDTSSALNSVAALFSSMPGIGGLGISK

SEQ ID NO: 99219 - protein, 189 aa, Unknown
  Obtained from environmental sample
  DOMAIN (23)...(187): Ribosome recycling factor
  misc_feature (1)..(189): Xaa is any amino acid
MQANEIGEILKEMSVRIDKTIAAVKKEFSHIRTGRASAGILEDVHVEYYDQQQPIAQLATVSVPEPRMILISPWDAGAGKAIDKAIQKANLGLGINFDGKVIRLTFPELTEERRKEFVKNAQKMTEEGKVAFRNIRRDTNEHLKKLLKDKLITEDEEKNAIEQTQKLTDEAVKNLEHILKNKEKEILEI

SEQ ID NO: 99220 - protein, 134 aa, Unknown
  Obtained from environmental sample
  DOMAIN (13)...(133): Peptidase family M50
  misc_feature (1)..(134): Xaa is any amino acid
MEAVFDTVIKIIYGLVTLGILVFVHELGHFIAGKACGIRVIAFSIGFGRGIVSFEHKGTLYKIGWLPIGGYCRFAGEGEDLSDDRKGEPDEMYSRPAWARLITVSAGVFFNFAFAILIFFILSLTGYGYQSNDN

SEQ ID NO: 99221 - protein, 146 aa, Unknown
  Obtained from environmental sample
  DOMAIN (1)...(142): Cytidylyltransferase family
  misc_feature (1)..(146): Xaa is any amino acid
VPDKGPWITLLAFVIVWMTDSFAYFIGRLIGRHPLGLAASPKKTVEGTLAGLLFAIGAAAGLKLIFPEAYSGWAWMSSWPVFLVLVFILSVVDQIGDLAESVFKRSLGTKDSGALVPGHGGLLDVFDAQLLVSPLMLGLVILLSGL

SEQ ID NO: 99222 - protein, 85 aa, Unknown
  Obtained from environmental sample
  DOMAIN (2)...(81): Ribosomal L27 protein
  misc_feature (1)..(85): Xaa is any amino acid
MARKRGGSGAKNGRDSNPQYLGVKVFGGGVVKAGTILVRQRGTHIHPGTNVGCGGDYTLFALKDGTVSYGQRRGRKIAVVSPAES

SEQ ID NO: 99223 - protein, 287 aa, Unknown
  Obtained from environmental sample
  misc_feature (1)..(287): Xaa is any amino acid
SPANGSREKRIRNKTKRGILGGSPLEINAYLLFFVPDEYKTMELCALAAGRDGMALKYVPPEMRSREVCKRAVYNHWYALAYVGENEKTEELCQMAVEYEAKALKYVPEKFKTPKLCLKAVKGNGYTLEFVPEKLKTPELCTEAVKRQSRALKFVPEAMKTKELCLLALSPGKTWLKGFSENEEINCALAYVPQEFVTRELCLDAVSCVPDSLKFLPDKFKTQEIYNAAITKNGWALEYVPEEFKTYELCLEAVKEYGHALEYVPRKNKTAELLDAALKMTEAPYSL

SEQ ID NO: 99224 - protein, 280 aa, Unknown
  Obtained from environmental sample
  misc_feature (1)..(280): Xaa is any amino acid
MRQSAIAAFKRTKEEHSRSVAVPMADLGMMRVFYRSGDFSAVESQFEELNALGVPDSIKYHAYYIMGQTHIQRGDYQAARQLFTMIPENHPDYVFAYHAAAVANAMAENFQGAIADLEFVIQIKPKNKAQEEAINRSYVFLGFLYYEDLNTEGALARAVTALRKVPKNSYYYQDALLGLGWTALKARQWPDCLSAGKELASTATDPVLQSEGSLLQAYAYAMQKNYAQAVSLLDEASKKLGSYTGPNESDLAANRSEYENVRSEYETMGVRIDELGQARQ

SEQ ID NO: 99225 - protein, 276 aa, Unknown
  Obtained from environmental sample
  DOMAIN (1)...(272): tRNA synthetases class I (R)
  misc_feature (1)..(276): Xaa is any amino acid
MLAYKRCGNEATPKSAGVKSDRFVGDYYVMFNDKSNADPSWGEDAQKMLKEWEDGEPGTVELWKKMNKWALDGFRETYKLFGISFDKEYYESDIYKNGKEVVAEGLSKGIFYKREDGAAVVDLEEEKLGAKVLLRPDGTSVYIVQDLYLALLKDKEFKYDKSFYVVGNEQDRHFAVLIAVFKKLGYDVAGKMKHLSYGMVELPEGKMKSREGTVVDADDLILETKELAKREVAERYEVAEAEAEGRSLRIALAAVKYQLLKIDIAKNMVFDPKKAI

SEQ ID NO: 99226 - protein, 272 aa, Unknown
  Obtained from environmental sample
  DOMAIN (88)...(269): Bacterial conjugation TrbI-like protein
  misc_feature (1)..(272): Xaa is any amino acid
EDPSKKIGSDAEHIGGRGGGMNLTMPTLSNQPPPKQVYRAVQLDNPPLPASGATHVFTAPPPQSSQSPSSLGTQATLSSVPYDRTFVLRHFKPIPATIVNEIRAVENAGILPVMATVDRHVYSDNGRTIIVPAGTLMLGNVKGNLPGPYKTIGRIEIEWYRFIRPDGVEFNFTAEDNRPFSGDSQGRIGVPGYGSSDYLEQMVLPMLTAIVPAVTNLIAPVSDKIVNQIDLDRNVIVQSGQMRSSEMAKQQMIQSWNKVTEKLFMDMRTIPS

SEQ ID NO: 99227 - protein, 111 aa, Unknown
  Obtained from environmental sample
  misc_feature (1)..(111): Xaa is any amino acid
WSSLNRSGPGSYCDHPDSRHRDGVCRGVFFLLWNHRRRTLLINAGHYNRPVFDLLTFSLLAGLLLSSVGITLTVFLAVVAGPTYGLLGGIIPLAMGIGLLAFYGIKRGEKA

SEQ ID NO: 99228 - protein, 121 aa, Unknown
  Obtained from environmental sample
  DOMAIN (46)...(121): Divergent AAA domain
  misc_feature (1)..(121): Xaa is any amino acid
MNEITALLKQISLGEDSVLELKNIEYANDNVSGPNRNSMADEMAAMANSHGGIVVLGINDKTHELAGLPLDKLDLTETWVRNIANDLIKPPLECKIKKLSVALQEEKNIIVIDIQRSIFVH

SEQ ID NO: 99229 - protein, 222 aa, Unknown
  Obtained from environmental sample
  misc_feature (1)..(222): Xaa is any amino acid
NEMIIRQEDSKEDQWTGEIRRANAPDGERAVRSFKFNGIPLKELRWDGHGESGTFAADGEYTYELYATDQAGNTGRSNTLRFRMSTVDTPVMITTDTRAFSPNGDRVKDTINLNPQIQVKEGIVNYKVEIQDNTGRTVRTFEGRGTPPAAISWDGRTAENAQAPEGLYKASLELRYEQGNQPSAVSLPFELDITPPKGSLSAPYTSFSPNGKRANIPFSVKP

SEQ ID NO: 99230 - protein, 262 aa, Unknown
  Obtained from environmental sample
  misc_feature (1)..(262): Xaa is any amino acid
LQSRLGLLPSVNASASFSSSKGKTLDNTTFKIVEGQTVHSLSTSINGSVTLFKGLQQKNTIERNLYSLYAEIQNTEKLKNDLSINIALYYLQIIHAQEQLTVAENQLKLTLLQVERTAALVAAGSIPEGDLYEIQSQAAREELQVVTAQNTLDLSRLNLAQLLDLESKTNFQVAVPDFSNMTAIEPFASVDDVFANAEKSLPQIKAAEYSLKSSEKQLSIARGYRSPTLSLSGGYSTRYSSLATMPGATDSTYLLWDQLKDG

SEQ ID NO: 99231 - protein, 63 aa, Unknown
  Obtained from environmental sample
  misc_feature (1)..(63): Xaa is any amino acid
TEVISTSGKSYQFNINDIMNDLNMDLLDLTGQLNSGQSYDFDYDNQIISHDKYDAQPTYKKSK

SEQ ID NO: 99232 - protein, 134 aa, Unknown
  Obtained from environmental sample
  DOMAIN (1)...(128): ABC transporter
  misc_feature (1)..(134): Xaa is any amino acid
LEDEDSPSVRDFLLKNPFFLNSEHFVESEPFPKTNGALLGEALSLAGIPEHILEQKLPSLSNGELRRLLLARNYMEEPDLWILDDPFGGLDPEYRKFLAERIKLFQQKGIQMQINLKREDEQLLLESSPSNDCI

SEQ ID NO: 99233 - protein, 294 aa, Unknown
  Obtained from environmental sample
  misc_feature (1)..(294): Xaa is any amino acid
KQIFAFYDEDWGDWTEIQIQLAEKAQELGRTVLVLADDIDEADITPRLKKIGFFIDNWFPNEKELALYLGQRLKQRKWEGVDVGLELGDEEIRRIASLLTGRGFEEAENKFTVFVMKHYLKNRYGKKPCVIDRSVIDIFEKEIKTEWQKLESSQGLEQVKLDGFNANSMAGLEKLKNWLETAKELSSPKKILEMQQMGWKPPRGVLLMGIPGCGKSLSAKCIAASFGWSLYRLDFATVQNMWLAESERRLKEALDFVDSRSPCVLWIDEIEKGLSVSEGDNYTKKLLGMFLTYL

SEQ ID NO: 99234 - protein, 283 aa, Unknown
  Obtained from environmental sample
  DOMAIN (4)...(283): Bacterial extracellular solute-binding proteins, family 5 Middle
  misc_feature (1)..(283): Xaa is any amino acid
MEDGSEARITITKIDNKRFRFHFPRIVADPLLSTNRDFGPRHVYEPAKKANGVQGVRDLFSVASDPKLIPSMGKWFLVEYVPSQRLVFKRNPDYWNRDKAGISIPYLEEDIVQILPDQNTEYLVFKEGKLETYRARPEDIDELVNKANTAGYTVFNAEGNLGAGLWSFNQNPKNSSEPYYDWFTKKEFRQAMSCLLNRQRINAQVYRGLAEPKLDFFPPPNPYYNPDIVLEYQYNPQRALELLESVGFTRDRRGVLLDEKKRRVEFDLSFTADSTVTADIASI

SEQ ID NO: 99235 - protein, 242 aa, Unknown
  Obtained from environmental sample
  misc_feature (1)..(242): Xaa is any amino acid
MLAKFAKDAAERGVENCKIITLKDNPGPNYKQYALSAGIAEARGDYFLFTDGDCEVPPGWIRAMSSRMTDPEAGAVIGPVFKKKQGKGFFSLYQCYDHAVRYNYLAGAIGLGAAGGGFGNNLIISKAALDAAGGYDAVPVSPTEDAALISLIRSQRKYRVHAIALPDAAVETTAEKTWRGFISQTLRWNNGGLFSPEPMTRFNYNLLMLVITTGILVIPLLPFFPNLWPMTAGVYIVMLENT

SEQ ID NO: 99236 - protein, 237 aa, Unknown
  Obtained from environmental sample
  DOMAIN (1)...(133): Protein of unknown function (DUF1625)
  misc_feature (1)..(237): Xaa is any amino acid
ASPQIGDVRITLTKVVPAEISIIAKVTGNSFEEFISPRTGRTFSSVEMGTVSAETMFKHASNLNKFITWLLRIIGVILVVVSFKLIFNILPTLFKVLPPLATIVGAGVSLVCSVGGFAWSLIVISLAWLFYRPLIGIPLLLAAAFGIWFLRKKAKEKAGNGKTIVESGKLTGPAADGWTCACGTVNKGKFCVDCGKPKPAGVPQYKCDKCGWEPQDKAHPPKFCPTCGDPFDNGDIV

SEQ ID NO: 99237 - protein, 156 aa, Unknown
  Obtained from environmental sample
  DOMAIN (70)...(155): DHH family
  misc_feature (1)..(156): Xaa is any amino acid
MRREPFGAVVPWKRIQSEWDLDEGIARLAWMRGVDDPADLAWRLQPNWESTHEPYGMDGMADAVARINAAIANKEKIVVYGDYDVDGVTATALLVRVLERLGADVTFFIPNRFSDGYGLHLECIRELAQTRSPKLLVSVDCGIRSQGEVAASSELG

SEQ ID NO: 99238 - protein, 142 aa, Unknown
  Obtained from environmental sample
  misc_feature (1)..(142): Xaa is any amino acid
MTVSTFKRGLKLNTQKHATEGKAVEQAPLPKQVVIPINQHFGAPNKALVSVGDKVRRGQVIADGMAPGPMTVPVHASISGVVKKIEPRPQSNNVEGFCVIIEADPAGVQEDLFMSPLDPFACTNEEALRRIREAGIVGMGGA

SEQ ID NO: 99239 - protein, 155 aa, Unknown
  Obtained from environmental sample
  misc_feature (1)..(155): Xaa is any amino acid
MQFLKQVKPEDVAILFVAAHGVTDDDVFYVLPSDIPIDSAGLHPDLSKAINIEDIMNAVDIPGRKIVLIDTCQSGGVDNNRLIRTLKNRSTAIFTAAQQYELAQESDDYGGHFTYSIVEGLRGSNNPSGKLVDLGVFVTNTVEQLSRFAGREKIR

SEQ ID NO: 99240 - protein, 267 aa, Unknown
  Obtained from environmental sample
  misc_feature (1)..(267): Xaa is any amino acid
NEVENQGMPEMLEIQKTLVSIVRGLDDRPVTCALQPHVHPKTLIGAPAAELVKLTKKLAKDVDVLGLNYHEDLFKDYSAGIDRPIIATECYEYYSGTAVNFEDVTTKNPWSYVLENDNVIGQFIWAGIDYLGESSWPAKGWTGSILDICGFRKPNAWFRKSIWSDEPVVYLAFYDQNIKPDYCRGRWSFPPLSSHLNHDHFKRRTVTAVIFSNCETVSLWINGKKLGSKSPKDFANNIIEWTFEYPSGEIKTAGYRNGKEVCVYCLK

SEQ ID NO: 99241 - protein, 197 aa, Unknown
  Obtained from environmental sample
  misc_feature (1)..(197): Xaa is any amino acid
MHEMFRADIAAKMPVDAADPKAWGDGQVFLAEKALELGLISGIVTDRDELIARINKENHMDKAELAQKHPELLTQLLAEADAAMRAAHEDRLEDALAVAEANMLALVRIVAGDDAADKVAKLAASGLTAEQVESLAAIFPASASAPAGEGKPELSGAQKELLEHLRAATPGPIGTSVIPKKTDRIQAAIDQIASVRA

SEQ ID NO: 99242 - protein, 213 aa, Unknown
  Obtained from environmental sample
  misc_feature (1)..(213): Xaa is any amino acid
MVAPVRLAPSAGRISRDAGSRRGGLSHFNPPFSYSLDQQARERILAQSRSADLAANDWAANSGINSITTNAVGTGLRPQSHINAKRLGISVEAARELQEAIEAVWREWTARAHVRGKLHFEDLQFLGLRSMLRSGEMLHLPVMLDEPGRKIQLAIQDVLPTRLRTPLDLATDASIVDGVQLGPYGAPEAYWLATPSAVLSRTLDITGLSSDQF

SEQ ID NO: 99243 - protein, 132 aa, Unknown
  Obtained from environmental sample
  DOMAIN (84)...(119): Sel1 repeat
  misc_feature (1)..(132): Xaa is any amino acid
AYYSKAAKEGYAPAQSNFGFCCENGSGIAKDINQAFELYKEAAAKGNVSAQFSLGGCYEFGKGTEKDLVKAFEWYKKSAENGYAPAQNCLGICYENGNGTAKNLLAASEWYAVAVAQGYTAAKKNLDNLKKK

SEQ ID NO: 99244 - protein, 265 aa, Unknown
  Obtained from environmental sample
  misc_feature (1)..(265): Xaa is any amino acid
KSESQTIMVKVDTSSLKKQQDSIAALKNMPVDEHGLLIKLFSARKKTKWGSYEIEKCKEWFVITDEQRSGVDEQRHFVEQALSTPDFAILEGPPGSGKTTVILEIVCQLAKLGKRVLLCGSTHVAIDNILERLNEKRGETSLLEKCQILPIRIGESGKISDDVENFRLENLIRKNNIDAERDEKGKYKYNGQVRLLLDSANLVCGTTLGILQHPKFRERNRKRDDGKYSSWKEPIIPEFDYLIIDESSKTTFQEFLVPALYAKKW

SEQ ID NO: 99245 - protein, 51 aa, Unknown
  Obtained from environmental sample
  misc_feature (1)..(51): Xaa is any amino acid
MAEAIGEGHITEGRPHRASGELAFHVLDVMHGIHDASASGKYYEPKSGCHL

SEQ ID NO: 99246 - protein, 272 aa, Unknown
  Obtained from environmental sample
  DOMAIN (1)...(272): Dehydratase family
  misc_feature (1)..(272): Xaa is any amino acid
TVVATHKNRYKLVDKAADLIVKMAKRYYEEGDESVLPRSIAVKEAFNNAMALDIAMGGSSNTVLHLLAIAREAGVDFHMEDIDRLSRKIPVLCKVAPSCAYHVEDVNRAGGIIGIMAELSRAGLVDTKVKRLESATLADTIEAFDIRSPKITQEATSLYKSAPGGYRNLEFGSQDKMYGEFDLDRNGGCVRDIDHCYFKDGGLAVLFGNIAKRGCIVKTAGVDESIFKFSGTAKIYDSQEAACDGILGGEIKAGDVVVIRYEGPRGGPGMQE

SEQ ID NO: 99247 - protein, 231 aa, Unknown
  Obtained from environmental sample
  DOMAIN (1)...(228): NAD-dependent DNA ligase adenylation domain
  misc_feature (1)..(231): Xaa is any amino acid
VRDDPVIEDAEYDRLFRELCGIEASYPELRDASSPTLKVGGVVLDSLETREHRLRMYSLDNVFSWGEFHEFVDRMLRLLPVTPREAITFWVDPKMDGLAMELIYEKGLFTAALTRGDGEKGEIVTESMRTVKNVPLRLKGDALPGYIEVRGEVVIARKDFEVLNARRLADGARPFANPRNAAAGSVRQLDSRITAARPLRFIAYGVGLVDASPGGPWPRYDILVQNPDGHG

SEQ ID NO: 99248 - protein, 250 aa, Unknown
  Obtained from environmental sample
  misc_feature (1)..(250): Xaa is any amino acid
MAAAIALQEESNSILDRGLIVEFESFESIGEAFEENSFGRGIELLNIRYTDKRTYATVFVPDGSLQKLENKINAYFHEQKRVDEQPLDYQRLIDTIANLRKATVKALWTDTILFPENRDEVLCWEVWLTARGNRQNQLDGFKALAKTLNIETSDSFFEFKERTVLLARATTKQLEQSLHLLNNIAELRKAKTLTDFFTEMEGKEQKEWLVDLQKRVVSPKETDKTPFICILDTGINAAHPLLEKFLGVND

SEQ ID NO: 99249 - protein, 44 aa, Unknown
  Obtained from environmental sample
  misc_feature (1)..(44): Xaa is any amino acid
MDNITLNVSGMSCEHCVKAVNNALSSLAGVKDVAVSLKDGKVSF

SEQ ID NO: 99250 - protein, 269 aa, Unknown
  Obtained from environmental sample
  DOMAIN (1)...(269): DNA topoisomerase
  misc_feature (1)..(269): Xaa is any amino acid
RADWLVGMNLTRFMSIGSPPPPLSVGRVQTAVLASVAGRNNEVKNFVAVKYKKLEASVLSKDGVAIKAFLENPRLCNTSFFECDWPYIHAAMENCKNNIFGIDSSDVSSKEKRIKPPKLLNITALQKEAFRRYGFKPEETLDIAQALYETHKCLSYPRTPSRVMGDNNAELFLEKFNLLRLDSSLSCFSGSSLIAADNKHIFNSAQLEDHHALIPLARLPSTANEKEHKIYSIVLESFFIVCMPDFIYNEKSLRFHVSKYLFSSKIRET

SEQ ID NO: 99251 - protein, 152 aa, Unknown
  Obtained from environmental sample
  DOMAIN (35)...(152): IPP transferase
  misc_feature (1)..(152): Xaa is any amino acid
MKPLVFILFGPTASGKTALLQRLDKNIEIISADSMQVYRGMDIGTAKPTPEERAKTPHHLIDIRNPDEQFNAGDFVRLAKEACHAALARGALPVVSGGTGFYIKNLVMGLGEAPPSDQGLRLELKKELALNGASSLMEELAKADPVSAARIH

SEQ ID NO: 99252 - protein, 71 aa, Unknown
  Obtained from environmental sample
  misc_feature (1)..(71): Xaa is any amino acid
MIFPLEELIGYEKNMYEITAASSRRSYQLSMLYAANDDDVKYWIDDNDGKVVSLAARQVFTKEIVFRRENQ

SEQ ID NO: 99253 - protein, 234 aa, Unknown
  Obtained from environmental sample
  DOMAIN (7)...(120): Response regulator receiver domain
  misc_feature (1)..(234): Xaa is any amino acid
MPDSALQTVLAVDDVDINVMMLEEILKTDYNVLTANNGKQALEILSRAKVLPKIILLDVQMPEMDGREMFEILKADGAFKRIPVIFITAANDSETELLAAGAVDFINKPFTPEIVKLRVRNQISLKNYSDSLEEMVAQKTAEVIKKTEEANKTLDNALQGLANVIEHRDLESGEHVKRTQLYVGELANYLIRSRSPYADVLSEMQPDIIVKSMALHDVGKIAIPDRILQKPGRL

SEQ ID NO: 99254 - protein, 224 aa, Unknown
  Obtained from environmental sample
  misc_feature (1)..(224): Xaa is any amino acid
MTQVDFFDNLTFVSTDTRTWSTTYTIPGHKKSEYIDNPVEREYIVEKEGYQLTILIRAYDDGVAFRYVLPGPGGTNITDEYTEYHLPEQTVAWGYPWINTYEQRCVYYKYEDLLTIHQAETVAAKRSDSADSEEAVLELSTLAMPLLTSQNGVYALYSEANVYNAGGSYCPSVLKSSGDAVFKFEPAPDQANFGDFKSLEIAFPFQTPWRVVIIAEDLNVLVNS

SEQ ID NO: 99255 - protein, 265 aa, Unknown
  Obtained from environmental sample
  misc_feature (1)..(265): Xaa is any amino acid
VDTDGADSHILDTSEIGVAHILISQEELKILADSADAKRIREEQNALQAEVQEFPWYEEVEEIVGTWIATGRMVSDTGISQTQNVQNELITLRTILSEDEIQRYREVGHICANIVETVCKEAKIGDTEREIAGRVMGKCEAAGVNPVCVLVGSDERITKYRHLLPTDKKIKNSLLVVLGGEKYGLNISLTRMVCFGEPTDTFMERYQQNQALFAKVNGFMQAGFSYREHFAAICSFYEEMGYPDGWRYLHQGGLTGYACREIVVK

SEQ ID NO: 99256 - protein, 220 aa, Unknown
  Obtained from environmental sample
  misc_feature (1)..(220): Xaa is any amino acid
MIKDSELTVFRAGGVSLMRIIAPVVIAGLLASLLSYGNSELLAPWANTVSEDLIDKVVMKKPVADVLENTFFKESDARYFYIRKIDKQTNQMDDVYIYEVTGAFPRVITAKRAQWDGREWLLQNGVVHKYAEDGSLSYQGNFAVMRINIDKGFYNYYKSQKSPMEMSSKELQEKIANLKQSGQSTGKMEVAYYMKYSQPLACLIFSLVGTALLLFFMGSG

SEQ ID NO: 99257 - protein, 269 aa, Unknown
  Obtained from environmental sample
  DOMAIN (25)...(58): Tetratricopeptide repeat
  misc_feature (1)..(269): Xaa is any amino acid
VLAHNNFRRAKAEAEAIIAIDQNNAEAYCILGRAQQALGDYSQAVVSFRTALALDPYNKTIHNYYQETAVQNLDEKIVNLAKKTEKNIWKYSLHYELGMDYFHRGLLNEAISELQIAVKDTALSGRAHKMQGICYKELGRYDLAATQFAKALEKTLGTNTDERLKLLFYIGLSYEALGLHQEALRVYEEISTLDLNYENITKRIAKLQSFSWVEIRGKALAAVVADPVSKRLICSWAKNNESEEYAKKHKNKNIDMSFSMEHNNQAVSL

SEQ ID NO: 99258 - protein, 177 aa, Unknown
  Obtained from environmental sample
  misc_feature (1)..(177): Xaa is any amino acid
MQEQQEDYKWYSASQSEFTLNTAKELIEFANLVNSGNNFEGKTVKLGANIRLNNIANWSDWATKPPANKWTPIGTKDNPFAGTFDGSGYEISGVYVKPNLSTGYVSAGLFYSLKTGGIIKNLGIANSYIEGIEGLTGGLAGMNGGTITNSHCYLCNVVGMATPATAISITGGLWELT

SEQ ID NO: 99259 - protein, 125 aa, Unknown
  Obtained from environmental sample
  misc_feature (1)..(125): Xaa is any amino acid
VDHAVGEVALSPTEFRFTGKEFDKETGLYYYGARYLDPRTSRWISGDPAMGEYIPQAPVNDEARKRNKNLPGMGGIFNIVNMHVYHYAGNNPIVMRDPDGRQSVDDLILFSILKENKYFDTPVKH

SEQ ID NO: 99260 - protein, 64 aa, Unknown
  Obtained from environmental sample
  misc_feature (1)..(64): Xaa is any amino acid
NCSYDTKSHNYPTRIKIHFQGKNGWIVLDQIRTIDKARLVKILGKLEVDKINELKNIINEMLVK

SEQ ID NO: 99261 - protein, 168 aa, Unknown
  Obtained from environmental sample
  misc_feature (1)..(168): Xaa is any amino acid
AKENGGIFLHANPWVMIAETLVGNGDRAFQYYNQINPAARINGRIDEFESEPYCYPQNILGNEHKQFGLGRNAWLSGTSSWTYQAATQYILGVKATMKGLSINPCVPKSWKEFGIKRKFRGSVYEISVKNPKGVSKGIKSISINGREIVGNVLPIFPGKKHTVKVVMG

SEQ ID NO: 99262 - protein, 193 aa, Unknown
  Obtained from environmental sample
  misc_feature (1)..(193): Xaa is any amino acid
VNSVVVLDEAQLVPTDYLEPILETMRLLTEHYRVSFAICTATQPVFEKQKEFPVFPGLPEGSIEEIIQDVSGLYKSLERVKVETPKDLSVSVEWKELAEELSQYDQVLCVVSDRKSCRELHALMPNGTYHLSALMCAQHRSDTIAEIRKKLETGETVNVVSTQLVEAGVDMDFPVVYRALAGLDYIAQAAGRC

SEQ ID NO: 99263 - protein, 241 aa, Unknown
  Obtained from environmental sample
  misc_feature (1)..(241): Xaa is any amino acid
MILQALKEYYDRKAADPESSIAPIGWEWKEIPFIILLDKKGLFIQFEDTREGEGIKKRGKSFLVPQGVKRASGIAANLLWDNTGYVLGLANTEGLSIDEKAKKLSRVPEQKKAFIERIQNELSDTPRKNAILAFLSNLNIQALEKTSQWEDVYRAGPTMSFRFDGDYQLYCQSDEVKKALTGKTDVDDNNGLCLITGEKDRISTLHTAIKGVWGAQTSGANIVSFNLEAFRSFGKEQGQNA

SEQ ID NO: 99264 - protein, 268 aa, Unknown
  Obtained from environmental sample
  misc_feature (1)..(268): Xaa is any amino acid
GTTGDPEKRPKLAVFFNGSAATLEMKSKEVPAGMITINPPIEGYWIWRDDDTLIFITEQTWRIGKRYTVNFSKDLFPPHIKANNSFNFDIEEFSLWIIEKEFYIDPEDSAIKRALFTVRTNYPLDTASLEKNISITPQIKADSGSLKKRPYQYSLTYNEDRTRAYITSEPLGMPAKVIDMRLTISAGVRDANNEGKAAESQSADVEIPGVSSFVRVDEMSHVLVKNDKQLYDQVLVMETRGTIDAAELARNITAWILPKDLPELQGWK

SEQ ID NO: 99265 - protein, 183 aa, Unknown
  Obtained from environmental sample
  DOMAIN (7)...(183): Family 4 glycosyl hydrolase
  misc_feature (1)..(183): Xaa is any amino acid
MKKDKLKICYIGGGSRNWALILMQDLAFEKDISGTIELFDIKHEDAQTNEIIGNKLMEKYNRSVWKFHANPSLQDALSESDIVIISILPGDFEEMAVDVHAPEKYGIYQSVGDTAGAGGIIRALRTIPQFRQIAQEIRKNAPAAWVINYTNPMSVCTRTLYKEFPLIKAFGCCHEVFHTQKLL

SEQ ID NO: 99266 - protein, 140 aa, Unknown
  Obtained from environmental sample
  misc_feature (1)..(140): Xaa is any amino acid
RGCIKLSGKWETFFEKIRSYCVDLALKAEKTHGTEFAVIWYAVIALLRCVSSSPDAAKRALETRLRGLNPENGKEEVSFIDDERSDERILDGIGDDLLINDQEPAALLEKNSLLENLIKETENLKGIKNDPKLALLVKEI

SEQ ID NO: 99267 - protein, 143 aa, Unknown
  Obtained from environmental sample
  misc_feature (1)..(143): Xaa is any amino acid
MKKIITTVIAVLIYAGAVFAADPVEGFWMSVDDKTGEIKSGWEIYESNGYLYGKMLSAVGFSSATRATRCRESYANFPVAGKVNQLPLLGPPWIFGLRREGPGHWTNGNVINPEDGNMYKCSIIHRPADGKKFKQETLEIRGQ

SEQ ID NO: 99268 - protein, 269 aa, Unknown
  Obtained from environmental sample
  misc_feature (1)..(269): Xaa is any amino acid
DGTDQLPSVQWVTQADMNAFNTAINTAQGVYEQTTATQTQVDAQVTALTAAITAFVPKAGTKQETTAPDKSALKASLDAANTKKNGVVVDTNADNVKPSDKWVTQAALDTFNTAITAAQGVYDSTAANQTQAQVDAAKTTLDAAITAFAPTAGSPVTTTNLESLITAANTKKTGVVVSADGTDKLPSENWVTQAMMTTFNTAITTAEGARDDANKTKASITNAETALTSATNAFTPQPGTKEEAEDTTAKKQELADKVVAAKDLVKDVI

SEQ ID NO: 99269 - protein, 252 aa, Unknown
  Obtained from environmental sample
  DOMAIN (1)...(249): Domain of unknown function (DUF323)
  misc_feature (1)..(252): Xaa is any amino acid
MGSPIAERERYDDEKQHKVQITKNFSIRKYPVTQELYRFVMGRSPSRFSSAPQGERAERRPVDTVCFYDTLVFCNKLSLLEGLTPVYQICESTDPSDWGKIPANFNATWNLVTMDSFANGYRLPTEAEWEYACRAGTETAYTTGADISDDTGWYTDNSNDMTHETGKKSVNAWGLYDIHGNVYEWCWDWYAPYPDKAEMDTMGPQFSPKNRRVMRGGSWGNAPARIRSAYRDYGDPYHKCSADGFRLVRSAQ

SEQ ID NO: 99270 - protein, 278 aa, Unknown
  Obtained from environmental sample
  DOMAIN (114)...(226): Phosphoglucomutase/phosphomannomutase, alpha/beta/alpha domain II
  misc_feature (1)..(278): Xaa is any amino acid
DSRHYSAEFSEACALIFAANGIKTYLFSSLRRTPELSFAIRHLGCDTGIVVTASHNPPQYNGYKAYWNDGSQVIPPHDVGIIEEVNNVKDIKEISKKEALDKGLLQIIDKEVDEPYQAMVKSHLFRPALIKEKAGEVKIVYTPLHGTGAFHVEKVLGDLGLKVITVPEQREGNGDFPTVSFPNPEEAAALDMAIKLGAKEKADVVMATDPDADRFGIAVPNKSGSFTLVTGNQMGVLLADYIFLSLKELGKLPKNAAMVNSMLQQEGKKKSRNITAAN

SEQ ID NO: 99271 - protein, 107 aa, Unknown
  Obtained from environmental sample
  DOMAIN (39)...(77): WD domain, G-beta repeat
  misc_feature (1)..(107): Xaa is any amino acid
MNKEQLAMSNGQRAMSVFARLIAIFLLLCGICLNAVAQDVAVFPQLGHTGNVTSVAFSPDGKQVLSGSIDGTIRLWDTESCREIKTFEDNTDEIIRSVAFSPDGKKF

SEQ ID NO: 99272 - protein, 273 aa, Unknown
  Obtained from environmental sample
  misc_feature (1)..(273): Xaa is any amino acid
KKFLKLYEAIGTDYDNNGERLNRACIDMFNKPMWRVENYVPMNRREQTGEEHDNRVIEDLLGMTGVGNKWVNRGFTEKREKIRPAGQRPIELGLYKTWARSVNATEHLLAYGPLVQRLNAVFKGYNAGEVKQALHDRWGEAAVKRLDNTIAEFANPNAARETANRDGLNKLVRGLRGKTATAYLAWKTSGVLKQMATSPWPYLQEIPPAQYLAACVEVAGGAGKINDFIREKSIYMKNRDFDPMVKLIREAMEKEDNPVLSKIDKFNAVGMKG

SEQ ID NO: 99273 - protein, 75 aa, Unknown
  Obtained from environmental sample
  DOMAIN (21)...(70): Sigma-70, region 4
  misc_feature (1)..(75): Xaa is any amino acid
MDKIPEGIYHDDHSELEFTQMIKSLQPELREIISLKYYSGYTLYEISEILDVPEGTVKSRLNRALNILRLEVLYE

SEQ ID NO: 99274 - protein, 295 aa, Unknown
  Obtained from environmental sample
  DOMAIN (58)...(211): Cyclophilin type peptidyl-prolyl cis-trans isomerase/CLD
  misc_feature (1)..(295): Xaa is any amino acid
FGIGSLLIACIGSCSNAKIGSLTKRISTGVQATTEKTAQRPGNETSPAAAADSALGNGLFARISTDRGDIVVQLEFQKTPLTVCNFVALAEGKMKVTGGKHFYDGLTFHRVIADFMIQGGDPQGTGSGGPGYKFPDEIVPSLKHDGPGILSMANAGPGTNGSQFFITHVATPWLDGKHTVFGRVVEGQNVVNAIQQGDKMKTITIIRNGALANQFKADQTAFDALLKEASASASDKSKAQRDADIAQINTKYPGAVQTASGVKYVIQKKGNGHKPTAGKTVQVNYRGSFLSGQVF

SEQ ID NO: 99275 - protein, 206 aa, Unknown
  Obtained from environmental sample
  DOMAIN (1)...(205): Endonuclease/Exonuclease/phosphatase family
  misc_feature (1)..(206): Xaa is any amino acid
MRVISWNVNGIRSVEKKGFASWVKNESADMVCIQETKARPDQLSPELLEIQDKNGKPYYAYWACAKKPGYSGVGIYSKTEPLNLKNLGVEEFDNEGRVLQAEYRDFTLISAYFPNSQDEGKRLDYKLRFCAAILELCSAYRKENRHFVLSGDYNIAHTPIDLARPKQNENNPGYLPEERAWMDTFTKEGFVDTFRHFHPGEKDHYT

SEQ ID NO: 99276 - protein, 195 aa, Unknown
  Obtained from environmental sample
  DOMAIN (4)...(190): Queuosine biosynthesis protein
  misc_feature (1)..(195): Xaa is any amino acid
MVSDLPCILSGNNFLSPCGEKPLMVFNNTKVRKARLFGKHEHTGAESEFLLLEKENDDCTIWKAMSKHIRRKKAGNAYIFFDNEGRQTAKAVVRGTEDDCLLLEFNRAINDEWLERYGHIPLPPYIKRSDTPGDAQCYQTVYAKQTGSVASPTAGLHFTKEILEKTTAAGIESAYITLHVGLGTFLPVRSENMKI

SEQ ID NO: 99277 - protein, 94 aa, Unknown
  Obtained from environmental sample
  DOMAIN (1)...(86): Domain of unknown function DUF28
  misc_feature (1)..(94): Xaa is any amino acid
MEAALDGGAEDVSASDGIVEVTCAPEDFENVLNALNGRNFETMSAQISMVADAEVSLDNDGIAKALRLIDKLEENDDVQNVYSNIAIPEGFEAA

SEQ ID NO: 99278 - protein, 120 aa, Unknown
  Obtained from environmental sample
  DOMAIN (2)...(108): Ribulose-phosphate 3 epimerase family
  misc_feature (1)..(120): Xaa is any amino acid
SSLLLQDIRGLGKKAGISIVPSTPAGLLGELLPFLDLILIMTVNPGFGGQHLIPECLDKLRFLAGERQKQNLNCLLSVDGGINSETAASAIAAGADVLVVGSAFFAAPDKKKFVDNLRLQ

SEQ ID NO: 99279 - protein, 285 aa, Unknown
  Obtained from environmental sample
  misc_feature (1)..(285): Xaa is any amino acid
QTQVEFVYFNHKNIIKYVNKHEKIDEILTLTGIAIKEDFNYKEVILGRVSVKEIARILDKYGDDLLDKNIRKYLGINAVNKAIHDTLIDDSRRSNFFFYNNGITMICSDFKYNALQKEDWKVQTRSLQIINGGQTCKTIYQALKDNIDIDFSDATVLLRLYAVGADESVIEGITHATNSQNPVDFRDLKSNDEMQCLLEQGAKGLGYVYKRKRDNQTNTETIPSSVAAESVFAVWREKPHLAKYKKSEFFNVYYKEIFYSLNAAHMIIAVLVFRTCDSYRKNIPM

SEQ ID NO: 99280 - protein, 283 aa, Unknown
  Obtained from environmental sample
  misc_feature (1)..(283): Xaa is any amino acid
GVIYPKTNDPFNKDGSMCLYAPDVTVGPDGRYYLYYVFDKVDVVSVAVCDSPAGKYNFLGYVHYKDGTMLGRREGDQPQFDPGVLTEGEKTYLYTGFSWSSDKSRKGAMAVVLDKDMLTILEEPVLIVPSGSYSEGTGFEGHEFFEASSIRKHGDTYYFVYSSVAGNELCYATSKNPLKDFVYGGVVVSNIDLHIDTYKPAGKPMNFWNNNHGSIVAIKGKWYVFYHRHTNGTPFSRQACLEPIKIEKDGKIHQVEITSSGPNGKPLDGRGEYPAYIACNLFV

SEQ ID NO: 99281 - protein, 182 aa, Unknown
  Obtained from environmental sample
  misc_feature (1)..(182): Xaa is any amino acid
MYIHQKFLIGVISPRLYGAFLEPIGTMVNGSMYNPKHPTADGKGFRHDYMDALKESGIPAVRLPGGNFVSGWSWKDSIGPMEKRKTQLDTAWFQYYTNEIGHDEYLQWTHMIGAEPMYTVNLGTDNLIDALHIVEYTNHKSGSYWSDLRREYGHEAPYNVRTWYLGNEMDGPWPIGSWQKNP

SEQ ID NO: 99282 - protein, 245 aa, Unknown
  Obtained from environmental sample
  misc_feature (1)..(245): Xaa is any amino acid
LGYGVLLWSVEDPAVPSGTVLPVYIRSNIDRVWVVGVPKEFRTSGKSADKIEIPLSKLELSGSKKKARERAEAFSPYSLLYAETLQDGLPIREHPDNGARRVYRLKLGEIIKVLTPVAGVEAVGATGDPLPGEWYRVLTEDGTTGYCFSYRLKLFDHTGGSLAAITLNQQEADDPNLDRLLERTWSAESYGTMVSTGKIDLNELSYHWRFDPGQDTGIAVIKTKDLELSYEYIKIRSTGSQSWRL

SEQ ID NO: 99283 - protein, 297 aa, Unknown
  Obtained from environmental sample
  misc_feature (1)..(297): Xaa is any amino acid
QDLRGFISLAGNTDVRYTLEGNIVKIFGNNSGGIPSGAELVIQDLVDVDGKRLNTPVQYSIPDKWELPEIRFAGSGAILPTSQGSQLVIETKNVSGILVEAFQIYNQNMVYFLQSNNLRDNSELDRVGEPVWSKAFDFQWIASDQNRWVRRGLDMAELSKKFPGGMFHIRISFRHRHIKYVCDKGHKDFSGYEFPDDSFSPSYTISGEKYTSYYNAKDYNWREWDNYKTDPCHPAFYYNMYEHNITQRRNVLVSDLGLIAKRSLDGSWLIATTNLITARAAPNVEIQVYNYHGRVLH

SEQ ID NO: 99284 - protein, 244 aa, Unknown
  Obtained from environmental sample
  misc_feature (1)..(244): Xaa is any amino acid
MRFLNGVLLVLLLSSCIGRVVTPIFEDENAVIEVIDPLRVRAQEIASSLDNRLLASQVLISGIDDNKSLSVKMTELFTAIPVGGIMLFKYNLNTDNDTIKVRLAQIKKLIINESNISPFFAVDHEGGGVNRFRRGVADLPAASNYYERVSQGRVETLAAIEADSLKAGREIHYLGLNMNFAPVAEYLFDGNRKFLLRRSYGPDPIFTAQAAEAFIRGMEQAGVLCVVKHFPASAGPDPHRSPSV

SEQ ID NO: 99285 - protein, 274 aa, Unknown
  Obtained from environmental sample
  DOMAIN (1)...(123): Glycosyl hydrolase family 3 C terminal domain
  misc_feature (1)..(274): Xaa is any amino acid
NLSAAAGDADVIVYVTGERPYAEWNGDLTSLDFNPPAADMTNLANYRGQGKKIVTVFVTGRPRIVTQLLQASDAFLVAWLPGTEGGGVADILFGSAITGTLPVTWPGANGAQFQYGFGLNYLKTPAAPNAPTLASKSHNSVTLTPNAAYEFSIDSAAWLRSNEFTDLTAETEYTFYQRVAATDTTTASVSSHGLKVTTNTEPISIASPNREIPSAKTEGAGVLQPVPAVAINDLSAGPNPVTLRSGGVKFFWRGGGIKGGSLNIYDAFGNFIKK

SEQ ID NO: 99286 - protein, 135 aa, Unknown
  Obtained from environmental sample
  DOMAIN (1)...(134): Chromate transporter
  misc_feature (1)..(135): Xaa is any amino acid
VAQTLPGAIGVNMSAYTGFKCSGIAGAIIAPLALISPSIIIIVIIARILHSFKENNIVKAVFSGLRPAAGGLICTAGFFAIRLSLYNTDAVNLLEKIRLREGILFVILLFLLMKFKKHPIVYIAIAGIAGVIFKF

SEQ ID NO: 99287 - protein, 101 aa, Unknown
  Obtained from environmental sample
  misc_feature (1)..(101): Xaa is any amino acid
RFGFHEAFRVLKQSGYFATLDFFRPEKKVAKLFYQRIAPLAIPFVGMLFSKHNAYRYLVISILNFLSPVDYVAKAKKAGFTLRSINSLDGGLAHIVICEKK

SEQ ID NO: 99288 - protein, 260 aa, Unknown
  Obtained from environmental sample
  DOMAIN (1)...(260): Amidase
  misc_feature (1)..(260): Xaa is any amino acid
MGSSTDNSALKQTNNPWDTNRVPGGSSGGCAAAVAAGIVPYALGTDTGGSVRQPAAFCGVVGLKPTYGAVSRFGLVAYASSLECAGILADTIARCRAVFSVIRGRDPLDKTSFQAPPSAPSLYPVPANSGRKIGVLSPEAIARALAAAAKEADGPEPASGALEVAAQASVLEDEVQRGFQLAKERLAALGHTLVDVEIPSLKYGVPAYYTIATAEASANLARFDSIRYGARPQMAENPDELIDKAREAGFGPEVNCGSFW

SEQ ID NO: 99289 - protein, 275 aa, Unknown
  Obtained from environmental sample
  DOMAIN (173)...(241): PET112 family, C terminal region
  misc_feature (1)..(275): Xaa is any amino acid
MTKNYQISQFASPLGQQGYIDIEGKNGDKEIKKRVRIKECHLEEDAGKMIHTGTVSLLDYNRAGVSLLEIVTEPDMETGEEAEIFIHQLRRMVRYLGVCDGNMEEGSLRADANVSINLPGKGLGKKVEIKNLNSSRFVKLGLNYEISRQGVLLDAGKTVTQETRLWNENRDETFPMRQKENAQDYRYFPEPDLPVFSPDAAFLKSVDDAMVELPFPRAKRIAAEYGVSEEQAGLICEEKAQADYFEAAVAVAAESGLSKKDAAARVANWLLQDIK

SEQ ID NO: 99290 - protein, 264 aa, Unknown
  Obtained from environmental sample
  misc_feature (1)..(264): Xaa is any amino acid
LTAWIPDMDPNKTYLIAEGINMEFNSLSDALSAAQTALDTELEEFTISISDKVHFLNSDTGVIQEGYTVTIKNHGNGTAYIKPDPETKDSLFSVFGNLTLQGKVTLEGVNDNYYTLLKVYGTLNMSGNVKITGNIKNDRGSDSGGGVCVKDGGIFNMSGGEISGNEKFSFGGGVYVDAGGTFYMEAGTISNNKAIYRGGGVCVEDGGIFHMNGGIISGNEVSSYMSSTASGGGGVFITTGAYFRKTQGTIYGYGDNAGVDDESL

SEQ ID NO: 99291 - protein, 56 aa, Unknown
  Obtained from environmental sample
  misc_feature (1)..(56): Xaa is any amino acid
MVELKALIALERVHLSQAKNYLEAYKIPVGLLINFGSTELEFKRVHIDKPIPRNRE

SEQ ID NO: 99292 - protein, 106 aa, Unknown
  Obtained from environmental sample
  misc_feature (1)..(106): Xaa is any amino acid
MKLLFDPNQPYQLDAVRAVTDIFEGQGLCGGEFEFSLHTAGSMFSEDGFGNRISISVEQIMENVKTIQLRNNMVDATAHFHGMDFSVEMETGTGKTYVYLRTIYEL

SEQ ID NO: 99293 - protein, 296 aa, Unknown
  Obtained from environmental sample
  DOMAIN (1)...(74): Pyruvate kinase, barrel domain
  misc_feature (1)..(296): Xaa is any amino acid
KPVITATQMLESMIVNPRPTRAELTDVANAIFDGTDAVMLSGETSAGAYPVEAVKTMDKIACAVEQSNEFRKRMRNYHDECHSEVHNPKENLGIIMSRSGVEIAAAVKAKAIVTPTRSGNTARILSVFRPDEPIFAVTSDGRAERFMQLYWGVYTSISSKVDDSESMIQNTMKIVSETGVAGISDKVVLIAGLPLESPNMINNVRVVIIGTVLARSSAGGYANPDVVRAHGKIIHVTNPDEARKKIISSGGGEILICKTLTEDYTSIITMVSGIICEGVSEINEQKLRLINPTWSG

SEQ ID NO: 99294 - protein, 282 aa, Unknown
  Obtained from environmental sample
  misc_feature (1)..(282): Xaa is any amino acid
VPAEPAPAAESSDIDFGDLDDLGDLDLPVEPAPAAESSDIDFGDLDDLGDLDLPAEPALAAESSDIDFNDLDNLGDLDLPAEPAPAAESPDMDFGDLDDLGDLDLPAEPAPAGAAESSDIDFGDLDDLGDLDLPAEPAPAGAAESSDIDFGDLDDLGDLDLPAEPAPAAESPDMDFSDLDDLGDLDLPAEPAPAEESPDMDLGNLDLPAEPAPAEATESPDMDLGDLDLPAEPAPAEAAESPDMDFSDLGDFGDLDLPGEPASAEAEETGMDLGNLDEQLSE

SEQ ID NO: 99295 - protein, 278 aa, Unknown
  Obtained from environmental sample
  misc_feature (1)..(278): Xaa is any amino acid
GTTITAYLASLGTTTNGKRAAYAHIVFNVIGVLWITAIFSFYITCIRKFIGHDPNTMVIVNGAETFPYIQAGIAAVHSGFNVFNTLLFLPLTNVLAYVLIRAVPDKPYKEPPKLTKLGNHLVDSPMVGIAQARYELINMGKHDREMLDKLKAILSGGVVGGVEGLENEDKLLGSIFYKEEVMDNIQREITAFLTEVLSGNVPRSIAEEAQIQIRLADDYETISDYITTLAKLYKRIKNTTGVEMPQIMRDELISLHDSVSDYFDLVNHAFSVNNKAII

SEQ ID NO: 99296 - protein, 212 aa, Unknown
  Obtained from environmental sample
  misc_feature (1)..(212): Xaa is any amino acid
AKTEAAHAKTEAAHAKTEAAHARTEAAIQELSAENRMLAAAIQELSAEGQKTFRAVLELSRNMGGLNNSFGFLVEVVVIPKIRTAINSIGKHTFNKVLVDKKISALVAGEKNTIGEIDMFLFSDADAEAMAVEIKAQVNTNHVKERLERLQKFRDYEEEAEIKGKKLFGAMAGIYIDPKAKALALENGLYVIEIREEEDKLDIEKPDTCRTW

SEQ ID NO: 99297 - protein, 92 aa, Unknown
  Obtained from environmental sample
  DOMAIN (31)...(88): Hemerythrin HHE cation binding domain
  misc_feature (1)..(92): Xaa is any amino acid
KVGPTLDFLISYTKKHFAEEEALQIRANYPDFSNHRKLHESLLKVVADLAVDLKKNGPTPVLVNKLIRNVGDWLVNHIRKEDAKVAAYLRSC

SEQ ID NO: 99298 - protein, 89 aa, Unknown
  Obtained from environmental sample
  DOMAIN (1)...(86): Cyclophilin type peptidyl-prolyl cis-trans isomerase/CLD
  misc_feature (1)..(89): Xaa is any amino acid
TPGTGGPGWQIKCETENNPHAHELGAISMAHAGKDTGGSQFFIVNGAKENVAHLDGRHTVFGRCNSKDDIDVVLAIQPMDRIEKAVLVE

SEQ ID NO: 99299 - protein, 228 aa, Unknown
  Obtained from environmental sample
  misc_feature (1)..(228): Xaa is any amino acid
DERKILNTLREGGDVASRLEHFEPRQAQLDLMELAIRCFNENAIGAAEAGTGVGKSFAYLLPAMYFAVESGERVVVSTATITLQQQLFGKDIPLVKDAINARVKAVLVKGRGNYLCYRRLLDALREPELAGSSEQEQLEDISRWAETSKGGGREELAFVPIESVWSRVCSDADLCMGKACPEQSRCFVLALRREAAAAKIIVVNHHLLFADLAARRGGASYEAAAVLP

SEQ ID NO: 99300 - protein, 251 aa, Unknown
  Obtained from environmental sample
  misc_feature (1)..(251): Xaa is any amino acid
MTPDYGKLCAALTDYLGKLPLSETRAKTTNAAIIGRLMASVKMGYYPTDAEHARLIARSVGFPDGVTANLLDPCCGCGLALQTLAHGRQCNTYGVELDRHRAEEAITRLHRVGFGSYFHSRLSQEAFHLLLLNPPYLSVMTESGSNARSEKRFLIECYTHLIYGGLLIYIIPYYRLTSDICRVLCDNFDDLSVWKFMDSEFLKYKQVAVMGLRCKRRDGSKMVHELASLVMKPDKLREISELPEGRYRLPE

SEQ ID NO: 99301 - protein, 279 aa, Unknown
  Obtained from environmental sample
  misc_feature (1)..(279): Xaa is any amino acid
VSFFVDDPTIPYIITGGSGSFTATRNGITIGTANQSIRIVIDNIRTHAAGRNRVIQFGSNDEIYINDATINFNNNDGTWGAITLTGKIILTNAIVIDSVSVTSSADITNNLGAVFINEGVLNIIGGTVSATGTDSITVRNGDYGGVLNISGGTITATGTRGKAVYSSSGRDKITVSGTAKITSMNTDTSANGGTICLTSRTGNTAVRLEITGGTVENTVTNGYAINNRSDGSIIISGGTVSATGSNGIAVYNFWGTSVIISGGRISAPNGYAVSNGIKN

SEQ ID NO: 99302 - protein, 288 aa, Unknown
  Obtained from environmental sample
  misc_feature (1)..(288): Xaa is any amino acid
FLDPALAGAIAERHLRYSAEYSYADGWPYGLAPEILSAGTAGILAKILIDDEPVERDILFSVIQKDINAFDIETEISSVDLRCHRISFCADSKRNLLLLNNFTAVNSKIPCASDVERIIEKQSEILRTLPNFYPIQVYGGCPQKCAICPYPSVTDALGRKDFMDIGRFTGLLDKIAAFSGDAVIDLSLWGELSLHPQKMELIEAAVSRNCLALIIETSGLGWTAAEIEKCLELSKNYEKRKNSLAPISWIFSLDTSDPQRYKELRGGGFAEAFDCAKKVFSLFPKDCY

SEQ ID NO: 99303 - protein, 254 aa, Unknown
  Obtained from environmental sample
  DOMAIN (88)...(191): TonB-dependent Receptor Plug Domain
  misc_feature (1)..(254): Xaa is any amino acid
MAGVALGLSGPQLLGSRTTSTDAQGRYRFQLILPGQYVVTASRQGFVTRKADVSLSAGSTMNASFSMVSIEVATETVEITGAQSGSLDKTETKVATTRTMAELTSLPLGGDINAWGALRLAPGVTGNVEYAKIRGGSTGQALYTINGMSTRDPYVGQGSQVEFNIDDLTQDIAVIQNPINAKYGNTSTGVIAVTTKTGTNSFQGSLRVKLSNGNRNEPGGAWNSLSTNTVPNRFGRPLSDTVTGSPLYAAPSDV

SEQ ID NO: 99304 - protein, 132 aa, Unknown
  Obtained from environmental sample
  misc_feature (1)..(132): Xaa is any amino acid
MNWTGGIKNSKGYYVSGYWNKRTAGISPYVPGEQPRDRKFIKLNTNENPYPPSPKVIAAMEEVLAAGERLRLYPDPLCTTFREAVASAYGVKPSQVFPGNGSDEALAFAFGAFFESEPACPVLFPDITYSFY

SEQ ID NO: 99305 - protein, 278 aa, Unknown
  Obtained from environmental sample
  DOMAIN (5)...(277): Histidinol dehydrogenase
  misc_feature (1)..(278): Xaa is any amino acid
DEYWKLRNRTGSVETGSDPTDVVVGEIIKAVRSEGDAALRRYAERFDRSSPAQLEVPPGLAESAWEDFRKKDAEAAGALELAARHIFTFAELQRKQMSGFETEMAEGLFTGQRVIPAERAAVYVPAGRFPLFSSVLMGMIPAMAAGVEEIILASPPMEDGLPDRNILAAAALALRIGREAAAAKATKLRIFAVGGAQAIAALAIGTESVPRASVIVGPGNKYVAAAKRLLFGEVGIDFIAGPTDVLVIVDNGNPDPAELVAADMLAQAEHDPDARARA

SEQ ID NO: 99306 - protein, 278 aa, Unknown
  Obtained from environmental sample
  misc_feature (1)..(278): Xaa is any amino acid
YVESGNPYGDTKWRYEMFDTEFALGIYSDGKLTGQDNVDTFNKILNGKYNDHVNNKLFKALLINSDFCKKFVNTMMDLYNVNFHPANFKPKLTKYANVYKPLMEGYFSRWGRPWETVYEDKVNYAEKYLNDIRDAMVYSYLPNYFGGYPGIANVLSGKSLCNVTLSVTGVSGASIKINTVIPNLASGNWTGKYFSGIPVTVTASPAPAGYTFDGWAVTGGTAASPTALTTDINITGDIQIMAKYKINGSAVTPATGISLNKTTHSLNTGDTFDLTAII

SEQ ID NO: 99307 - protein, 271 aa, Unknown
  Obtained from environmental sample
  misc_feature (1)..(271): Xaa is any amino acid
MIFDIRHETMPRDELEALQLRRLQDVCHRLYACVPFYTRKFNELGIKPEEVRGLDDLRRLPFTEKQDLRDTFPFGLLSVPKDNLIRIHASSGTTGRVTVTGYTRRDVDNWAALMARSLAAAGAGRGDVIHVAYGYGLFTGGLGAHYGAEWLGAMVVPASGGATRRQVQLMSGLGATTLCCTPSYALHLYDAAREEGLDFRDKSVLPLRTGVFGAEPWTEEMRRDIESKMHINAMNVYGLSEVMGPGVSMECLEGRRGLHIYEDHFLPEIID

SEQ ID NO: 99308 - protein, 300 aa, Unknown
  Obtained from environmental sample
  misc_feature (1)..(300): Xaa is any amino acid
SAHGHSFADAAFDVIYHSHVLEHLERPYAEHLLRECFRALKPGGLLRVAVPDLEYTARAYLAALDEARGGDDDARQRHAWMLIELLDQLVRTESGGDMLRWWAENPMPQEEFIASRMGGEMLRAVEHLRRNPPAPKKPRTPLPVPDAPVVRSGEMHRWMYDEVALAEALRKAGFADITRQRHDVSLRQDILRYRLDTLEDGSPRKPDSLFMEAVKPMRQGNPPLRIALLCAYDIGGAGTAALRLHGALRDIAAEGVVSQFYCASQKNAVDGVHLAPMYGQSVCGTPDGSAECPGWINAAA

SEQ ID NO: 99309 - protein, 256 aa, Unknown
  Obtained from environmental sample
  misc_feature (1)..(256): Xaa is any amino acid
MVTDTSVFTKDTTIYAHWKMKIYTISFDANATDVILTTMSGTTTNWKLTSLPTPTRTGYTLDGWYTAKTDGNKVTTNSTEFFADTTIYARWTPINYTITYDLKGGTVTPANANPTSYTIESETITLIKPTKAAFTFEGWTLTGNTTPEEIVTITKGSTGNKTYTAKWTVNIYTITFSADTTTITRETGNMDATGGKVTSWPAIPAKNGYTPDNWYTAETGGEQVSTATVFDDNTIVYARWTPINYTITYNNLNDGT

SEQ ID NO: 99310 - protein, 178 aa, Unknown
  Obtained from environmental sample
  DOMAIN (1)...(178): NADPH-dependent FMN reductase
  misc_feature (1)..(178): Xaa is any amino acid
MKTVIIYGIEHKGSTHNAVQLFKNELGIRDDNLTEFFLPRDMPRFCTGCNACFMEGERFCPHSAYVTPIKEALINAELIILASPVYLFHVTGQMKALLDHFGFQFMNHKPNKAMFSKTALVVSIAAGAGTKSAMKDMTGSLEYWGISRIFKFGFAIFAANWDEISKKNKSKIESRIKK

SEQ ID NO: 99311 - protein, 71 aa, Unknown
  Obtained from environmental sample
  misc_feature (1)..(71): Xaa is any amino acid
VAGKKTVIFGAGGHSRAVADVALLADPNLELIFVDESAQPGEVILGFPVAKEYFVKGESVFVAIGDNEKRR

SEQ ID NO: 99312 - protein, 154 aa, Unknown
  Obtained from environmental sample
  misc_feature (1)..(154): Xaa is any amino acid
MAFALNSYPIAYRAKFSGGKWSEEYLEKPHKTAEAEAAMSAEDREKIENSRNYYDDMPLVNYTSQYGLACFEGIKALPQKNGGLAIFRPDRNAARFYRSMEGLFMPPFPEDLFVKACIETVKRNAKLGFRPMYKPEWEKDSFMSADSVYIRPFT

SEQ ID NO: 99313 - protein, 305 aa, Unknown
  Obtained from environmental sample
  misc_feature (1)..(305): Xaa is any amino acid
DAEIEKIIRQAEIKNEITKNEAQRLRANIKDEGVLNKHLEIRKQILDANINAYENLLTAANNTLSAEEKRDMLEALRAQWKAYSDLAEQAKRDEEAQKKADEERKKRLADLVKLQEEIQSKLKKILEDSIAEGEKLYDTEKERAFQEELAKIKEKSILDAIYREAEYRNNQRREEYNKLLGDLKEKEEAQKEHLKKIRDMELEAAGGNAKLKKDINEKYTKDVEELDKNLIQTRQQLDANFQEARKQADEETNRAIADAHKKMTEQIAKDYADMWANIISKTQSYLDAASSLAFFISAMWTNEID

SEQ ID NO: 99314 - protein, 293 aa, Unknown
  Obtained from environmental sample
  misc_feature (1)..(293): Xaa is any amino acid
MESVSLHDLQEMGAAATIQMFEPESIINWSITSSGARAQLGRVVIMGCYEDDDGEIQTSYRELVMVNGYYVSREWRQEVDSRTGKVSGDFVIYDESYPTDGNGERWTEIPFTLVGARSNTWEITTPPMLGLCNLNIAHYRNSAAYEDSVYMLGQPQPYMTGLDAYNKEQMDKDGLYIGCGRVLILPKDATLAYVQAQPNTLAKEAMDSKEEQAVRMGAVFITPGSGTKTATQVEGEKTVNHSILSLAASNVGEAYTKCLGWMAEYMAVDGEGLFFDVKRDFVSERADANMINA

SEQ ID NO: 99315 - protein, 293 aa, Unknown
  Obtained from environmental sample
  DOMAIN (114)...(228): Phage Mu protein F like protein
  misc_feature (1)..(293): Xaa is any amino acid
TGMKRDIENRLLPKDLTEYSQTRMENLLDHVRDDLKDRYGKYYGVWREQIVDFAVYDAEFQGKTMKQLFDIDFDIPTRAQLRSAVLSPITGMNGINNGMTPRELYADWVGRGVKRVEGIISRGYYQGLTTQQIVREVIGTKSSHYSDGEFARLYRDMETMTRAVVQHAATQARIETLRENDDVVSQLQVVATLDDRTSPLCQSMDGKILGLDSQNLPPYHPGCRTTIVPVLKPPFDELGAGGTRFARGAEGSEVVPADMTYFEWLKTQPRGFVESAIGVKRADLLFGGGLTAE

SEQ ID NO: 99316 - protein, 264 aa, Unknown
  Obtained from environmental sample
  misc_feature (1)..(264): Xaa is any amino acid
LRAHRKGAGKLTLCILDDGDASADDPENEPENEEDEPEFLPPVENEARYVAERIQALLGEKDEAGGRKYRPEDIAILFRTRTNQNLFEKHLRLLNIPYSGDNLNGFFFGGPTDDLMSVLRLAAYPTDRTAYAQMLRSPFAGLSVPALAACLAALDESETAAPFGASSFGASPFGDKPLSFLTGQDREQYLHGQRIYRQILEKSRTENICSLVSELWYGGGYRYETEWNPKTAAFRELYDYLFHLAALADEENQTLAAFTDYMQS

SEQ ID NO: 99317 - protein, 79 aa, Unknown
  Obtained from environmental sample
  misc_feature (1)..(79): Xaa is any amino acid
VQGADRNGPTAVIKSAGKMDHIKTGGTLLNMKLSPGLLEDDEGIGRLADLVRAYFKMDGHHVQFNVVDAETLRGAQRTH

SEQ ID NO: 99318 - protein, 272 aa, Unknown
  Obtained from environmental sample
  misc_feature (1)..(272): Xaa is any amino acid
MLKQTVTKNVETTLAIPLSATSGVGSGTGVIGGTQRQLSAPAAVISGKGKVVLRLSPQSYKNAEVSLHTINGKRVSHGQASATEAAKSITRRDLTPGVYLLSVKGSDGNAFASRVTHRGGSLDISVAFSNESNSSSRTLAKESAAAAAGDWAVTVSAAGYIDSAYNFEPVKGRSNAKHTITLKTPTTTAKADFKETVAGVSFDMVYVPGGEFTIGCEAANSSDCPSDSQPVSGVKVSNYFIGKTEVTIGLYKAVMGVTPSDCYGSSSGSCTC

SEQ ID NO: 99319 - protein, 264 aa, Unknown
  Obtained from environmental sample
  misc_feature (1)..(264): Xaa is any amino acid
VFLAGAVGGVDVSRTGYAFGGWYAERELANKIDLNVFRITRNLNLYAKWTPVAYTVTYKKNTEDAEGTTADSSHTYDVEKALIPNGYSRAGYTFAGWALAEGGEAAYGDGGNVINLASMEGEVVPLFAKWTANTLTIKYAGGDGAAGSKADTSAAYNDSVAFPAVTGFTKAGHAFDKWAVTGGLIATWAEADGAKTVAELSEDIATRDAEITLTAVWTVNPYTVSFDTNGGSPAPQDQTLDYGSPVPKPTDPAKEYSGVITADF

SEQ ID NO: 99320 - protein, 262 aa, Unknown
  Obtained from environmental sample
  misc_feature (1)..(262): Xaa is any amino acid
MDSIIFIFDEPTIGLHEVEKQKLIDILQNLIKRGNTVIAVEHDENFIQAADYIVDLGPHAGEFGGQRIFQGSYADFMKCKKSLTSPYLSGRLSMPVKTIFKPAEKLKQLHLNNCNIHNLRNISLDIPLKLLVGVAGVSGSGKSSIISDTLVPKLKEVLKNSAKFIDFTDIESYEDECESIVLPDVQISGTENIKKCIIIDQKPIGRSRTSCPATYTGIFDRTRKIFAQAPESIAQGFEPRMFSVNSKGKCRTCGGDGVIHYH

SEQ ID NO: 99321 - protein, 225 aa, Unknown
  Obtained from environmental sample
  DOMAIN (1)...(225): Amino acid kinase family
  misc_feature (1)..(225): Xaa is any amino acid
MIVMKFGGSSVADAARLRHVADIVQPQLERGPALVLSAMGDTTDHLLEAGDAAFRTGKVQTDMIEKLHLGAIKSLKLPIQKEINTLLDELTSLLSGISLIRELTPKTKDYLVSFGERLSVRIAAAFFQSAGINAQAFDAWDLGFVSDSNYGHAELSKESWELIPKKIVPLVKAGVVPVVTGFIAKDEQGNITTLGRGGSDLSATMIAAACKTEEVQVWKDVDGIL

SEQ ID NO: 99322 - protein, 108 aa, Unknown
  Obtained from environmental sample
  misc_feature (1)..(108): Xaa is any amino acid
ISIYEVDYEKMKQELDILHYKSADEAWLDFVMANRRSTYNGKKCDVIYGPVANDTIYRTLIAYENGVLSAAETIAMLKVRQLFDQMIFATEQSFAFLKFSGFEEAANA

SEQ ID NO: 99323 - protein, 79 aa, Unknown
  Obtained from environmental sample
  misc_feature (1)..(79): Xaa is any amino acid
MPDPQFKATLEMLIPLVIREIMKSRNISEREAFELLYSSFLYSKLETEATKLWHLSQLTLANLLNEEIETGTITFPEEA

SEQ ID NO: 99324 - protein, 113 aa, Unknown
  Obtained from environmental sample
  misc_feature (1)..(113): Xaa is any amino acid
QADTFTLDIDGAGEGKAELDVINLKANISGAGSFELSGKADYAEIKFGGAGELKAFSLQIREASVNFSGAGAIRISCSEKLSVEASGAGKVEYKGSPILSVNTRGPVSFKKAD

SEQ ID NO: 99325 - protein, 149 aa, Unknown
  Obtained from environmental sample
  misc_feature (1)..(149): Xaa is any amino acid
MINKQDVIREVKENILPFWQDMADEESGGFYGEADFYGRPNKTATKGCTLNSRILWTFSAAYRIFGDDTYKACAQIARDYLSSVFLDKTHGGLYWLVRHTGRALNTRKQFYNIAFGIYALSEYYRAVSDQSSLELAMALFDTIENHGLD

SEQ ID NO: 99326 - protein, 261 aa, Unknown
  Obtained from environmental sample
  DOMAIN (10)...(261): Acetyl-CoA hydrolase/transferase
  misc_feature (1)..(261): Xaa is any amino acid
SEDVVRNRIHLTNADEKIKTPEEAACLIENGMTVGCSGFTPSGYPKVVPQALARWCGAHGPRPITLWTGASVGPELDRELSRAGCIRKRFPYQTDETLRKKINEGEISFADIHLSHSAQNLRYGFHGNVDVAIVEAIAVRDDGGIIPTTSVGNTPTFVELAQKVIVEINVTQPADLEGIHDIYVPLNPPNRLPIPISSPSDRIGVNYIPCAPEKIAAIVYSDVADSQRPLAEIDDTSKLMASHLLNFLDLEVRRGRLPRSL

SEQ ID NO: 99327 - protein, 285 aa, Unknown
  Obtained from environmental sample
  misc_feature (1)..(285): Xaa is any amino acid
DEIEAFTTRFDTVYGITFIALSPEHDLVKLMIEKSPAGQAKEMAAFVAKCAAQSAIERSAAGGEKLGFKTPFTGAHPVTGKPVPIWIANYILMDYGTGAIMGVPAHDQRDFEFCRKYGIEVIPVIQPEGAVPLEGTAMKAAFEGDGVSCNSGEFDGLPTQAAIEKMIGWGEKEGFCKREVNFRLRDWLISRQRYWGTPIPFVHCPKCGIVPVPEEQLPVLLPEDVQVTDVGRSPLLDMPEWLETTCPVCGGKARREAETMDTFFCSSWYFERYCSPGNVNAPFGK

SEQ ID NO: 99328 - protein, 283 aa, Unknown
  Obtained from environmental sample
  DOMAIN (200)...(283): Peptidase family M23
  misc_feature (1)..(283): Xaa is any amino acid
LLAAGRFLTRRYTVVFVPHSEKRVYNFHINVLSILCFLLVAGAFMGASLWYGASYNTAIAVLAEKDNNLRDAEASLDQLRDETAGLLQEVKDFEIALSETLSALGQDPAAQRQHVYGGDLGDFFKISETPEGQLREVDYVRRIRSIVRESVDPLKDIGSMLNSQSALLTEIPSIWPIKSGGGHISMYFGQNINPFSGQYYIHKGIDISTYRSGDPVITTADGQVVTIEYTEDFGNYVIIRHKHGYYTRYAHLLSARVRLGQRVQQGEVIGYIGNTGLSTGPHL

SEQ ID NO: 99329 - protein, 242 aa, Unknown
  Obtained from environmental sample
  misc_feature (1)..(242): Xaa is any amino acid
MKLSVRIPLLIGVVVLITSAVLGILAFQLSSKALTETIMGAVEAENEANSKLMSSLLNWELSILYEIANRPSTRTLDWAIVHNDLLPEVSRIKAQQMALVLSDGSYTSVVNTTTNNVFDRPYFKKAMAGENNIDIVVSRATGKPVIVMAVPIRQSNAKDAPVVGILMAEKDGVDYLTDIMLANLKSAMPSGYCYIMDVSSGQAVTIAHPNKDMVVRRFTPEEEAKKDPAFISLGEMLAVSRK

SEQ ID NO: 99330 - protein, 285 aa, Unknown
  Obtained from environmental sample
  DOMAIN (118)...(141): 4Fe-4S binding domain
  misc_feature (1)..(285): Xaa is any amino acid
GGELAEEVHGIPKALAPVGGNPIRCCIYHDREILRNRIIAELGCSLEDYNDEKRLAEYVQEALNREKPTWPMLTVLYLACNACVRSHFMVTNACQACVARPCLVNCGKKAIEIKDGRACIDSEKCVSCGMCLQNCPYHAIIKIPVPCEEACPVGAINKNEDGRECIDYHKCIFCGKCMRECPFGAMMDKGQLVDVIKHIMNKKNVVAMYAPAAAAQFRVEPGRLEGALLAAGFSNVVEVAIGADITSDKEAAEFAERMEKGEKMMTTSCCPAYVRAVNRHIPELA

SEQ ID NO: 99331 - protein, 56 aa, Unknown
  Obtained from environmental sample
  misc_feature (1)..(56): Xaa is any amino acid
MANSREILLEKYSAKVYKNRKDHILQLAEGDKNAAIAANTRAIPGVMTARGCCYAG

SEQ ID NO: 99332 - protein, 280 aa, Unknown
  Obtained from environmental sample
  misc_feature (1)..(280): Xaa is any amino acid
SASFTPSSAAYGMTYYYCVVSNACGKVKSKFAGIHIISECVPPVITTQIGTSPATVPKDDHFSPLSVSIMGTAPYTYKWYTNSSNSTSGGTLLNTNTSTYYTSSYEPSTATVGTAYYYCEINNNCGTITTLASGLHTVTTSTLPPPATPGCNSTTLSLGTITYGNTGNTNIASGVTTISGNGISQVWSGAVYASGCNKTVFNGGGSGNYISDCRANSSRTYGDLFSWCAVVKYAATLCPSGWHVPTNADFCDLDNALGGPATCPAVGISHTTSGVPAKYL

SEQ ID NO: 99333 - protein, 202 aa, Unknown
  Obtained from environmental sample
  misc_feature (1)..(202): Xaa is any amino acid
SLEEPNVLLLDMAEYALDAGEWRSKDEILRLDNKLRTELKWPTRGDSWAQPWVERDASTPHTLKLRFNFESEIAVTGAELALENAASSAVALNGEAAGAVKGWYVDKCIGKVSLPAIKAGTNVLEVSFPYGRKVDVEAMYLLGDFGVNVAGSSCVITRPVRNLGFGDITRQGLPFYGGNLTYHLEAEIPADKFTLRATQYRG

SEQ ID NO: 99334 - protein, 288 aa, Unknown
  Obtained from environmental sample
  DOMAIN (173)...(255): Histidine kinase
  misc_feature (1)..(288): Xaa is any amino acid
TTTETENRQILEVTGRAMGTLYRYVDRLGAQMELNYPVIENEHMLDEIRGVAALVSDLLQSFIVREIESAAVENQRIKKRAIILGISEFAIIFTAVYFAILMQRSVAKSVDHSIGSLVSLSSSIAEGDLDARAELPNVEELQTLTKDLNIMAYKIKTLIEENIREQRNLQKSEMRALQAQITPHFLYNTLDSIVWLAEGNKNEQVISITRAFSDFFRISLNRGDEWVHVQDEFKHIESYLTIQKIRYRDILDYSIEYEHEMEHKVMLKLLLQPLVENALYHGIKNKRG

SEQ ID NO: 99335 - protein, 205 aa, Unknown
  Obtained from environmental sample
  misc_feature (1)..(205): Xaa is any amino acid
MKIKNSGVSWIPWLAPALVFYVFFMAWPLLDSLRLSLFTGSAGMGRTFAGLDNYKRLFSVETYSERYWGAFGHTVIFFIVHMAVQNCLGMLFAVLLTSKTMKGRQFYQTVIFLPTTLAVLVTGYLWKLLLNPVWSGPFLQSLGMDFFVRPWLGDRNTALFCVSLVSCWQWIGIPVMMFVAALRGISEDYIEAASIEGANSLQVFW

SEQ ID NO: 99336 - protein, 97 aa, Unknown
  Obtained from environmental sample
  DOMAIN (18)...(97): Homoserine dehydrogenase, NAD binding domain
  misc_feature (1)..(97): Xaa is any amino acid
MEEVLAEARTPLRVALLGCGVVGSQVARGILQHGDELAARIGRPLSLIGIAVRELSEIRDPEIPRDLLTTDMVALIEKGPDIVIELMGGIEPARSMI

SEQ ID NO: 99337 - protein, 275 aa, Unknown
  Obtained from environmental sample
  DOMAIN (4)...(192): Glycosyl transferase family 2
  misc_feature (1)..(275): Xaa is any amino acid
MKVSIVIPTYNRSRMLCKTLANIISFEHQYHELIVVDQTKEHDPQTKQYLDNLIEKNKINYIFLEFPSAPNAKNIGIEKTSGDIVICFDDDVEINENTIPAHVSGLSGPGVGCVTGKVVIQNVNQDGNKVLKKRSSLQKKIKFFLFLFLRKKASYVGHLGVLANFTGNNILPSDTCIGCNMSFRKEVFRKCGLFDVKFSGNAVREETDLSVRLRRCGYKIMYIPQAAVIHYMNNTGGTRAAAHEAYWFAIFRNQCYFYLKNFKYSRLTIMFVQMF

SEQ ID NO: 99338 - protein, 282 aa, Unknown
  Obtained from environmental sample
  misc_feature (1)..(282): Xaa is any amino acid
MGHVYFKNTVSQKFNELLNTEHDLPEVKKMIFDDFHIKHIDKLPARINEYKDNEILEFDTLQEAIDFDGDFRQFIVDNSLKDWVDDYSGIKRYNTIPTDQKTGRLHLNENLFLPSPVCLDVLKNISLEDLAAYDASGIDILEAELCRVLDLNTQNVFIHNGSSDVIKTILSLVLKKEHNVLIPNLSWNYYKAVTSLKFTKCFTYNIIEKDNVFFHDIDDILSKAKKHHPKVIIITTPNNPTGNTIDDTSLKKIISENPHSLVLVDEAYWGFSDIDYNYKEYL

SEQ ID NO: 99339 - protein, 86 aa, Unknown
  Obtained from environmental sample
  misc_feature (1)..(86): Xaa is any amino acid
MKIKDVMATPVITGRKEQTMRHLQAMMRENNITSIPITEGEKLVGIISIYDIVTALDMSLINCLAEERMTTNVVVLQDDMPLSFAI

SEQ ID NO: 99340 - protein, 282 aa, Unknown
  Obtained from environmental sample
  DOMAIN (58)...(272): Uncharacterized protein, DegV family COG1307
  misc_feature (1)..(282): Xaa is any amino acid
DRFGIDGTLNGHMSTPEAEGTEARLDLSDAELDAFYKSLKANPSGYKTASFGVEAVTSFFEAFLQKGRDILALCLSSKLSAPYNVMTHAAKQLLEKYPQRKITVVDSRKYSLGLGLLVIKAAELRAAGLSLTENAEKLETIKKTVHQMGSVDDLFWVASKGRISHAKAFFGTIAGIKAMGDFDSDGMVSPLAKVSGYKKAYQTTIEYIKKTIKAANEQIILVAHSARREQANTLAEMIKEQIKPRELIICNIYPMNGVNIGPGLCAAYYLGTEITDLSFEKE

SEQ ID NO: 99341 - protein, 293 aa, Unknown
  Obtained from environmental sample
  DOMAIN (22)...(293): Transposase, Mutator family
  misc_feature (1)..(293): Xaa is any amino acid
TRACNDFCVNAETFGKEFTWAFTKEVLDEILKEYSGAPEEFAGPDGLLKRLTKALIERAMEAELTQELGFPKSRPGEKATANRRNGRTTKTLRTDHGPMEVSVPRDRDGEFEPAIVPKHSREWRGFDEKILSMYALGLTTRQIQDHLKEIYAVDVSPELVSRVTDEVKAHLDEWRGRPLEPVYPVVFFDALRVAIRDGGAVAKKAVHVALAVGMDGRKDVLGLWVQQNEGAKFWAGILNELRARGVKDILLAAVDGLTGFPDAVNAVFPQTEVQLCIVHMVRNSLKYVPHRDK

SEQ ID NO: 99342 - protein, 211 aa, Unknown
  Obtained from environmental sample
  DOMAIN (100)...(210): Methyltransferase small domain
  misc_feature (1)..(211): Xaa is any amino acid
VPTQSIASARMALAKRLSLFLTDLEANAESWRWFEEGLEWGRAKIIAHGEEPASREMEDQLDTWFNRRKQGEPWAYILGWTIWRGRRFCVTPATLIPRPETELVLESATRLANQISAKRMVDVGTGTGILAVTLALETPLEVTATDISMEALTVAKQNAQSHGAGLSFACGDLLAPVSGPIDLVVSNPPYVDPDEETELQRELSFEPKLAL

SEQ ID NO: 99343 - protein, 283 aa, Unknown
  Obtained from environmental sample
  DOMAIN (108)...(177): HAMP domain
  misc_feature (1)..(283): Xaa is any amino acid
AGVLIHEINHRYVAPVKLLGGYGYAMIVNPAGTIIGHKNDDFLGKKIPENLHERIKAMDMGRFAFQETIDGVPSMLFIERHNSTDWFPIVIASLSDFSASSNFVSRTIMLLAAGVILLLTVIVLFAVNGVTKALSATIRYAETVSRGDLEAELSVRREDEIGVLARSLNDMVASLKHMISVATQKTREAEEATETIIQGINYASKIQRDLLPRNHAFDKAFRDYAIIWKPRDIVGGDIFWLKNFEQGTVLCVCDCTGHGTSGAMLTMLVVSALEACILPGNCH

SEQ ID NO: 99344 - protein, 231 aa, Unknown
  Obtained from environmental sample
  DOMAIN (179)...(231): Peptidase family M23
  misc_feature (1)..(231): Xaa is any amino acid
LAVTIPDEPVPVKRPEDSVETELKQPANKPEETTKDLITFQWQQYKVQKGDSVSRIAKKFGISLGAVIASNNIRNARQLKEGVTLRIPNIDGIPYSIKSGDSLSKISVSFNVPLEVILDINDLKSDVIKAGETIFIPGARMNDLDLRMSLGELFIYPVSSKHLTSNFGMRKDPISGELTFHTGIDLRANTGASVMASMEGVVSVIGENWLYGKHIILSHPNGYKTMYAHLN

SEQ ID NO: 99345 - protein, 205 aa, Unknown
  Obtained from environmental sample
  misc_feature (1)..(205): Xaa is any amino acid
MQPTTEILAKINLNSNMNKNEVFARLYRYLLREDIYYVAYQKLYKNDGAATNGVNDDTADGFGKDKIIKIIQALTDETYMPSPAKRVYIQKSNGKMRPLGIPTFTDKLVQEILRMILEAVYEPTFSINSHGFRPNKSCHTALNQIKHDFTGVRWFIEGDIKGCFDNIDHTTLVGIINRKIKDARLIKLIYKFLKAGYLENWQYHK

SEQ ID NO: 99346 - protein, 70 aa, Unknown
  Obtained from environmental sample
  misc_feature (1)..(70): Xaa is any amino acid
MATIGLDKLYYAKITEAANGIETYSTPKILAKALKADLSIDLNEATLFADDAASEVVKEVRPDRARLEVA

SEQ ID NO: 99347 - protein, 268 aa, Unknown
  Obtained from environmental sample
  DOMAIN (33)...(66): Tetratricopeptide repeat
  misc_feature (1)..(268): Xaa is any amino acid
LHFNYGIALETNGRLDDAANEYNTAIRSKPGWLEPMNKLGMVLFAQGQYDKALSTFNRVLHADPSNVEARNNMGIVLSEQGRTQEAIKNFRMAIETDPKFTQAMVNLGQVLEASGDYADAVVEIERIIKISPDNAKIRNRLSSLYLKLERYPEALGQAEEALKLEDGNIQALRAKGSIMRIMGNDTEAQACFEKILSIDPGNYAFLFDLADIHFHRKEYKEAEERIHSYLVQKPNDREAKMLLGRMFAEMGNRAHAIQILRSFKSGSQ

SEQ ID NO: 99348 - protein, 229 aa, Unknown
  Obtained from environmental sample
  DOMAIN (142)...(221): Fibronectin type III domain
  misc_feature (1)..(229): Xaa is any amino acid
MMDEFRIHGNYLEKAETTRYSGSGGRVETRTLDLGYADSQVLKIEAFGGRTSNYSGKVRNEYAGNSPLSFSDHSEMKFFIRLSNSPYRWNDVPWVPINPGTELQQFRGRYVQLAADFFPGTDGETSPYLSELRVIYRAAEPPPPPAYVTAVARDGAVELTWRASASRDVGGYYIYYGTAKGEYLESKCPIDAGNRTSILIEGLKNGTLYYFAIASYNKPENDERLLMHE

SEQ ID NO: 99349 - protein, 93 aa, Unknown
  Obtained from environmental sample
  misc_feature (1)..(93): Xaa is any amino acid
IDREYGAGRGRMDLGIEYNGHRYIIEIKLVHDYNSPQAVRAKGLEQIRKYRDKFAPGVPAYLTIFDRRTKTREKPWDERISWEYDGDVAVLGC

SEQ ID NO: 99350 - protein, 271 aa, Unknown
  Obtained from environmental sample
  misc_feature (1)..(271): Xaa is any amino acid
MIQQFKNIIKQLYPPNSPYAFDMIEPEILGRIYERFLGSKIRLTENHQAKVEEKPEVRHAGGVYYTPQYIVDYIVENTVGVKIKDKSPEEIEAVKICDPACGSGSFLLGAFQYLMEYHREWYAKANQTAQKKYKDDFFTNAESEIQLTLKKKTEILKNNIFGVDIDREATEVAIMSLYLKILDEGYDKGQVELFMRGHILPDMTNNIKCGNSLIDRKQLFDYDMFGDPDINPFDWQEFNAEGFDVIIGNPPYIRIQEMQEWASKTVKLYRE

SEQ ID NO: 99351 - protein, 203 aa, Unknown
  Obtained from environmental sample
  misc_feature (1)..(203): Xaa is any amino acid
MHMITDLNQWRKLRSFGIEEWIAGKKKSGQIKQIGFSFHGSGIEFLKIIDDFDWDFSQIQYNYSDENFQAGVTGLRAAAKKMAVVVMEPLLGGKLAVGLPKDAVKIFQKANNDLSPAGWALNWVWDHAEVTTVLSGMSNMAQLEENLCLAEASAPGMLTDNLKAVYKSVLEIVNRRCKVRCTGCNYCMPCPAGVNIPRFFLFV

SEQ ID NO: 99352 - protein, 281 aa, Unknown
  Obtained from environmental sample
  DOMAIN (2)...(206): RNA polymerase Rpb1, domain 5
  misc_feature (1)..(281): Xaa is any amino acid
DGIDMRGEYGVCRKCYGRDLATHHTVEIGEAVGTIAAQSIGQPGTQLTMRTFHIGGVASKAIEENRIALKYPVYIKDVVGEIIKLDNGHLLFTRRGWVTINKVMREYRLENGDKLHVTEGKRINRGDVIIKRRGEDIISPEIAYALILKDKETETLYLISQDQKIEIKSGSNFEVRKGTVVEAEKTISTFDPFSDPIIAEAGGTVKYEDIILDSTLKEEHDEDTGNIEKRITEFQHESKQPRIFIVDDNDKEVASYFLPSGAYILVEEGDKINAGKTIAKT

SEQ ID NO: 99353 - protein, 49 aa, Unknown
  Obtained from environmental sample
  misc_feature (1)..(49): Xaa is any amino acid
MSKKVIGSEALILSLIEEGVDTIFGYPGGQIMPVYDAMYDHAKQLRHIL

SEQ ID NO: 99354 - protein, 269 aa, Unknown
  Obtained from environmental sample
  DOMAIN (1)...(269): Inorganic H+ pyrophosphatase
  misc_feature (1)..(269): Xaa is any amino acid
ASQKTLLGALRKGTYISSSIIALAAFPVIYYCLDCANNPGRIGVYFAILSGLIAGVLIGFITEYFTSDHYSPTRNLAAASLTGPATIIIGGISLGMLSTLMPVVIVSISVMVSFFAAGGASHYSAGLYGVSISAVGMLSTLGITLATDAYGPVADNAGGIAEMSGLPPEVRNRTDALDSLGNTTAATGKGFAIGSAALTALALIVAYIDEVKLYIPKYKPDFELRLELNNPPVLIGLFIGVMLPFLFSSMTMSAVGRAAQSIVREVRRQ

SEQ ID NO: 99355 - protein, 108 aa, Unknown
  Obtained from environmental sample
  DOMAIN (25)...(107): ABC transporter
  misc_feature (1)..(108): Xaa is any amino acid
MLEVKGLKKSYGNFSLSLDLSVSAGETLALVGPSGCGKTTALNLIAGLAQPESGSVTIDGEDITNLSAWKRNISVVFQDLALFPHLDVGGNIAYGLFIKGTPKKERRI

SEQ ID NO: 99356 - protein, 54 aa, Unknown
  Obtained from environmental sample
  misc_feature (1)..(54): Xaa is any amino acid
EIRPIVDSVLLSMAIECGLCSAIMNPCDKNLMNTVKTAAVILNQTLYADSYLEL

SEQ ID NO: 99357 - protein, 282 aa, Unknown
  Obtained from environmental sample
  DOMAIN (8)...(279): AMP-binding enzyme
  misc_feature (1)..(282): Xaa is any amino acid
LIAVDDPSLLENISVSRANCAKLEKIAVVGSTIPDGYIEMRAEIEKASSVFTRIPTVTSDPMLVYFSSGTTGMPKMVIHNHSLPLGHIVTAKYWQCVEDNCVHLTQTDSGWAKFAWGKIYGQWICGAAIGVYDTEKFTPKGMLTALQRLRPATFCAPATVFRYLIKEDLSGYDFSYIRHTSVAGEPLSPEVYNKFMELVKLEIREGFGQTETSVMAAVFKWLPVKPGSMGKPAPFFGFKLLDENDTVCDQGIVGNMSITCAGKSMYGIEGAKDSETPVIGNS

SEQ ID NO: 99358 - protein, 186 aa, Unknown
  Obtained from environmental sample
  misc_feature (1)..(186): Xaa is any amino acid
SSPKAEPFKIWLAQVGTDRLDEISDPEKAILRGADFYRQKGYTEAWINQRLQTIEMRKELTDEWQKRGVTEKDYAILTNDMTKAWSGLSVQEYKQLKGLKKQSLRDNMTNIELVLNMLAEVTTTAISKTEQPKTLGHNTQIAIRGGKVANVAKNEYEKATRQKAISPLNAKNKKMLEIKTALPKKK

SEQ ID NO: 99359 - protein, 276 aa, Unknown
  Obtained from environmental sample
  DOMAIN (1)...(275): UvrD/REP helicase
  misc_feature (1)..(276): Xaa is any amino acid
WKYTKNFSIYDDDDQKKLLKLIVVPVEGDLANAARIRKISNTISSWKNKGVTPEEALKESYDDWKTIASYYDEYQEQLMQANAMDFDDLLLRAADVLKYIPEISAQFSEHFQYIFVDEYQDTNDAQYILLKLLLSNGNRNITVVGDDDQSIYGWRGANLNIIRSFHRDFAPVEIVKLEENYRSSSNIVKAAGSVIAHNKRPKEMEKKVFSNQEKGSLIHIKQTADDETEAFSIASKIISLGTENYLQTAIFYRNNAQSRLIEAALNKMRIPNIIIG

SEQ ID NO: 99360 - protein, 275 aa, Unknown
  Obtained from environmental sample
  misc_feature (1)..(275): Xaa is any amino acid
VGNTEIAYNENFTAFTFRSMAFSRLLDRLILPAARAAAGDSLGYFNSEIMTAAGYKLSVDDMKFELHVTFPPEDKAVMFTSLYGGYQAPEPRGEEIPPAAVSLYINYSLDDRARYLWYNYYDNYKGMRYEGNDTLIRDPATMNVDGALNIREWVFESSGWIREPYGDAPFTWENIRRGDARVVHNFVKQRSQLTLGDITTGTSIVPGPVTGGVRYERNSYFFGNNPSDNLNSVTFFMPEPGEVEVYMDGTFRRRIYLPAGHHQLGGFGGEVGRNR

SEQ ID NO: 99361 - protein, 142 aa, Unknown
  Obtained from environmental sample
  DOMAIN (7)...(118): Response regulator receiver domain
  misc_feature (1)..(142): Xaa is any amino acid
MTQVHKKKILVVDDDRDICEILSFNLKHEGYEVDAVHSAEDALKKLSPEHCLILLDVMMGGMSGYQMAEKLRKNGNDINIIFLTAKDTENDMLTGFSVGADDYISKPFSLKEVSARVKAVLKRGAENAKNAEHTLLVIDDLQ

SEQ ID NO: 99362 - protein, 257 aa, Unknown
  Obtained from environmental sample
  DOMAIN (55)...(256): ABC transporter
  misc_feature (1)..(257): Xaa is any amino acid
TRGIAKTCRRAYTESMPVLEVSHLKKRFNLEAGFFARYGNFVNAVNDVSFVINKNEAYGLAGESGCGKTTTARLLVRMYDADGGSILYYPENAKAPDEPLDVLSLAGDGLKSYRKKIRYVFQDPARSLNPRMTVYEVLVSGLRWSGVAGKTRLREKQFREQAAAALDEVGLSPGDLHRRPSEFSGGQRQRISIARGLLMRPRLLICDEVVSALDVSIQGQILNLLLDIREKRDISFLFIAHDLKVASYFCDRIGVMY

SEQ ID NO: 99363 - protein, 263 aa, Unknown
  Obtained from environmental sample
  misc_feature (1)..(263): Xaa is any amino acid
KNVHHKFTRAFLNPPFSQDNEPERDFVDTSMSALMPEGIFSSIVWAGIFADDDNSNWRKEFTRNHTLLGMISMPDDLFYPTAATTTIMIAKAHIPQQDDDKVFMARIWNDGYEKLKGRRIICDGSQLPMTLSAFHKFLGGDDVKSENIITIESKNIINGNEWSPQQWLPKVRISKNEMLNLEKDVRMSMFRAITAMPNLADITLDNFTTIWNDLPELPFSLTRPTSFFFNVHNGKSSGEKNYREGDFPYISSGDTNNSIIRLI

SEQ ID NO: 99364 - protein, 238 aa, Unknown
  Obtained from environmental sample
  misc_feature (1)..(238): Xaa is any amino acid
GNIFTDGYFCKAGTAGENAVPNDGAVGYGYAGKSGAPGKSFIPNIGNAVRYDYAGKVGAAFKRAIINDGNVVPYGYISKAGTVLKNAPINSGNAVRYGHTDKAGTVVKSKKPNVGNAVRYGYTGKAAAIFKRAVPNDGNAVRYAYNGKAFAETKSLVSNLGNAVRYGHAGKIDAAGKSSLSNAGNALRYVYAGNGAGRKSALPNTGNAVRYDYAGNVTATGKSVIPNAGNSVRQDYTG

SEQ ID NO: 99365 - protein, 227 aa, Unknown
  Obtained from environmental sample
  misc_feature (1)..(227): Xaa is any amino acid
MATHFGRIILPAQLFFFAGSFLIAAQQAKKQFFVPSLTGVIYNASIVFFGWAFRENGVIGFAYGVPIGAFIGFFVLQILGSYRSRIKYFFVFKPTNAEFIKTLKLLLPMVLGAGSMFALEFAIRSFGSLFGNSGISSLNYSYRLMYTLVAVFGFSVGAAKYPDMVRLFKENKKSELNEKVWNDLAKIFAILVPAICALTAVSLPAVRILFERGAFTQQNSILVNSLL

SEQ ID NO: 99366 - protein, 281 aa, Unknown
  Obtained from environmental sample
  DOMAIN (115)...(273): Glycosyl transferases group 1
  misc_feature (1)..(281): Xaa is any amino acid
QHILWQLFTLQWFLITHKEYTVLEFGNTALPFAPGIVFLHDIYCEFFPEDFKGVRDKLARFYNRKQYRLIAKKSKHIVTVSNFSKNQIVHYCKAKPENISVIYNGWSHFKDIAVDNSIFNDFPILSKPFYFSLGSLSKRKNIRWIIEYAEKHPESIFAISGTGLSTLKVNELDGEIPKNIILLGYLDDFKVKALMTKCKAFILPSYFEGFGIPPLEALSCGAQIIIAKSASLPEIYGNTAHYIDPFKTDVDLDALLREPVEKRTQFLPNIPMTFPLTKYII

SEQ ID NO: 99367 - protein, 279 aa, Unknown
  Obtained from environmental sample
  DOMAIN (1)...(275): Acyl transferase domain
  misc_feature (1)..(279): Xaa is any amino acid
KDFYDSSDIPSCRELFDKADRILGRSLTQIIFNGPMGELTKTHNTQPALFVVEAVIADLLSARGIAPVVAAGHSLGEYSALYAAGAVSFEDGLRLVAARGEAMAEAGAASPGAMAAVLGMDRDKIADVISGVKSGVVVTANENAPEQTVISGEAAAVDEACGLLKAAGAKRAMPLPVSGAFHSPLMQPAAEKLAKALESVKFSAPRCPVIANVTAKPETDPAVLKDLLIKQLVSPVRWVDSMKALSELSPQHCAEVGPGTVLKGLAKKCVPEMNILTCD

SEQ ID NO: 99368 - protein, 94 aa, Unknown
  Obtained from environmental sample
  DOMAIN (9)...(93): IMP dehydrogenase / GMP reductase domain
  misc_feature (1)..(94): Xaa is any amino acid
MEANYFLTDGLSYDDVLLLPGYSDTLPKDCDIKTTLCCGISLNIPVISAAMDTVTEEKLAIAIALEGGAGVIHRNLNPEEQARQVANVKRYLNW

SEQ ID NO: 99369 - protein, 252 aa, Unknown
  Obtained from environmental sample
  misc_feature (1)..(252): Xaa is any amino acid
VNNTGNNVRTIYLRCSYSEGYNITRKETKIAFDSYLSPGESHTTKLPVSLSTVNRYDIEMVFTDGKSIKSNNVTVSDNARIAVGSNGQIQQTVLAPNVQAGEEMLKRAISTNPANSWNNGSIQKGQWTNGSNISAFLWSSGEMYFGNFLGNLKNGYGISISPQGNIINNCPKAKYYAGNWSNNEKSGTGSCYDASGTLIYYGEFKNDKPVGTYPSTGSYSSDKFQTIDYTGGDKYIGETYNGNRHGYGVYVW

SEQ ID NO: 99370 - protein, 88 aa, Unknown
  Obtained from environmental sample
  misc_feature (1)..(88): Xaa is any amino acid
MNLFLPVFACLTLAGGPACFGQTSREDSVRLISASEKGDVEAVKSLLKKNVYIHAQDREGRCALVAAAYKNRLEIADLLIAAGADVNM

SEQ ID NO: 99371 - protein, 80 aa, Unknown
  Obtained from environmental sample
  DOMAIN (7)...(49): ClpX C4-type zinc finger
  misc_feature (1)..(80): Xaa is any amino acid
MNMEKQNHRCSFCGKGPHEVEHLLQGMQGVRAFICDECLEAGSTQVRMSKKPKTAKPQEPKLYRPKEIKAFLDEYVVGQD

SEQ ID NO: 99372 - protein, 278 aa, Unknown
  Obtained from environmental sample
  DOMAIN (2)...(256): NAD-dependent DNA ligase adenylation domain
  misc_feature (1)..(278): Xaa is any amino acid
MSDSPTQTVGYKTVKGLEKTVHTIPLLSLEKTKQTSDLMRFIGSRHVLLMHKLDGLTVKLEYEKGSLIRASTRGDGEEGEVITHNANVIEGIPKKILYKPRLVVAGEAYIQKNTFDKLRDTLRDSTGNPYKNARNMAAGSVRCYDTASCAARSLMFSPFAVIEGLDEDARIKASKCLKLAVLKQLRFSPCEFILLNGKTAELEIINGISKLRSIADDKGLPIDGIVVSYNDIPYSLSCGRTGHHYKDALAYKFEDDLHETVLREIEWTPSRSGELSPV

SEQ ID NO: 99373 - protein, 251 aa, Unknown
  Obtained from environmental sample
  DOMAIN (33)...(251): Bacterial extracellular solute-binding protein, family 7
  misc_feature (1)..(251): Xaa is any amino acid
MKISFGKAMCTGFLCAAVLLTACKRDQKVVIKVGDTWSPTHPIARSIDEVFKPQVEQKSKGAITVEAYHSQVLGNEQTLWDSVRNGSIEMAVVGSVMNSEYRPMLISDWPFLYRDITHAKNVWTGGFFDDFTKDFEKAFPTTRMLSVGPNSSRTFTSNKQLTGISDFQGQKFRTPSNPIHVGIVTDLGASAQVIPLNELFNALHTGIVDGQDNGMVTVLSEKLNEVQKYLYETNHIMAIMEVIVNAHFFDK

SEQ ID NO: 99374 - protein, 245 aa, Unknown
  Obtained from environmental sample
  misc_feature (1)..(245): Xaa is any amino acid
MKRFNLILLIVLFGFLFSCAGKPKVKTAENNEQAKENVVEKPDKQAEKIDELAVEEKTPVDLAAASPEKPADAPIDIAAEKPTEEPLNEETTQADSDKELIADAELVKTEPAAQEPAANTPSVSPAPPSQTQPPQTQAQPPQAQPTQTQPQTQPQTQPPRTQPPQTQPSQQAQAPQSTPPAQRQQPVTPPAQTPPEEKTDSSETASSGDDSQDKKEPSSSIAGGNSAPATRIESLTPMGTMPQDK

SEQ ID NO: 99375 - protein, 296 aa, Unknown
  Obtained from environmental sample
  DOMAIN (241)...(296): Elongation factor Tu C-terminal domain
  misc_feature (1)..(296): Xaa is any amino acid
IPGTLNIVHKRHYAHIDCPGHADYIKNMITGAAQMDGAVLVVSAPDSVMPQTREHIILARQVGVPSMLVFLNKIDLVDDPELLELVEEEIKDVLTQNGFPGDKIPIIKGSAFKAMSELAEGAPSEETTKCIEGLLDAMDSYFPDPERDSEKPFLMPIEDVFTISGRGTVVTGKVDRGILKLNEEIEIVGIKPTKKTVVTGIEMFNKLLDEAQAGDNVGTLLRGIDKKEVERGQVLAKPGTITPHKNFKGQIYCLSKEEGGRHSPFFPGYRPQFYFRTTDITGTVQLPAGQEMVMPG

SEQ ID NO: 99376 - protein, 52 aa, Unknown
  Obtained from environmental sample
  DOMAIN (1)...(44): Ribosomal protein L34
  misc_feature (1)..(52): Xaa is any amino acid
MKRTFQPSRLKRNRTHGFMERMSTPEGRKVLKRRRRKGRYKLTVSDEKRLPK

SEQ ID NO: 99377 - protein, 88 aa, Unknown
  Obtained from environmental sample
  misc_feature (1)..(88): Xaa is any amino acid
MRGIGQDFNDFLKEQGIYDEVNELAAKKLITYQLEKAMQEQKFTKSFIAKKMKTSRVAVDNILNPAFNTSIDSLERFANVLGKKLTIS

SEQ ID NO: 99378 - protein, 72 aa, Unknown
  Obtained from environmental sample
  misc_feature (1)..(72): Xaa is any amino acid
VKEQAAYFISDAHLGAFPKGSVLGREVHLIAFLKELEGKATHLFIAGDLFEFWYEYDFFSPSRYFRLWRALA

SEQ ID NO: 99379 - protein, 131 aa, Unknown
  Obtained from environmental sample
  DOMAIN (3)...(128): Inositol monophosphatase family
  misc_feature (1)..(131): Xaa is any amino acid
MSGNKELAAAVKAAQEAGKIQLDALNKLTSLNIEKKPDCSPVTAVDKACEARIRDILLSEFPNDGFLGEETGENAGTTARRWIVDPLDGTRPFIRNIPTHSALIALEENGRSHNRSNPPAGNGANLLRFYR

SEQ ID NO: 99380 - protein, 259 aa, Unknown
  Obtained from environmental sample
  misc_feature (1)..(259): Xaa is any amino acid
KDSWAQQRQVRDLVLFLQEYDISAATASRLYKVYGDGAKMRICENPYSLIDDVWGIGFVKADAIAVKIGFDADSYKRIKAGLIYALQNAATAGHTYLPKAELETAAAELLGVAHERILYTLDHCVNQDYLICQDECVYLPYLYAAETGVAQRLSERIRGGGAGSGERSLSDKEINNFITQYEKRTGWIGAPEQLEAVRYAAKSGIFILTGGPGTGQTTVLQVIVALFKEMGLRVELAAPTGRAAARMGSISGIAARTIH

SEQ ID NO: 99381 - protein, 93 aa, Unknown
  Obtained from environmental sample
  misc_feature (1)..(93): Xaa is any amino acid
VQSLGCDEKLFKQVVKTTFNQRRKTIRNSLKPLLGDLKLEHVLLDLRPERLGVAEFVELTNVVERVRHCEEERRSNLNIRDEIASSLVPRFSQ

SEQ ID NO: 99382 - protein, 245 aa, Unknown
  Obtained from environmental sample
  misc_feature (1)..(245): Xaa is any amino acid
VAAGSLLGVAINREKYSFPVGKVNELYMFPLDFEEFLWALGYEKLLAEIKNHFANNEAMPEALHSLALELYQKYFIVGGMPAVVKTFIKTDSFLKAQLAQSDILNEYVADMAKYADKTTSIKIRACYNSVPAQLAKENTKFQYKVVQRGGTATIFGEAIEWLNLAGITLKCQRLEHGFIPINAYVDLINFKLYMGDIGILTLRSEIPLQTILSTIEVDNTFLGAMTENYVAQCFRAKNYRLTYWQ

SEQ ID NO: 99383 - protein, 129 aa, Unknown
  Obtained from environmental sample
  misc_feature (1)..(129): Xaa is any amino acid
ATDFPVADGIAINQKDVRLFQLAKSAIYSGITVLCRTAGLTPAALDKAYIAGGLGFYINLENAAYTGLLPREIISKTNVSGNTSLKGAILSLTDESFLHRCREIIARSTVVDLAVDKEFADAFAENMVI

SEQ ID NO: 99384 - protein, 133 aa, Unknown
  Obtained from environmental sample
  DOMAIN (1)...(105): ABC transporter
  misc_feature (1)..(133): Xaa is any amino acid
VEEAAKAVYAHEFISRLPEGYNTVLSEGAANISSGQRQLISFARVIAHNPAIVILDEATSSIDTETERLIQLGMQRVLAGRTSIVIAHRLSTIRHADRILVLSSGRLVEQGKHDALIAKNGLYAGLYRLQYSD

SEQ ID NO: 99385 - protein, 123 aa, Unknown
  Obtained from environmental sample
  DOMAIN (69)...(101): Ankyrin repeat
  misc_feature (1)..(123): Xaa is any amino acid
MVDAEGRTALRLALDLDQLKTAELLADSGGDVFSAARDGKTPAEAAFSKGADAVRAIFSGAAINSRDSSGNTVLHYAARLGDASLVSLLISLGANKSIRNIASESPADIALRWRNNEAAALLN

SEQ ID NO: 99386 - protein, 240 aa, Unknown
  Obtained from environmental sample
  DOMAIN (2)...(34): Ankyrin repeat
  misc_feature (1)..(240): Xaa is any amino acid
SSGKTILHLASEAGSASAVNTILKAGANAAPRDKNGKTALDYALERTDSRNHAETAVQLILAGAVSNNPLYAYFAPAAKSSNYNIRSADGMTPLHYIAREGYIGYLTFILEKGADVNTKNASGASPLHEAARSGNIAMMRTLLNNKADIKAQDAKGNSVLHVAVPPESHLEAINLFLTYGAHVNLRDEHGDSPLHIAILLNRSENIIRTLLSSGADVTIRDIDGKTPLYLAVERGRIHFI

SEQ ID NO: 99387 - protein, 269 aa, Unknown
  Obtained from environmental sample
  misc_feature (1)..(269): Xaa is any amino acid
MIRVNNDEEIQLNSGVNTATGQTYDWTWEWDLANAVNGLKNFAGMNEGSNTITVTAYDKAGKSDYKTFTFIRDTKQPVLTLNNLEGNAPTIVADAPVIQVSISDDYSAIGYETDKVTGATLNQYYFEYQIGSDYIPRNPGSYVKVGLTSSTGRSWNGNINLNTASTFWSGNVIPDGEWWIQIKVADRLNNNGSEIRTSLDNYATAVTKVYFYVNRGAPKLEVTVPNAKPDNFYSAQTSSPFTLNGKITDGDYDTDALTIVLNNREIRMR

SEQ ID NO: 99388 - protein, 263 aa, Unknown
  Obtained from environmental sample
  misc_feature (1)..(263): Xaa is any amino acid
RLTVDCSGIPAVARSQLPDGYGVENFTTNASDQFYVVLRYVKLTDPDFKLTPMAWPYYKTWIAPQHHPGGAIIGVGANLSFDYAEHCYKRFTEAVKLPAHALMYAEKSATPYRRPPYSFVADGFAVFGDAACITNPWNGEGVPYAWRLCAIAAEEFGRVMKDGSYPLIDKVWNVNARYINEQGAQFAQFLSMLAGVVDCSAGENDYEFEKSIIFQDDEEPHKGGLTGKVLTGMLRGKLSVRIVAKLIGAMITGTRMIKHYRSY

SEQ ID NO: 99389 - protein, 98 aa, Unknown
  Obtained from environmental sample
  misc_feature (1)..(98): Xaa is any amino acid
VNKLKITFIDKGIPVIQGEYNVINKKGSTVKAHEERVKWLTAVTQKCIELGICPVLWDNGGKSATGFNDMGEIYRDTPSVISPALQEVLDAMLPLLQE

SEQ ID NO: 99390 - protein, 242 aa, Unknown
  Obtained from environmental sample
  misc_feature (1)..(242): Xaa is any amino acid
LEFEFLNEKLKIENCEPVSQTLSLWEGTLSSEFKVDTHTVKTETFVHPEEDTLYVRAASPLLKEKTLRVTVVFPYGSHKKNGADFSAPHLHETEVCVSKDGFIYIERKLDGTIYTVAVGGSGFTILLNERQHTLQLIPHEETIEFSIRFEPVEIPAFSNAGLTLDKPHSDNAEPFDEAKTKCLSFWEHYWNSGGIIDFTGSSDSRAFELERRITLSHYLTAIQSRGRLPPAETGHTCNSWYG

SEQ ID NO: 99391 - protein, 283 aa, Unknown
  Obtained from environmental sample
  misc_feature (1)..(283): Xaa is any amino acid
ATPKKGYKFVGWTGAATSTADTLKITMDENKTLTANFIPESYDFNVDPTNGGHVSRSPNQPNYKLGTIVTVTAVPNSGYKFAGWVGVVSGMTNPVKIKMNSDKDLKADFHPVYYTLTVNSNPTNGGHVSHSPNQPNYKPGTIVTVTAVPDSGYTFAGWAGAAKSMTNPLKIEMSGNNVNNTLTAMFFHLTENRFSFTDPRDNKTYKTVKIGTQTWMAENLNYQTSTGSWCYANDVSNSVKYGRLYDWNTAQTVCPTGWHLPSNQEWGTLVATVGASSAGNNLK

SEQ ID NO: 99392 - protein, 249 aa, Unknown
  Obtained from environmental sample
  misc_feature (1)..(249): Xaa is any amino acid
LTDIEGIKLPAAGDTAPGNVTPKNGYTGTILWTPTPPNNIFESNKTYIATITLSPASDDYTLAQDSATPNVTLKDVAVGAYTATPNAGTSAPYYLNNITITFAAPTNSKLGDTITLTGLFPATGALPANSVNTTATTGILAGSISWSPAFPTGTAAFAGRYDSATDYTATITLYLSSGATMKGIPATGTDYFKLKDTNGDQPTGTTVTHEIQGDPDTAISVKLTATFPKTKTAIPTVGTDAATNGKYIP

SEQ ID NO: 99393 - protein, 165 aa, Unknown
  Obtained from environmental sample
  DOMAIN (4)...(164): Glycosyl transferase family 2
  misc_feature (1)..(165): Xaa is any amino acid
MKVSALALIYNTKPSHLREMIESILSQTFRDFEFLVLNNSPENAQLEEIVKSYADKRIKYFANERNMGIPVSRNQLIDMASGEYLAICDHDDISALNRFAQQVEFLDNNPDIGVVSGWIEYFGDRRGVLKHPEDNSSIKRAMLAYCALAQPAAMIRKSVLIENNI

SEQ ID NO: 99394 - protein, 120 aa, Unknown
  Obtained from environmental sample
  misc_feature (1)..(120): Xaa is any amino acid
MGVVAKKQNKPSQKVQAQIPEISVIVPVYNTEKYIAECLDSILAQTFQNYEVICIDDGSKDASLSILKEYALQDNRITIMTQENAGVVSARNNAIAMAKGEYIFPLDSDDKIAPACLEIL

SEQ ID NO: 99395 - protein, 130 aa, Unknown
  Obtained from environmental sample
  misc_feature (1)..(130): Xaa is any amino acid
KSDVNICSNEALCALRAHAYLSLIGKRGLVDVATLCRDKAVYLRERIKESIPSIKTYDGAPIFNEFVVDLPINADKCAEAMLAKGFAAGIPIGQYYNYNGADKALLVAVTEKRTRREIDAFVDGLRGVVG

SEQ ID NO: 99396 - protein, 286 aa, Unknown
  Obtained from environmental sample
  misc_feature (1)..(286): Xaa is any amino acid
GQGGLKSDVILGGFKGCGTGGAGGGGAVAYMKDTVTGQITLTINVGSGGAGGNAMYTKGGENWRTGYKGEDGGSTSVTWKGKNPLKVAGGKGGGEGRAADKGTDATGRIMNGGSGGLASAKPSNDFPSNWATKQGGNGDDGNQSKLVESYGGSAGKLTNTGYLNTYGGYIGGYCANPGTDPCSPTCSPLYSASIGAGGPGGAGYDKGYIGQKGGDGRVTVIITYLHTVKIDPNGGSEVSPSSRTDVPNGTKIAAPTDPIRTGYTFSGWYDAKTGGSQWNFHSNTVT

SEQ ID NO: 99397 - protein, 298 aa, Unknown
  Obtained from environmental sample
  DOMAIN (106)...(159): Ferrous iron transport protein B C terminus
  misc_feature (1)..(298): Xaa is any amino acid
AVLSFIPIIIVLFFFLSLLEDSGYMARVAYVMDKPLRKIGLSGRSFVPMLMGFGCSVPAIMATRTLASERDKKMTILLTPFMSCSAKVPIYALFAAAFFPQHPVLIMSSLYLLGIFFGVISGFMMEKAIFRGEPVPFVMELPNYRFPSAKTVLLLCWDKAKDFIQRAFTIIFMATVVIWFLQSFDIRLNHVEGGEGSLLALIGRLTSGIFVPLGFSDWRISTALITGFTAKEAVISTLAVLTGSNVAELANTLHTLFSPLSAFSFLVFTLLYTPCVAAVATVKREFGSIKGLIFIILY

SEQ ID NO: 99398 - protein, 252 aa, Unknown
  Obtained from environmental sample
  DOMAIN (100)...(252): Glycosyl hydrolases family 31
  misc_feature (1)..(252): Xaa is any amino acid
MINNTKQPYIKDELSLSVGELVYGLGERFGPFIKNGQTVDIWNADGGTASEQAYKNIPFYMTNKGYGVFINDPGKVSLEVGSEKTARVQFCVSGEYLEYFIIYGPQPKAVLERYTALTGKSAMPPEWSFGLWLSTSFTTSYDEKTVMSFINGMEERKIPLSVFHFDCFWMKGFNWCDFTWDRETFPDPKGMLSRIKAKGIKICVWINPYIAQRSVLFEEGKKGGYFLKHKDGSVYQTDQWQAGMAIVDFSNP

SEQ ID NO: 99399 - protein, 134 aa, Unknown
  Obtained from environmental sample
  misc_feature (1)..(134): Xaa is any amino acid
LPKSNWKFWLQAVCRLTTQHNSASFVKQIRNRYALSAIINGSQKWPNKPEDRDALYFLAQSFKAQLVKELPSDKNNLSGASQDLAFRAKSLMKDLANISLEIAQMTVSSEDAQVLPDWFIVEVIRDLPRLAAKK

SEQ ID NO: 99400 - protein, 191 aa, Unknown
  Obtained from environmental sample
  misc_feature (1)..(191): Xaa is any amino acid
MSAYRDKGFPVTIVRPSHTYDERSVPLGVHGKNGSWQVLKRMMEGRPVIIHGDGTSLWTMTHNSDFAAGFTGLMGNIHAIGEAVQITSDETLDWNQIYRAIARVLNVELHAVHISSEFLAKNSPYDFTGSLIGDKANSVVFDNTKLKRLLPGFCAKVRFDQGIRRTIDHVLSHKECQIDDPEFNAWCEKII

SEQ ID NO: 99401 - protein, 231 aa, Unknown
  Obtained from environmental sample
  misc_feature (1)..(231): Xaa is any amino acid
ETAVKEGVGNAIRRSVTFGKYYLYTAVAINDSAGKFTGVLRFSGLIPGFFTRLLSATLPFLAFGFLIIMGICLSLYHFTQYQSHLVQEKLNAELEKKTTELKQMIEKAEAETRHREVILNSMFDGVLTLDSKLNIIHANQRLCALFDTNKDVRNMSLIEFSHSAELENAAKIVLSTGRPYEFILKRYNGKLQQFQGFAAPLNIGQHTPPGIIMVLGDISRLVKLEQVRKDL

SEQ ID NO: 99402 - protein, 247 aa, Unknown
  Obtained from environmental sample
  DOMAIN (139)...(247): Glycosyl hydrolase family 3 N terminal domain
  misc_feature (1)..(247): Xaa is any amino acid
MKKILLFTLCGLLLNFAWAAAPKNASKSIYKNGWIDFNKNGVKDVFEDPAQPVEKRIADLLSQMTIEEKTCQMATLYGYGRVLKDSLPTARWKNEIWKDGIANIDEQLNGVGRSSRTTPHLLYPFSNHAEAINTIQRWFIEETRLGIPVDFSNEGIHGLNHTKATPLPAPIAIGSTWNRALIYEAGAIAGKEARALGYTNVYAPILDVARDPRWGRTLECYGEDPFLIAELGIQMVNGMKTAARRLP

SEQ ID NO: 99403 - protein, 109 aa, Unknown
  Obtained from environmental sample
  misc_feature (1)..(109): Xaa is any amino acid
ADEAYWDARLASLLPEDNGSIATPSVILEGAVLKGLEQAARLRLYLRAVTRLSRVCGQGQGRAEILFALDAAWSEGRGATRFQFPGGIRAEVRRGGVSFFSVEPEPSTL

SEQ ID NO: 99404 - protein, 153 aa, Unknown
  Obtained from environmental sample
  DOMAIN (10)...(153): Tryptophan synthase alpha chain
  misc_feature (1)..(153): Xaa is any amino acid
MSAMSLQQRIEKAGHEGRTALIPFITAGFPEPDRFARILRELDESGADVIEVGVPFSDPVADGPVVEEASRKALAAGVSLDWTIRQLVELRPRPAAGLVLMGYYNPFLQYGLERLAKDAAEAGVQGLIVPDLPLEEDGLLRAALAPHKLDLIA

SEQ ID NO: 99405 - protein, 163 aa, Unknown
  Obtained from environmental sample
  DOMAIN (1)...(150): Indole-3-glycerol phosphate synthase
  misc_feature (1)..(163): Xaa is any amino acid
AAKANIPVLRKDFIVDSYQIYEAKILGAHAVLLIAALLDAKALAVYVKTAAELGLSALVEIHSEAEAEQALEAGARIIGINNRDLKTFKVDIGVTARIKKLIPAGIITVAESGIKSADDARAMKEIGVDAVLIGESLMRSADKKQFLAELKTAASESYSESLN

SEQ ID NO: 99406 - protein, 205 aa, Unknown
  Obtained from environmental sample
  misc_feature (1)..(205): Xaa is any amino acid
VTAPYSQPGALTVNVTNTSTVATGNLAVALSAGAEDFFVLSTSSINSITSENGRANFTVTPRTGLAARTSSYTGTVTVSGANVASRSFGVSFRVNPGYGITITPPVFDSVKVGYAQPAAKTVTVSNPAGNAATGVLNIEFTSGESDFWLSGTTLESISAGGNRTFTIRPNGGLAVGNYSATVRLSNANITANNTFTVSFAVTDGT

SEQ ID NO: 99407 - protein, 65 aa, Unknown
  Obtained from environmental sample
  misc_feature (1)..(65): Xaa is any amino acid
KSQLVSALKGGVELKAGKTLDGGFHIVEKDGAAYYDFSVQAVAKLLSAYLNPRLAEILSNAAKGN

SEQ ID NO: 99408 - protein, 104 aa, Unknown
  Obtained from environmental sample
  misc_feature (1)..(104): Xaa is any amino acid
MTWYGGILTAAVAAFPLMYRTARGAFEGFDNTLAHAGQTLGLPDSYIFWRIRMPYCRQGILAGVVLAFARAMGEYGATSMLIGYTPGKTRDHKHDRIPDVAYRQ

SEQ ID NO: 99409 - protein, 245 aa, Unknown
  Obtained from environmental sample
  misc_feature (1)..(245): Xaa is any amino acid
MLAALAQTVSSAQSLLAGSANGGASKDISASRETGVFVFNDLSWERKSAVTISGDLAGNAAALRGADGEVYPIQRYVDHDGNKQAVFFPKTPSLGWIRLAVLDKNNEEKSPFIWKNNILETPFYTIAFDTAGRITSLIDKRRGCEMVAPGGVFNAIITAEDVPVYWDAWDIDADWTKHIKQETQLVSTGVAADGPVCFRLRRAYEISEASRLVQDMVCYANNPRIDFDTKVFWYEKWRVLKAQFD

SEQ ID NO: 99410 - protein, 75 aa, Unknown
  Obtained from environmental sample
  misc_feature (1)..(75): Xaa is any amino acid
MYVPGNQGIIYFLDTGLCAYLTKWPTPDTLMMGAMAGAILETYVIGEILKSYLHNGKELAMWLYHKARFPFGRFN

SEQ ID NO: 99411 - protein, 197 aa, Unknown
  Obtained from environmental sample
  DOMAIN (86)...(110): The GLUG motif
  misc_feature (1)..(197): Xaa is any amino acid
DYELQNDIDLGDYLANSSTGWQPIGYDISYYYYFNGKFNGNGHKVSGLWINRPLTNYVGLFGYVYNIAELRNIGVEIDDGKDGVRGNSSVGGLAGSGGTITNSYATGSVTGSGNYVGGLAGSGGTIINSYATGSVTGSGNYVGGLAGSGGTIINSYATGNVTGSGDRVGGLVGYNGYGSTISNSYATGNVTGSGDRV

SEQ ID NO: 99412 - protein, 268 aa, Unknown
  Obtained from environmental sample
  DOMAIN (191)...(224): Tetratricopeptide repeat
  misc_feature (1)..(268): Xaa is any amino acid
MEDKWLIYFEDGRICCHRSWTGHKIYEAKVQRSDSGYIIPELIVERDAKLYSRTDAEDVCGFFYLMGRGLLGYEFDSPHSRGSDADLLRDWGDFGRMMVTSPSVSAKLNEAIEEEIQRQQAAVPANEDIDDAPDDDEPDGVPPASSDSPEAHFLRAMYFDIDKEDLKGAIAEYSEAIRLDSQKGNVWRNRGAAYSNRAELYRRMGEFDLAIYDNNEALRLEPGDHNWLIERGYTKYGLGDYAGALEDYNRVINGCWSNLVFAYRGRGE

SEQ ID NO: 99413 - protein, 261 aa, Unknown
  Obtained from environmental sample
  DOMAIN (213)...(260): Regulator of chromosome condensation (RCC1)
  misc_feature (1)..(261): Xaa is any amino acid
DHSLAIQADGSLWAWGNNFFGQLGDGAAPDRSRPVRLGTDNDWAKVSSYSSPYFAIKLDGSLWAWGRNNHGQLGDGTTTNRNVPVRVGADSDWAAVSASFANTFAIKSDGSLWAWGRNKHGQLGDGTTTDQTVPVRVGAANDWVTVSTSYMHPFTSCLAIKSDGSLWAWGGNRFGQLGDGTRTDRDTPVCVGAANDWKTVSACGGCSFAVKTDGSLWAWGDNRFGQLGDGTDEDRDTPVRVGTANDCATVSAGGSHSLAVK

SEQ ID NO: 99414 - protein, 250 aa, Unknown
  Obtained from environmental sample
  misc_feature (1)..(250): Xaa is any amino acid
FYEKITEKEEDKWLTKQFWEAAGIDNKYRETAPDEGAASHELMSAIVALQVFETFFEGKDKEFFARCITGFKYNVPLYEAKCAYKLHLLNCLISILKSEPIDVDRLDYLIRDSFVSGYQNVSIDYKRLLGGLMVVYDKDEDKFVHAFHKNAASTIESVIFAHDSEKKWIQNHPVICYEAEIIRYAIEKLVTYFGKKNIFCREALTEEGVFIDIKTPEEKKYKVSLLSDTDILFYIKNIIPEDEFIQEFFD

SEQ ID NO: 99415 - protein, 283 aa, Unknown
  Obtained from environmental sample
  DOMAIN (116)...(282): ABC transporter
  misc_feature (1)..(283): Xaa is any amino acid
MDEPTATLSEKEIEILFSIIRSLQERGVSIVYISHRLQEISLIGNRITVLRDGETVATCKAGEISLDEIIKMMVGREISKKRVRENNTALQEIALEVNGLSQGKILKDISLYVKRGEIVGLAGLVGSGRTELAQAIYGITRKDKGKVSINGMEIVKALPRRCIKNKMGFISENRKQFGLALSLPIKFNITSAALDKLFPSRLIDNKKETMIAMDYRIKLRMATPDVVRDVQALIGGTQQKVVLAKWLCTDSKFLVFDEPTRGIDVGAKDEIHTMINELAKSGV

SEQ ID NO: 99416 - protein, 81 aa, Unknown
  Obtained from environmental sample
  misc_feature (1)..(81): Xaa is any amino acid
AASAHNGLGFEFNGIAASVVGGASMSGGKSTPLRTLIGSLILTAMRNGFNLVGLSNSIQMISIGIVLIIIVGVDALRSRRK

SEQ ID NO: 99417 - protein, 65 aa, Unknown
  Obtained from environmental sample
  DOMAIN (5)...(63): Heavy-metal-associated domain
  misc_feature (1)..(65): Xaa is any amino acid
MERKVLKVDGMSCEHCARAVTNAVNCISGTQDVSVDLEGGTVSFNFDSSKAVLDAIEAAIAEEGY

SEQ ID NO: 99418 - protein, 109 aa, Unknown
  Obtained from environmental sample
  misc_feature (1)..(109): Xaa is any amino acid
MIPDFSKVELQTSVAQKGRSDWEKRAGDVSKLAWTTNEQIAVRPYYSAEDVSSAEHLSYLAGIPPFLRGPYASMYVIRPWTVRQYAGFSTAEESNAFYRRNLAAGQKGL

SEQ ID NO: 99419 - protein, 279 aa, Unknown
  Obtained from environmental sample
  DOMAIN (113)...(279): Domain of unknown function (DUF323)
  misc_feature (1)..(279): Xaa is any amino acid
SYYYDAGPPSVSVGITTTVPVTGVTLNKASLSLTVGGDAETLTATIAPSNATNKAVTWGSNDPAIATVDANGKVTAVAAGSAIITVTTADGSFTKTCMVTVTDGGGSITSPTTGMELVRIPAGTFTMGSPSTETGRNDNEGPQHSVTLTGFYMGKYEVTQEQYEAVMETNPSNFSSNPQAGETQGKRPVENVTWYDAVEFCNKLSEKDGLQEVYTISGRTPATGYPITSATVTADFTKSGYRLPTEAQWEYACRAGTTTAFNNGDNDYTNAALVSAVAW

SEQ ID NO: 99420 - protein, 272 aa, Unknown
  Obtained from environmental sample
  DOMAIN (1)...(145): Uncharacterized BCR, COG1636
  misc_feature (1)..(272): Xaa is any amino acid
ELEILDEYGLESFLTNIGSKTEAPERCSVCYRMRLERTAAYAAEKSFDAFSTSLLISPYQKHDVIRSLGEELAARYGVEFIYRDFRPLFKQSRNQARVLGLYMQKYCGCIFSEKGSPQKAHNQAELKDVNPLFQRLALLTGAEALEKLARTSVLVVGIGGVGSWCAEALVRSGVGKMTIVDFDTVDVSNVNRQLQATSRTVGCVKVEVLQQRLLEINPRCEVTAWRKIFSRENAAEFGIEKMDYVIDAIDSLECKLDLIETTCGAHGGAYGV

SEQ ID NO: 99421 - protein, 79 aa, Unknown
  Obtained from environmental sample
  misc_feature (1)..(79): Xaa is any amino acid
VPAAKTGAIAKQLEKLKLNASALIIGGAALDDNFKKSIANMANVDALPAIGANVRDILKHKALVLTVDGAKALEERIGK

SEQ ID NO: 99422 - protein, 139 aa, Unknown
  Obtained from environmental sample
  DOMAIN (27)...(131): Ribosomal protein L22p/L17e
  misc_feature (1)..(139): Xaa is any amino acid
MIRKGQVLEKAAAKKPRYNIAENQVRAFNKLIRISAYKLSLVTDMIRGKSAASAVDILKFSKKRIAGEVLKTLLSAVANAENNKKLSADALFVKEIWVGKAITMKRYRAGPRGQAKPILKPFSHLTIVLESGAGDADKK

SEQ ID NO: 99423 - protein, 274 aa, Unknown
  Obtained from environmental sample
  DOMAIN (37)...(102): His Kinase A (phosphoacceptor) domain
  misc_feature (1)..(274): Xaa is any amino acid
MEFVAMTASTLSGAIMRNLYEKRLEEALEAMTVASEAKSVFLSNMSHEMRTPLNAIIGMTTIGKRADQIDRKDYALSKIGDASTHLLSVINDVLDMSKIEANKLELSPVEFDFEYMLQKILSVINFRMAEKQQRFSVRVAPDVPRFIVGDDARLSQVIMNLLSNAVKFTPEQGEIDLIVNLHAEGGGMCELLLEVADTGIGISPEQRKKLFQAFGQAESGISREFGGTGLGLVISKRIVEMMGGKIWVESELGKGARFFFTVKAPRGGQNARSL

SEQ ID NO: 99424 - protein, 266 aa, Unknown
  Obtained from environmental sample
  DOMAIN (73)...(266): Domain of unknown function (DUF323)
  misc_feature (1)..(266): Xaa is any amino acid
GNDVTISYSSGSGAVSVSGDEVFTVQENGNQLTLTLKDNSAQLSNLLVQFGLPAKSVTLTKTDGSGNNNNSIKAIEMVSIPAGTFMMGSPTNEPYRYDEETQHSVTLSNFSMSKYQITQAQWVSVMGSGEDRTTTSYGKGDNYPIYYVSWYDAIVFCNKLSIIEGLNPVYSISGKTNPTDWGTIPTSSSSTWDAVVMDKSKNGYRLPTEAEWEYACRGDYPNKATKTDTKPFGIGDGTQMVSGMANFDFTRPYDLAHGGEYSDSSA

SEQ ID NO: 99425 - protein, 259 aa, Unknown
  Obtained from environmental sample
  misc_feature (1)..(259): Xaa is any amino acid
APARGSFFTNNYAGQIAGKIDDLATYTRSVLSSLWQSLRIISLFAASLSMFFTIHWIFTVICLVWMAGHFTFVRVRLKTWVQIYHERGEAKAVATGKTIDSISNYATVKPFASERREQSYIAPFWGAFVTKWRRLKRITLDYLMLDLFGVLGLYLSTFAAIYFLYDYGQIQLGDIVFVYTATEFIRKQILDLDDKVIEFTESYGIMRQGLWVVSTPVEIKDASHAKHLSCCKAGICFDKMTFRPQNHKGPLFKNFCLDI

SEQ ID NO: 99426 - protein, 163 aa, Unknown
  Obtained from environmental sample
  DOMAIN (102)...(156): Helix-turn-helix
  misc_feature (1)..(163): Xaa is any amino acid
MEEIIFPNKIRILRKMAGKSMQELADKLGVSLSAISKIEKGYRKINQEQMMVVADFLGSSMTDIFITEDDDDDDVLSQWKKEISRRVEQNRNNGLKSFGAGLRLLRSQKDMTLMDVAEAAKLTLSVYHRIEIGQREIFETELFAIARALGMDVKELLTKIYKM

SEQ ID NO: 99427 - protein, 219 aa, Unknown
  Obtained from environmental sample
  misc_feature (1)..(219): Xaa is any amino acid
MANGRVFQQVDIQAKGELGIIVRTFNQTLLNLQQLDASVKDQTNKVPELAAQLDAITADTEVATQNVMNRLDTLLAKAEEAGRFFAELQRNSEEYKHEYEHLVDGISEFLERAKKGESSTKLAQEILDYWFESQVAPKPKPMDLSAGQALLQTVSDEAFEIMNILQFQDITRQKVEKVVQLLKHFRQSLDRLLEIFNIREEGAEETHEIFDNRKTATQD

SEQ ID NO: 99428 - protein, 63 aa, Unknown
  Obtained from environmental sample
  misc_feature (1)..(63): Xaa is any amino acid
MGPDMTKKIKVVKRFLKQAKFTNLVLYAALVLISYQFMYPLLRMIMTSMMSQEDIINPTVNWI

SEQ ID NO: 99429 - protein, 236 aa, Unknown
  Obtained from environmental sample
  misc_feature (1)..(236): Xaa is any amino acid
KGISAGFTVQFTESVAATYGVLLSNDGAELAGVYTFTESTAALTVTAENTGNQPTGELAVASSTDEFAVSVAVINIAVSESVAFTVQPNALLSAGAHTAAITVSGGNGISAKFIVTYTARYGIKLRDDDGGPLSAGFFEFDNTTKTVRVVNTGNEPTGPISIAKDGPAPDSFAVSETAIENIAAGDSASFTVKPAGALAPGAHAATITVSGSNGISADWNVVFTASYGVTLLHNEM

SEQ ID NO: 99430 - protein, 252 aa, Unknown
  Obtained from environmental sample
  DOMAIN (24)...(250): Domain of unknown function (DUF323)
  misc_feature (1)..(252): Xaa is any amino acid
GKAGKTAANKPASARTAKRKIGKPEIEMVFVKGGTFKMGDADARKCENDYDCDDECKDRAHNVTVGDFYIGKYEVTQKQWLQVMDGNPSGGTEGDDYPVNNISWYDAQEFIERLNAATGKKYRLPTEAEWEYAARGGAESKGYEYSGGDNPDDVAWHEGNSGGGSHPVGSKAPNELGIYDMSGNVWEWTSDWLGEYDSSDQVNPTGPPTGDFRVGRGYYWGSDAEHCKVYLRGFYPPGGSSYDTGFRLVLPK

SEQ ID NO: 99431 - protein, 259 aa, Unknown
  Obtained from environmental sample
  DOMAIN (1)...(204): Pyruvate flavodoxin/ferredoxin oxidoreductase, thiamine diP-binding domain
  misc_feature (1)..(259): Xaa is any amino acid
LEYLAEHNPAETTGMIVLQAESEVAAINMVYGAACAGRRVMTSSSGPGISLMTEGMSYLAGAELPCLIINVARGGPGLGTIQPSQADYLQSTKGGGHGDYHLLVLAPASVQEMADFTALGFDLAFKYRNPVLILTDGVIGQMMEKVELPEFRPRITEREPWAVVGKTPDRERNIITSLNLDALKQEQHNIRLQSKYRRMEEETRYETYLCDDAEYIVVAYGASARISSKAIELAREQGVKAGLFRPITLFPFPAKELKA

SEQ ID NO: 99432 - protein, 268 aa, Unknown
  Obtained from environmental sample
  DOMAIN (13)...(188): Metallo-beta-lactamase superfamily
  misc_feature (1)..(268): Xaa is any amino acid
MTLTIHRGANEIGGSCVEVCTEKTRIILDIGMPLMNKDGTSFDSSVIKDLSIDEMIKEKILPNIPALYKKPRDKETAIIISHSHQDHYGLIDFVDNDIPVYLGKASHKLIELTAIFGGRKPVINNPIYFTSYEIFTFGDIEITPYFMDHACCDAYAFLLKGEGETIFYSGDFRSHGRKWRSFYKFLHIAPKNVDYMLMEGTSISRSNKRFETEEQLEEQFIKTFKDTKDINFVYVSGQNIDRLVTIFRACRRCGKIFIIDFYIANVLF

SEQ ID NO: 99433 - protein, 177 aa, Unknown
  Obtained from environmental sample
  DOMAIN (7)...(173): ABC transporter
  misc_feature (1)..(177): Xaa is any amino acid
AAVNQPLVDIIIGIHKPVSGKIYIDDTAINDDNIRTWRKKIGYIPQSIYLFDGTVAENVSFGSIPDNEKIKRALQMANIWDFLTAKDGINTLVGEGGIQLSGGQQQRIGIARALYDDPDVLVLDEATSALDSETEQRIMDEIYSVSVNKTLIVIAHRLSTVERCGRRIRIENGKIIS

SEQ ID NO: 99434 - protein, 107 aa, Unknown
  Obtained from environmental sample
  misc_feature (1)..(107): Xaa is any amino acid
MVRSFHDLESYGIYDMKVVLLAGGLGTRLSEETELRPKPMVEIGGYPILWHIMKTYSYWGFNEFVILTGYKSHMIKDYFINYYTRYSDMTIDMANNSVELHQIRNEQ

SEQ ID NO: 99435 - protein, 292 aa, Unknown
  Obtained from environmental sample
  DOMAIN (117)...(260): CBS domain pair
  misc_feature (1)..(292): Xaa is any amino acid
AELAGKNWGPNTSYLGRLTMDQGLTLESEEATIALTGIYADTGRLIHESVRREDLEVAAWLLDMGASLRLVKSFLETIKEEEQLLILNKLLLLAQKKTVRGHEILFSYLEIEENIPGLAPVVEKIMDIENPDAYFAVFFIRKNKTILVIARSQKRRIGLHALLSPYGGGGHELAASLLLRNQEGSRFYGEFLEHLEQSMPPATRARDIMTTNVFTVNENSSVMNASIYMEEVNHAGVPVLDDKGNLSGFLGLRDIMKARKASQMHAPVKAYMAKQIVSSHPDSTMREVERLL

SEQ ID NO: 99436 - protein, 91 aa, Unknown
  Obtained from environmental sample
  misc_feature (1)..(91): Xaa is any amino acid
AGESTYDVTGSLCENNDKFAIDRKLPKIVPGDIVVIHDAGAHGHAMGFNYNGKTRSSELLRRENGEVMEIRRAETLDDLFATLDFEKLKSF

SEQ ID NO: 99437 - protein, 252 aa, Unknown
  Obtained from environmental sample
  DOMAIN (1)...(215): Alpha amylase, catalytic domain
  misc_feature (1)..(252): Xaa is any amino acid
MDAISLISKPPDFPDGDAKKLIFNGPRVHEFLREVRREVLSKYDIMTVGETGGVTVDQAIQYADSGGGELDMVFQFEQVELDGGESFKWNDRKINLVELKEVFSRWQTRLYGRAWNSLYWCNHDQPRIVSRLGDEGAYREKSAKMLACCLHFMQGTTYIYQGEELGMTNAPFADIGDYRDLESINAYNALVVQEKRIAHADMLRYMRLKSRDTSRTPMHWDSGPNAGFSTGTPWIMVNPNFKQVNVEEQTRR

SEQ ID NO: 99438 - protein, 286 aa, Unknown
  Obtained from environmental sample
  misc_feature (1)..(286): Xaa is any amino acid
DEKLRDLQGARVFAVEFLPGQFDQRADSCAQCISLANGKERPIIHSSKIFALYGNITDDEFIKIKSWLINPVESREASLEKPQTLIQKYNKPGDVKNIEGFISLSDGALDELRVTMNLAMDTQDILFCRDYFRDKEKRDPSVTEIRVLDTYWSDHCRHTTFLTELDEVEIEDETLRGSYANYLETRAFTGRDGKPVTLMDIATIGARALKKRGLLPDLDESEEINACSVKIKADVNGAEKDWLLMFKNETHNHPTEIEPFGGAATCLGGAIRDPLSGRALLSGYAH

SEQ ID NO: 99439 - protein, 251 aa, Unknown
  Obtained from environmental sample
  misc_feature (1)..(251): Xaa is any amino acid
MDFIPIDIPEGYNGIPPELLMGLEEKLKGTAKKLEEINESKNKLRNEYGLTLQSLAASYLMAGITEKLKASLRSTRNVYLLSGWVPADMVHTLVTELEKLTEGRIAVRSYNPEEIERVKEGREKVPVSLDHGSFVKGFENVVFSYGSPLYGTIDPTPLVAIFFTVLFGIMFGDLGQGFVLLLLGLLSGKHGSRLLSRFRKFSVPLIAVGISSMVMGFLNGGVFTNEELLIGPTKAVTAFITGHPMDRILTI

SEQ ID NO: 99440 - protein, 82 aa, Unknown
  Obtained from environmental sample
  misc_feature (1)..(82): Xaa is any amino acid
MVADKMVNDVRSRRLPHAKNEAADYVTISVGVATGRVSHTDKVDDFVKRADEMLYRSKREGRNRFSSDVGVGPVTGDNSQRT

SEQ ID NO: 99441 - protein, 109 aa, Unknown
  Obtained from environmental sample
  misc_feature (1)..(109): Xaa is any amino acid
NAIRHNPNDVTAIGNLASLYRSEGYLEEAIQLRALEGRLRRMDPYHQAFLAAEAMAKSDYKKAGKLIQRAIKIHPNDSDFYLTLSNIYRAQDKNAKALQALLQARHHAI

SEQ ID NO: 99442 - protein, 170 aa, Unknown
  Obtained from environmental sample
  misc_feature (1)..(170): Xaa is any amino acid
MKSLNYMKIVIFVVSISQFLFSLNLIAQQQYEQTVRGVVLEKNTREPLPGANIVIVSEGKQFGASTNETGEFAISAVPVGRCNIAVSMIGFSTYVSNNVLVYSGKETVLEIVMQEDVYAMKEVAVTAKVDKEQPLNKLAVVSARMLSSEEANRYAGTFGGDPSRMVAGFA

SEQ ID NO: 99443 - protein, 287 aa, Unknown
  Obtained from environmental sample
  misc_feature (1)..(287): Xaa is any amino acid
DSLSVIPGVYAHYYTFNGDYSIEPRIGVKYEVSPATSFSLGGGLHSQLQPRLVQMYEDKTGKRLNENLEMSKSLQTVVGYNQKIGAGMHLKTEVYYQYLFNIPVIPAIPQQSILNMGDDYYNSWDYVFVNDGVGRNYGAEFTLEKFFDKRYYFLLTASLYNSKYKGYDNVERDTHFAGNYALNGLFGYEWKIGAKKLLSVNTKISYAGGKRYVPLSVSISETGYDYTYDYSQAYTKRADDYFRMDLNVNMKNNYKRCSFEWFVEITNLTNHKNIWMIYYDVDRGENM

SEQ ID NO: 99444 - protein, 277 aa, Unknown
  Obtained from environmental sample
  DOMAIN (2)...(155): ABC transporter
  misc_feature (1)..(277): Xaa is any amino acid
DTGTLTLDRSDVLSLPPNKRQLNTVFQNYALFPHLTVFENVACSPRLKNISNTEIKNKVNDYLNLVRLEGHAEKKPNQLSGGQKQRVAIARALINEPRVLLLDEPLSALDAKLRQHMLIELDRIHDEIGITFIYVTHDQQEALSVSDRLAVMNQGDILQIGTPQEIYESPATDFVARFIGETNLFDGKVVRAEKIDVQDAQEEYMVELEIPELGNIKVTTVDNVHTGQLVSFTIRPEKIVISKEKPATKREDINLITGIVDEPIYSGFQTKFYGKWT

SEQ ID NO: 99445 - protein, 234 aa, Unknown
  Obtained from environmental sample
  DOMAIN (29)...(191): Integrase core domain
  misc_feature (1)..(234): Xaa is any amino acid
MHRILSENKEARERRSQARRPAYSAPELLATGPNQVWSWDITKLKGPGKWGHFHLYVVMDIFSRYVVGWMVAEGESAALASRLILETCRKEGIAPGQLTIHADRGSSMKSKPVALLLSDLGVVRSHSRPHVSDDNPYSESQFKTLKYCPAFPERFGSIQDARAFCQEFFRWYNDEHRHWGIGLMAPGAVHRGRAARITELRGETLYAAFGAHPERFVNGRPKPPVVPDAAWINK

SEQ ID NO: 99446 - protein, 137 aa, Unknown
  Obtained from environmental sample
  misc_feature (1)..(137): Xaa is any amino acid
MGQKSKANKFGLTEIIAKQWDGGKNTIVFVTEKVNEYLKQNGLTLTVSREAVRHVIRSYEDKVNDLRKSVEQAKTMAEVLQDQPGTELSESLIMYLSRVLYDHAQTVESVNFEDPSEMFASAAKIATAQAKLSQYRT

SEQ ID NO: 99447 - protein, 285 aa, Unknown
  Obtained from environmental sample
  DOMAIN (21)...(285): Beta-galactosidase
  misc_feature (1)..(285): Xaa is any amino acid
KKAIRHPPISVKFKCFLHGGDYNPEQWLKWKDTVWKEDMRLAKLAGVNTLSFGIFAWTAIEPSEGEYRFEWLDEIMDMLAENGMAAVLATPSGSRPKWMAQKYPEVLRVNRYRQRNLYGERHNHCMSSPVYREKTTAINTRLAERYKEHPALAVWHISNEYSGECHCHLCQENFRSYLKKRFGDLDALNEAWWNSFWSHAYTDWSQVESPSPLGDVNVHGLNLEWKRFNTEQIVNFYLYETAPFKSITPNIPCTTNLMSGSSGVDNFRLARVLDVDAWDSYPEWT

SEQ ID NO: 99448 - protein, 288 aa, Unknown
  Obtained from environmental sample
  misc_feature (1)..(288): Xaa is any amino acid
NEGDAPRQLQELIAAGTPPDVFITSSGDMPNIVRMDYALPLNSYLDEYKEYAQALIPAATTLNEVDGKVYGVCWELLPRAWIINVDLFERMGIAVPSPNWTVEEFVEINHKFTDRANGISGVQGDFHVIVEQFLMAYGVDPRKVVDGKVLSAYADDPNAIKACEMAYLTIYGTDGQFTDEEKTSFGSNWNSYFTEGHVSMAPWSLWGQPYNQQTGKNYFNWSVLPPPMGPTGIRGGNSDSIVMCIFPSSGKADLAWKYIMANTIQHYVDNAYVLDMTQNPPVSAPPVS

SEQ ID NO: 99449 - protein, 290 aa, Unknown
  Obtained from environmental sample
  misc_feature (1)..(290): Xaa is any amino acid
MTDLRETSAVLTLDSNLEGRLVIRDEQGNLFAELNKIRGRQIELGMPVGKYSIQMEAPSKIWMAKEVQISDGKKNVLSMNDMQSIEREKAVARGNADSSGMTGLDSARAKPFSFNFNALVSNKEPANEVQLGFFTIAQSALAGTQIAVFGNLATEDMAGAQISPFVNGAIKNIYGAQISIFNYAYNINGLQASSSLNIARNFNGVQAGVTNIAGTSRGVQGGVVNIVDTLYGVQGSVFNIARNVSILQGGVVNIAGDVGKVQGGVLNIAGDAGLVQGGVINVTGKVEKLQ

SEQ ID NO: 99450 - protein, 308 aa, Unknown
  Obtained from environmental sample
  misc_feature (1)..(308): Xaa is any amino acid
MFIVMRLQLVIKAPIMAVWAVTKILGKGYEWSMATGVVVLIVLVMVTILMIFVMPKFKKMQTLIDNVTRVTRENLTGLRVVRAYNAEDYQKNKFEAANAELTDTQLFTNRAMAIMMPVMQLMMGGLSLAIYWIGAYLIDAAGAMDKLTIFSNMVVFSNYAVQVIMSFMMLVMIFIILPRASVSARRINEVLNTKPQILDGRETGGQPGVSGEIEFRSVSFKYPDAAKPVIEGISFTAKRGQTIAFIGSTGSGKTTLINLIPRFYDATEGEVLIDGINVKDYKLESLLNKIGICPSKGSFFKGTGNPMW

SEQ ID NO: 99451 - protein, 139 aa, Unknown
  Obtained from environmental sample
  DOMAIN (27)...(138): Polysaccharide deacetylase
  misc_feature (1)..(139): Xaa is any amino acid
MRHKFALPLLLILFSSCRTISHSRAELNIPPSIVYFSFDDGPNAQSDTTARLLDVLKKYQIKAMFFLLGENVEQYPELVKRIYDEGHYIGTHGYYDKWAYKMKPDEFRGNLVRRGAVISAALGHDMNPKLYRPHGGFYN

SEQ ID NO: 99452 - protein, 99 aa, Unknown
  Obtained from environmental sample
  misc_feature (1)..(99): Xaa is any amino acid
MNQNLTEIVFILDRSGSMEGLESDTIGGFNGFVKKQAEAGQTSLTTVLFDDQYEILHNGIDARDITLTEREYFTRGSTALLDAVGKTINDVGKRLNEAP

SEQ ID NO: 99453 - protein, 59 aa, Unknown
  Obtained from environmental sample
  DOMAIN (6)...(59): DnaJ domain
  misc_feature (1)..(59): Xaa is any amino acid
MAAKRDYYEVLGVPKDASADDIKRAYKKLAIKYHPDKNPGDKEAEAKFKEAAEAYDVLS

SEQ ID NO: 99454 - protein, 256 aa, Unknown
  Obtained from environmental sample
  DOMAIN (222)...(255): Tetratricopeptide repeat
  misc_feature (1)..(256): Xaa is any amino acid
ILDYTDQGRTPTEIAKWLGLPRDQVEAIIRLARERGESGSAYSPTLEEQTSSKLTKSIIKIVIWLVIFISSYFFLRFIIRPLLYPDEAHIKNGNAYYEKKDYDKAIEDYTAAIKIKPDNPAYYGIRGNAYYEKKDYDKAIEDYTAAIKIKPDNPKYLNNRGSAYYEKKDYDKAIEDLTAAIKIKPDDPVYLNFRGKVYYEKKDYDKAIEDYTAAIKIKPDNPVYLNFRGLAYYNKQNYDMAVTDFETALRINPIMI

SEQ ID NO: 99455 - protein, 194 aa, Unknown
  Obtained from environmental sample
  DOMAIN (7)...(143): ABC transporter
  misc_feature (1)..(194): Xaa is any amino acid
INHRRNLIYRLNKEHSDNTVIEEAIIKQKVTNILSNIHSVANGNFIEYDEKLMFMEKGLEKPIPLFNVSAGMKPFLIIKRLLELGEIKEQDVLILDEPEIHLHPEWQLQFAEILVLLQKEFNLTILITTHSPYFLNALEVYSKKHEREKYCNYYLAQNKEDYSIVEDVTNKTNEIYALMEDPFCKLERLRNEDL

SEQ ID NO: 99456 - protein, 60 aa, Unknown
  Obtained from environmental sample
  misc_feature (1)..(60): Xaa is any amino acid
KDISWGNQIRSYVFQPYTMVKDYRTKAEVGNIQAVMDGDIDQFIEEYLRWTWHQRSGSRE

SEQ ID NO: 99457 - protein, 146 aa, Unknown
  Obtained from environmental sample
  DOMAIN (44)...(128): Biotin/lipoate A/B protein ligase family
  misc_feature (1)..(146): Xaa is any amino acid
MNYYIESRSTDPYHNLALEQFVFDSLDRSCNYFMLWQNHNSIIVGKHQNTLAEINAAFVNAHKINVVRRLSGGGAVYHDLGNLNYTFIIDAKTDNAIDLAAFCLPVQRALASFGVPVEITGRNDMTVMGKKFSGNAQYVKQGRDNA

SEQ ID NO: 99458 - protein, 285 aa, Unknown
  Obtained from environmental sample
  DOMAIN (30)...(281): Aminotransferase class I and II
  misc_feature (1)..(285): Xaa is any amino acid
MYISKLASASEANVLQTLEEKRAALTALGADIINLSVGTPDLPPADHVMKAVCEASGNPLNYKYTLIDPPSLLDAVQGWYKTRYNADITGNGIISLYGTQEGFTHIFHALCDPGDLVIVGTPGYPIFSFGPLMAGAEVYHTPLLPENKFLIDFNAIPAEIAKKARVIVVCYPSNPLGAVADKGFYRKLVAFAKEYDIAVIHDNAYSELVHDGPPGGSFLAVPGAIDVGIEFNSLSKSYNLTGLRISFAVGNEKIIGAFKKLRTNFDYGLSMLDYIAAISALTGPQ

SEQ ID NO: 99459 - protein, 261 aa, Unknown
  Obtained from environmental sample
  misc_feature (1)..(261): Xaa is any amino acid
MGRKSLQIAALDPDSIRFANALPESKIEWEKWSLPPNATPLVAEWSADGSMLYVGTKEGQLVVFGSDNELPPSDFGEPITALGFALGHNSLLVGGANGKLAAYQVIRQDGAAKLQCFHTFKPIDGVAAGFMASLRDKRFLVWSDKGFSVNHLTTEKRLAHCKADITGAAALSPRGDFILASGDGSARKWQLDAFHPEVSWSLFWRTIHYEGYAEPQHVWQSGGASDDIEPKFSLVPLLFGTIKGTFYAMLFAFPIAVLSAL

SEQ ID NO: 99460 - protein, 272 aa, Unknown
  Obtained from environmental sample
  misc_feature (1)..(272): Xaa is any amino acid
VWLSGSTLALSLLMVAGLVLLLAVKGLGFFWPSDMCELQLKDGTIVLGQQEAHEKAAHSHPDRIQVKVANRDFYGQDYRWIVENDIQNRAYPKDVVYIDRLEYGAFIGHLTQIEKNGATIAQGADALSIARRWLPSAKTNLAKIQKMEQKEAGTLSAQLEKLRLEGRKLAMNGKETPQALQQIESKKNELQTQFEQFQAGLDGMRSESRTLTVTLQTSDGQTKTIPLTSIMRIVSPNSIGVFGKTRVYLSRLWEFVSEGPREANTEGGIFPA

SEQ ID NO: 99461 - protein, 209 aa, Unknown
  Obtained from environmental sample
  DOMAIN (43)...(157): Transglycosylase SLT domain
  misc_feature (1)..(209): Xaa is any amino acid
RPFLFKARQERQDRVRELYRQQESQERVIDFFTQLCPSREIAEAILVSADWFNISPSLAFALAWEESQLNPLAVNSKNRDGSVDRGLFQLNNRSFPYLGIQAFFSPDMNSWHGMSHLRYCLDTGRTEIAALAMYNAGTGRVAVSGAPKSTLDYINRILDNKNKIENSFRELEIWYQEQQVELEALGEIAEEKVEHPSWLMPLKPLQMSN

SEQ ID NO: 99462 - protein, 263 aa, Unknown
  Obtained from environmental sample
  DOMAIN (23)...(244): Cytochrome C biogenesis protein transmembrane region
  misc_feature (1)..(263): Xaa is any amino acid
MFSTSSLVTAFPAAQTGMGYGMVLIIGLLTSVHCIAMCGGINLSQTLRREQGTRQQSWRGNREQGYSLLMPSVLYNTGRVISYTAVGVAVGALGSVLTVSGRFQGAIMLIAGIFMLVMGINMLGLFPALRRFIPRMPAKLQNSLTSIFTKKPDNHKTNRGPLVVGLLNGFMPCGPLQAMQLYALSTGSPIRSGISMFLFSVGTIPLMFALGAASGILSKGQAFSHKVMRVGAVLVAAMGLTMFSNGWNLAGFVSPLNRVTAAF

SEQ ID NO: 99463 - protein, 53 aa, Unknown
  Obtained from environmental sample
  misc_feature (1)..(53): Xaa is any amino acid
MTLFTGIRNQDYPLISGSTLIITVMVLAANFIVDIICGLIDPRVRMTTHEEGA

SEQ ID NO: 99464 - protein, 234 aa, Unknown
  Obtained from environmental sample
  misc_feature (1)..(234): Xaa is any amino acid
MLHLLKTIFKSGKFTFGFSVIVIVFLFIAIYPMFDKRDPLEMKGGLYERPNLKEYLNRHKEGGGKAAGNEIEQDQEITDLLASWGIVAVTRDTGPIELHILGTDNFGRDMMAQLVAGTKTSLLIGIVAGSIATVIGLTIGLLAGYLGGQLDNFLSSVTNIFIVIPSIVILILVAVSVNSRGFMATGLIIGLTSWPWTARSVRAQTTSLRNRDHVNLSSFQAQYAPYHCQGYSAI

SEQ ID NO: 99465 - protein, 199 aa, Unknown
  Obtained from environmental sample
  misc_feature (1)..(199): Xaa is any amino acid
MVKLYHGKCETILNDIPDKSIDLILCDLPYGFTHCEWDVKIPFDILWRQYNRVKKINTPIVLFSNQPFTTELINSNKKQFRYNWYWIKNVPTGFCFAKVQPMRRVEDICVFYERAPVFNQSYKKEFSRKRLRKDTGGVYKSKTLNNKYFQETSGYLDNVLDFESDLAGGQERLHPTQKPIKILEFLIRVYSNLNDIVLD

SEQ ID NO: 99466 - protein, 289 aa, Unknown
  Obtained from environmental sample
  DOMAIN (1)...(103): DEAD/DEAH box helicase
  misc_feature (1)..(289): Xaa is any amino acid
EQTKSAWEGYLAGLGVRVGYVGAGDAPEKRRALGDLASGDLRFVVGTHALFMPSVRFRNLGMVIIDEQHKFGAAQRLKLQEKGPASDFLLMSATPIPQTLAKTLYGDLDVVEIGSRPSAAPVPTHIVPEGKRAGMEGFIFERISVGARVFYVVPRIDRQPSDDLEDEGGGLPVKTVDSVAEALGKGPLSSAPIHKLHGRMSADERDAAIRAFKEGPPGVLVSTTIVEVGIDVADAAVMVIENPEFFGLAQLHQIRGRVGRGSMASHCFLLPGPGACRDARTMERLKFLC

SEQ ID NO: 99467 - protein, 92 aa, Unknown
  Obtained from environmental sample
  misc_feature (1)..(92): Xaa is any amino acid
MKIKMKDKLFTFLLAAAFLLMPVSLFAQPRVVDNAGLLSEGEIARLEKLIDGIALTYKFDLVIVTETDIGGAEPMEYADDFFDYNGYGLGDD

SEQ ID NO: 99468 - protein, 268 aa, Unknown
  Obtained from environmental sample
  misc_feature (1)..(268): Xaa is any amino acid
LQEAYGYTASDAALIAEYVTIYNAVYRGNWNYFSGRFKKPVTDNLNRDSAGLAVRYQEWPGRTLMLIPLNAGGLSSINTSAISDNRVVERMRTEDDKGIPQRQGMVDLKEREAAQAREDAANKRDAAKAEEAAIAKDRQTLNEQQRQAERDRQQLEQDKASGKVTDEEAAKRDAELARRETEASKKSDELDQRDKDLAAQRQNAANQEQFAQQKQDEARQDREGIARDQQTMLEQGIPPQGSIQGIICLLLEKPDATSGRLVSLDPGT

SEQ ID NO: 99469 - protein, 254 aa, Unknown
  Obtained from environmental sample
  misc_feature (1)..(254): Xaa is any amino acid
LYGIMKLLLVLDSDDNYNLISFYVKPLGFEIIRYRHAIKAMDNIDEVDPRAIVISARDFPRHWKTMVQFFRSERTREECPVIILTGEDFTMEERSKASFLGVSGTILENLDNPVEIERFHGIISRYLPVEEKRRSRRFHVEPYHKFGFVFARPPDSVLVTGEVNDISSGGLSLKLDNATLIKDMRLNDELKECSLRVGEAFLDPVCRLARTGRIISLEFLSFPKGEDATLSVYLDDLLLMLGRNYKRKEINILD

SEQ ID NO: 99470 - protein, 211 aa, Unknown
  Obtained from environmental sample
  DOMAIN (124)...(210): Histidine kinase-, DNA gyrase B-, and HSP90-like ATPase
  misc_feature (1)..(211): Xaa is any amino acid
MEEEIRAASRAKSTFLANMSHELRTPLNVVIGLTDLLLENDNLDNHVRVNLLKVSNAGSTLLSIVNDILDFSKIESGKLELTPVVYYMPSLLNDVITLAVMSLGEKPIRFSLNIGDDLPDILYGDDLRVKQIFTNLLSNAVKYTREGSIELSVRCTRETDTVRVDVTVSDTGIGIREEDLKKLFSDYYQADAKANRKIEGTGLGLSITKRL

SEQ ID NO: 99471 - protein, 149 aa, Unknown
  Obtained from environmental sample
  DOMAIN (16)...(101): Phage integrase, N-terminal SAM-like domain
  misc_feature (1)..(149): Xaa is any amino acid
MDVIDRNTDTELCRLLDGFLDYTRKEKGYSEHTVEAYRSDLAQFVEFLLHRGHPLTVSAALSKQPLRLFLHDVGRLGLKARTVARKVAAVKSLCRYCVKIGVLAVNPAKALSTPKLDSPLPVFLTAAQAESLEGAAAADSARNRAIGSL

SEQ ID NO: 99472 - protein, 274 aa, Unknown
  Obtained from environmental sample
  DOMAIN (157)...(274): HD domain
  misc_feature (1)..(274): Xaa is any amino acid
YIGSEIYLPAKTTIQQKHIDDLRRRGVKEILTDGIPQRLAPSTVEAVNPYGNVDNTRHKLPPSAVEALNPYVNIDLTGHRFKLDFSPADVKDLKGAYYVYILLIEQLHSFFNTVSKGRSLDKHSLERMVGFMLQIMRNHPEKYIGFILGGEMDEYGLAKRSVNTAILAALTAKELKLSHHRLLHIITGAFLHDAGLLRLPDHLFEKVGALSEEEVKQMRTHPMISFHIAVKELACPVGVGEIILQHHEHWNGNGYPNHLKGDTLDICAQILTVA

SEQ ID NO: 99473 - protein, 281 aa, Unknown
  Obtained from environmental sample
  misc_feature (1)..(281): Xaa is any amino acid
YDNTEIDEETGELIPPDTSNIYKDKDGNLHTTDHTIQKDDGTTTKRYTAADPRIEDEEKTGKQWYGTIDYTEDGNNITVNNFRMIDGHENLRQQFYEQFAEEKAGKNITWNLQEEQNKTILQELTNRNPRGITHGINYFENTDQAEARRVSRRIKNYMPNIPQQRIAMAVEGLKFMRMKGESLDTMTHRLFGTFTNDPKINPDIKTAQENNKIVQGATFLKNVDGVLKRFTYINQTAGNESTLFHEAMHVAKTFFNEETKKAAEKALNGYEISKGQLKGRQ

SEQ ID NO: 99474 - protein, 261 aa, Unknown
  Obtained from environmental sample
  misc_feature (1)..(261): Xaa is any amino acid
LDIRKGQIGDDEPGHTIIDEIWKIAFCPIIVFSAIANEIYTNKYNENYFIKKVEKGSGDIKRLIDTVKELSNYVERKNETLKLLNFHISETYKEAFPSVMNNLNSPNEENIQDIFTRLIRRRIAAALDESVDFSPIKSWEIYLLPPINKQLLAADVLYKNGEDKNKAESFKVVLSPSCDLQRDETNDRKPLERVLVVSCISIKQYLSFKNLSKDTPKENFHEDLQKVLSNTGSERFIPLPGLKGFIPNMACDFKNLEMIAY

SEQ ID NO: 99475 - protein, 264 aa, Unknown
  Obtained from environmental sample
  DOMAIN (2)...(169): Transketolase, pyridine binding domain
  misc_feature (1)..(264): Xaa is any amino acid
MEKMNLRKAYGDSLVELGKTNPNIVVLEADLGKSTMSCLFKDAFPDRYFEMGIAEQNMASVSAGLALAGKIPFYSSFAVFASGRAYDQIRCSISIPKLNVRICGSSCGLSDFGDGKTHQSVEDANILSAMPNMTVLNPVDAVETQKMMKALVSYKGPAYIRINRNDLPVYTSQESEYQIGKMYPVTDGNDAVIFATGVMVSKAVEAAEKLKSENIAVQVVNVSTLKPLLKEEALKYASGKKAIITAEEAVKSRGLGAGIAALLF

SEQ ID NO: 99476 - protein, 255 aa, Unknown
  Obtained from environmental sample
  misc_feature (1)..(255): Xaa is any amino acid
MLAWLYDEDRWPSGAAGGIVTKDPKYRVRHLLLTRSPYGSQAGKAPEKRSRVDSGRCENGELIACFDVVLDKNGDLETYRAIGEKDKASGFRLYAYAETALPSPWFNNQTYVNTLDARSIREFIRVTYGAYEKHFGKDFDNVIPAIFTDEPQFSRKGTLNFAHEEKDVTLPWTYDIEDTYRAAYNGESLIGALPELLWDFPGGRISTIRYHYHDHVAERFAAAFADQCGAWCREHGIMLSGHMMEEPTLRSQTCA

SEQ ID NO: 99477 - protein, 277 aa, Unknown
  Obtained from environmental sample
  misc_feature (1)..(277): Xaa is any amino acid
DEWRPREEILRLDNKLRAELKWPARGDGWAQPWVDRDAGTPFTLRLRFSFESEISITGAELALENAASSKVSLNGEAAGAVKGWYVDKCIGRVSLPAIRAGTNVLEVSFPYGRKVNVEAVYVLGDFGVNVAGSSCVITKPVRSLGFGDITRQGLPFYGGNLIYHLEAEIPPDKTIEKFTLRATEYRGHLLKVKADGKDYGPLVYSPYEMEIPAGKGRHKIDLVYFGSRINTFGQLHCVEKDPQFWWGPNSWRTAGANWSYEYQFWPQGVLKSPEIIQ

SEQ ID NO: 99478 - protein, 277 aa, Unknown
  Obtained from environmental sample
  DOMAIN (38)...(229): ATPase family associated with various cellular activities (AAA)
  misc_feature (1)..(277): Xaa is any amino acid
FATDLTALARDNKLEPFIGRTEELDRTVQVLCRRLKNNPIHVGDSGVGKTAVTEGLAQRIVAGNVPDTLKDFSIMALDMGALIAGTKYRGDYEDRVKRVIEELLKKEKAILFIDEIHTLVGAGAVSGSAMDASNLLKPALTSGKLRCIGSTTHEEYGKFFDKDRALSRRFQKIDINEPPEDDAIAILHGLKSKYEEFHKVRYSDEAIEGAVRLSVQFITERRLPDKAIDIIDEARAFARIRAGQSDKTADSADNNNAETDITDETKTDDATAKVIET

SEQ ID NO: 99479 - protein, 297 aa, Unknown
  Obtained from environmental sample
  misc_feature (1)..(297): Xaa is any amino acid
GPTIFGYQDAAGSVFGSPNTSKSVILDKISSVWSAGLQEYITLDAEDSGVKYALISVKTGGDLFFGRIINDSIFTIPESRDFIFKLSMFLTLFLTLYFIVNFKPHPITLVQNRIKTLRTDLFEELYIKKTGQDRAKWILELEQRRGEIRFELKSRIRIRRSLENKIDEIIDKAWDELLAVMKSGYDIASLEEIVKARSVKVEKPKAEGPKTVWDEIKELEDVDEAESIEEIEQAEPVDDEIDEIEEIEEVEEAEVIDDADEIEAALTGARTSISEEKSYTEIQLSNGLLKAANEILA

SEQ ID NO: 99480 - protein, 207 aa, Unknown
  Obtained from environmental sample
  misc_feature (1)..(207): Xaa is any amino acid
VKLYTKTRKVIHIEIQLKVTPELYKRIILYHSKLITEQIGSGDDYDLIEKVISIVITDENLINVSPRYRHRFTFYDREAGVEFSDISEIHTLELRKLPEGTDGTILYDWARFIAAETEEELTMLAERNPEIGKAVVKLRELSADERAMDLYERREKARRDIAAEKKWAVKQSKFEIAQKLRKRNRPIEEIIEDTGLTREEVENLPTL

SEQ ID NO: 99481 - protein, 178 aa, Unknown
  Obtained from environmental sample
  misc_feature (1)..(178): Xaa is any amino acid
ITEQIGSGDDYDLFEKVISIVITDENLINVSSRYRHRFTFYDREAGVEFSDISEIHTLELRKLPEGTDGTILYDWAKFIAAETEEELTMLAERNPQIGKAVVKLRELSADERARDLYERREKARRDQSAREKWARQQGIEERNIEIARNLLEINMPIDQIVMVTGLTREKVENQRTTI

SEQ ID NO: 99482 - protein, 118 aa, Unknown
  Obtained from environmental sample
  DOMAIN (12)...(114): Mur ligase family, catalytic domain
  misc_feature (1)..(118): Xaa is any amino acid
MGTQDLFKPDSYVYFVGIKGTGVCALAELMYNSGIKVSGSDISEKFYTDEILQDLKIPYYEEFDAAHIGKDIDMVIYSAAYGADTNPELKRAQELDIPMVKYTDALGAWSAKLTQPAL

SEQ ID NO: 99483 - protein, 241 aa, Unknown
  Obtained from environmental sample
  DOMAIN (27)...(210): ABC transporter
  misc_feature (1)..(241): Xaa is any amino acid
MIKCEQLTKLFDANSGIKNINLQFSPGTIYGIIGYNGSGKTTLLNCIEGLYIPTSGFVSHDDVKTTNDKDFLPYRKKIAFLPSDDFLYPLLTCMENIELSTILKTGRNKLSSETDELIRYFEIDSFLHKNFGDCSTGMKKKVQIVVSLIGEIDTIIWDEPNNGLDIISNMKIKNLLKHYKSKRNITILFSSHVIEFLNDFVDHCVLLHEGNIIENKDIQNIGSLEMLFLNNLPHNALSINI

SEQ ID NO: 99484 - protein, 287 aa, Unknown
  Obtained from environmental sample
  DOMAIN (187)...(238): Translation initiation factor IF-2, N-terminal region
  misc_feature (1)..(287): Xaa is any amino acid
EKTVAFTADVSKVVDPAILARIQKSKQEKATMRNNRGDKNKGGKNQQNNNNNRNNGSKQTSATGYSGNLRIQPRQTENKAQAGLQTRRPGFGTTLQDVLSANAPAHKDFLDNRTRTGKGGHGDSRKRGKKGKDSLREREIQKENIEKAQKRVSDVLVSLSKTPVKKVYNKDKIQAEGTEASKVIYVSASVSVGELASLMEQPSASVIGKCMEMNEMLTINKRLDFDMVQIIASEFGFEARLQEEYQEETLGIQADAEENLRPRHPVVTVMGHVDHGKTSLLDYIRKT

SEQ ID NO: 99485 - protein, 89 aa, Unknown
  Obtained from environmental sample
  DOMAIN (1)...(86): Uncharacterised BCR, YhbC family COG0779
  misc_feature (1)..(89): Xaa is any amino acid
VLGACKRSGVDLVEIEKNFIGKRKVLRVFIDKSGGVDVEDCASTSRYLSEELDKDANSNLIEGAYTIEVSSPGLDFDRNSKKGGKWQKK

SEQ ID NO: 99486 - protein, 283 aa, Unknown
  Obtained from environmental sample
  DOMAIN (218)...(261): Threonyl and Alanyl tRNA synthetase second additional domain
  misc_feature (1)..(283): Xaa is any amino acid
ERARAAQKQGLSAIGSEGWTVFAEGSTEFLGYDASTAQVKILRYKEDKGSYSIVLDRTPFYAEMGGEVGEKGTLENSGATFKVFDTLKVNDIWIHRAKLLSGEISEKNMSLEFTASVNLEERAATRKNHSATHLLQAALRKVVGEHVTQQGSRVAPDNLRFDFTAFSALTPEQINTVENLVNEKIQMCLPISTEQMSVEKAKESGAMALFGEKYGAEVRVVSMENFSKEFCGGLHAKNTGEIGVFRILSESSVSAGVRRIEATTAFGALNSFREEAVIVSSLK

SEQ ID NO: 99487 - protein, 274 aa, Unknown
  Obtained from environmental sample
  DOMAIN (164)...(271): Toprim domain
  misc_feature (1)..(274): Xaa is any amino acid
MKAARSITRFANGQFTPQGGTHQQAFREAYVKTIREFFKKDYDASDIRSSIIAAISIKLHEPTFESQTKIKLGSKEMAPGSELTVNKFVGDFVKRELDNYLHRHSDIADVIRKKIEESEKERKAISSIRKSAKEFARKAILHNEKLRDCRIHYTDEKNEKFLESTLFITEGNSASGSITKSRNVNTQAVFSLRGKPLNTFGMTKKIVYVNKEFNLLQAALDIEEDIENLRYNRVVIATDADVDGMHIRLLIITFFLQFFPDLIRKGHLYILQTP

SEQ ID NO: 99488 - protein, 282 aa, Unknown
  Obtained from environmental sample
  DOMAIN (1)...(207): MutS domain V
  misc_feature (1)..(282): Xaa is any amino acid
ANDLYLDASDNGGPGEISFALITGPNMAGKSTYLRQAALITIMAQCGSFIPASEGRIGIVDRIYCRFGSQDNLARGESTFLVEMNETAYILHTATNQSLVIMDEVGRGTGTEDGLSIAWAVCEELLNNIKCRTLFATHYHELAGIDHHAMANRSMDVDERNGKVVFLRKIREGSASESYGLHVAALAGIPERVLKRAGEIMLRRKNEKPVFAETPLPQEETQGSSYNCQEAAVLKNLSELEINTITPLEALNLMQRWKKIVTGEERPASGQKIKSASKHPGA

SEQ ID NO: 99489 - protein, 214 aa, Unknown
  Obtained from environmental sample
  misc_feature (1)..(214): Xaa is any amino acid
MILSLLPSREKSLLRLHPWVFSGAVDKVNGNPKLGETVEIIDSKGNFLAWGAYSPNSQIRARVWSFEKKEKIDKDFFARKLKRCLESRKAMGFEPKRENAFRLANAENDFLPGCIIDYYASYLSVQLLSAGWEIFREILVECLMEIFPNCKGIIERSDSNVRTKEGLEPQVKILAGEIPQNAIEIEENGLKILVDLHSGHKTGYYLDQKKCEKE

SEQ ID NO: 99490 - protein, 181 aa, Unknown
  Obtained from environmental sample
  misc_feature (1)..(181): Xaa is any amino acid
VNANIFAKANKIVKTCDAAYLGVLDENGCPHVSTVSTIKQAACANSSAQAERPASKNIFEAYFATGMSANKTKRLLRDKRSSVCYRAGGDNITLVGEAEILTDQETKNWCWLDWFINHFPGGETDPNYCIIKFAAQRASLWIDNESAEFMIDDLLSVQSRCGLLCKWCTYRESHGCGGCVE

SEQ ID NO: 99491 - protein, 194 aa, Unknown
  Obtained from environmental sample
  DOMAIN (54)...(117): Bacterial regulatory proteins, gntR family
  misc_feature (1)..(194): Xaa is any amino acid
MPAKGDTDIGFLIGTKTVPSPHSPVPSSYGTITVMGNDEFWDLITINDNEVVPKYRQLQSELERLIAESILKVNARLPGENEFFSRLGLSRTTIRKAFAALEKNHLLYRVQGQGTFIGSKPPSVSKNSDNARPDEIKQIIGVVLPNITNEIYPFIIHGVEETVSPRHICVFSANSGGSRERELRIINEMINNSV

SEQ ID NO: 99492 - protein, 128 aa, Unknown
  Obtained from environmental sample
  misc_feature (1)..(128): Xaa is any amino acid
VAVMYTSQVTMAKMAKPELKVVFPVEGIGFGIMAAFIPSKAPNAEAAHAFLNYILDPERGAQCFMTLGYYSTFSASDPYIDAEYRDFLTLPKDFKDFASMEMIQNISPEAEELHNRIWTEFKTAAGQE

SEQ ID NO: 99493 - protein, 82 aa, Unknown
  Obtained from environmental sample
  misc_feature (1)..(82): Xaa is any amino acid
GKKINIPSYLVKKNDEISVCDKSRGLTLIKDALKEYGKSGVMPWLSLDADAMKGKFLAAPQRSDITDLGDIKEQMIIEFYSK

SEQ ID NO: 99494 - protein, 223 aa, Unknown
  Obtained from environmental sample
  DOMAIN (8)...(223): tRNA synthetases class I (K)
  misc_feature (1)..(223): Xaa is any amino acid
MKEDKKAVHWADEYAQKIVREKGDKDQYTCASGITPSGTVHIGNFREIISVELVVRALRDIGKKVRFIYSWDDYDVFRKVPKNMPKQTELEKFLRFPITMVPDPWERDSSYARHHEVDVESSLSIVGISPEFLYQAERYRSSRYAQGIRRALEHRDALKNILDKFRDEEHKIQGEWWPVSVFCGACNKDETEIDGWDGEWGLSYHCAACGHKETVDIRNAPGV

SEQ ID NO: 99495 - protein, 261 aa, Unknown
  Obtained from environmental sample
  DOMAIN (5)...(140): RecF/RecN/SMC N terminal domain
  misc_feature (1)..(261): Xaa is any amino acid
MSFVFLRTVAFRNLLDAETDLRGKDIFLVGENGQGKSNFLEALYYCSYASSFRGSKDKELVKNGEKDCSVGLSVADALYSKVSVAFKDQKKTILLDGKRIEDRKELLSVAPAIVFCHEDMEFVAGSPERRRWFFDQTRSLWDFLYLEDLRKYRHILKSRNALFRGDRRFDGQTVATLEALDPQLARYGLELTAKRRETAGEFSAVFEPLYREITGLSGIGVKYQPSWKEGNIDVVLSLLLEKRDLDASMGVSLSGPHRDRY

SEQ ID NO: 99496 - protein, 138 aa, Unknown
  Obtained from environmental sample
  DOMAIN (2)...(138): NAD-dependent DNA ligase adenylation domain
  misc_feature (1)..(138): Xaa is any amino acid
MRNNAKRIEHLERVIQKYQKSYYGGEAEISDGEFDLLWDELKALAPNSPVILGIGGSADNADGFPKAKHLIPMGSQEKAANPQEFLEWAAKHPLPEFLAQYKLDGVSLELQYEKGALVRAVTRGDGVIGDDITANARR

SEQ ID NO: 99497 - protein, 287 aa, Unknown
  Obtained from environmental sample
  DOMAIN (16)...(165): GAF domain
  misc_feature (1)..(287): Xaa is any amino acid
ALNRTLEIFVSRAEESIDAVMGNGLWPVMDVTSLDRLLIFRARNPQSNEVNDRKPGEIYRWDRDRQGSAPIDDELKTLPVTTALKRWLGAMMNDECVSLRRSEFTEDEAAFLSPRGVQSILIVPVFAEGGLWGVTTFHDNTEEREFDDECIAMLRSVARLCVDMLQRTEMENAISNAERNARKLKIEADKIYYDALTGIYSRRYFDVSMKQNINSLSRSASLLSLMMIDIDFFKRYNDTYGHVEGDKCLKIVAQTLSQSITRTDDYVVRYGGEEFVLVLPNTHEHGA

SEQ ID NO: 99498 - protein, 292 aa, Unknown
  Obtained from environmental sample
  DOMAIN (74)...(291): Domain of unknown function (DUF323)
  misc_feature (1)..(292): Xaa is any amino acid
WVSVPTFTVSFETNGGNTISSQSVESGITVTQPGAPTRSGYTFIDWYIDNKTFNTQYDFSAPVTANITLYAKWILTNMVWVPEGSFKMGSLSTNDGVQTGETPQHDVTITKGYYMAMYEVTQDLYQSVMGYNPSSSSKGASFPVETVNWYEAVEFCNKLSEQGGLTPVYTISNRTPTTGYPITNMRVSANWDSNGYRLPTEAEWEYAAKGGDGSPGNYIYSGGNNTDSLAWYLGNSGNATHAIGTKAANSLGIYDMSGNVWEWCWDWYNDKNYYASSPSADPAGPGSGSTRV

SEQ ID NO: 99499 - protein, 291 aa, Unknown
  Obtained from environmental sample
  misc_feature (1)..(291): Xaa is any amino acid
APAKPAAAPAKAAPNLDALIAEQLADKAENLPDLTGDMDSLLAKGLPPEEDTVPAAPAKPAEAKAAPNLDALIAEQLADKAENLPDLTGDMDSLLAKGLPPEEDTVPAAPAKPAEAKAAPNLDALIAEQLADKAENLPDLTGDMDSLLAKGLPPEEDTAPAAPAKPAAAPAKAAPNLDALIAEQLADKADNLPDLTGDMDSLLAKGLPPEEDTVAAKPAEAKAAPNLDALIAEQLADKADNLPDLTGDMDSLLAKGLPPEEDTAPAAPAKPAAATAKAAPNLDALIAEPLA

SEQ ID NO: 99500 - protein, 259 aa, Unknown
  Obtained from environmental sample
  misc_feature (1)..(259): Xaa is any amino acid
VVVEPLPWPGNPDRPIDSTNFGKYRFRVLDRETGKAVFSRGFCSIFGEWELTEEASKAYRTFSESLRFPCPDAPVVVTIEKRSASNEFAEAWRTEIDPRDIFVQTAAPPAPEKVLALQNSGDPSHKVDLLILGDGYTAKERGKFEKDAKKMMEALFAQEPYKSRRKDFNVWGICPAAVETGVNRPSTNRHRRSPLGCSYDTFGSERYVLTFENKAMRDIACFAPYDCVQILVNDRTYGGGGIFGLYGTVSVDNEFAPYI

SEQ ID NO: 99501 - protein, 254 aa, Unknown
  Obtained from environmental sample
  misc_feature (1)..(254): Xaa is any amino acid
MTEDVLLPYQKKWIEDESNVKVWEKSRRIGASYVEALASVMEAAKSKKAGGQSSYYLSYSKEMTQQFARDCAFWTKHINAAASELEEVVLKDEDKDITVYRIHFASGYEIWCLPSVARSLRSKQGRVIIDEAAFVEDLAALLKAAMALLMWGGCVRILSTHNGDDNPFNELIKEIKEGKKDYSIHHTTFDEALALGLYKRICLVQKKEWSPEAEKVWRQKIIDEYGEDADEELFCIPVRAGTRYFPSALLEAVS

SEQ ID NO: 99502 - protein, 295 aa, Unknown
  Obtained from environmental sample
  misc_feature (1)..(295): Xaa is any amino acid
GSGVTGIWKDDFWSSDRLTGITLDINNPNLSSVDGILYNKAKTEFVLIPKNITGNITIPGGITGIKERSFESKSITGVIIENGVTGIGERAFSGCKNLTNVTIPNSITNIGESAFSGCTGLTRVTLPANAGLSGIASNTFYGCSKLTGVTIPNNVTTIGKSAFHGCTSLVSVIIPNNVTNIGESAFQGCTSLVSVTIGSSVTRIEENAFFETKLSSITIPNSVIYIGKHAFYCDSLFSVRFEGTNTSINNNAFPSDSLPDAYKSGGVGIYTRTSSGNNWTTPALTVKDETEIYAI

SEQ ID NO: 99503 - protein, 96 aa, Unknown
  Obtained from environmental sample
  misc_feature (1)..(96): Xaa is any amino acid
MSMVKTVVSRPTTFLIIFLLLIGLGFFAMFNLSIDLYPEINPPIMAVFTTYTGAGPEEVERSITRPLEAALSSASGLEKVTSISSTGSSVVIMNFT

SEQ ID NO: 99504 - protein, 72 aa, Unknown
  Obtained from environmental sample
  DOMAIN (1)...(62): OmpA family
  misc_feature (1)..(72): Xaa is any amino acid
EGHTDERGTENYNLGLGMRRADAVVKFLTNYGVASSRLTKVSYGEEQPKAAGSSEEAWAQNRRAAFRVKINN

SEQ ID NO: 99505 - protein, 237 aa, Unknown
  Obtained from environmental sample
  misc_feature (1)..(237): Xaa is any amino acid
KTRRVAKFLILIGSDQASKILAELDSKQVEEISKEIASIKGVDKEEAESIITEFKTLLSGSYRYLGPSFGGVETARNMLHAALGEEKGEALLQKTMLSLPQNIFGFLEEFTPEQIVFLLKDESPVTAALVLARLSPEVSAKTLAKFPPALKPEILKKIAHQSEVMPEVLEQVAKAIRERARHLGSSGKDDIEIDGMQALTAILKQGDYTFGDKIIKELETDSPDISKKLKDRLYTLD

SEQ ID NO: 99506 - protein, 84 aa, Unknown
  Obtained from environmental sample
  misc_feature (1)..(84): Xaa is any amino acid
VEEMVTEFIKLGLDGIEAYYTDYTQEQTEFAVELAKKYQLLLSGGSDYHGKAGGDLGVGYGNLNIPYSILEKMKSFRSETAQMI

SEQ ID NO: 99507 - protein, 294 aa, Unknown
  Obtained from environmental sample
  DOMAIN (1)...(253): Lyase
  misc_feature (1)..(294): Xaa is any amino acid
GDISPAEAEALVRGLDRVREEVEQGRFVWKRELEDVHMNIEARLTELAGDVGKKLHTGRSRNDQVALTFRLFVSERVQEWRKLACLLAGVFADRASEHVEDILPGYTHMQPAQPVSLGQHLLAYAWMLRRDVARMEDCLRRVRVSPLGAGALAGTVYPLNPHAVAEELGFDEVFGNSMDAVSDRDFVLEALFCASCGMMHLARFCEEIVIWSNPAFGFVILPDGYATGSSMMPQKKNPDVAELMRGKVGRVYGSLIALLTVMKGLPLTYNRDMQEDKEAFLDADAAYAASLRIM

SEQ ID NO: 99508 - protein, 275 aa, Unknown
  Obtained from environmental sample
  DOMAIN (84)...(240): Asparagine synthase
  misc_feature (1)..(275): Xaa is any amino acid
VYFASEITALKQAAGLKLTVSRAGLARYLAYEYVRAPHSIYREVLKLPPAHFLHVRNGEVQSGSYWRMPLSEPAEHSEAALAEELFHLLEQAVRRRLISDVPLGVFLSGGIDSSIVTGLMASLQSQVNSFSIAFTEAGYDESSYSRLVAARYGTRHEERVLSAEDCAGLLPAIAVRLDEPMADSSVVPTYLLSGFTREKVTVALGGDGADELFAGYEHYVGCKLAGWYRELPLAVRNAVEPLARFLPLSDSYINPRLVARTFLSGTACAALADRA

SEQ ID NO: 99509 - protein, 264 aa, Unknown
  Obtained from environmental sample
  misc_feature (1)..(264): Xaa is any amino acid
VRRRLYLLLICSHCVFAQNNNQVKLSEYLWRQAAGGVVLGTPSARPQSVVVALDSGVVKSYSGSGDLLWSYGVRGRLCPYITRSREGITYICSTDGILIAVNSIGRELWRANAGGALSGSIVTGWDGRVFVPTGKKISCYTSSGTLLWSNEPGSGIAAGPLLDQSGCVLLALEDSRLIRITPFGAVSSWKLPSVPAVLVPLDNYILALYANGNVQRVDSSTEGSAPLPFPSLAARPLAAAARDGRAAVFLANGQTLLLSGGDGK

SEQ ID NO: 99510 - protein, 273 aa, Unknown
  Obtained from environmental sample
  DOMAIN (1)...(273): Glycosyl hydrolase family 65 central catalytic domain
  misc_feature (1)..(273): Xaa is any amino acid
GYRGAFFAWESQENGDDACSDFNVTDVFTGRPVRTFFRDKQIHISADIVYSIQNYVDCTGDFSILAEGAMELILEAARFFLSYLYYSPEYKRYEVLDVIGPDEYHERVHNNAFTNRMVFSVFETTHNFIEALQKSNPEFIAALIKRIDFNDDRLFMEKVMQQFYLPMPDRRGLIEQFDGYFRLEDCTLDTVRSRLKDPKEYWGCSGGVATATQIIKQADVVTMLVLFGGDYTTGVKRANLDYYEPRTEHGSSLSSCMYALLSCETGNSDWAYP

SEQ ID NO: 99511 - protein, 145 aa, Unknown
  Obtained from environmental sample
  misc_feature (1)..(145): Xaa is any amino acid
MLEFFIRRPITTLMFVLFWVVMGIVSYPKMNVERMPPMDFPIVTTTLLYPGAGPAEIETQIVKPVENVISRVSGIKKITAQVYDNYAFLMTEFNLGEHAMEKQQEIKGMVDSIMYTLPRGMEQPVVRKLNVLQQAVMDLAISGAD

SEQ ID NO: 99512 - protein, 288 aa, Unknown
  Obtained from environmental sample
  misc_feature (1)..(288): Xaa is any amino acid
LIANAIILIESALNLMDDGMIREEAAIAGTRRAAVAILAGVGTNVVVFLPLAFMDGIAGLFMNQFGMTVVYLTLCSLMFSFTLTPMMIAKFMRTANREALKKKAEPKVTLAWFRKCFDSQIKHPWRWVGLSALLLVLSAMLMGFVGNEFSPSSDTDEINITARSPMGATYEKSQKLARRIEEKLAEFPEITSASIKIGRRGVENINIIVNLIPKSKRESDKMIAQRLVLALSEIPDAEFLVKAGETGGGGGNIADTIINVTGDDDSARERLADELIAKINEMEEVQSV

SEQ ID NO: 99513 - protein, 64 aa, Unknown
  Obtained from environmental sample
  misc_feature (1)..(64): Xaa is any amino acid
CSLFGCKLYGESVAEDIRIQYGGSMKPDNADGLLAQKDIDGGLIGGAALKADSFFSIISAAEKI

SEQ ID NO: 99514 - protein, 276 aa, Unknown
  Obtained from environmental sample
  DOMAIN (54)...(131): Surface antigen variable number repeat
  misc_feature (1)..(276): Xaa is any amino acid
ADIAREQTRLQQQQQQLLEDHLRQQEIHNAEAGRPQERTDQQSEKPSAEAGRCVNIKAIEFSGNTALSDARIRGLLAPYTGRCLTIGEINAALSAVTNAYIDRGWLTSRAFMVMPQPRLREGVLTIKIYEGRLSAIEGIGPGERATAFPFMLEEILNLRDVEQGIDQINRLDSNKAKVDIEADEAREGYSKIVIKNEPQGNTGLGATFDNLGNSSTGEWRAGARLARDNLLGLNDHISFLYTQALVSNSKEQNSQSLLCSLSIPLGWWTFSNNFAY

SEQ ID NO: 99515 - protein, 271 aa, Unknown
  Obtained from environmental sample
  misc_feature (1)..(271): Xaa is any amino acid
MQEWMKYFDEVILPRLDYGHGKGIFVTSSLLWADNERVLSKLGNTATALFAGDMGNRIPFKVSPLIQDNDFLKALRLFQQPVQDKPLANGCDDWKRNIALSHTYLPDDKNQCRFYLGSWMSVKELAVMAGIPQKEVVGLQLKEEVEFGLNVHNTSKEGKEINLGNLVVSGNPKNIPVNIPEGDLDRHIFVTGVTGAGKTTTCQNLVINSERRFLIIEPAKTEYRILRDMKEFCEEEKKIHIFTIGSNKAVFKLNPFQFSKGENITSRVDMV

SEQ ID NO: 99516 - protein, 293 aa, Unknown
  Obtained from environmental sample
  DOMAIN (2)...(286): Bacteriophage Mu tail sheath protein (GpL)
  misc_feature (1)..(293): Xaa is any amino acid
IATQSPAYLDSAPIGKPFLITSPEDCTSRAGFGTMAHRLALAAFRGAKNSVPVYLMLQEEPPSSQSATGQIAVTAEASHGGGELALYVGSKAYKITVTPDDTAGAIGEKIADALGRDLACPVTASNANGTVALTSKSKGPWGNGITVAVNQRLREDEALPDGVTCAITAMSGGLGLPDLEAALKKGLGDGDSANEDEYTGVIHGYGKDSQILNALSQYVGEGNEFSGLYSRTIARPFRSMVGDTTTGSAGLQALTDFTNNRKNDRCNGVCAKPGSLTHPAEIAAELMGVMEAV

SEQ ID NO: 99517 - protein, 126 aa, Unknown
  Obtained from environmental sample
  misc_feature (1)..(126): Xaa is any amino acid
MKIEIYSPTIRRKEMDSVLTALVEEKIGPGERSRLLVQTAKEQLHFDYALALRSPAVALFTALKALMDNPRKILTTESTEFHGVLEQKSSLPPCNSKLSFGQQSSVVNSSDTSADGQAAVGKAAII

SEQ ID NO: 99518 - protein, 289 aa, Unknown
  Obtained from environmental sample
  misc_feature (1)..(289): Xaa is any amino acid
EKPLCDRLCIDPPAITFSGDSVYYSVDTGAGARHQLVRGFGGMINAWGSSPDMTIDDADTLFNPDKLGLNILRMIIYPDPLEDIMNNLVYTNVDNSDFFDIGRLVNRYNGMIMGCPWTPPDGLKLPNGHMNPEKYLDMGRHLVTWVQKMEAGMGGNNKIHAISSQNEPDSNASWCIYTPEENRDFVKAVFPWIKQQIPHVDLFPGEWTNFSEDLYMPIVNDPAALAAVDGFAGHFYGGSIGQRKDKLIETGKEIWMTEHLRNTNNNKIVDPSWATVWDFATDFHNCMIN

SEQ ID NO: 99519 - protein, 195 aa, Unknown
  Obtained from environmental sample
  misc_feature (1)..(195): Xaa is any amino acid
DIIKSAKDFSPDTLSSYSVVLLAKSDEVSHEDKTPWKTEAVQKAFISYVENGGGLLVAHSGIVAGEQTEALNRLIGCRFIYHPNACPVTVQPIKPHPITEGVGMFCETDEHYRLVIITGDADILIASYSPPQGEADKYQEDPYNNTPAWICPAGYVRTHGKGRVCVLTPGHLLPVWLNPQYRRTIANAIKWCAGQ

SEQ ID NO: 99520 - protein, 271 aa, Unknown
  Obtained from environmental sample
  DOMAIN (151)...(183): Ankyrin repeat
  misc_feature (1)..(271): Xaa is any amino acid
YFAAAARSANYNVRAGDGYTALHYAAREGYMGYINFILGRRADINIRNNSGATALHEAVRTGKINSMETLIGRGADVNIQDAKGNSPLHLAPPEDKHIQTTDLLLISGANPNLQDEHGETPLHVMITLGRSDELARRFLSGGSDVKARNIQGKTPLYLAVEYSRTDLIPLLLASGSDIFAADNNNVPPLGRALIENKNAVLNEILTEETVRRQDSTGNTPLHIAIRSKADVGVVELILNRNGEVNARNKEGNTPLHIANIENHEPAGSLLI

SEQ ID NO: 99521 - protein, 226 aa, Unknown
  Obtained from environmental sample
  DOMAIN (11)...(226): Cation efflux family
  misc_feature (1)..(226): Xaa is any amino acid
MEKNKAQVLEGTVSVIVNTVLFAIKFWAGMATGSIALVADAWHTLSDSLSSVFIIFAVKLSSKKADREHPFGHGRWEHISSIFVAVLLGIVAFDFFEKSVLRFKNKEAVEYGTLAIVVTVISIVVKELLAQFAFYYGRKTDNTVVKADGWHHRSDALSSVLVLAGIISSFVFGDKFWWMDSVLGLLVALAIFYATIIILKEAITKLLGEEPGALIWSIKLPKRVKA

SEQ ID NO: 99522 - protein, 258 aa, Unknown
  Obtained from environmental sample
  misc_feature (1)..(258): Xaa is any amino acid
VFKVEPIFEGGRKEKDLEQSKLLNINENESIDIKAFYYRHCTEFPTALEIFEQTDGRLLSRGAVFLRQPEPKLLRSAVWNVGVDFGTTSTSVFYNTYNKETPQFLQLLNEYRWKEDNDDEPEPVNEDIKSNTGILCNSGEDNHFLDYYFIDEKCLSQKGYTSTFEELIETLDDNFFVSGRIFWHNHKNFLHINAHKGTRYKRLKSSIKWENDKRWAIRYLNQLLTHITYRAVEKGVGEINWFFSYPAALSIEDQTAFK

SEQ ID NO: 99523 - protein, 300 aa, Unknown
  Obtained from environmental sample
  DOMAIN (1)...(80): Histidine kinase-, DNA gyrase B-, and HSP90-like ATPase
  misc_feature (1)..(300): Xaa is any amino acid
DTTVWMEISVTDTGIGIREEDLNKLFLDYFQVDAKANRNIEGTGLGLPITKKLVEMMDGKIEAESEYGKGTTFRLRIKQGYIDDTHLGAALAEKLRSFRYIDDKRTSAKRLVRLNLSYAKVLVVDDMPTNLDVAAGLLRKYKMQVDCVSSGQESIGRIRAGSPVYNAIFMDHMMPGMDGIEAADKIREIGTDYAKKIPIIALTANAIYGTEEMFYAHDFQSFISKPIDIMELDSVIRKWVRSEEKEKELGTNVYLTPEVSAEDENSNIAEIHIPGLDTDRGLSLYGRDKKIYLSLLRSYA

SEQ ID NO: 99524 - protein, 300 aa, Unknown
  Obtained from environmental sample
  misc_feature (1)..(300): Xaa is any amino acid
GIKEWGTSAKTVPPGTEALIRLFTSVDKPVLLLFDEVVNFINRHRSMADHFYAFIQNLTVAVTGMTHGAVVISLPRSQVEMSELDMQWQERITKVVRRVAKDLIANDEAEIGEVIRRRLFEKLGPETTRKAVAKAYAEWCFDRRAQLPPEWTYVDTASSEASAKENLQNLFETCYPFHPATISVFRRKWQALPQYQQTRGTLAMFAQWISQVFSDEHVRSLQSPLITLGSAPLNVPEFRSVILGQLGESKLQAAIDADISGAQSHAKVLDADTKDGLKDIHRRVGTAILFESSGGQMTKS

SEQ ID NO: 99525 - protein, 90 aa, Unknown
  Obtained from environmental sample
  misc_feature (1)..(90): Xaa is any amino acid
MEKSMSVTLDRVTKVFKNTKGKSDVIAVHNADFVVKPGELVTLLGPSGCGKTTTLRMIAGFELPSSGKIHIGSEDVTMLPPNSRDTATVF

SEQ ID NO: 99526 - protein, 225 aa, Unknown
  Obtained from environmental sample
  DOMAIN (147)...(180): Tetratricopeptide repeat
  misc_feature (1)..(225): Xaa is any amino acid
MMFLDEEWSDLPELLENVQELLELGLIDDARDMLDKYQTVFQDYWEYHYLYSRVYAEQNMPRKAVSCLITGLRIERDNVDCLLGLFYAFSMMNMVRRGGRFLLEAHRLFPDNEPVYSALIWYYTEINEPDMAVACFEQAKALNSNNPDTYRNGGLAFDRLGRVEEAAACYKAALEISPSFEEARDLYADHLIFTGKTDAAVALFEEALRESPKNARHMSKLIYCL

SEQ ID NO: 99527 - protein, 193 aa, Unknown
  Obtained from environmental sample
  DOMAIN (67)...(132): His Kinase A (phosphoacceptor) domain
  misc_feature (1)..(193): Xaa is any amino acid
MGGEPVIFGHDKKLLQKLDAMLDEAIAGTFQAQSFDESLLSKIESKTVRFLEQSRLKQEQIANEQERVRSLISDISHQTKTPISNVALYTQLLAEQNLTDEQKKLAEQISASAEKLSFLIQSLVKTSRLESGIIKIEPKPGNVYDLISAAASECESLAATKNITLSIAQNTPVTALFDPRWCAEAIFNIIDNA

SEQ ID NO: 99528 - protein, 287 aa, Unknown
  Obtained from environmental sample
  DOMAIN (4)...(112): TonB-dependent Receptor Plug Domain
  misc_feature (1)..(287): Xaa is any amino acid
AIVGTRETSQRKASISKDEIEQRNAQDIATLLQDTLGLNITRYGAYGNMTLLNLRGLDSKRLAFLIDGVPVNSSMDSGFDIEQIDLNSVERIEVIYGGSDTKYNVSGAMGGVINIITVRKRKPGLRLGASISNTSAMPGEYRDRNGETKGPHWEDLLDTQNLAVSAGYGGNDFSLSANAFANRVGNHFLFKDSYNYTRRKDYNEVWDTGAGTSAVWEFPDLSKFIASANFYYGDKNIPSSGFSSVFGKQQDLSVRGNAMVDMPRAWHDDLAMEASLGWNFLGRITLA

SEQ ID NO: 99529 - protein, 105 aa, Unknown
  Obtained from environmental sample
  misc_feature (1)..(105): Xaa is any amino acid
MAGRKTGVTSETMKHLVLDAGVIYLNWGSTDPQKPQTKLGACRGGNTFTVETEWRDMPFDGVGGTVAGARRPISVSVSLTANLVEINKDLLKIAVPGADYDAGSP

SEQ ID NO: 99530 - protein, 229 aa, Unknown
  Obtained from environmental sample
  misc_feature (1)..(229): Xaa is any amino acid
VTHSIPGTYAVSLAVPSAGNIFVSADFKAFADPAEAARFASPDVFVCESTNAGVPAPSFGGAEVKAFLGDCIARHKDARVLFSCFSTNLARLGVVLRAARELNLKIYAEGKAIQNALVIARELYAEPLWGPYPALPRNKLPASGLALASGCQGEEDSQIYTLIKKGFLSRKQDALILSASPIPGNESDWRNLLDAAARAPAQSYYLPLAAVHASGHACRDGLAMTFGLI

SEQ ID NO: 99531 - protein, 133 aa, Unknown
  Obtained from environmental sample
  DOMAIN (12)...(131): dUTPase
  misc_feature (1)..(133): Xaa is any amino acid
MQPQIKVVKAHARIELPVYESEGSAGMDLRAFLEADVTLPPLGRVKIPTGLKLEIPEGYEAQVRPRSGLAIKNGLTVLNSPGTIDSDYRGELEIILINLGADSVIIKDGQRIAQLVTAPVCRARFVEAHTLAE

SEQ ID NO: 99532 - protein, 273 aa, Unknown
  Obtained from environmental sample
  DOMAIN (154)...(171): Zinc knuckle
  misc_feature (1)..(273): Xaa is any amino acid
GWRAMYDELEQVLKQYKLKYLLHENTIVIQIENLRQLRQFLREFFWACKRAKDDANDYWPCICAVIDRKGMNFNAELVGKAGLQWEHLTPDYPYLSYRNAYLLGEGFAIFDIRFSSEQVSMDTWCTISLDENADVYQAIPITMPGVIVPTLEEGGCFYCGLGGHTAAQCPTHYLPVESVPPWRKMMELSFDDINDVLRGISSVLTEKGVAGYRSLLETEGAPNTLLRAIFDINAVSQLRSVPRIWLAKSKDYPRCLEEPPHPRDSSQVWELLD

SEQ ID NO: 99533 - protein, 273 aa, Unknown
  Obtained from environmental sample
  DOMAIN (1)...(158): Queuosine biosynthesis protein
  misc_feature (1)..(273): Xaa is any amino acid
VFNIPRVRKARLFGISEASGAKAEFLLLKKIDRLSWLALSKRSKRQKPGNRYVFDDARAELQSVAEGNFLLRFDRPIDDAWLDVHGHIPLPPYIRRQDSEDDATRYQTVYAQEHGSAAAPTAGLHFTEELLSELKSAEMETVFLTLHVGLGTFLPVRTENLEEHKMHEETYSIGEETACRIEKAKAEGRKILAVGTTSVRTLESAWIEDHSINNQLIENQLMPGSGRLRRGEGSTSIFIYPGYTFKACGLLVYQFPHPRFHLAHAGICSGRQG

SEQ ID NO: 99534 - protein, 294 aa, Unknown
  Obtained from environmental sample
  misc_feature (1)..(294): Xaa is any amino acid
DSLAKIIEKCHAAGIKVIARTDFSKIRESVYERHPDWAYRSAGGKIVNYNGDVHVCPNGGYQQDAMFKIVSDMFARLSFDGIFYNMAGFQTKDYSYNSYGPCHCDNCKKKFMERFGLELPVEEDMDDPRYQKYRVFVDECTRDLNKRLTDHVRSISPDIAINGREYQRMESNTEIDRPLPVWQYSASSNTRNIRDSENGGIAPLNTTVDFLGFPYRHVAVSPWLQELRMWQNLANQGGLDYYLIGRIDNHGDKSGYEGIRKVFKFAAETYEELKDLRPKADVLVFHKELWETTR

SEQ ID NO: 99535 - protein, 131 aa, Unknown
  Obtained from environmental sample
  DOMAIN (6)...(104): UDP-3-O-[3-hydroxymyristoyl] glucosamine N-acyltransferase, LpxD
  misc_feature (1)..(131): Xaa is any amino acid
MTQTEITAQVLAGLFEGTLKHCPPGRAFTEVLPLDKASATSISFLSNPKYRAKAAQSGAGLILVALGVDLGDRPVLEVKNPYFAFAQCTAKLHPEPPPEFSFAPVHFTAKVGADCNVSTTATIGARTTIGE

SEQ ID NO: 99536 - protein, 284 aa, Unknown
  Obtained from environmental sample
  DOMAIN (1)...(88): ABC transporter
  misc_feature (1)..(284): Xaa is any amino acid
MDALRCPPPDTPIKVLSGGERRRVALCRLLIQKPDILLLDEPTNHLDAETVAWLERHLRDYKGTVIAVTHDRYFLDNVAEWILELDRGEGVPWKGNYSSWLEQKRNRLALEEKQDAKRQKTLERELEWIRMTPKGRHTKSKARIADYESLAGQDAKERELDLEIYIPPGPRLGDTVVEFDKVSKAYGEKALFESLSFRVPRAAILGVVGPNGAGKTTLLRLMTGQEAPDAGAIHVGDTVKMAHIDQLRAGLDDAKSVYETISGGNETIQLGGREMNARAWLSRF

SEQ ID NO: 99537 - protein, 170 aa, Unknown
  Obtained from environmental sample
  misc_feature (1)..(170): Xaa is any amino acid
LNKLKQRLDVCKAIASATIKEYIVYRSHMMVSLFVGPVFFIVQYFIWTAVYGEGGAINGIEYLQMIRYFGISALIGYMTWDSADWNLSMLIRSGKFLTFALRPVHHPFFALSQKIGHRVLGTLLEAVPCAIIFSLLFGIDMRPASIPWTLLSILLAYFVYFYVNYILGIA

SEQ ID NO: 99538 - protein, 254 aa, Unknown
  Obtained from environmental sample
  DOMAIN (41)...(240): PHP domain
  misc_feature (1)..(254): Xaa is any amino acid
VCGYGSSGSMPLPGAGTCMVSSPEGPSSPDGAAGGEAPAYAELHCLSNFTFLRGASHPEELVAQAVSLGYRALALTDECSVAGVVRAHMAARGQPLTLLTGSELRLECGLKLVLLARDRQGYGQLCRIISRGRSAAPKGQYRLTRADLEETGLNGCFVLWVPERQQGGSPPHSTQQPVEPMESAWAPPPRWLAALAGPQLRIAVELLREGDDGARLRELTRLSGELGVPLVAAGDVHMHARARRRLQDALTAIR

SEQ ID NO: 99539 - protein, 77 aa, Unknown
  Obtained from environmental sample
  misc_feature (1)..(77): Xaa is any amino acid
NVLVNNGETVVIAGLTSNEKKNNNAGIPFLKDIPVLGHLFKRSQKSTTKKDLVIFVTPHIIHSEMGNNGFDVKQKEK

SEQ ID NO: 99540 - protein, 87 aa, Unknown
  Obtained from environmental sample
  misc_feature (1)..(87): Xaa is any amino acid
AQKVLDTRAKFPNDSLADLYDPIAMPPALTKAHQKLDKAVENAYGQSFDDDSQRVAHLFGLYQKLSGELFVEEKRRKGRKGRKGRKK

SEQ ID NO: 99541 - protein, 178 aa, Unknown
  Obtained from environmental sample
  misc_feature (1)..(178): Xaa is any amino acid
ELERTYNVPRGRLRLTGRIDRISQGPSQDTLIIDYKTGKAPSAKQCRWNEEDGLKDFQIPMYIKLYEDTAGTAVSRAFFFSIHKHQIIPVMGEFNGKEFSREKYQSSMDALEEAIKYFDISVSSLNFKPERISCKTCASCEFKTICRSLYSLNPRQELFNNKVQHEKDEGEEEDEYVF

SEQ ID NO: 99542 - protein, 96 aa, Unknown
  Obtained from environmental sample
  misc_feature (1)..(96): Xaa is any amino acid
MYSENLHFLQELDEEQRAAATAEKNVVVSAGAGSGKTRVLTARYGWLVMTGRCTVDQILTITFTNKAANEMYRRIYTILSAHAPDNEYARKAVENF

SEQ ID NO: 99543 - protein, 301 aa, Unknown
  Obtained from environmental sample
  misc_feature (1)..(301): Xaa is any amino acid
LGDGNQFLNVGPYSFGINGDNGNGWGKVTLLGKVVGNTGGNQGGPISVIGVTDATVDNFADFKAAEGNGDHVIRLNANANFTHKSGTISGGIVTYRAGGITVTVAGGKVGYISNYDGGNGNTIVVSGGTVGDSSSTSAAIYNTVPSGEVIITGGTVVSGDTSSDAGTILNRGKLAVSGGRVYNVSKVGCASAIYNGSGLDIDTTAVAIAIISDSAQVFSAYRCISNNVDSAKGVITNRGITEISGGKVYNTATDTAGPVVYNWWKLKVSGNADIATRAAYNPLATVFSQAAFFGASTDSTY

SEQ ID NO: 99544 - protein, 118 aa, Unknown
  Obtained from environmental sample
  misc_feature (1)..(118): Xaa is any amino acid
MNLRDTIKNFKWNEHSTGLGFIMLFVLGAIVSWAAQGFYGVPTFITPSNLLMVLRQVSYTGIIALGMTLIIISGGIDLSVGSMMAFVGGIAVFLLKQFPDDSLFAVLVTLIFALIFGT

SEQ ID NO: 99545 - protein, 61 aa, Unknown
  Obtained from environmental sample
  misc_feature (1)..(61): Xaa is any amino acid
ILRPWEIFTRPSLMALNKQKEGKTLSEEDLDFPNAEAGFDGVKFIGKCVESSNKGAVWVNY

SEQ ID NO: 99546 - protein, 60 aa, Unknown
  Obtained from environmental sample
  misc_feature (1)..(60): Xaa is any amino acid
LKNIGAIIGGKCWADGSLNTPDQIQQGKIVFDFDFTPPYPAEHITFRSRLVNDYLTEIFE

SEQ ID NO: 99547 - protein, 116 aa, Unknown
  Obtained from environmental sample
  DOMAIN (17)...(98): Acetyltransferase (GNAT) family
  misc_feature (1)..(116): Xaa is any amino acid
MELKLASKTIENALLIITAIFEGKIIGLTRVSGDGGYTVLIQDVIVLPNYQNRRIGKKLMSKAMEFIKETFIEKGQTIFVNLMSAKGKESFYEKYGFEKRPNDKFGAGMSQWIKKE

SEQ ID NO: 99548 - protein, 290 aa, Unknown
  Obtained from environmental sample
  DOMAIN (1)...(290): Prismane/CO dehydrogenase family
  misc_feature (1)..(290): Xaa is any amino acid
DKIRDEQKLFRLAREYSISTENRDIYDIAHDVADAGLAEFGKSFGTQNFIKRATGERQKVWHEQGIEPRAIDREIATALHMTNMGNTADAEALIRQGLRTSLSNGWGGSMLATEITDILFGTPTVRSTEGNLGVLETDMVNIVVHGHDPAFSEMVVCAAEARELVDYAKSKGAKGINIVGLCCTANEVAMRHGVRMAGNFLQQENAVLTGAVEMMCVDVQCIFPALSALCECFHTKFVTSSPIARIPGSIYVEFKQDTAFQQAKDLVKMAVDNFTNRDQSKVYIPQGSRA

SEQ ID NO: 99549 - protein, 291 aa, Unknown
  Obtained from environmental sample
  misc_feature (1)..(291): Xaa is any amino acid
MKERRRRDNMESIFGVQEIPSDTQIRTLIDRIEPDMFGGVFNESLLIADEYKVLDSYRVLDGGVLIALDGVWYHSSENIRCKRCLHKTKDGVTTYYHSVLAGTIVKPGETAVLPVMGEMIRNEDGEEKQDCERNAAKRWIRKHADEYTWLKPTLLGDDLFSNYPLCKEIEEKGFSFIFTCKEETHPWLTETVKNSYLEERTKRDWNGRHHLIYRYRWLNGVDIRDDKETLAVNYVHLEIENEEKKKITYKNSWITDKAVTEQNVALIASCGRARWKIENEHNNVLKNHGYN

SEQ ID NO: 99550 - protein, 88 aa, Unknown
  Obtained from environmental sample
  misc_feature (1)..(88): Xaa is any amino acid
MAENINLTRERYGYGFVPDAFLPHGKDEYWLRNSHQDTKPWRALYPDEIEILTVNGNYCADWNNFFVVDPFEPNLIRNSYFYGLVRIG

SEQ ID NO: 99551 - protein, 279 aa, Unknown
  Obtained from environmental sample
  misc_feature (1)..(279): Xaa is any amino acid
KGSKTSGKFEAYYDGYADTRSFVTDGYADFAVVDAPDALKAANVDAPFDAITSYWGEICETSGLPMYIIHHNEKIGGGAGWGAEDQLLRQLSYAKNDVPSYKGSVFNSYSGLLENKMGTTDTLIKFFNKEINEESLFEDLAMLAPKSLNYSTNDAIAVFQGTYDDNFDVYFNDGKISLNEAGYFYIEQPLKVGMNYFTIKHKGKVISYSIERKVISLYSIDASIANGKVLNVEGGTSVVISAVAYKGATVTASLGGKAIKLTQQEANLDETDLRASYAL

SEQ ID NO: 99552 - protein, 192 aa, Unknown
  Obtained from environmental sample
  DOMAIN (1)...(185): Initiation factor 2 subunit family
  misc_feature (1)..(192): Xaa is any amino acid
VLTHCNAGRFAAVKYGTALAPIYLGVETGYKFKVYADETRPLLQGARLTAFELREKGIDVTVICDNMASQVMKNGWVQAVFVGCDRVAANGDVCNKIGTSALAILAKYYQIPFYVCAPVSTVDMNTPTGNDIHIEERPAYEVAEMWYKRRMSPDGVNVYNPAFDVTDNALVTAIVTEKGIVRRPYNESLKSL

SEQ ID NO: 99553 - protein, 79 aa, Unknown
  Obtained from environmental sample
  misc_feature (1)..(79): Xaa is any amino acid
VGDPPAISTQSAKTNVLVNNGETVVIAGLTQNEKRSSSNGIPFLKDIPILGYLFKHADKSNDKTDLVIFVTPHIIHSEI

SEQ ID NO: 99554 - protein, 126 aa, Unknown
  Obtained from environmental sample
  DOMAIN (13)...(101): Phage integrase, N-terminal SAM-like domain
  misc_feature (1)..(126): Xaa is any amino acid
MNTNASSPVLALVSAWLDHLLAERGLAANTVAAYRQDLRDFHVFLEEMAGARPELTALDQLDEHALFLYLVWLRKRGSAGRSLPRRLSSLRGFFVYALEEKAVRSNPTLFLERPKLPGLLPEVLNE

SEQ ID NO: 99555 - protein, 109 aa, Unknown
  Obtained from environmental sample
  misc_feature (1)..(109): Xaa is any amino acid
MKIYAISDLHLSGEQVTKPMDIFGSYTSGYIEEVKNNWNSIVEDSDVVLISGDISWAMYLKDAQQDLDFIGKMKGIKIILRGNHDYWWKSISSVRAALCEGTYALQNDS

SEQ ID NO: 99556 - protein, 161 aa, Unknown
  Obtained from environmental sample
  DOMAIN (4)...(90): ThiS family
  misc_feature (1)..(161): Xaa is any amino acid
MKKVLIPYALRAFTERNAEVEVEGGTAGEVVNALANAYPALKTHLFTEDGQLRNFINLFVEGVNINSLQGLNTPIKENGEVMLVPAIAGGSDSSDLSNEEIARYSRHLLLPEIGVEGQKKLKAAKVLIVGTGGLGAPLALYLSAAGVGTIGLVDFDVVDES

SEQ ID NO: 99557 - protein, 127 aa, Unknown
  Obtained from environmental sample
  misc_feature (1)..(127): Xaa is any amino acid
MRISEAKKCITELYKNTDNVVALVSERGIGKTSAFQQCAEEMGIGYMGLYAAAMEGPDFMGLPDKDREKGITRYLAPQFLPTISAVQEGFFPDKGLLVIEEINRVPTDTISVLYPLLLERKINGHSL

SEQ ID NO: 99558 - protein, 86 aa, Unknown
  Obtained from environmental sample
  DOMAIN (5)...(80): Penicillin-Binding Protein C-terminus Family
  misc_feature (1)..(86): Xaa is any amino acid
ALFNPEPDSKVYVPRELDNSEGKIVFTAAHRNESEIIYWHLDDTFLGSTQTFHEMEARPQPGLRTLTLVDTSGNTIVRSFMVLDGK

SEQ ID NO: 99559 - protein, 151 aa, Unknown
  Obtained from environmental sample
  DOMAIN (12)...(151): Transglycosylase
  misc_feature (1)..(151): Xaa is any amino acid
LPRPLFNAPYSPVLYDREGNLLGAQVASDSQWRFPGTGKINEKFALALIETEDRRFRRHFGVDPLAIARAAYQNFRGKRIISGGSTITMQTIRLSRGARKRSIFEKFIEAYLAIRLEAGHSKNKILALYSDNAPFGANVVRIEAAAWRWFG

SEQ ID NO: 99560 - protein, 282 aa, Unknown
  Obtained from environmental sample
  DOMAIN (1)...(282): Permease for cytosine/purines, uracil, thiamine, allantoin
  misc_feature (1)..(282): Xaa is any amino acid
MISFTQIGWFGVGAAMFAYPVSELTGINLWVLIVIVGVCMTASAYFGMKGLTIVSFVSVPLIAVLGIYSMATATAAGGGWVAMFGKSQGGITLFTAIGMVVGSFVSGGTATPNFVRFSKTTKIAIITTIVAFFLGNTLMFLFGAVGGAYTGEADIFYVMIAQGLTIPAIIVLGANIWTTNDNALYTSGLGLSNITKIRKKPMTLVAGAIATVASVWLYNNFIGWLSFLNATLPPVGAILVVDYFLNKNKYAKDSTVNEVINIWAVVGVVAGALTANFLKWGI

SEQ ID NO: 99561 - protein, 274 aa, Unknown
  Obtained from environmental sample
  DOMAIN (1)...(274): Protein of unknown function (DUF1116)
  misc_feature (1)..(274): Xaa is any amino acid
AIIGALLYEKKAADPASAEKLAASGDIEFSPCHEHHATGPMAGVVSPSMPVFIIENKTYKNRAYATMNEGLGKVLRYGAYSEEVINRLNWMRDVLGPGVKKAVEASGGIELKPIIAQALHMGDEVHNRNKAATSLLIRGLLPFLIKAGLPEKDFYEIVTFINSNDHFFLNLSMPAAKSMLESADGIENSSVVVIMARNGTDFGIKVSGLKGQWFTGPAGIIQGLLFPGFTEADKNPDIGDSAITETAGLGGFSMAASLAIVQFVGGEPEDAVNF

SEQ ID NO: 99562 - protein, 176 aa, Unknown
  Obtained from environmental sample
  DOMAIN (8)...(71): Putative carbohydrate binding domain
  misc_feature (1)..(176): Xaa is any amino acid
MKNDAKNATFGRFDDSAREYVITEPRTPYPWINYLGNQDFFSLISNTAGGYCFYKDARLRRITRYRYNSVPIDTNGRYFYINDGGDVWSPTWKPVKADLTGYFCRHGMGYTVIGGSRNGIAAEALFLVPLDFNGEVHRVKLTNTSKGAKSVTLFSMAEFCLWNAQDDSTNYQRNLN

SEQ ID NO: 99563 - protein, 279 aa, Unknown
  Obtained from environmental sample
  DOMAIN (3)...(174): ATP-dependent protease La (LON) domain
  misc_feature (1)..(279): Xaa is any amino acid
VGQEQAASVKHSVERSAKTIGIVLVKDINGNDHPDNLYTIGVAARILKVFPGEGDSASVLINCVERFRVTEYKKVKFGTLAKVEYPAATVSQLSEELRAYGMAVLTTLRDLVKMNPLQSEAIKMFLSRSTFDDPGRLADFAANLTTASGEELQDVLETFDVRPRIDKVLVLLKREVEISRLHGEINRQIHEKISGQQKEFFLREQLKAIKKELGIEKEGKVSEVEKFQERLKDLTLNPEARKTVDDEIEKFQTLEPHSPEYTVSRNYLDWLTILPGESS

SEQ ID NO: 99564 - protein, 281 aa, Unknown
  Obtained from environmental sample
  DOMAIN (94)...(247): AIR synthase related protein, C-terminal domain
  misc_feature (1)..(281): Xaa is any amino acid
GNIDGGLKSVSLSANWMWPCKNTGEDARLYNAVEAASKFCIDIGINIPTGKDSLSMTQKYPDGDIVVSPGTVIISAVAQTGDVRKVVHPVLDNNTESYIIYVDLSCSPFALGGSSFAQITGKMGNETPDINDTSYFAKAFETIQRLISKEMIVAGHDVSSGGLVVALLEMCFANRDGGMEIDLSEIVRERGNEIDIIKILFAENPALILQVKEVDSVKVHEEFGESGIKAFTIGKPNPKRILRVFCGDEKYKFDIDTLRDLWFKTSYLFDCRQSGKIRDRT

SEQ ID NO: 99565 - protein, 203 aa, Unknown
  Obtained from environmental sample
  misc_feature (1)..(203): Xaa is any amino acid
VIQQALEAIKNGERIFKFSFDHAEDGMICGGSMAGFGNVLGSQANLCIFGGGHIAQSLARIAAHSGFFVTVVEDRPEFASSFGHIRYVVCGPEEYAATDPAAASDYAVICTRGHKTDAEALRYCLTKKCNYIGMIGSEKKVASLFDNLRAEGVARAELDRIYAPIGLDIADTLPAEIAVAILAEILLVKNKGKLRHKKLKFEE

SEQ ID NO: 99566 - protein, 283 aa, Unknown
  Obtained from environmental sample
  misc_feature (1)..(283): Xaa is any amino acid
TISSVEVRQGRTAALSVTASSPNSGVLSYQWWESKESGDVKVGTNSNTYAAPTSSMGTRNYYVVVTNSKSGVQDPAYDTSSVKAVNVIEPPTTLNATNGVIELSKATWTYNGYPLALGGTDVIVKYLKKDESGAVDTVTLTEDTDYTLAYSNATNVGTATIRVTGTGDYAGSLSKTFTIAKKEVEAFDFTFVDERAYTGDSLGAQVKLVTPLTNSGSTVTVYYDDGNGKKTAIPVNVGNYDVSINVTAGANLTAGNDIYLGAYVITTGKLDTDCFTYSIPTGH

SEQ ID NO: 99567 - protein, 266 aa, Unknown
  Obtained from environmental sample
  misc_feature (1)..(266): Xaa is any amino acid
MDVQKRLYYGIKRIEMKQITLLALIASLCALNAPAQQVVETRRTVEYTIRDSVDRFGNQYIRYSGQHPSVLTFINNDGSVTVCSSDENTTYIYEYSINLQALKTLAFKNELGSLGAFTKDNDGNYYFFYGVYSANKNSDNMAMVKYSPEGEKINTYRLKAQAPSSFDGIRSPFRAGTCRLELAGSMLAVYFAREMFSGHQASYGFVLEKDTFERIDNGAATNAERTGGNTQMPYTSHSFNQFILPIDNGFVFADHGDAYPRSLLCQ

SEQ ID NO: 99568 - protein, 273 aa, Unknown
  Obtained from environmental sample
  DOMAIN (3)...(147): Glyceraldehyde 3-phosphate dehydrogenase, NAD binding domain
  misc_feature (1)..(273): Xaa is any amino acid
SSLVGQGLLGKDKIDVVAVVDLSTDAKYFAYQLKYDSTQGQMNAEIGTDGDDVLVVNGHKIKCLCGKGLTPDQFPWKDLGIDYVVESTGIYTNEKAYGHITAGAKKVIISAPGKSGDDSKPIKTIVMGVNNEEYDASKHHVLSNASCTTNCLAPVVHVILKEGIGIETGLMTTIHSYTATQKTVDGVSQKDWRGGRAAAINIIPSTTGAAKAVGEVLPVTKGKLTGMSFRVPTPTGSVVDLTFRAEKDTSIEAIDAAMKKASETYLKGILAYC

SEQ ID NO: 99569 - protein, 250 aa, Unknown
  Obtained from environmental sample
  misc_feature (1)..(250): Xaa is any amino acid
MGAISGPVETSDVLGLVLLHRREPELLEAALLNRALTAEWMERAIPALPERHLEIALNNQVLWIQRPTILDALEVHPAGTTNLKRRITEFRKEVLGQLDSASAQERIEILDDVDSGALDKAWSELPLPTEDEAQGTHGPVSQARHTTPVAAPDGSVQAISPPHQRSTLAQRIMKLAPNQKIVLALKGGKEERTILMQEANRLIQANIVRNGRITEGEIAHIAQMRTAHEDVIRLISNNREWVRKYQFSKP

SEQ ID NO: 99570 - protein, 284 aa, Unknown
  Obtained from environmental sample
  DOMAIN (14)...(265): Dolichyl-phosphate-mannose-protein mannosyltransferase
  misc_feature (1)..(284): Xaa is any amino acid
MVDAGWKQWLRENRVPLLFLFIMLLAAPMRGLWAPDEPNFAQCVREMREGGEWLLPYFNGRPYNEKPILFYWAMKCSAILCDKLTGGLGFVNGISAWALRLPSVFAAGIFVFAMRRWAARFADKASSEICAIVLATTAIWIWQAQFIQIDMLFSVLVAWSWLTWLGGYLLLRGEAAPKHPNEARTWFFMSYASLGLAFLAKGPLAIVLSVSVIAAFILWQRDWKAIRQMRPLWGGLILLVVISPWYIAAAVKGGADYAYNLLIYQNFGRALNAWAHVQPWWRYA

SEQ ID NO: 99571 - protein, 265 aa, Unknown
  Obtained from environmental sample
  DOMAIN (1)...(157): tRNA synthetase class II core domain (G, H, P, S and T)
  misc_feature (1)..(265): Xaa is any amino acid
LLETIEESFRSYGFVPIDTPALEYADVLLGKGGGETEKQIFRFNDNGGRDVALRFDLTVPFARFMAAHRNELPLPFKRYHIGKAWRGENTQRGRYREFIQCDFDIVGSTGVAADFEILLILRNTLKLICDEEVRIHFNHRGLFNRFLSRLDGLDKSVDVLRIVDKLSKIGRDETLNQLSELLGSKGQEVLNFIEAKGTFEEKLEIMTEAASGDKTCPESERLKLLHRFMVETETQGSFVLDPSITRGLDYYTGVVFESYLNKLPD

SEQ ID NO: 99572 - protein, 212 aa, Unknown
  Obtained from environmental sample
  misc_feature (1)..(212): Xaa is any amino acid
MDKLSVENALNIEGISGKIFEWRDDCTVLVVRPEKNLSPWIECRWNLKETAKSGDGVPIPKSSSGYFYTDADSDIPVVTRVYPVINSAGVWLPTGLDIETGLGPGQGIAVEFSKVMGENWLRSLRFEPSVTGRTEQLSEKALVYIFSRDLDPETNYTLVITGDTRDSEGLKIGADFRVNFVPDIPYLNIISLVFDSVTPPMNAWNTDGTIAV

SEQ ID NO: 99573 - protein, 110 aa, Unknown
  Obtained from environmental sample
  DOMAIN (1)...(104): Protein of unknown function (DUF1312)
  misc_feature (1)..(110): Xaa is any amino acid
FIAVSLTISSAYAAYIKPESTVRVLIRGQNKEWTYLLGTNETVIVSGPLGDTIVKINDNRAWIESSPCDNQTCVGMGSVQRQGQWALCLPNKVMLIIEGTDDKDIDSISW

SEQ ID NO: 99574 - protein, 95 aa, Unknown
  Obtained from environmental sample
  misc_feature (1)..(95): Xaa is any amino acid
MSCGGAMMNVRTVEKYLKALCDSYILYRAERYDVRGKKLLKTLNQYYIVDTGLRYSLLGDTWIDTGRMLENIVYLELVRRNRKVYVGQIDALSTE

SEQ ID NO: 99575 - protein, 258 aa, Unknown
  Obtained from environmental sample
  DOMAIN (1)...(258): Protein of unknown function (DUF342)
  misc_feature (1)..(258): Xaa is any amino acid
MTEKSIFIVAQGTPPVKGEDGRVEFCFNTDPSPAPTIAEDGSADYKNINIVNLVTNGTVLAKLYPAQKGTPGQNVYGNAVAALNGIPARLPVGANTAIPNDDPNSLVAVSDGIASYDGTSVNVSPGYVISGDVDFKTGNIKYDNSIMINGDVKSGFEVECGGDLQVKGIIEDCKITVKGNILCKFGFVGTGKGVITADGNVNLNFMKNQTIVAGGNVNIAKEALNCNITAAKSINVYGHPLSVAGGTLISHGSITCRT

SEQ ID NO: 99576 - protein, 232 aa, Unknown
  Obtained from environmental sample
  misc_feature (1)..(232): Xaa is any amino acid
DAAHEGVDPHAIALKDIPGARVQSVEAPSAMSVWFPAEIIAVEASQFVVSSAVNGILGALLVPRGRNVAADMALVEVKSPELACVHADWLAARAKLVRAEAALAREERLNVKKATSQRDLEEATSEAEVARAEEGAAALALESLGIKTTQGGAAWVLRAPRAGTVVGYKVVSGQGVSAGQELGLFLASGSVVVRTELAQGAAGKIEAGQTFAVRQPNGRQWKAKLEGIVPAL

SEQ ID NO: 99577 - protein, 233 aa, Unknown
  Obtained from environmental sample
  misc_feature (1)..(233): Xaa is any amino acid
MGRKVEAKPGTALSATAGNNGIALQVSEGAAVIAEEGQNRELSSGEMVAMDSAGYIRYEPAALVIQPRPNAIFRKSGDEPLNINFLWNRINLQPDETLRLEIAEDQNFNRSVRTFDGLISSAQTALNAGLWNWRLTYNSGNLNGDNGGANDGATSVILDSGRFTITEASSPELLSPARNQQFIVESEPPKLNFQWSQTEDASYYIIEVDGTLEFRNPIIKKQSAVTFLSDSSL

SEQ ID NO: 99578 - protein, 254 aa, Unknown
  Obtained from environmental sample
  DOMAIN (1)...(58): His Kinase A (phosphoacceptor) domain
  misc_feature (1)..(254): Xaa is any amino acid
MSHEMRTPMNAIIGMVAIGKPAADIARKDYCLTKIEEASRHLLGVINDVLDMSKIEAGKFDLSPEEFDFERMVRRVVDVINFRVDEKKQKLSVQIDENIPRTIIADDQRLAQVITNLLGNAVKFTQEKGTIRLNAKFLEEENDLCTLEISISDNGIGIDAKQQERLFTSFQQAEASTTRRFGGSGLGLVISKSIVEMMGGKIRLKSELGKGSVFTFTIKAKKGVSSETKERALNGREGEKETILTGFLKDDAYC

SEQ ID NO: 99579 - protein, 130 aa, Unknown
  Obtained from environmental sample
  DOMAIN (3)...(127): NUDIX domain
  misc_feature (1)..(130): Xaa is any amino acid
ARICPAVIVIITDDTQKILLAHTKKFKTGVYSLIAGFNEAGESLEATVAREIYEEIKIKIKDVSYIKSQPWPFPNSLMMGFKARYLSGAIRPDGIEIEDAAWFTKDNLPPLPGEGSLSRFLINLWLDGAL

SEQ ID NO: 99580 - protein, 276 aa, Unknown
  Obtained from environmental sample
  DOMAIN (40)...(276): Carbohydrate phosphorylase
  misc_feature (1)..(276): Xaa is any amino acid
GKDSKKPVKKLHYLTIEILIGKTLENTLVNLGWDKAFEIALRGRGIDIQKIYDVEADAGLGNGGLGRLAACYMESLATLGYAATAHCIKYDYGLFKQRIIDGQQVEFLDEWLATGNVWLTARPDEAVTVRFGGSVVPYKGADGNLKFNYIDAQEVEAMPYDMMLSGYQARLVSFLKLWSAKNKNAGDINLSRTDLANYMKEVKEIEMINSVLYPTNETLRLKQQYFLSSASMQSIINWHLRKKIDLHKLPDYVAIHINDTHPVVCVPELMRLLMDE

SEQ ID NO: 99581 - protein, 283 aa, Unknown
  Obtained from environmental sample
  DOMAIN (35)...(266): Starch synthase catalytic domain
  misc_feature (1)..(283): Xaa is any amino acid
VAEKAVVEKHVAEKPVAVKAAVEREEGDSGGAGLKVLFCISEAQPFAAAGGLGEVGGSLPRALPEVDVRVILPLYQAVSADFRKKFKFLGCTNIQFAGREEYMGVFEYRAESTTYYFIDNEKYFKRDNVYGYEDDGERFAFFSKAILDSFKLTGFRPDILHINDWHTASVAVYLKTSYADVREYQKIKTLFTLHNINFQGRFPYSFMTDIMNIDYRYKNLLEHGNQINLVKAAIECADAVNTVSPAYAEEIKTPEFAMRLHECVCANAGKLSGILNGIDYKFY

SEQ ID NO: 99582 - protein, 231 aa, Unknown
  Obtained from environmental sample
  DOMAIN (8)...(231): TonB dependent receptor
  misc_feature (1)..(231): Xaa is any amino acid
ERSKDLYSGRASANFGKADSKWSSFFAFGHYFRDPSVFELFSTAFGIVSNPNLKPEQGEQAEAGIGYKSKKSRLSATLFANSIRDRIIYYTSGMVTKPINAEEGKVYGVETELGSELFSWLKVSANATFQNPENLPSEPEQQYYISMLFMLPFSFELTLDGEAHSELYRDKAQRKAIPAKSFYHAGLGYKPTQNTKLFFYARNINGGEYQNIYDAYPTPGRVFSLSYSHSF

SEQ ID NO: 99583 - protein, 222 aa, Unknown
  Obtained from environmental sample
  misc_feature (1)..(222): Xaa is any amino acid
LIRITDRTLSCLDGLPPDVPALSRFLSLLTELDPGAIELSETMYRLLSPLPTYPSYILRLSKASDAAKYPDIEDFICPKDGSADDDCRKLRVVGMSGAILGDYRQMFARLKHSSVEFCPTNRLRCATALAAEWAMSGGGGGVVTAFGGLGGFAATEELIMILRINNLIGTDKSYGFLPEMARLFEQIAKKNIPPNKPIIGKRIFHVESGIHVDGILKSPMCY

SEQ ID NO: 99584 - protein, 136 aa, Unknown
  Obtained from environmental sample
  DOMAIN (8)...(136): L-rhamnose isomerase (RhaA)
  misc_feature (1)..(136): Xaa is any amino acid
MESYLNPEKIEKAYALAKDAYAAFGIDTDKAISAAVDIPISIHCWQGDDVTGFEGADGLSGGGILATGNYPGRARNGEELRADAEFAFTLIPGEKRFNLHTLYAETGGKKVGRDELEPEHFMNWMAWSKKIKSRWI

SEQ ID NO: 99585 - protein, 273 aa, Unknown
  Obtained from environmental sample
  misc_feature (1)..(273): Xaa is any amino acid
TGQSVHDAQRQYENDRDPGAPLFRFKERALAHFAVEADLVCMCTKLNKKDTYWLPFNQGNGFGAGNPPSPAGRYRTAYLWQESLCRESLLDLLARFIHLEVKTKKIATGKSIKNITTENLIFPRYHQLAAVRGLTGHAREHGAGHNYLIQHSAGSGKSNSIGWLAHHLASLHNAADEKIFHSVIVVTDRVVIDRQLQDTIYQFEHKRGVVEKIDQNTRQLVEALAAGVPIIISTIQKFPFIASALRGLAREGQDISLSTAGKRFAVIIDEAHS

SEQ ID NO: 99586 - protein, 255 aa, Unknown
  Obtained from environmental sample
  DOMAIN (122)...(201): Cache domain
  misc_feature (1)..(255): Xaa is any amino acid
MARIMRANLINDVGGVFNTVENQIKFDLLEPRTILYDFAQTVRSMILYGDDAERLLVYTTEISDRICMREMGRFCGLYGYIEKVKGGPVFLNGLHIESTDINTPEGRPWYEAAITAGGIAETAPYTDLVTGTSIISYSCCIFDDEGAYLGVVSIDVHLDYIGNRVINSALTEYGYGMLVSQDLTVITHSNPDFVGAKMYDPKIPVSIFTDEMVEKGSISEASFINWKNEKALAFTRRLPNGWYLIILAEKDIYYK

SEQ ID NO: 99587 - protein, 282 aa, Unknown
  Obtained from environmental sample
  DOMAIN (25)...(199): Radical SAM superfamily
  misc_feature (1)..(282): Xaa is any amino acid
MDDMTQAQCSFSSSHLREGQFRSFVPIMHGCNNFCSYCIVPYVRGREVSRNPKLIAEEIRLVGERGVREITLLGQNVNTYNWNGGELDFAGLLRLAAAEAEKSGVKWLRFLSANPRDFSRETIRVMAEHRVFCRHLHLCVQHGSNRILQAMNRGYTREHYLSLVKEIRSSMPEISLSTDILVGFPGEQEEDLEETLALMEEVRFLYAYMYHYNPREGTSAYDLPDRVSEETKRERLSRVIALQKKHTSALLKKRIGSREIVLIEGISRKNADELVTRTERDE

SEQ ID NO: 99588 - protein, 277 aa, Unknown
  Obtained from environmental sample
  DOMAIN (19)...(229): Peptidase family M20/M25/M40
  misc_feature (1)..(277): Xaa is any amino acid
NLIATIDGGADDKNTGRLWILSHLDIVPPGEKKLWNSDPWTVIRKDDSPGPRVIGRGVEDNQQGLVSSVITALAFVSGSLKPTRTIKLLFAADEEVGSAFGIEWLVKNHGDLFYKNDMVLVPDGGDIKGECIEIAEKNILWVKFVTHGKQAHGSMPDSGANAFLAGADLATRLHHGLSAKFKKRDSMFDPDYSTFQPTKKEANVPNINTIPGEDVFYMDMRVLPCYSNDSVFAEIDRIKTKIEKEYHVKVEYSLSQSTQSKATDVKAPIVTLLNDAI

SEQ ID NO: 99589 - protein, 192 aa, Unknown
  Obtained from environmental sample
  DOMAIN (14)...(192): Protein tyrosine kinase
  misc_feature (1)..(192): Xaa is any amino acid
MSSEIFPRPFNADFELLGILGKGGMGSVYKARQVKLNRIVALKVLHIEGDSEEEKEAEKRFYSEAQAMKELNHQNLATVYDFGKQDDKIFIAMTFVEGESLSDIIKREKKLTVKRAIYIAWQIARGLEYAHEREVIHRDIKPSNIMIKKNNEVCIIDFGISISTHSQRLTNPGMTMGTPEYMSPEQCQNKNV

SEQ ID NO: 99590 - protein, 283 aa, Unknown
  Obtained from environmental sample
  misc_feature (1)..(283): Xaa is any amino acid
MEREAREAKEREDARLEKEAREAKEIEDARLAKEAREAKEREEAGRMAREEREAKDREESERIIREAREEAERITREAREEADRLAKEAREAKDRETKEIEGARIAREEREAKEIENARLAKEAREAREREEAERAAREAANAKVIEEARLARETREAKEREEAARTAREAREAREREEAERAAREAREAREREEAARLAREAREREEAARIAREREEAARIAREATQQAANTAPQQAVNSTPPPVNVAPSQVAESPGRIFFQEPPLDVKIIPNLPDPGNGKV

SEQ ID NO: 99591 - protein, 267 aa, Unknown
  Obtained from environmental sample
  misc_feature (1)..(267): Xaa is any amino acid
MIEDIQVNLSPVHPRYGRTTGGSVNVATKSGSNTFSATARAYLNKSNAWTANRRGVLDGDFDEGGRYTDNWSTKRYDITLLGPIIKDKLWFSFGTSFTPGSVTNRIMTSWPDYPDINYGPMKFATNATTVPATAAEINQKLLDGPDGYYYPEFDALKHFQERTSRDYYQGKLTWTFFQNHTLEYSFSLEKTLIANRDSTTSATAGYVMMSMLGTQSTENSNWGMNYKGVFGASTLVEARYGSSVSDIQWPNYLHPTIQDPIMIWIGR

SEQ ID NO: 99592 - protein, 280 aa, Unknown
  Obtained from environmental sample
  DOMAIN (166)...(199): Tetratricopeptide repeat
  misc_feature (1)..(280): Xaa is any amino acid
MSGDKSEWSSSQRSLALHIAALQREALGRKQEIAPVVKPEKTEEKPIEEKPIEEKPRGDKRLHDGKRLFRMNQWEKALKEFQLVDGDKLDASEQAELAYYLGLCHTKLERYDEAVLYLEHVVTAGNDAMRSYQCRMTLALIYIKTNRARMAEFELKRLKNAGFTSAPMYNALAYAAYSQKRYHQAIDYYEKTLEIDNNNATAMNSMGYILADRGFDTVRGLTFCRRAVDIRPRNAAYMDSLGWAYYKCGQITEARSWLQKAMESAPKEKEILEHFRMVTG

SEQ ID NO: 99593 - protein, 264 aa, Unknown
  Obtained from environmental sample
  misc_feature (1)..(264): Xaa is any amino acid
ATTIDVLPASPTRTGYTFNGWNTLANGSGTAFVQTTPVSASITVYAQWTANVYTVTFNKNNTDSGSTEPNPATKTVTAPATMIDSLPTAPARTGYAFAGWNTQADGKGTSFVQSTTVSTNITVYAQWTANTYTVTFNKNNTDSGSTEASPATKTVTVPTTKIDALPTSPTRTGYIFNGWNTLANGSGTAFVQTTPVSASITVYAQWKSSNANIRAVSSGASGNAHAPLGTFGLYVGGIPATSNGTPSTTNVITGTGTGAPTNGT

SEQ ID NO: 99594 - protein, 139 aa, Unknown
  Obtained from environmental sample
  misc_feature (1)..(139): Xaa is any amino acid
MEGVTDLPFRRFIRELSKDKQPFFVSEFLSTGSSVFLTPVNIRAVRFEKEEEPFCMQLFGHSAERLAATALQAQELGAAFVELNAGCPAPKIANKGSGSGLLRDLPNLQKILESMKSVLKVPLFLKCRLGWDEKSIVIN

SEQ ID NO: 99595 - protein, 101 aa, Unknown
  Obtained from environmental sample
  misc_feature (1)..(101): Xaa is any amino acid
MNDDFADVMLIRDLIERWAVYRDALLWDKFRTIWHNDGVMTATWTEGPYEDFIKITDEGVKHGLNIMHILGGSAIEARENRACSMTKFMILQRAIVEGVLC

SEQ ID NO: 99596 - protein, 248 aa, Unknown
  Obtained from environmental sample
  DOMAIN (6)...(248): tRNA synthetases class II core domain (F)
  misc_feature (1)..(248): Xaa is any amino acid
IDITAPYGIGTPRSAHAHTPGGLHPITLIIRDVEEVFASMGFIIEDGREIATEYENFESVNIPKNHPARDMQDTFWLSDGRVLRTHTSMWQNYMLKKYGPTFRAICPGRCFRNEATDATHENTFFQCEGIMVGEDISIATLVYFMTEILNAVFNSGQNRGHMAEPSRSAATCHMKETGGIRVRLRPSYYPFVEPGFDLDASCIHCGGKGCPACKGAGWVEFCGCGMVHPNVLREGNVDPQKYAGLRSA

SEQ ID NO: 99597 - protein, 267 aa, Unknown
  Obtained from environmental sample
  misc_feature (1)..(267): Xaa is any amino acid
VFTLSCSDDTSGGGGGDDGGNGGTIADPLNGTWKAGNGETITLNNGSFVISQNNKQGMRGTYTAANARSISANISLAVKELHGDFLTEELKKEGIDKTFESKWFTKEQFIDAFKKILKELGASDADANAYINQHSGDLNSMYPTITGTIDGDTMFLNVDGGTTYTKDGGGQTPGTNPGSGNMTWTRVSSPFSNYEYEFVQAIAWGGNKFVAGSSSGQIATSPDGITWTFAAYPFGQGGGIKGIAWGNDKFVAVGYDKDYSNKIAYST

SEQ ID NO: 99598 - protein, 91 aa, Unknown
  Obtained from environmental sample
  misc_feature (1)..(91): Xaa is any amino acid
KLCELNEYFSKWNKGVFNPNEFKSKITPESQATLEKYKEDHTFIYEDRKIIVSFHLRYTGNIAGRIYFHPDSITRKGIICSLATKLPNVSD

SEQ ID NO: 99599 - protein, 293 aa, Unknown
  Obtained from environmental sample
  misc_feature (1)..(293): Xaa is any amino acid
LTVTASLPEGAAGTLKYQWFRYLTAQSYQDQTGILIDGATDKSFAAPTTADGTFNYYVVVTNEHPRATGKKRNSIKSASVTVTVNDTANAKFPVITRQPEADNEGLTWSNRIVLPALQVEVQEMLDTESDEIRYQWYVSNSLTNTQGATIPGATAPRLIPPVAIQGQEAEEGLIIGPGNYYYFVIVTNYYFLAPGRRESSVASNPVLVSIGTNPNADAPVIKEQPQNAIYFSGDTVKDLTVEADEPEDGGTLSYQWYSNTSSSNTGGTLLTGASSATYSPPVNTSTPSKNYYY

SEQ ID NO: 99600 - protein, 292 aa, Unknown
  Obtained from environmental sample
  DOMAIN (205)...(292): PPIC-type PPIASE domain
  misc_feature (1)..(292): Xaa is any amino acid
SVGKIDGRDISIEHFDRLVNAERNRLHEGGRDVPPMQYRQIPSQVWNQEVSRALLDKAVKSMRLESTDHEIFEYLKRNPLPGLDTASVFQTDGSFDTTKYVQWLSTPQTYTMYPWMVDVERQVSGQVLPGQKLDALLKAGVFVSKSEAAYEFAQRNDKATFEYYMVLGRNYTIDSAAITDKMVSDYYAAHQERFRHDEQADLYFVKIPKIATENDLELNKKSLIEIKRRVEAGESTFEGEAEFESDDEGSAPNGGDLGWFGKGAMVPEFEAAAFALAPGTISDLRQTAFGYH

SEQ ID NO: 99601 - protein, 218 aa, Unknown
  Obtained from environmental sample
  DOMAIN (1)...(153): Calcineurin-like phosphoesterase
  misc_feature (1)..(218): Xaa is any amino acid
MKFAFISDIHANLEALEAVLADIDKKKVDEILCLGDVVGYGANPNECAEIIAKRCKSVLLGNHDAVATGLLTTQHFNVHAKIAIEWTSQALTPSNKSFLAALPVSKTTDILTMAHSTPYEPGMWYYITSLEEAAFNFQFFDTKICLVGHTHIPMIIVLDDEEIYVHAEQQISYKEREDRRMLINIGSVGQPRDRNPDSSYGILDTDEMLFSLHRISYD

SEQ ID NO: 99602 - protein, 237 aa, Unknown
  Obtained from environmental sample
  misc_feature (1)..(237): Xaa is any amino acid
LSGSGVLYSGGIDWILYAWRIENRILPQKKDLYGPVPEGSYGLGNPPPSQFTDYLLRLDETHVKKELDLIRREVAAGSIGKDERERVAYLMETAAVNPWPGDSFSGNNRALINCRIQALQLLGRIGSGETIPWLVLLFRREPDPVVKAAAARAIGNIGIDPDGLAIQEFTAATATWNPVHDEQTLLAVTSATGALCRFSGFPLFHAGLRIFVLLNNSRMPPTVLRQLRREKSSLGIP

SEQ ID NO: 99603 - protein, 284 aa, Unknown
  Obtained from environmental sample
  DOMAIN (188)...(284): TrkA-N domain
  misc_feature (1)..(284): Xaa is any amino acid
ILLGLAVMTTGLGLLGLPAGIGAFLAGMLFSESLYNHQVRADIAPFQMLFVSLFFITLGMGLDLPRLGGNLVAVAGGVVLMMLAKFAAIYFTARLRKTTPKSAFLMALILAQGGEFGLLILQTLKGAGIEAIPLEHGEILTAIIIISMMLTPLLLRLYDKLNDNGVLYSIKAAQKYNDMERPATPPAVIICGFGRVGRTLAKMLSLENIPYAAIDMNTDRVVAGRESGHNVFYGDTTNSEILTDFGLAPRTTKAVIIALDNAAVAKKTVRAAKRAAPRGRYSRG

SEQ ID NO: 99604 - protein, 280 aa, Unknown
  Obtained from environmental sample
  misc_feature (1)..(280): Xaa is any amino acid
VKVTVPQGWKINQNRVPEDFLVPSSIEAIAKGIVFDSVLWSKPIVERNELLNMDLLLLRDTFTVALPIKSIEANYNPYDAKLKFTYQACSKICLPPKTIEISFNPALQKKKVELETKEKSSLPIYILLAFIGGLLLNAMPCVLPILFLKIFDLVKKTGESKRNMLKWGFATASGICFSFFVIALIISGLRLTGNAVGWGFQFQHPAYTAAMVLCLAIFALNLWGVFEIWMPGNVLNVWEKRTKEGGFRGAFAYGILLVLLSTPCSAPFLGTAIGFAFTAT

SEQ ID NO: 99605 - protein, 293 aa, Unknown
  Obtained from environmental sample
  DOMAIN (26)...(293): Pyridine nucleotide-disulphide oxidoreductase
  misc_feature (1)..(293): Xaa is any amino acid
RCSLPSTEKIRHRKKSGNYRGGTRRFTAAWFLAQEGHSVTIFERQENPGGMLRYGIPSYRLPRETLDEEINVIKSLGVEIIYNKEFGKDITVSSLRAADFNAILLAIGSQKGYPLGVDGEKDCPHVLIGVDFLGSVTRGKQPDFNGKKIAVVGGGNTAMDCVRTAIRLGAENVKLIYRRTIAEMPADEAEIEEAQLEGIEFLVLNNPLSVSESGGKVTMKLTKMELGESDASGRRSPRPVAGSEYNIEVDYVISAIGQTQDLSFINSECNVSTNRDCLVIDKNTSMTGIGGVF

SEQ ID NO: 99606 - protein, 109 aa, Unknown
  Obtained from environmental sample
  misc_feature (1)..(109): Xaa is any amino acid
MTKEEIAGVIDGYSNQILGKGGINNELYTKYEVKRGLRDVSGKGVLVGLTEISEIVSYIIEDGDYIPCEGKLFYRGINIEKIVQGFLDEGRFGFEETSFLLLFGHLPDK

SEQ ID NO: 99607 - protein, 187 aa, Unknown
  Obtained from environmental sample
  DOMAIN (1)...(82): Mur ligase family, catalytic domain
  misc_feature (1)..(187): Xaa is any amino acid
MGLKTTGSDTNEVFYTDGILRELGIPFHETFDPAHISDDIDLVIHSAAYSGENNVELAEAVRRNIPLMTYPQALGEFSANFDSTGIAGVHGKTTTTAMAGCLVRGLRLPAQVLVGSAAANFGGRSTLAQGDKYFIAETCEYRRHFLLFHPRRIVLTAVKATIRIITRLMNRSATPLSNTAASFHQAE

SEQ ID NO: 99608 - protein, 68 aa, Unknown
  Obtained from environmental sample
  misc_feature (1)..(68): Xaa is any amino acid
ANIDFYPGFVYSMLDLPEELFTPLFAVARISGWGAHRIEELVNAGKIIRPAYKSVSKQRNYTSMQERG

SEQ ID NO: 99609 - protein, 89 aa, Unknown
  Obtained from environmental sample
  DOMAIN (6)...(86): Plasmid encoded toxin Txe
  misc_feature (1)..(89): Xaa is any amino acid
MSDIVFTPNGFEDYTYWQSVDKSTLKKINNLIKDIIRNGHVGIGCPEPLKGDLVGLWSRRIDDKNRLVYRIKDNGDIEIVECKGHYGDK

SEQ ID NO: 99610 - protein, 279 aa, Unknown
  Obtained from environmental sample
  DOMAIN (138)...(279): Sigma-54 factor, core binding domain
  misc_feature (1)..(279): Xaa is any amino acid
ISQNLKQTTNLALTPAMQLKLKLWQMNIQELSQTIEEELEKNPLLEVPDDLSETPTAEALMEGKESEVLEEAPILEGVEVPEGTESVDLGPLYESAQEMNTDDIEKFTSEGVAQVQETEMGAENAWDIDLPRTSSLPDEDRTSWEDRITSSVTLHEHLLSQLYEAISEDDPRGPLLEALIDHVDPKGFFRLDPDSNVETTREQLAAELGIEAALIPELIDILQEFDPSGVACFNVQESLLVQLRHAGAEPDDLAVRIIKDHTELLGQRDSVKLRKALDC

SEQ ID NO: 99611 - protein, 91 aa, Unknown
  Obtained from environmental sample
  misc_feature (1)..(91): Xaa is any amino acid
MGSYKRNGIPLAIRLTGGNVHDSQEFEDLLDELPKFRNLCGRPSWKPNEVHADKGYDSAKCRFACFRRRIKERIARRGKELGDKLGAPNIT

SEQ ID NO: 99612 - protein, 268 aa, Unknown
  Obtained from environmental sample
  misc_feature (1)..(268): Xaa is any amino acid
VVPHIGNGVYQFSQTNFFPLDNAPTAYNANGRNPGVEFTSGAPLSPGKQWKTDHNFSFTMEMVCEFTMQDDLMFSFTGDDDVWVFINGRLAVDVGGIHSAVKDSINLREKRAALGGLVDKTKYKLHMFYAERHTTESNIKITTNIIFDPTEIGLKVDGSPMVAGEPKLAAGVVKRTDGTRVTDFSKGWFTWTAKDIGPNKNGTTVTGQQITVTNKSGQRCDLNNNCSKKDSIHVTATKAYTYVRIYGEYYDSLSGSRARDSADVWVNP

SEQ ID NO: 99613 - protein, 91 aa, Unknown
  Obtained from environmental sample
  misc_feature (1)..(91): Xaa is any amino acid
MKTVSLYRPNVMENALSGFDRYLDSFFRDNFLDPAERVFNRLPTVDVKETEKAYVLEAELPGLDEKDVEIRLDGSTLTLQSKKEEKEEKEE

SEQ ID NO: 99614 - protein, 110 aa, Unknown
  Obtained from environmental sample
  misc_feature (1)..(110): Xaa is any amino acid
MIILIDTNILLDFLQNRETNGEYANKIIELCAKKTISGFMAAHSISNAFYILRTDYSVKERKEMLLGLCYIIDIVDIDKQKIITSLLNEDFTDIEDGLQIECAKRVNADY

SEQ ID NO: 99615 - protein, 279 aa, Unknown
  Obtained from environmental sample
  DOMAIN (22)...(133): Phosphoglucomutase/phosphomannomutase, alpha/beta/alpha domain III
  misc_feature (1)..(279): Xaa is any amino acid
MASTDGDSDRPLLSDENGVWLKGDSLGILAGMALGIEAVAIPVSCNTAAEKSGFFKEVLRTKIGSPFVIEGIKKLQGKYKSVAGFEANGGFLTESLTTRDALTPIIATIIESKKQNLKISELLAKLPARYASSGLTRGFSVDATDGYRIEFENGDIIHLRKSGNAPEFRCYTESKTPEQAELLSDKCIKAFELWKVMGSKLYDELKELTTKEIKHIEENIAPMNFEMLRDNPKYDEFEKVGKDILKRGKAAAFLIAGGQGSRLGFEGPKGAFRLESLVN

SEQ ID NO: 99616 - protein, 259 aa, Unknown
  Obtained from environmental sample
  misc_feature (1)..(259): Xaa is any amino acid
VYAGSGKAEEVAWFGDNGEIKTVKVGIRAPNEFGIYDMSGNVWELVGDWYGRYDTSSHLDDPVGPPWGNSRTMRGGSWSSSARACRVSNRMSLSQDFRSGDMGFRLAIGTRELKVPEPARPVLAAQPLLPPAPALVAQPTLPVRSSVRVERESPHDHTYKPRKRTSVGLGAFYGGDYGGGIVWPSGEALGMPYRGAGTYMFFDAIYAEVFTGYSAGRGKWVSPFAKDPNNLPDMSRTYLNIGVFAKYPLGGAGNFFPLL

SEQ ID NO: 99617 - protein, 260 aa, Unknown
  Obtained from environmental sample
  DOMAIN (4)...(228): MCM2/3/5 family
  misc_feature (1)..(260): Xaa is any amino acid
MPADILGVSVWRQGEEFDDGVGQNTKGPTVSGRFVYRSGPLVNQFVLVDEINRATPRTQSALLEAMAEGQISVDGKRYALPEPFFVMATENPVEFEGTFPLPEAQKDRFLFSLGIGYPDLESESRILENQRRLSHPVTDIKPVADAQEITPLQDAVSRIHVDPVVRDYLLSLVAATRKEGHLRLGISPRGSLALYRSAQAYAGLNNRNYVTPEDVKEMAGSVFRQRLLLSSEAIVRGAVPERIIQSILDSTPIPEYRTSP

SEQ ID NO: 99618 - protein, 279 aa, Unknown
  Obtained from environmental sample
  misc_feature (1)..(279): Xaa is any amino acid
MITEIKIKNFKSLKSTKSGLNRLNILTGLNGVGKSSFLQPLLLIMQSTKLEKGIIELRGSLADIGVGRDALYQFAQDDKIVFKMTMNDEQYLWECNYQKDADFLEANNKYWGTQIIMIQKMAEQFHYINSIRHGPSDIYPISSDVSEKKQIGARGEYTPYYIYLFGNDYIVPEALRHKKATSETLLSQINAWMKEISPGVSLKTEFIPSINIVTLHYQFDYGNNKTYTFLPKNVGAGISYVIPVILILLTAVEGKTIIIENPESHIHPRGQVEIGKLIS

SEQ ID NO: 99619 - protein, 273 aa, Unknown
  Obtained from environmental sample
  misc_feature (1)..(273): Xaa is any amino acid
FICGKAEEESISSLVSELWYREGYRYETEWNPLTSAYRELYDYLFHLAVKADNANQGLAVFTDSMRTFRDTGGQLTDIEIPLEHTSAVHLMTIHKSKGLEFPVVFLCGCGKHSQTDRSSEVFFSNDAGVVFSAPLPAACYSIPNIKNNFFWEKAKAEIKLKRTAELRRLLYVGMTRAEKELHITGALEIRDEGEIDNFSLKIKNYIEKKCEKNENQIYGDSILDNDTFFGLLLPSIVSRIPPDGLKPDSGNNGDFFNLEEIPVYTEKQIKKQA

SEQ ID NO: 99620 - protein, 229 aa, Unknown
  Obtained from environmental sample
  DOMAIN (82)...(229): Hexokinase
  misc_feature (1)..(229): Xaa is any amino acid
MEITPDADGILLGFSKEVDAPDVIGKAIGKGLREALAGKGCKYDGPIVLLNDTVATLLSGLVSISPDGEAVRAGNDFNASPGPVIGFILGTGFNTAYPETAIPKINFNSASSPQIIVCETGNFNVHCRGQLDREYDSTTKNPGGYFLEKASAGAYLGPLTHHILKQAIIDKVITFKKSSELLAMPHLETRFLNEFAHAPLKAQGPLGSLFEKDEGDALAAVQYITSLVT

SEQ ID NO: 99621 - protein, 266 aa, Unknown
  Obtained from environmental sample
  misc_feature (1)..(266): Xaa is any amino acid
SLSRRFLQIGDVYQIDAAVNSGNSGGPVIDNMGRLVGIVFAGIPNYQGLNFAVPAERLAAALPAMIKGGIAERPWLGLTLCETLTGAEIVYISPNTPAMQHRIAEGSVISTINGKAVTAPQGVLIPAMQDSIFLCGPGELVALETVSESGEIQRHVLMTVARPEYPLLESAKIDSKERIAAALFGMILTPSQSGSFSSNYIIKKVVRGSIADEAGLSEQDPVTIKRLRILADDGFALLEISVKKRRMGYLETSMQLPALLDSPDTL

SEQ ID NO: 99622 - protein, 246 aa, Unknown
  Obtained from environmental sample
  misc_feature (1)..(246): Xaa is any amino acid
LEYYVKADRVIATYQRMRTQPLWRLLASTNGPLVIGLLQSNLYENERSLPASILHERIGRDLEALKAQGEDLPQTVQAYIANWLAEGYLERRFPAGAAEEEYELSTATVEAIRFLSGLEQPHSAATESRLALVIQALVKLAEDTDTDKSRRIERLEAEKTRIEKEIEDIQEGRMRVIPYPSALEQIREIISLADELTGDFRRVRDQFDQLNHELRKSLMDNEGSRGETLVSVFTNYDQITESEAGK

SEQ ID NO: 99623 - protein, 267 aa, Unknown
  Obtained from environmental sample
  misc_feature (1)..(267): Xaa is any amino acid
GEERLPGRMASSTVDEWDNLGKAAGGQRDTYGGHINWRGTGKRLKAKHGWKSDISGKRGGGTDSRGFSALPGGHRRPDDYFFTVGTDGTWWTASGSKHKGSAHIQSMSLSSDDLEEATGNKDYGFSVRCVLGVSDAVEELNEAEEENSEQNEAEQEEQQIEIDSSYLTDERDGKKYRAVRIGGKRWMAENLRYKMNNSLCYNGSLDSCVKYGRLYDWDAAVVSCPTGWHLPFLEDWDSLARAVGGKPRPPGWKGTVDCDDAGRKLKA

SEQ ID NO: 99624 - protein, 299 aa, Unknown
  Obtained from environmental sample
  misc_feature (1)..(299): Xaa is any amino acid
VVGIGLIAVTSLVVLLAIGVKWFSGQLQEHADDPRVTLVGNTIGKAATDETATAEKAGASPPTYNTGTLADKRDAKTYKTVTIGGKTWMAENLNYKPDSGRSWCYDNKEDNCKKYGRLYDWYTAKTVCPTGWRLTSGYDWDNLLLAIGGKRESHISNSDQFFAWEGAGNKLKAKHRWKELQDGSSGNGTDNFGFSALPGGAIFYTDGSFDRIGAYANWWTSAGFDENRAEWLYINYFKDLVVERFDDKGNGLSVRCVADSGDGNPFDSAERKKNGALTQKDAEQREKAADEKIAKLSGI

SEQ ID NO: 99625 - protein, 200 aa, Unknown
  Obtained from environmental sample
  misc_feature (1)..(200): Xaa is any amino acid
MIDLETKAQIRRLFFAEHWKIGTIAQALSLHPQTVARAVGTERFKSLKPAARPDIIAPYTEFIGEILAKYPRLCATRIFQMLRDRGYKHSIYPIRRFIATVRPQKHDVFLRLRTFPGEQGQVDWANFGVVSVGRAQRKLSCFVITLSYSRAMYLEFFFDQKLESFLSAHVHAFESWNGLPRTLLYDNLKTVVLQRRGDNF

SEQ ID NO: 99626 - protein, 79 aa, Unknown
  Obtained from environmental sample
  DOMAIN (33)...(79): Helix-turn-helix
  misc_feature (1)..(79): Xaa is any amino acid
MKWSQAKSIILKNEAVKNELKMNEAEYKIIEEIIMARKEKKLTQKDLAELIGTKQSNISRLESGNYNPSLDFLKKLRWQ

SEQ ID NO: 99627 - protein, 169 aa, Unknown
  Obtained from environmental sample
  misc_feature (1)..(169): Xaa is any amino acid
VNRKNVPGCRPFLRLLIVILLVFFGASMLPAAEAGIDFSIRYFDKRVYYLESDPIYIQVTVTNNSPTTYRFKLADERAFSVDFDVRTNSNRIVDAADILVRKRSQSQQVYFREVAIEAGESFSFVEDLKNYAALTQSGNYVVQARIYPELYHTVRSENAGVCLRNQRHQ

SEQ ID NO: 99628 - protein, 190 aa, Unknown
  Obtained from environmental sample
  misc_feature (1)..(190): Xaa is any amino acid
MQTKAGGVSYDGNVKDSAGYYLRTLPTNTNPDTIINPDYQFTLTAGKHIEIDTKAPEIVKITSSDTGYHNSGDIYINVEFDKPVTISGVPRLTLNVRNGSNTTAQTSTNASDVRVNEKTVTFVYSIKKGDGINTGDTTNGNQVVVSNFSGTITDLAGNPFTNFGGNKSLTGVYIETINPPIPTVRVYPGT

SEQ ID NO: 99629 - protein, 114 aa, Unknown
  Obtained from environmental sample
  misc_feature (1)..(114): Xaa is any amino acid
MRQIGGRGRNDKPFFSDHTGGLWVSLVVPLPDISAHFEHNRAISLAIRMALLECKPSEDAPVLIKWPNDIFWGERKIAGILLENSPKKSNVLIIGFGINVNIAQDDFPISLHKT

SEQ ID NO: 99630 - protein, 288 aa, Unknown
  Obtained from environmental sample
  misc_feature (1)..(288): Xaa is any amino acid
DKLGERVSFLQTACEAAAQFPEDVPKEIWIAKGTYKPANIDDYFSLTPNTSYIGGFAGHETAKSQRNVTANTVTITGNLGGGIYSRRLFAAVSELDGDLSFESLRMTGARGREGAVINAPLDPSSEISVTDCDFSDIQASGTGGTIYVRGGRAVVSDSAFSACNNVALYVHGAGAKITDVGFSACNNDDVVRLDCSGDTEITRVNIEDSSNYAFYLSGNGNKTIETLRASRVGQCLNVQNTTGYLRINGLVMRDIAGVGININGANGVKHFSGISGRNISGSAISCSA

SEQ ID NO: 99631 - protein, 281 aa, Unknown
  Obtained from environmental sample
  misc_feature (1)..(281): Xaa is any amino acid
MTSAEAVEEKKPPAPIAAVQPPPAPPVRPDQPPPAAVKEEPPAAKTPAEEATAAEKPADEKQEASSESEEPPKPPARNQPWITPPPAVSAVKDDAPVPNRQVLVPPKEDNVFSRIVRATVGQLVEIPFRGNNWSYLEDMVSRRGIAYMSRRVDSEGMTFTFRAEEAGTFALRFYRRDYIRDYILYDYVQVIVEEQPDKGRAGNSSIDRGKVTAEPRWPSALEEAEMQRGGARSAPAAESAPGNKNGSSGRDSSASPAQRTTPQVSSANSDSSTQSQGSVMP

SEQ ID NO: 99632 - protein, 289 aa, Unknown
  Obtained from environmental sample
  DOMAIN (91)...(189): 5'-3' exonuclease, C-terminal SAM fold
  misc_feature (1)..(289): Xaa is any amino acid
EADDIIATLAKKCQEEKRQCYILSSDKDLLQLVGNGTFELRPTKVQKNAAPGGSAPAGGAPTGGAPTGAAQNAGPAWEIIGPAEVKAEWGVPPEKILDFLSLVGDSSDNIPGVKGIGEKTALEHIKRYGSLDGIYQNIAGLGSARGKKIAEGKKDAYFSQSLIKLVTDVPLPITDIDKLSAEALNRKAAALVLFREGIRQSAKQLDPNISVTVASIGTKEQTDEQQGYIGTTYSADKSLFGGGVYKIINDIGELKTLLDEAEKQKLLALDFETDSLDAWNSRPIGISLA

SEQ ID NO: 99633 - protein, 234 aa, Unknown
  Obtained from environmental sample
  misc_feature (1)..(234): Xaa is any amino acid
MSFFNQRGRTLAFAAATVIGAVCFSVNAQPAKTSSGAAAATLTDPRNSRTYKTVKIGNQTWMAENLNFQTPSGSWCYNNDNSNCQKYGRLYDWNTATGGKTSTTANPIDVQGVCPAGWHLPSSPEWAELAKAAGGTGTHGEVGIAGERLKSKSGWYMNGNGTDNYGFSALPGGWRDSVGVSRSNRMYGCWWTSSNNKGFGIDRQMGHTDEFVTYGNTNSNKNGFSVRCVKDGKR

SEQ ID NO: 99634 - protein, 136 aa, Unknown
  Obtained from environmental sample
  misc_feature (1)..(136): Xaa is any amino acid
MSNEQWKKKTSAPLREDFLKVFFVSLLILLVSQGFSLNFFDDGPPEELAVALEEAMSDDEALAQVFMLGWVGAEPSPLIMDWIHDRSIGGVKIFGWNTGDTVRLARTVGALQEASLKGKYNIPLLVATDQEGGWIR

SEQ ID NO: 99635 - protein, 120 aa, Unknown
  Obtained from environmental sample
  misc_feature (1)..(120): Xaa is any amino acid
EVRFNTVIKEIKGDKKVGSALLECEGRTYEETADAVFIFAGTSPQSWLVSGESGGLKAELDDSGCIVSDQKMATSVPGLFVAGDVRSGSFRQVIVAAGEGAVAAHSAAAYLDELRGTTYK

SEQ ID NO: 99636 - protein, 250 aa, Unknown
  Obtained from environmental sample
  misc_feature (1)..(250): Xaa is any amino acid
MHHPLLKLADNMETTPSSLISTSELTIHAGIPQNSVSGLPVLETAAFGREVAEHWESGKKSAVNDGVRLGNIYHMGSEEALPVLLDKNSLASHIFITGSTGSGKSNTVYQLLGEITRLGAHFLVIEPAKGEYKNVFGSRQDVAVYGTNPALTPLLRINPFTFPNGNKDASKNIHVLEHLDRLIEIFNVCWPMYAAMPAVLKDAIETSYEKAGWDLPSSTNIYSPVKYPTFADITINIRKIIDSSEYSEKT

SEQ ID NO: 99637 - protein, 276 aa, Unknown
  Obtained from environmental sample
  misc_feature (1)..(276): Xaa is any amino acid
TGLPRLPHLNLGHTGLKSLPDFMSCLRLESLQLNNNELVEFPEWLGSMTDLKELDLSWNEKITTLPQSFTRLCNIEVFDLFGTSITRVPDCVREYKNLKKLYLGGSFELSKTLVIPNWIGELATLEYLFLGRSIKKIPRSIGNLRKLKRIVIYDNKIKTLPESIGNLLLLKELTINFTHLKKFPKAFSNLSSLEKLELIVKAKLKRLPESFGSLRALKELKISYFSGYGMETLPDSFGNLSDLQRLSIDSIKYLPESFGKLSSLEELNIRGNITAL

SEQ ID NO: 99638 - protein, 269 aa, Unknown
  Obtained from environmental sample
  misc_feature (1)..(269): Xaa is any amino acid
MALDTGFSPADILPDLPTVFGSREAYIPSNFNNRFNGPVRLRIALASSLNIPAVYILERLGVHAFEEYLVSLGFDSILETIGTHGTGLALGNAEVSLEEMVRAFSVFPRMGTPVKLRWTEDGKPEQAAPPVMSPYAAWMIADILSDRSSRFVGFGPAPTLATPFESMFKTGTANQFQHIWALGATKRFTVGVWMGNFSGETIIGSTGSSIPARIAAKLLGVLEESIGQEQEKSRASNRITGNLAGSLPPGTTEARICALSGMAAGPYCT

SEQ ID NO: 99639 - protein, 268 aa, Unknown
  Obtained from environmental sample
  misc_feature (1)..(268): Xaa is any amino acid
MSDQLQLDLETEEPVFEKENYLTQQLITYIGNKRALLGFIGAGIKKVQKKLNKEKLIMFDVFSGSGIVARYFKQFSKLLIVNDLEKYSTLINECYLSNDDERNEFTLRKYYYELAEQAENNLVKGIISELYAPKNDKKIKQKERVFYTTRNAMYIDTIRQLINNIPKEHQKYFLAPLLSEASIHANTSGVFKGFYKNKKTGIGQFGGINQDALFRITGDIKLPFPVFSNFNCETMICNGDSNEIIHSLPETDIAYLDPPYNQHPYGSN

SEQ ID NO: 99640 - protein, 283 aa, Unknown
  Obtained from environmental sample
  misc_feature (1)..(283): Xaa is any amino acid
MVTSEDEMVKKVRNFIDKEETLVLARYTPKEISKLLDEVGGADKFNSGEIEKSIVNMYGHLMGHVQRGVNELETLTNGLLRQKMDTGAFVRGENAYSIVKCAFTDSVDKPKNVTDVKLSINIIDSELISPIFHYQVTQDYLVRDLLSKYIIDTIDRELEKLKEERVEKGHEELSDAEVIFAKVGRVELHTDDDLDNEKAKRYKLVSKAIIDKLNGLRAEIDPETFDQMNIRENLKKIIDIENIRNRGFNTAINSITSILDTSNMGYQYIENLKNGRGVIIREY

SEQ ID NO: 99641 - protein, 220 aa, Unknown
  Obtained from environmental sample
  misc_feature (1)..(220): Xaa is any amino acid
MRICFILPSYNITSGKTVKGSKVWIHGLTLPLLAAFVGKEHSVTLVNDYVQTLPDKNSIDVFFISIMGSVLDRAGELIKSLKTDNNYIIVGGKTLNETSSDYASLADAIVLGEGETLIGQILADIQNKKLKKQYGDPLLRTSLEDLPVPRYDLIDKRYHSSIFPVEATRGCENTCSFCYIHSWSKGVFRKRPVEQVIRDIAYIKTLRVRRLLFVDDNLFS

SEQ ID NO: 99642 - protein, 199 aa, Unknown
  Obtained from environmental sample
  DOMAIN (7)...(192): Radical SAM superfamily
  misc_feature (1)..(199): Xaa is any amino acid
LEKEYYIRIAEGCVSNCSYCALPAAIGRLKSKSASQCLAEFKQGLEKGYKNITITAEDSGAWGSDFAKNKDDSSPAASNIAELLKQMLDCGKQYGNDYSLLLCSLNPVSLKRYLEPLAEIFCNPLIRFAAIPVQSLSPRLLTLMRRFPDVNAIKESLITVRSKSPDLWISTHLLVGFPSETIEELRETMMLWEELPLAK

SEQ ID NO: 99643 - protein, 273 aa, Unknown
  Obtained from environmental sample
  misc_feature (1)..(273): Xaa is any amino acid
VTSATPPVVENGVAYLPYAFLRERVDPFLFWDEYAYTLFKTTSAEMTRLMPGAMEYRVGGEKFPLATPVRVIDGKPYIPADTAELLYPLSVEYAPENDMVIVTLDSEPPSLGAVTKKTDIRYRPDGDAPVSRKAEKDEQLSIYNEENGFARVRTHDGLLGYVPSAALKYDEPPMPAPAALPAPAPLWPAGVKVNLMWEAVYSSEGNEAMMRTPLPEGVNVIAPTWFNVDGETLNVRSLGSAEYVEWAHGQGAQVWGVLQDEKSNVTHAFLTDF

SEQ ID NO: 99644 - protein, 212 aa, Unknown
  Obtained from environmental sample
  DOMAIN (95)...(180): Translation initiation factor IF-3, C-terminal domain
  misc_feature (1)..(212): Xaa is any amino acid
LLPPRGRPQPNRPKDGIRINQEIRVPQVRLIDAKGAQVGIVDIQRALQMAKDSELDLVEVSPNATPPVCRIIDYGKYRFEQTKKQKASKAHQQSTRQTKEIKMHFQTASNDYRYRMVQAQEFLEKGFKVKVLVQFRGRELSRMEFGSPLIEQAKKDLAPFGDIEELKVDKCFAISVSPRKGVVKKKETHKPANESKDSATEQAKHETEQKAA

SEQ ID NO: 99645 - protein, 262 aa, Unknown
  Obtained from environmental sample
  misc_feature (1)..(262): Xaa is any amino acid
NIGNIRLCKINEMVYQKDEYSTYKCASVFNSVQNLNCGVFIIADSNGQKTDFYMGVRSLDDKRTTKSLKDTLKNALCGQFPGVKTEDLLDSAAEKFLNNIQSKNITAVSCVAKNKDEEFTDNERFIQGLEKLALAMQGQRYTAVVLAKSTPSSLLAETRRAYEIIYTQLSPFANIQLSYGTNSTNNITDAFSYGKSKGKTYSTNISDTTGTSKTTSKSKTTSKSVTKENKLSQVMGAASAITGAAASAAGVAATIASGGTAT

SEQ ID NO: 99646 - protein, 293 aa, Unknown
  Obtained from environmental sample
  misc_feature (1)..(293): Xaa is any amino acid
IRSKIKEKLNQVCLAYNGPQYENKEEALIHTGVVSIEAAIRQYVQKYAKTAKIKNIVDTFTTKLYELDCFEKTKQELAKHQDEHEIIAKQIDSIQEKIDSAKEAQKFEDAVNKAVVKVNNESKDVIDGIIQEFQSNITKLIEEIGNQEIEINKVEDEIGRLEKSAETLVVDFKVKLDDLIRANLVNTSNVLLKGYRNKLASLVEEIDIKDLAGLTIDPLKLMSGSITYDVSLTMNLVKTKDIKDGEQYVETRGWFESIAFWPKKEWVTKYKTVEYVKSDELAQAFFEPVQRNF

SEQ ID NO: 99647 - protein, 264 aa, Unknown
  Obtained from environmental sample
  DOMAIN (56)...(264): ABC transporter transmembrane region
  misc_feature (1)..(264): Xaa is any amino acid
MSDSRNNQGRPPVRGPGPGPMGGGPGQFAAMGAKARDFKGTMRQLAAYVKPYRFTIAGVWILALVSTAFSIVGPKIMGEATDVLVAGITQRASGTGIIDFNRIASILIWLLALYIISALSSWLQGFIMAGVSMKISYTLRDNISQKIHRLPFTYFDGVTHGEVLSRLTNDVDTVNQSLNMSLTQIITSVSSVVGILIIMFSVSWILTLISLVFLSSSVIFIRLIVKQSQKHFKAQQKSLGKVNGHIEEMFSSHVVVKAFSGEDD

SEQ ID NO: 99648 - protein, 270 aa, Unknown
  Obtained from environmental sample
  DOMAIN (1)...(254): ABC transporter transmembrane region
  misc_feature (1)..(270): Xaa is any amino acid
MSQLVNTVLAQHPADGDGSILRLGLGMLGIALTGGGAAVLVSFLSTRIATGVARDLRYAIFQKVETFSSHEFDSFSTASLITRCTNDVTQIQGIFIMGIRMLCYAPIMGIGGIVMTVSTAPSMSWIVVLAVVVLIGLVVLVISIVMPKFKVIQALVDTLNRIAREILNGLMVIRAFGAEDHEKKRFDKVNKDLISTNLFVFRVMALQMPLMQFIMNTAILLIIWNGSHQIAANTMGVGDMMAFIQYTMHIIFSFLFLSMMFVMLPRTAVS

SEQ ID NO: 99649 - protein, 162 aa, Unknown
  Obtained from environmental sample
  misc_feature (1)..(162): Xaa is any amino acid
LLALKLFFPFKKDTANSKAVILKTLIKDAPILGAYGLGYASSMILFVIANKLTASANAIMLQYTAPVWAALLGWIFLRERPGLEHFAAMAFVGLGMFFVFRGGLAAGSLLGDILALASGVMFAANPVLLRAREDKNPADIMLFSHITCALVSAPFFFLFPPA

SEQ ID NO: 99650 - protein, 262 aa, Unknown
  Obtained from environmental sample
  DOMAIN (116)...(261): Stage II sporulation protein E (SpoIIE)
  misc_feature (1)..(262): Xaa is any amino acid
MFINTPIKKLTRGVERIELGNLEMKLDIKSNDELGQLARTFNKMTSDLKKAIDENLHEREEKNRINTELAVAREIQANMLPASFPAFPLRNEFDIFAEMIPAKEVGGDFYDFFLIDDDNLAVVIGDVSGKGIPASLFMVNTKTLINYFSSDKSPKDVFNLINKKLCKNNEACIFVTSIMGIYNIPAGRFVFVNAGHNPPLLKRSGGSFEYLKTKPQIVLAVMEDTKYAQEEITLNGGDTLYFYTDGVTEAMNRAKEFTGRQA

SEQ ID NO: 99651 - protein, 99 aa, Unknown
  Obtained from environmental sample
  DOMAIN (17)...(99): 6-O-methylguanine DNA methyltransferase, DNA binding domain
  misc_feature (1)..(99): Xaa is any amino acid
YFKKDRKDFDLSLIIHGTDFQEKVWKALQKIPYGQTRSYGELAAMIGNPKACRAVGMANNRNPIAIIIPCHRVIGHDGSLTGFGGGLDIKQKLLDLEKR

SEQ ID NO: 99652 - protein, 258 aa, Unknown
  Obtained from environmental sample
  DOMAIN (94)...(258): Domain of unknown function (DUF323)
  misc_feature (1)..(258): Xaa is any amino acid
IYYRTVTLNSVTANGSSTQTTTQLTLTFDNAIDGLSASDITLSGVSGVIKGTLSGSNPYTLPISVFPSGGNLNVAVAKSGYIINGSQKTVAIYVAVEMIQIPGGSFQMGNNYSGYTHERPEHTVTLSGFYMGKYEVTQEQWTAVMGSNPSYFTNSPASGEVQSKRPVEQVSWYDALVFCNRLSVLEGLSPAYRISGSTDPAKWGNVPTSSNSTWDAVEIVAGSTGYRLPTEAQWEYAAGQPHGSEMNLEQVAWYGKNQ

SEQ ID NO: 99653 - protein, 255 aa, Unknown
  Obtained from environmental sample
  DOMAIN (18)...(199): Peptidase family S41
  misc_feature (1)..(255): Xaa is any amino acid
MQKGEIPEPTVYLDSLDGIPYIRVYSYKKSSNNPNGTYAEFRNALQEIKGAKAAIMDLRGNPGGNIGHCTAMAAELVPLDRELVYDVEHYRDNKKGKNVVETSHEYARDYLKQAGIGINTKWVIMMSRGSASCSERFTAAVKYNRPETVVIGQTSYGKGVGQIYTRTYMGGLAYITCLQTYYPNGETFHNIGIIPDIPIEIPIELQKGMPDPKNVDAYNAYIVAYDAYMATLKNEAIKAARSLGAAAKPLNMSAS

SEQ ID NO: 99654 - protein, 137 aa, Unknown
  Obtained from environmental sample
  DOMAIN (51)...(128): OB-fold nucleic acid binding domain
  misc_feature (1)..(137): Xaa is any amino acid
MQNEFVKVRLGKLEKMREQGLNPYPYKFLVTCNSNELKEKAEEFIANNKEVSWAGRIVRYNRKGKMCFMHLKDAHGRFQVLAVASELSEIEYEVVKSMDIGDWVGTSGTVMKTNSGEYTLQAKKIEIISKAIYPLPI

SEQ ID NO: 99655 - protein, 88 aa, Unknown
  Obtained from environmental sample
  misc_feature (1)..(88): Xaa is any amino acid
MTTQSILHDTAALRASRGLGITGMGLQKTIERLTTGLRINRASDDAAGLAISNSLGADIRIAAQGRRNAFDGISYLQVADGVLEEVNS

SEQ ID NO: 99656 - protein, 264 aa, Unknown
  Obtained from environmental sample
  DOMAIN (4)...(158): Glycosyl transferase family 2
  misc_feature (1)..(264): Xaa is any amino acid
MLLSLAMIVKNEEETLAHCLESVKPVVDEMVIVDTGSTDKTVEIAKEFGANVHHFQWCDDFAAARNESLKHCRGEWVLIVDADEAIDPLDYEKIKNACLNPFADAYELIHRHYFYDSTRTSQDFASVPNTSPYSEGSHLSFYADNSALRLAKMFDGLAFSDSIHESLHHTLLGSGKTIKDLGVALHHYGNLFKDKKEYKLQYYLWLALKEAEKKPRSMDAQFNLMQQALAAEKWDLALETTDACLRLSPMVDSLVLYGRAKALQ

SEQ ID NO: 99657 - protein, 161 aa, Unknown
  Obtained from environmental sample
  DOMAIN (5)...(35): Flagella basal body rod protein
  misc_feature (1)..(161): Xaa is any amino acid
MIQGIYTASTGMTALAQKQEQIANNLANVHTMGFKQSGLFTIAYQKLVKDDNDRVFANRDIKVDQVYVDYSEGTMRQTNNDLDLCLKGSGFFKVVTDAGIRYTRNGSFSIDAQGLLVTDDGSKVMGTEGFIRVEPNEKVNISETGEVMQNGYSQGFLKIVD

SEQ ID NO: 99658 - protein, 141 aa, Unknown
  Obtained from environmental sample
  DOMAIN (18)...(114): Histidine kinase-, DNA gyrase B-, and HSP90-like ATPase
  misc_feature (1)..(141): Xaa is any amino acid
MTIRILPQNLVNQIAAGEVVERPASALKELIENSLDASATEIDIIARDGGKTYLSVMDNGCGMSETDLERCALRYATSKLPEDNLSCIANLGFRGEALPSIASVSRMTITTNNGSGGLCLSIDGGAAGEIRPARMGRGTKV

SEQ ID NO: 99659 - protein, 168 aa, Unknown
  Obtained from environmental sample
  DOMAIN (12)...(168): Phospholipase/Carboxylesterase
  misc_feature (1)..(168): Xaa is any amino acid
MKTVREEGLLGMVPDDARAALVMLHGYGDSAGGFFGLAPEFAARVPGLAVFAIDAPYENERPEAAAFGGRQWFSLDGFWEGKFKPGEFSAAARKNVPYVKGAVARACEIAKIPAEKVFILGFSQGATVALSYALTGGKKTLGAVSISGIGDFMASEITDRPPVLSLHG

SEQ ID NO: 99660 - protein, 221 aa, Unknown
  Obtained from environmental sample
  misc_feature (1)..(221): Xaa is any amino acid
MGFNGFSINMMTLLALASALGTLIANAIILIESSLMLMDEGMDPETAAIEGAKRTIVSIIAGSGTNIVVFMPLAFMNGIMGLFMNQFGMTVVYLTLTSLMFSFSLTPMMIAKLLRPHGKPKTKTTRQNVEKSLSWYRPYFDSQMKHPWPWVGLATLALVGSFFLLKLVGNEFMPSADTDEINIFARAPMGSTYEKSHDLATAIEKKLAEFPEVKSVSIKIG

SEQ ID NO: 99661 - protein, 206 aa, Unknown
  Obtained from environmental sample
  misc_feature (1)..(206): Xaa is any amino acid
LQSEVDFVYRQEMGAFFDKPEKIRDLYEQFIDDQNGIEKFIRKNAKKSVKISDEQVARIIMLLEAQKFMLFSFTSCAWFFNDISGIEPAQNLRYALRAWQLTFPYVKSNSVLREFILILQQAKSNYPNLDGQKIIEKEALPMVNHLERVAFSIAVNHYLYGIYSGSNKFTLDDYSYAANVDKYEEDRVFDKRTWRIYSADIVHKIS

SEQ ID NO: 99662 - protein, 233 aa, Unknown
  Obtained from environmental sample
  DOMAIN (26)...(197): Calcineurin-like phosphoesterase
  misc_feature (1)..(233): Xaa is any amino acid
LISSCSSISTKTYQVKTDLLEEQTVIKIALISDLHSTIYGKDQSILINKVKDVKPDLILLSGDIFDDVVPMTGTELFLAGIYGIAPIFYVTGNHEYWTHNMREIREKLASYGVIILSDAYTIIEINNNEIVIAGIEDPDKKLYETPEYNQNESMEKAFRELDEIYLYKILIAHRPERIEEYKKYSFDLVLSGHAHGGQVRIPYIMNGLYAPHHGLFPKYAGGVYTHGKLTHII

SEQ ID NO: 99663 - protein, 181 aa, Unknown
  Obtained from environmental sample
  misc_feature (1)..(181): Xaa is any amino acid
MNHVHVKNPVLPGFNPDPSALRVGDDYYIAVSTFEWYPGIIIYHSRDFINWEIAVRPLTDTKTVSLYGNPDSCGIWAPHLSFSNGVFYLVLTDVKNNVFFKDTLNYVMTAKNITGEWSTPKLINCSGFDPSMFHDDDGKKYFLNMLWDYRPEYPSFHGIIMQEFDAQDNTLTGERKIIYEG

SEQ ID NO: 99664 - protein, 202 aa, Unknown
  Obtained from environmental sample
  DOMAIN (25)...(148): Oxidoreductase family, NAD-binding Rossmann fold
  misc_feature (1)..(202): Xaa is any amino acid
MSDKFDGMKNGMNYAPKGKPNPVVKKGEFIFSAIGLDHGHIYGQCNGLIEAGGTLKSVYDPDLKKVDRFCEAFPGVKRAASEDEVLGDKEVLLVAGAAITSERCALGLRVMSAGKDYFTDKAPLTTLEQLQAAKAKSKETGKKYMVYYSERIHVESAVFAGQLIEQGAIGKVVQVLGLGPHRLAAPSRPDWFFIKTTIAAVF

SEQ ID NO: 99665 - protein, 238 aa, Unknown
  Obtained from environmental sample
  DOMAIN (67)...(231): Peptidase family M28
  misc_feature (1)..(238): Xaa is any amino acid
MLLPYLKGIPWQRFMDFISPEADRLAILKETLKEAELEYKVTEIAGSRHIIVTPPPLEQLKSIGHCLPTILVAHYDRADGSPGANDNSAGVFLLIETAMKLIKKNKSHWLVIFTDREEIKSGGKLQSQGAYGLAEYLKKIKMEKSKIFSFDACGTGDTLVISTTLESLLKKEGSGEKLRDSILELRKYALDAARNLNMAKVLLAPTPFSDDAGFIRAGLIAQTVTMLPSNECITLVAE

SEQ ID NO: 99666 - protein, 276 aa, Unknown
  Obtained from environmental sample
  misc_feature (1)..(276): Xaa is any amino acid
NAQGELMDEAGYSFSWNTSSAQGIDFDSWSAKYIHNPNDNSGRIDVSYKQTGADDFRLYYRINRSSGKDIANNIINGVTGPDYSGIRTGRQVTGINEYEINIELYKDGIMENKASIKIWNIPGMSVEYNRAQNIDTRIITIRTAEELAGIKDNLDGLYAFANNITVTGEWTPIGTESTPFTGKLYGNGHTITFNSDFNIGEETNHIGLFGYAQNAVIRDFTFDYNSPVKNINVYYTDCFIGGVAGYLKDTAVSNVITSGRILSIADAGYGYGTIRL

SEQ ID NO: 99667 - protein, 244 aa, Unknown
  Obtained from environmental sample
  DOMAIN (30)...(243): Aminotransferase class I and II
  misc_feature (1)..(244): Xaa is any amino acid
MYISKLASTSEANVLQTLEERKTAAMAKGVDIINLSAGTPDRPPADHVMKAIREASKNPLNYKYTLIDPPSLIDAARNWYKTRYGVDITKDGILSLYGSQEGFTHIFHALCDPGDLVIVGTPGYPIFSFGPLMAGAKVYHTPLLPENEFLIDFDAIPVEIAKKARVIVVCYPSNPLGAVAGKDFYGKLVAFAKEYDIVVIHDNAYSELVHDGPPGGSFLAVPGAMDVGIEFNSLSKSYNLTGLR

SEQ ID NO: 99668 - protein, 249 aa, Unknown
  Obtained from environmental sample
  DOMAIN (9)...(148): GTPase of unknown function
  misc_feature (1)..(249): Xaa is any amino acid
CRPAQCRQSTLFNALTKAQNAEAANYPFCTIEPNKATVPVPDSRADRLAELVKPQKTMYAAVDFIDIAGLVRGANKGEGLGNRFLANIRECTAIVEVVRCFDDENIAHVDGGVDPVRDMETIATELLLADMESLGKKLERLHKQVKGDKELARAMEECTKLLAHLDGGNPASSFPLPEHNEPFRQVWQELSLLTAKKIIYCANVDEAGLTEDNRHVQALKKSADSRRAETVKICARLEEELQGLPEADQ

SEQ ID NO: 99669 - protein, 96 aa, Unknown
  Obtained from environmental sample
  misc_feature (1)..(96): Xaa is any amino acid
MSDSLIIIPTYNEKENVEAIIRKVCSLPKEFHILIVEDHSPDGTADIVKRLMSEFPERLFIEERTGKLGLGTAYIHGFKWALQRNYDYIFEMDADF

SEQ ID NO: 99670 - protein, 242 aa, Unknown
  Obtained from environmental sample
  misc_feature (1)..(242): Xaa is any amino acid
FCASSNRQRIENVAFLDVDDSAIFYNGVFPWPRSIPAEGLLRLKEYGSLAVIFDIEFIDRGPQGVDTIYLNQGLGSDFDRSFSEIGAAAKDIFSAISAGRMGRNDIEYLSDSFIDIINTERKNLYSRAQGVARDNDLYLAQAIALNNNGWSTLNLRAVPLDGEQAERRQVAEELFAYPVKAADDASHGGGFTDILTSLPLLAKAAKGAGYTNVEIDNDGVRRRVYLTQKFMITGIFSFLLPL

SEQ ID NO: 99671 - protein, 256 aa, Unknown
  Obtained from environmental sample
  DOMAIN (5)...(133): ATPase family associated with various cellular activities (AAA)
  misc_feature (1)..(256): Xaa is any amino acid
KMGISPAKGILLVGMPGCGKSLTSKAVAAFFGYPLLALDLGTLMGKYLGESEGNLRRAISLAENSSPCVLWVDEIEKAFAGVGGDESGVSQRLLGYLLTWLNDKKSQVFVMATANDVAVLPPEFLRRGRFDEIFYVDFPNERERKDIFKIHIGKVFGKNIVKEMEEGKLQELLEQEKISKEKLIEKLGKKKFDDVIKNNDIKKSFDDLTRDKKREDKKKDKKTNPETKSYTSSDIEALVEAAIERRIINPNQDKKH

SEQ ID NO: 99672 - protein, 166 aa, Unknown
  Obtained from environmental sample
  DOMAIN (1)...(161): Divergent polysaccharide deacetylase
  misc_feature (1)..(166): Xaa is any amino acid
MEAIGGQDPGPGAIYAGMNAAEITAILKQNIAEIGPVAGMNNHQGSRITTDQQTMEIVLTFCREQGICFLDSRTTAQTAVPVAARNMGIKIGERNIFIDNEQNRPSMNRYIESGLAVASQKGNAVMIGHTWSPELAPLLAELYQNIIAQGYALAVASDFINQHTSP

SEQ ID NO: 99673 - protein, 282 aa, Unknown
  Obtained from environmental sample
  DOMAIN (55)...(282): Glycosyl hydrolase family 3 C terminal domain
  misc_feature (1)..(282): Xaa is any amino acid
GEDAIDTALTRLLRTRFKLGMFDPPNKGKYAKLGRKVINCEKHKQLALRAAEKSIVLLKNDNNLLPLDSSPKVITVAGPSAANAHALLGNYYGISPRFVTILEGLADKVQDRFGINLNYRQGCLMYTDINKSNVVYGEANTTDIVIVVMGLDGAIEGEEGDAIASDSNGDRTAIELPPWQLKFLKAVRAAGKKIILVLTGGSPIAFPEDLADAVIFAWYPGELGGKAVADIIFGDTVPSGKLPITFPASTDQLPPYEDYSMKGRTYRYMTEKPQYPFGFGLS

SEQ ID NO: 99674 - protein, 209 aa, Unknown
  Obtained from environmental sample
  misc_feature (1)..(209): Xaa is any amino acid
MARRYGYIDPLLSNLAVDYSQKVREGLVGPIVFPRVPVPKPSGKYAKFDKEAAFKVPDTTMAGERSQANEFHASAKTVSYATTPHGLKSFIDSSDLEFMDGPFKTWEKRKTELLVSKLELAQEQRIAKKVLNLEGRFCRLSGTGKEKTNKWADGKGDPYQIIKDAIAMLFYRPNILLFNEAVYDALEYHPILLDKLGEANLIKKVDEAN

SEQ ID NO: 99675 - protein, 211 aa, Unknown
  Obtained from environmental sample
  DOMAIN (69)...(211): SMF family
  misc_feature (1)..(211): Xaa is any amino acid
MAERGLLDLIISFLPDISYREKITLCEALGDEADLIRKSGSDIEALIGRALNARDIDSSRLAAEQAAGKARARGINMVCWQSPLYPPLLREIYDPPVLLYFRGKLPNPESPLAAIVGTRKPSPASSAQAFDIARGLGRGGISVVSGLAIGIDACAHRGNIEGGAPTVAVLGSGVDEIYPSSNRVLALRILETGGALISEYPPGTGPRQWTF

SEQ ID NO: 99676 - protein, 101 aa, Unknown
  Obtained from environmental sample
  DOMAIN (1)...(101): Glycosyl transferase family 4
  misc_feature (1)..(101): Xaa is any amino acid
MVSGAYDDFRPMSPSYKILLQLVLAVLIIFKGFDFDRLLYTGGGFLSNLSYLSIPITVFWIVGITNAFNMIDGVDGLAGGVSVIIAFFMGLIFFYLNRKRQ

SEQ ID NO: 99677 - protein, 259 aa, Unknown
  Obtained from environmental sample
  DOMAIN (13)...(160): Anthranilate synthase component I, N terminal region
  misc_feature (1)..(259): Xaa is any amino acid
AQKSSGANLIIPVGVRILADTETPVSVLSKFMDESSLFLFESVEGGEHWGRYSFLGFSPHLEIQVFSSIVKVNKKGKIDEIPHNGEPLDVLRKIASEYCHAELAGLPKFKGGFVGYFAYEMVSFFEPRVKSKLPPDQPLAHFILPEILLAFDNVHHTLDLMSFAFSEDDFQNAKERLNTTLKKLTNPIPHTPYPIPQKSAHIPQPLMQPEDFKAMVEKIKKHIVAGDIIQCVPSQAFVCDAPPNLLGLYRAQRFINPSP

SEQ ID NO: 99678 - protein, 96 aa, Unknown
  Obtained from environmental sample
  DOMAIN (4)...(95): Cytidylyltransferase
  misc_feature (1)..(96): Xaa is any amino acid
MKAAFPGSFDPPTLGHLDIIQRAAGLFDELLVVVAVNKQKKYLFSAAERIKMIRQLTKDFGNVSVTSCDSLIVNFLRKRGHKAPHPGHTRNGGFFL

SEQ ID NO: 99679 - protein, 162 aa, Unknown
  Obtained from environmental sample
  DOMAIN (4)...(162): CobQ/CobB/MinD/ParA nucleotide binding domain
  misc_feature (1)..(162): Xaa is any amino acid
MTYSIALAGKGGTGKTTVCGLILDHLVKAGKGPILAVDADANSNLNEVLGVAKPVSLGEIREDVARSETPGMSKQEYMDFRFDDALTEEENYDLLVMGRTQGVGCYCFVNDVLKEQLRKYYKNYRYLIVDNEAGLEHISRGILPPVVLILLVSDCSRRGIQA

SEQ ID NO: 99680 - protein, 124 aa, Unknown
  Obtained from environmental sample
  DOMAIN (1)...(76): Single-strand binding protein family
  misc_feature (1)..(124): Xaa is any amino acid
MSLASNRFYKQDTGFEKEVSFFDVETWSRLAESCYAKGKKGRGVRVVGRLKQDRWTGADGKPHSRITIIAEHVEFRPEFKKEEKPVTGSAVVNQDVNSYDYYPDEENDEAVMRIPDKEMEPVVF

SEQ ID NO: 99681 - protein, 251 aa, Unknown
  Obtained from environmental sample
  DOMAIN (74)...(251): Carbohydrate kinase
  misc_feature (1)..(251): Xaa is any amino acid
DVTLAIEPQKSCIYNPAARPYAGIILPVNGIFPKEIIDHFRNCKRGTELLDWESACLRVPKVKAYAHKYERGCVEIRAGAAGTTGAALIAARGAQAAGAGLVRLVLDDDIYPILAPGAGGIMVSPVSGKFQDFEGKFTPDAILLGPGWGRAESRAPVLEKALQKEKAGTPLILDADAIELSKNAKFNGNAILTPHPGELSRFSGIEKDDLLCRPAQALLKLSQEINAVILFKSHVLYIASPDGRLGIIDGM

SEQ ID NO: 99682 - protein, 271 aa, Unknown
  Obtained from environmental sample
  misc_feature (1)..(271): Xaa is any amino acid
ATINVSSNTGFTGKVSWVTDATGTIPAGGGTFEANKDYFVKIVLTAKPDFTFTGVTTTADTFTVNGAVSTTAVIESVPADGSTYTFVATLKKIVPAANITETAPVRATGSLNTTVPTPTGVTVTMKWYNADTNAEVSGTPAAYTRYKVEYTLTESAGYTLTGVNTSGFRVNGQAATYTAPAGDNKATITYTFPRTEGAPITTSNTITIPTLPKVGVTIPAETSITAVPVTYSAKVSWVASASNTAAAVTPGNFLANTDYFAKIVLTAKPRL

SEQ ID NO: 99683 - protein, 261 aa, Unknown
  Obtained from environmental sample
  misc_feature (1)..(261): Xaa is any amino acid
MPRVAAGGNFAAGTPYTATITLTAASNFTFDGMDANPFIVAGASSVSAPTGSGSVTVVTAEFLATADPNAPTVITAGPIAGITRPVVGVTPVTQVTATSQYTGSIEWRPSVTGTFLENTQYTAIISLSPINDGFTFTGVGVNAFTVTDATATNAANTGFVTAVFPKTKTTITNKNITGLIAPVTNNKPTYSFDADPQFGGSVIGWDLQFSAASAFLGQAEYTATIRLDPIGDYTLEGITSSTFFTVAGATETTYDPATKLS

SEQ ID NO: 99684 - protein, 84 aa, Unknown
  Obtained from environmental sample
  misc_feature (1)..(84): Xaa is any amino acid
MVWVVKAELKENYQVFIEFNDGTAGVIDFYEKLQNDHRQIIRELLDLEKFRKLKTGMDTICWDNGVDFAPEYLYEQIKIQQKVA

SEQ ID NO: 99685 - protein, 263 aa, Unknown
  Obtained from environmental sample
  DOMAIN (1)...(229): Transposase DDE domain
  misc_feature (1)..(263): Xaa is any amino acid
MRGSGKAGEREALHIVSAWVGEQDLVLGQLATDEKSNEITAIPQVLELIDIRGDVVTIDAMGCQTAIAEQIRKKQADYILAVKENHPTLCQDIRDYFDYLEQGPGRNVPAEQWDSPLEKDHGRIERRSVSAVTSLDWLEGKDAWKDLAAIIRYRTSRTVGEETAVTDQYYISSMAASAETFGHLIRGHWSIENRLHWSLDVLFREDACQVRKGRAPENLNVLRKIALARLRATPVEKKRSSMKRKSFKAAINPQFLLSVLFGK

SEQ ID NO: 99686 - protein, 163 aa, Unknown
  Obtained from environmental sample
  misc_feature (1)..(163): Xaa is any amino acid
MPVFNRLTVTQKALVALFKSDRTIPFSITVVDNGSEQELVRKLRKFYEDKIIDKLFLLPKNMGISCACNIGWEMTPADFYCKIDNDTMPVRSDWISSLFRLWRHGESLSSLGYASTQEELLRNTGAIHTDEGILGICRGTLAGTGIFIPKAVSDILGYGTKNM

SEQ ID NO: 99687 - protein, 269 aa, Unknown
  Obtained from environmental sample
  DOMAIN (31)...(269): DNA gyrase/topoisomerase IV, subunit A
  misc_feature (1)..(269): Xaa is any amino acid
MNEFQENVPVSIIDEMRKSYLDYAMSVIIGRALPDARDGLKPVHRRVLYAMHDLGNTYNKPYKKSARIVGDVIGKYHPHGDSAVYDTIVRMAQDFSMRYPLVDGQGNFGSIDDDPPAAMRYTEVRMARLSDELLADIDKDTVDFGPNYDDSLTEPLVLPARFPNLLINGSEGIAVGMATKVPPHNLTEIIDATVLLIQNPGAPLSELMQKVPGPDFPTAGFIYGRGGIRSAYETGRGIIVLRARATVEPMPQDREMIVVTEIPYQVNKA

SEQ ID NO: 99688 - protein, 103 aa, Unknown
  Obtained from environmental sample
  misc_feature (1)..(103): Xaa is any amino acid
MGGTEGLVDKMLRNPPSGFRSSVICLDAIGVLGEAARKDGFDVTLISRGKHFDWKIAMRIARHTKKCGVGIIQCHHYTPWCYGALARLWHPALRVIFTERWAP

SEQ ID NO: 99689 - protein, 275 aa, Unknown
  Obtained from environmental sample
  DOMAIN (196)...(274): Histidine kinase-, DNA gyrase B-, and HSP90-like ATPase
  misc_feature (1)..(275): Xaa is any amino acid
MINYQNIPSITFIRKLENGWYLGIVTPEEEYFAEAERVKLILILLGITLSAILSVILAKIITEKRKADEKINEAEKAIVANRVKTSFLAKMSHEIRSPMNVILGITEMQLEKKDLPPDTMRALDRMHNSGYMLLNIINDILDLSKIESGKMELAPVTYDVAGMINDTVQINAIRFDTKPIQFILKVDENVPSTLFGDALRVKQILNNILSNAFKYTDKGEVILSISADAPESGGAPDSGDLKSGASGSITLILSVSDTGHGMTPEHVDRLFDDYS

SEQ ID NO: 99690 - protein, 226 aa, Unknown
  Obtained from environmental sample
  DOMAIN (30)...(181): Histidine kinase-, DNA gyrase B-, and HSP90-like ATPase
  misc_feature (1)..(226): Xaa is any amino acid
MSSDYSAQNITVLEGLEPVRKRPGMFIGTTSIDGLHHLVFEVVDNSVDEAMQGHCDNILVALEVNDVVRVEDNGRGIPVDIHPGEGISALELVMTRLHAGGKFDKKSYKVSGGLHGVGVSVVNALSQWCEAFVHMDGRVHTQSYKIGIPDGPVHEIAIDKLPYSADPNRHGTVIRWKADASIFETTTHNFDALSNRLRELAFLNKGLKIIIRDERLSTPKVHEFKL

SEQ ID NO: 99691 - protein, 268 aa, Unknown
  Obtained from environmental sample
  misc_feature (1)..(268): Xaa is any amino acid
INAQIKAVEEKRWADATSLARTLASLGIKAENTGDEPELVLEYAKEQLSEGKNLPAFLAAVRAHNLKPLSFDDALLFLRKATEVRQRRTAAFFFSIIEGMGGGAQIPQELRTYAQGRDTPTDMIKGVATVLVERGVRIQQGIGFPDNVLGSAFFVDATGLLITNYHVIASEVDPSYKGYSRMYVRMGDSSSPRIPARVIGWDKAMDLALIKTEVVPEYVFSVVDWIIPNIGETVYAIGSPVGLEKTVTQGIVSALGRRLVQMETDSNR

SEQ ID NO: 99692 - protein, 242 aa, Unknown
  Obtained from environmental sample
  misc_feature (1)..(242): Xaa is any amino acid
FGSGVVLAAKILWKDEGERYANLIQHQYKNSVPVREQAFEVAGTKNKLNAIYAISDWVRTHIKYSKRGFGGHSLIPKPALSTLKEKQGDCKDQSLLLQEMLATIGVKSHLALIHLEEAGSEALSSIQQFNHEILYVPATKEYPELWIDPSDKVSNRRPIPLDLEGRVALVIKGDSSYSTLTPILEINQEHEAFMFHRLRIDEKGIGNFRDSLIFTGKFASAIRNELLQRDQKEHSEYISKWI

SEQ ID NO: 99693 - protein, 265 aa, Unknown
  Obtained from environmental sample
  DOMAIN (99)...(168): RNA polymerase Rpb2, domain 3
  misc_feature (1)..(265): Xaa is any amino acid
MTLTTDDFISVIRYMIGLYNAEEGYSLDDIDHLGNRRIRSVGELVANQISIGISRMLRSVRESFSSREREGVLTPTELINSRTVNSMVAAFFGSSQLSQFMDQINPLSELTNKRRISALGPGGLSRDRAGLEVRDVHHSHYGRLCPIETPEGANIGLINSLATFSIVNRFGFIETPYRIVGLLPFKDDSGKTCEFPEAKWHANIMKSFFGSINQQLLTQTELNENEIKNTRKKYSGRQLELFDLFCNKSFEFDFGNESTIIKNGI

SEQ ID NO: 99694 - protein, 79 aa, Unknown
  Obtained from environmental sample
  misc_feature (1)..(79): Xaa is any amino acid
VEKPFRSLMNIPFITKVEDAEKKNELETRFVKEAAAAGMVNLAGHRLVGGMRASIYNAMPLEGVQALIRFMEKFESANS

SEQ ID NO: 99695 - protein, 273 aa, Unknown
  Obtained from environmental sample
  misc_feature (1)..(273): Xaa is any amino acid
NTATTAYKVKLNISNLGGNSYYNGSLGNVISERSSKYVSLDLSGSTFTSIGNYAFRGCTSLASVTIPDNVTSIGDGAFYDCTSLASVTIPNSVTSIWDNAFNGCTSLASVTIPDSVTRIGALAFSDCTSLTSVTIPDSVKSIGQAFKRCTSLTSVTIGNGVTDIVERTFQGCTSLTSVTIGNGVTSIGAGAFEGCTSLTSITIPFVGATLDGRSNTHFGYIFGASGSGSQNSYIPTSLKTVIITGGSSIAASAFTRCTLASITIPNSVISIDG

SEQ ID NO: 99696 - protein, 185 aa, Unknown
  Obtained from environmental sample
  DOMAIN (9)...(149): CobQ/CobB/MinD/ParA nucleotide binding domain
  misc_feature (1)..(185): Xaa is any amino acid
VIQKNKKFDFIASSSKLNHADTFLSDVGKDRILKESLFEVENTYDVIIFDFPPSASKLTICGMVALDKILIPCQADPFSIDSLNSTNELYLAVKRYLNPSLGLAGLLITRYKKSLLSEEIVKSIEEIAISKMGTFVYKSKIRDSVLIREAQLAKNSINKYAGHSPVSSDIFDFIDEFGERYGQEI

SEQ ID NO: 99697 - protein, 72 aa, Unknown
  Obtained from environmental sample
  misc_feature (1)..(72): Xaa is any amino acid
MGISYRPLWILLINKGLKKTDLISMAKLSPTTVAKLSKNKSIDGTTLERICAALQCQPANVIEYIPDEGKKP

SEQ ID NO: 99698 - protein, 273 aa, Unknown
  Obtained from environmental sample
  misc_feature (1)..(273): Xaa is any amino acid
NTGAGTQYDPDDFYTVTGNTTIYVKWIPIRTVTFNVNGATSGIAPAAITVDSGTVVTLPGQGNIAKTNSNFGGWSTSSSSGINYSAGSSYTVTSNVTLYARWTAYPVYTVTYNGNGSTSGSVAAMSVDSSSSITLPGQGTLARMGYAFGGWNTNNTGTGTSYSVGTSYMVTSNVTLYVRWIPIYTVTFNGNGATSGSVSAMSTDSGSNITLPGNGTMVRTGYNFSGWYTNSIGTGINYSVGTPYSVTKNDTVYAKWTVITYTITFNGNGNTSG

SEQ ID NO: 99699 - protein, 89 aa, Unknown
  Obtained from environmental sample
  DOMAIN (6)...(88): Ribosomal protein S15
  misc_feature (1)..(89): Xaa is any amino acid
MALAKESTVSIVTKFGKSEKDTGASEVQIALVTERINQLTEHCKQFKKDKSGQRSLLILVGKRRRLLKYIQRTNLEGYRKLIKELGLRK

SEQ ID NO: 99700 - protein, 94 aa, Unknown
  Obtained from environmental sample
  misc_feature (1)..(94): Xaa is any amino acid
MAISYAHRLGQIIGESLENALEPFLREFAVKHNLYFDKKEFRIARSGTKLTWIDINNNKHDLDFVFEKDGSQEKIGKPVAFIECAWRRYTKHSR

SEQ ID NO: 99701 - protein, 120 aa, Unknown
  Obtained from environmental sample
  DOMAIN (60)...(117): Protein of unknown function (DUF1232)
  misc_feature (1)..(120): Xaa is any amino acid
MPRFTDEEAEEEFSKYTEDVTEDDVSGVLEKEEAILDKVKGPLAKFAKNIELLFSIVKDYAQGNYKEIPWTSIAAIIGALLYIFSPIDLIPDFIPVVGLMDDAAVLALCLNSIGHDLKKY

SEQ ID NO: 99702 - protein, 88 aa, Unknown
  Obtained from environmental sample
  misc_feature (1)..(88): Xaa is any amino acid
MMFNAIGIGEAEAREKFGFLLDALSYGAPPHGGIALGLDRLAMLLAGEDNIREVIAFPKTAQARCLMTDAPNAVDEKQLKELGLGGKN

SEQ ID NO: 99703 - protein, 208 aa, Unknown
  Obtained from environmental sample
  DOMAIN (30)...(150): HD domain
  misc_feature (1)..(208): Xaa is any amino acid
MEQTGLLNLFLPELAVCRGVDQKGFHRFDVLEHSLLACDYAAEKQYPLNVRLAALLHDIGKVPTRVIREDGIWTFYQHEAESAKMTRNIMTRLRWPNALADSVCHLVKEHMFNYTDEWSDAAVRRFIARVGEENLTSIYRLRRADAYATAATEPGHSFLLPLADRVEKIINEKQAFSLKDLAVNGRDLIDIGVTPGKTIGIVLGELLE

SEQ ID NO: 99704 - protein, 109 aa, Unknown
  Obtained from environmental sample
  misc_feature (1)..(109): Xaa is any amino acid
KHSTIAVISISSQDQDTAAFAIDELEYQLVDVNLFNMVDRKTLDLIRSEQEFQMSGDVSDDSAVSIGHMLGASIVITGSITSSGNTRRITIKALDVKTAQIIAMSREGF

SEQ ID NO: 99705 - protein, 269 aa, Unknown
  Obtained from environmental sample
  misc_feature (1)..(269): Xaa is any amino acid
FIWERSNIIFNTTLQEIILPYDCKLATFYYYETAFGAFHNMMSLKKVVFLGGDVEIRDSAFSGCLSLTDVVFTEEVTSVKWSYSNPSGFYWVTFPASDTFYNCFNLTHLDLSKTDLLIDEKVQLLAPSVRTKCTVAPRISTDYDILPSFCFDSYLHLTEVIIPNNISMIDSFAFVDCPKLTIYFDMTQEEFDAVDLRPKWNYDNRPYMLLSQRGMTPPPPNTDETVYPFDILDEEGNVIVTINNQDELLEYIKNNTDKGTTVVTRHLKL

SEQ ID NO: 99706 - protein, 257 aa, Unknown
  Obtained from environmental sample
  DOMAIN (33)...(141): CBS domain pair
  misc_feature (1)..(257): Xaa is any amino acid
VNVVYVVDAEGKLLDEISLRHMVLAPLEKSVESIMDGNFVTLTGYSDQEEAVAMIKKYNYLALPVVDSKGVLIGIVTIDDLMDVAEAEVTEDFQKLGAVSVQVGGEGPIESVREAAVSILFRSRIGWLVLLVVVNILSGFEMSFFTDTIAATVALVFFLPLLVGSGGNAGSQSATLLVRALATGNVKMGDLRRMFIKELSVSALLGATMAAAVSGLAFYRGGPRVGIVVAVSMVVIVTASSLVGLLLPFILYKLEKT

SEQ ID NO: 99707 - protein, 120 aa, Unknown
  Obtained from environmental sample
  DOMAIN (1)...(108): Ribulose-phosphate 3 epimerase family
  misc_feature (1)..(120): Xaa is any amino acid
SSPAAAEIRGLGKKAGISIVPSTPAGLLGELMPFLDLILIMTVNPGFGGQHLIPECLDKLRFLAGERQKQNLNCLLSVDGGINSETAASAIAAGADVLVVGSAFFAAPDKKKFVDNLRLQ

SEQ ID NO: 99708 - protein, 280 aa, Unknown
  Obtained from environmental sample
  DOMAIN (40)...(129): Transglutaminase-like superfamily
  misc_feature (1)..(280): Xaa is any amino acid
VNEHIEKIFALLIGFSTYQYNLSYTDELDVEMIKDFLFNSTEGDCVEFSNSLALLGRLAGIPSRVVTGFLASEDQQTPAHIQGLFNLRSKIPYLQQFPLDNLFMVTNIHGHSWTQFYIPDYGWLDFEATMFAIPPKGSGDYNTWDVVIPLIEEKRVFSQIRKFPWLAVLRATAIMAIFALVCAYILRYGRELALYLGTRRGGRAGARSLYLLLLARLAADGKPVKPASKTALEYAQLFPLTKLGAGAFENPHFKNFASLYTELRWREFKDSAQMDESFTK

SEQ ID NO: 99709 - protein, 163 aa, Unknown
  Obtained from environmental sample
  misc_feature (1)..(163): Xaa is any amino acid
LGGIDRAKRFVVIGAGPAGLTAACKILKEIPGAQVDVYEASDRCGGISATIEYHGNRIDIGGHRFFSKNKDVNDFWLSLMPLQGKGSKDDLALGAKKEFAVGGPDPEKNDAVMLIRDRVSRIFFRGRFFDYPISLTWRTFLNMGFGDSLMAGISFLGSSIKKR

SEQ ID NO: 99710 - protein, 136 aa, Unknown
  Obtained from environmental sample
  misc_feature (1)..(136): Xaa is any amino acid
LPYGFLIGVLGFGFFLICAFSVFFAAGLLWKLILTKAKGLSAAGRADKAELSWKIFIIISFPIFFILLVDLLVFYPGGISPDNVTQWSQVLSKSFNDWHPAIHTMIIWLVARIRPSYPFFLAFQMLAFSLGCGYMA

SEQ ID NO: 99711 - protein, 89 aa, Unknown
  Obtained from environmental sample
  misc_feature (1)..(89): Xaa is any amino acid
EDVLDATQVKIEKAYPAYFGSYAEMRAIRDYLDTIGNLYCLGRNGQHKYNNMDHSMLTAMEAVEIIKSGGGDKSAVWNVNAEDEYHEGK

SEQ ID NO: 99712 - protein, 115 aa, Unknown
  Obtained from environmental sample
  misc_feature (1)..(115): Xaa is any amino acid
MEEFLRWGLDCVRQIQTLETPGLTLIMRAITNLGSAAFYMVLIPFVYWCIDEKKGLRLAVVLFISAWVNLALKFLLDQPRPFFEAYDPLVPRVAAIMSGFPSAHAQNSLVMFMII

SEQ ID NO: 99713 - protein, 167 aa, Unknown
  Obtained from environmental sample
  DOMAIN (45)...(164): Exonuclease
  misc_feature (1)..(167): Xaa is any amino acid
MSIFDNVDPKTKEKLDAIASKGNPHNRAGNTHRIGTVKDIKLPDFVAVDIETTGLNKNSDRITEIAAVKFENGKITEEFSTFVNPNIEIPKKITQLTGISADTVKDAPQFAQVMPKFMNFISRLAICGHNVDFDISFLNAEIKRNSGAEITNWNIDTLVLSRIFGVE

SEQ ID NO: 99714 - protein, 110 aa, Unknown
  Obtained from environmental sample
  misc_feature (1)..(110): Xaa is any amino acid
YVHLPTKPLLPTPYSPLPELFYLYGITGSGKTEVFLRAAEHMIKEGKSVIYLVPEIALTQQTAELIGRRFGSAAATLHSGMSPSERLSQWSRIRRGETKIVHNGLSYYSC

SEQ ID NO: 99715 - protein, 162 aa, Unknown
  Obtained from environmental sample
  DOMAIN (45)...(156): Histidine kinase-, DNA gyrase B-, and HSP90-like ATPase
  misc_feature (1)..(162): Xaa is any amino acid
MEKINTSHYNLTQSILETAKVTENLLKKEGFKITFSYNNNIYVDADKAKIDRVFYNLLINAINYSGESKDILVEQTITNNRVRISVIDYGEGIAESDLPFIWDRYFKSGKAHKRAVTGSGLGLSIVKKIIDIHGGTYGVISETGKGSTFWFEIGLSDSNNRR

SEQ ID NO: 99716 - protein, 169 aa, Unknown
  Obtained from environmental sample
  DOMAIN (8)...(38): Flagella basal body rod protein
  misc_feature (1)..(169): Xaa is any amino acid
MTSTFMGLEIGKRGIQAHQQALATTGHNLSNINTPGFSRQRVEFAAFEPIFLPGLNRAETPGQIGQGAVVERIERIRDQLLDRRIIAQSSEEGYWAVRDRYISEMEQLHLVPGMNSVKSKMDNFWDAWQELSQHAADTEFRTAVLERGKTLIDGIENHFKGFGTQTQVT

SEQ ID NO: 99717 - protein, 278 aa, Unknown
  Obtained from environmental sample
  DOMAIN (85)...(118): Tetratricopeptide repeat
  misc_feature (1)..(278): Xaa is any amino acid
ITEYNTAISYNPNVIDAYITRAITYLELKDYDRAIADLDKVIQLDPKNAEAYNDRAWIYAYYLKRDFTRAISDANKADNLMPNNANILDTRGWAYLGNGDYEKAIVDFETALRLDPDITSSREGLAQAQSRVQPQVRLASTTPDTVTEDDFEIMQNRDNTLTITGYKGTARNLVIPDTLYGLKVTIIGNSAFENKGLISVVIPDTVISIGDGAFAINTELIKATLGKGLKTIGDYAFKTSYYHSSGHLTEITIPDSVTRIGNSSFSEAGLTKITLAQS

SEQ ID NO: 99718 - protein, 283 aa, Unknown
  Obtained from environmental sample
  misc_feature (1)..(283): Xaa is any amino acid
ATNQNVTWSSSDTSIAEVSASGVITAKNAGTAIITVTTIDGGKTASCTVTVISWDVYNVSTWNEVVTRIKTGGNNKTYTINVTDDFSIPGLTVSNPYTFGIPERINVTITGDKEISLASGSKGSLLYLCTHQTVIINDLRLKGHNTNTDPLVIILDDSSVTMQGSASVSGNTNTTTNPLSSVGGGVLVSTGGNLIMQGSSTVSSNTSSSNGGGVAVIGGSFTMQDNATVSGNTASGGKGGGVYVEDSYYGDEDDDRNFYVTFTMKGGTVYGNVAAPLGNTSMY

SEQ ID NO: 99719 - protein, 186 aa, Unknown
  Obtained from environmental sample
  misc_feature (1)..(186): Xaa is any amino acid
YRFLSERSGQRVGAFLFDSGIDRVFPPRKGRRNILAFVSRALHYHSAQAGAGKSSNIGAALAGAGRMLKRRSMVVLMSDFLSADWEKELCDLSRRHDVIAVRVYDPKNTGLSKLGLLDARDPETGLQIAFPSNSAAFRSAWAGWHRERSDHWLKLCRRAGASHLEIPVDGDPAKILSRFFTGRSGQ

SEQ ID NO: 99720 - protein, 80 aa, Unknown
  Obtained from environmental sample
  misc_feature (1)..(80): Xaa is any amino acid
MAKLRFCIVGCGRIATLNVLGYKDHPNAEIYAVCDQDQVKAEALATQTGAKKIYANYQQALNDKDIDVIDLLVPHHLHRG

SEQ ID NO: 99721 - protein, 272 aa, Unknown
  Obtained from environmental sample
  DOMAIN (63)...(169): PAS fold
  misc_feature (1)..(272): Xaa is any amino acid
MLVTAMRDIPAVLQKTLGEFQKVEELVSTGNLDARGDLASYKGGFATVISGANSIMNSFLHIVDNIPSPVLMLGADMKVNYLNTVGKNVCGADYKGKSASQVLPCEDDGTPADALRKASESLRSATSETVARPMGKQMDISYTAIPMLNKEGKIASILELVTDLTAIKQTQRTIQRVAEQAAGIANRVAAASEELSAQVEQVSRGAEQQRERTESTASAMSEMNSTVMEVAKSAGQAAEQSEATKNKAHEGSDLVNQVVKSINLGTRWRNAP

SEQ ID NO: 99722 - protein, 265 aa, Unknown
  Obtained from environmental sample
  DOMAIN (229)...(262): Tetratricopeptide repeat
  misc_feature (1)..(265): Xaa is any amino acid
YGNKGDYDRAIADCTEAIRLDPNYAAAYNNRGNAYSNKGDIDKAIADYTEAIRLDPNLAFAYYNRGVAYYDKGDIDKAIADFTEAIRLDPNYSFAYNNRGAAYGSKGDIDKAIADCTEAIRLDPNNAEAYKNRGNAYDDKGDIDQAIADYTEAIRLDPNDAEAYFSRGTAYYYKGDIEKAIADYTEALRLDPNDAFAYYSRGLAYRNKGDIEKAIADYTEALRLDPNYAFAYNHRGIAYNDKGDIDKAIADFDQALWLDPNNANA

SEQ ID NO: 99723 - protein, 289 aa, Unknown
  Obtained from environmental sample
  DOMAIN (1)...(289): Aldehyde ferredoxin oxidoreductase, domains 2 & 3
  misc_feature (1)..(289): Xaa is any amino acid
DPGIAAVTGELFAEKHLMRKNACSGCPVGCIHIALLRQQFADDHEYVFKQVSYDYELIFAQGTMLGLTDAEDIMHLLDETESCGLDSMSTGVALAWATEALEKGLIREQETLGPLRFGDVRGYLAALRRLTEGDNEFWQALGQGALYAAGIYGGADFACVLGQEMAGYATGEVFYVAQAMGFRHSHLDSGGYSYDQTHKEQDVEKAVRFLVDDERDRVMLTSLVSCLFARKIYGADRIREALNALGHTAQADNLAQAAGAMQALRWKLKLRTGFVPEAVTIPKRFCEVN

SEQ ID NO: 99724 - protein, 247 aa, Unknown
  Obtained from environmental sample
  misc_feature (1)..(247): Xaa is any amino acid
DDNSNNTPPPLPRKEKISGVSQKGPFDAATVKIYRLDANKQKVGGPVEGKTDDKGNFEIEIEEAQYISIEVTGSYANEVMGVKSNDAITLYAVADVSNKENANVNINVFTHLEYERVLKSSKAFDVAKREAQKKVLDALGMDESDVNSEAMSLFGNSPNDAKLLAASVLLQADRQTGAVSNLLGEIRSKIKDDMDLSQQTKNKLLEGAKWVKDNISMVEQNIKSLDSKAQVPSVNDINKIIEGIDDS

SEQ ID NO: 99725 - protein, 274 aa, Unknown
  Obtained from environmental sample
  DOMAIN (1)...(274): Glucuronate isomerase
  misc_feature (1)..(274): Xaa is any amino acid
FDYHCHLSPAQIAGNKQFADLAEIWLGGDHYKWRMMRALGYDESYITGSASPYEKFLAWARTVENLIGNPLYHWTHLELQRYFGINEPLTEKSAPEIWEKANALLQTPELSVRGIFEKFKVYAVGTTDDPVDSLDCHRAIAEGTAPIGKIATKVIPSFRPDKALNINLPGFAVYIETLATVSGVAIKSADDVLAALEKRLDIFAKAGCRASDHALECVPFALASESHIEKTFREAMAGKEITREDADAYKTKILCGLAKLYADRNMAMQLHLAA

SEQ ID NO: 99726 - protein, 66 aa, Unknown
  Obtained from environmental sample
  misc_feature (1)..(66): Xaa is any amino acid
MSILKNFRHLDIDWDLAPEDAVTLYLEWGNNDWHAPFAPIRSKEDYATYFVVDTWRAPPKIRLLRR

SEQ ID NO: 99727 - protein, 209 aa, Unknown
  Obtained from environmental sample
  misc_feature (1)..(209): Xaa is any amino acid
LKKKTSFYIAIRYLWGRAKEGVRYLRGAAAGIAVSLVPIIVTLIVADGMIRGITDRYLELGTGHIQVFDYNNNMGLEDTKREINEFEGIRGVWAEQRGMGVIAGKKGKTGVSVRAVESSFWDDSTGAVLLKIIEGENKPQTDRDIVLGETLARNIGVNAGDTVRLMTIMSDEGGRMSPKTAPFTVKGIISCGYNELDALWCIINLEGAK

SEQ ID NO: 99728 - protein, 221 aa, Unknown
  Obtained from environmental sample
  misc_feature (1)..(221): Xaa is any amino acid
MFNIETCFDQQILESKRERPTVVFPEALDIRIIEAVCHLTRFIRPVMLASQKDVAAIASQDGAHIDKDRMAYAFSECAFVDIAGRQDLVKEYAAIITTRLAAKGEAVEKGEALRRAMLPTWFALASVLAGHADSVVAGAQHDPKDYFRPMIKLFRNNDVAIEAGIFVLPDSHTSTLFPNNILVLGDARVNTFMDAKTLAEVAVGTCAIARDLFPESALPTI

SEQ ID NO: 99729 - protein, 63 aa, Unknown
  Obtained from environmental sample
  misc_feature (1)..(63): Xaa is any amino acid
MQHILIADDNKDITDVLAAYAKKENFEPIIASDGEEAIKLFHKYNPAVVLLDVMMPKEDGCEV

SEQ ID NO: 99730 - protein, 75 aa, Unknown
  Obtained from environmental sample
  misc_feature (1)..(75): Xaa is any amino acid
MVKSGSIEMMESSKEVITESKNLEQAAAEISNGMNEMSGGAGKIEFAVNQVEEISKKNKDCIDALFAEVSRFRLT

SEQ ID NO: 99731 - protein, 199 aa, Unknown
  Obtained from environmental sample
  DOMAIN (12)...(198): Na+-transporting methylmalonyl-CoA/oxaloacetate decarboxylase, beta subunit
  misc_feature (1)..(199): Xaa is any amino acid
MGFIIANLMLITWKHLVMYAVGVILIYLAIQKDYEPSLLLPMGFGAILVNLPFSGAINQIMPGIGNVTGPIQWLYQTGIEASEILPLLLFIGIGAMIDFSPLLSRPIFLLFGAAAHFGIFATITLSVLMGFNLNDAAAIGIIGAADGPTTILAAQVLKSNYVGPILVTAFSYMALVPIIQPATVKLLTTRKERMIRMTP

SEQ ID NO: 99732 - protein, 249 aa, Unknown
  Obtained from environmental sample
  misc_feature (1)..(249): Xaa is any amino acid
MSLKALFLAVALCLGASFAQDSTASALKIIFAGDLMGHVTQINAAKKEAKGKGYNYRPVYKHLESYFSKADLAVINLEYPLAGEPYSGFPQFSSPDESVFAIKDVGFDILATANNHSLDRGKQGLERTLYVLDSMGLEHLGTYRHPAERDNRYPLFIEKNGIKIAFLNYTYGTNMLMEEDPNIVNRIDSALIFGDIRKAKLASPDFIIAIMHWGVEYENTQNQEQKDLAQFLAANGVNLIIGSHPHVVQ

SEQ ID NO: 99733 - protein, 244 aa, Unknown
  Obtained from environmental sample
  misc_feature (1)..(244): Xaa is any amino acid
MLDQALALSRRLTEKRLERGALMLESEETEYIFDAKGLPIDARRYEVHDAHTMIEEYMLMANEAVAQCFTQKNCPSIFRIHEEPDPLKLDIFKNIAVGLGLLRPKDKPTPELLNALLKKIHGGPLETLLNTMLLRSLKRAEYSAENVGHSGLALGEYLHFTSPIRRYPDLVVHRLLKKLLKKEKIRDGLQGHLAILAKRASDSEQMATEAERENCRWKTCLLMKQRIGQKFQGTIQGFQTRPRC

SEQ ID NO: 99734 - protein, 258 aa, Unknown
  Obtained from environmental sample
  DOMAIN (37)...(258): Glycosyl hydrolase family 67 C-terminus
  misc_feature (1)..(258): Xaa is any amino acid
MEPEGRIKDLIGAYQIGHSRIEGFAAVVNTGRDRNWTGHTLAQANLYGYERIIWNPSLSAQEIAREWSVLSFGSGHVAETVTELLLKSYPAYEKYNAPFGVCFMVTPGLHYGPNIEGYEFSRWGTYHRADARAIGIDRTPAGTGYTAQYAARNASMFADPATCPENLILFFHRLAYDYRMKNGETLLQNIYDTHFEGYEEVAAMLEQWKGLKDSLEEKVYKSVLSRFERQLTNAREWRDQINTYFWRKTGIADKAGTK

SEQ ID NO: 99735 - protein, 270 aa, Unknown
  Obtained from environmental sample
  DOMAIN (46)...(252): Phosphoribulokinase / Uridine kinase family
  misc_feature (1)..(270): Xaa is any amino acid
RVVGELNSLISDRKILDYIRIAEAHQTRKISDIANQIYEKHDKVRMVLIAGPSSSGKTTTAKKLSIELMVLGLKPIAIGLDDYYRGTAQTPKDEKGEPDYECLEALDVPYLNDQLQALYRGEEIALPIYDFKSGERKSTPGKKIRLNDNNILIVEGIHGLNDALTYSIERGTKFKLYISALTQLNLDDHNRIPTSDNRLLRRMVRDSQFRGMDAAGTIKMWPKVQAGERKHIFPFQITSDTAFNSALDYELSVLKYYADPLLRAVKPNRS

SEQ ID NO: 99736 - protein, 274 aa, Unknown
  Obtained from environmental sample
  DOMAIN (97)...(270): Nicotinate phosphoribosyltransferase (NAPRTase) family
  misc_feature (1)..(274): Xaa is any amino acid
LLDKLINISFFDDDIAFLKSLGIFENDFIDYLKTFRFNGTIWAMDEGTVVFPNEPLIRVEGNLVECQLIEGILLNIINFQSLIATKTCRIWLASGKGKIMEFGLRRAQGPDGAVSASRAAFIGGAYGTSNTLAGKIYGIPVMGTMAHSWIMSFDSEEEAFEKYADLYPDRSIFLIDTYDTLKSGIHNAIKIGKKMSQKGKRIGVRLDSGDIQYLSKEVRKLLDKAGLPNAYITVSNDLDENIIETLVKEGAPVDSWGVGTKMITGAREAAFTGV

SEQ ID NO: 99737 - protein, 103 aa, Unknown
  Obtained from environmental sample
  DOMAIN (7)...(61): Helix-turn-helix
  misc_feature (1)..(103): Xaa is any amino acid
MVFAENMKKYRKKAKLTQEKLAEMCNTDFRYIGQIETGVRCPSLDYVERIASVLKIAPYRLFYDENSKEDEGFVTMQKEQKQKIKAMLFENFSQICSIIDEQY

SEQ ID NO: 99738 - protein, 234 aa, Unknown
  Obtained from environmental sample
  misc_feature (1)..(234): Xaa is any amino acid
MVDITKEVEKAVPQGADEKAATKARTATIAKALEDYSKKTGLVCEPVTLYQGGEYWIYAYKVFNDVRLVACPEYQIAAFGKEDDNFTWPRHDLDFSLFRVYENDKPYHPSDFLKWSVQGTKHGSLTFVSGHPGSTSRLFTMAQMEYDRDSYYPPLLARLTAMAAQLRQIARSSPEAERQVSSQLMGVENSLKALTGYHKGLLDKEQMAKVQAAEDELKAKVMADPKLAALAGDS

SEQ ID NO: 99739 - protein, 114 aa, Unknown
  Obtained from environmental sample
  misc_feature (1)..(114): Xaa is any amino acid
LKDAYKPNTITVVITGGEPILRKDLPECGRKLRENGFRWGIVTNGYDYTPDIHGRLLEAGMGSLTLSLDGLEQSHNWLRNNDKSFSRAVKALELITACSRFDYDAVTCVNQKNI

SEQ ID NO: 99740 - protein, 70 aa, Unknown
  Obtained from environmental sample
  misc_feature (1)..(70): Xaa is any amino acid
SGDNYYGYGIWLEKAQDGALEPWFQGCDPGVSFLSSYDRNQNLNITIISNTGNNVWEIRRKIKELLKNDQ

SEQ ID NO: 99741 - protein, 285 aa, Unknown
  Obtained from environmental sample
  DOMAIN (12)...(243): Papain family cysteine protease
  misc_feature (1)..(285): Xaa is any amino acid
MSAQAMAGRPVFPSCFDPRVNAVPTGIVAPAPPIRDQGQYGTCWAFDALASAESNINCAKDLSEWHLAYFAFTPVNGMPAFNKFEPYEGVFDQGGNDYIATAILSRGTGPVEESHAPYKGSLPKGTEPRALGLQSVFMYEGLSKGDIKYLVQTYGALGMGFYWADSYFQSSNSAYRYVGSQYANHGVNIVGWDDNFDKAKFRSQPSANGAWIVRNSWGTSWGESGYFYMSYDSKIDDYAMYIPCSLPANQKIYQYDTLGLNEDCGYGNNTAWFSNIFTATGHESI

SEQ ID NO: 99742 - protein, 285 aa, Unknown
  Obtained from environmental sample
  DOMAIN (141)...(174): Tetratricopeptide repeat
  misc_feature (1)..(285): Xaa is any amino acid
AIREKVLGKEHPYYATSVNNLGLLYFNMGDYAKAEQYFLEASAIEEKVLGKENPSYALTLHNLGETYRSKGDYAKAERYFIEAKALWEKVVGKEHPNYALTVNNLGMLYYVLGDFRKAENCFLETRDVREKILGKEHPNYAISLNNLGLLYLETGDYAKAERYYLESKAVQEKALGKEHPEYATLISNLGLLYNKMGDYAKAERCYLETITIREKALGKEHPDYATSLNNLGVLYFSIGDYTRAERFYLAAKAIWEKTLGKEHPSYAQLLDSLYLTYLSKKEYAK

SEQ ID NO: 99743 - protein, 275 aa, Unknown
  Obtained from environmental sample
  DOMAIN (9)...(253): ATP-NAD kinase
  misc_feature (1)..(275): Xaa is any amino acid
SGGEAAPGGSRLLAEKIHAWLEEHGCTTYRVQADEDYTKLLAGRFSFVVVIGGDGTLLDVARRFVSCPTPLLGINFGKVGFLAEAHASEWREVLIGALEGRLLVLERMALAFELFREEKQILAGVAVNDVVFNRGCLARVINLDVAVQGFALCRIRADGLIIASPQGCSGYGASAGGPLVHPDIQAFTLVPICPYACDFPPLVLPYPQEVRVTLPKNTTETYLTVDGQQGYTLQTDDSVLVCGIPGGVHFARRDRAGYLRRLKARGLLAERAEHA

SEQ ID NO: 99744 - protein, 130 aa, Unknown
  Obtained from environmental sample
  DOMAIN (2)...(130): PET112 family, N terminal region
  misc_feature (1)..(130): Xaa is any amino acid
MNAYEAVIGLEVHAQLATRSKLFCGCSTAFGAEANTQVCEVCAGLPGALPVANEKAVEYAVRTGLAVECAINRNSVFARKNYMYPDLPSGYQISQFETPICGRGRLRIPTDAGEKYIGITRIHWRTMRAK

SEQ ID NO: 99745 - protein, 126 aa, Unknown
  Obtained from environmental sample
  misc_feature (1)..(126): Xaa is any amino acid
EPYTSPYTIKEINNDPDKDKQKNMKALITDYDISILPITEEIERLSALYVQEKAIGSAWLADAAHIATATHNGLDFIVSLNFTHIVRPWTIERVRLVNKREKYQTIGIYKPVEVLEIYEDSKGILE

SEQ ID NO: 99746 - protein, 94 aa, Unknown
  Obtained from environmental sample
  DOMAIN (43)...(83): Bacterial regulatory protein, Fis family
  misc_feature (1)..(94): Xaa is any amino acid
MHQGSGITGDDLNKLLNKKSKKTQNNANQLPEGILERNYNEAKDSFEKSYLEFQLSKNNGIITRTAEAIGIYPSNLHAKLRKYNITAANAKEET

SEQ ID NO: 99747 - protein, 130 aa, Unknown
  Obtained from environmental sample
  misc_feature (1)..(130): Xaa is any amino acid
VKKTPELAYNPQSAWERYSSPADRKAMDALAERYLDFLTRCKTERETVAYALRFLRKAGYKDKPAGGLIVRPFKGKALFAARRGTLPLNRGLHLISAHTDAPRLDLKQRPLVEQAQVLQAKTHYYGGIRK

SEQ ID NO: 99748 - protein, 172 aa, Unknown
  Obtained from environmental sample
  DOMAIN (1)...(150): L-seryl-tRNA selenium transferase
  misc_feature (1)..(172): Xaa is any amino acid
PQAGILVGRRVYIDRLRANPLCRALRSDKLTLAALEATLRLYLDPQMALAQIPTAAMLSCPPETLARRARGLAARLRRALGRTAQIVVVKDSSRAGGGAFPERDLPTSLVCLRPAACSAGDLKLRLLNTVPPLLGRLEDDAFCLDPRTLDDRELPLVVSALQRALRLEKDVP

SEQ ID NO: 99749 - protein, 303 aa, Unknown
  Obtained from environmental sample
  DOMAIN (114)...(302): Glutamine amidotransferases class-II
  misc_feature (1)..(303): Xaa is any amino acid
GVISKSGKRMSGECVIRSISVMHDRSNGLGGGFAAYGIYPEYRDYYAFHIFYESAAAKKECEKFLEEHFDIINLSKIPTRKVKVITNEPHIWRYFVAPLPTKLADSQLDEREFVVQCVFSVNTKITGANVFSCGKNMGVFKAVGFPEDVGRFYKLEEYEGYCFTAHGRYPTNTPGHWGGAHPFALLDYSVVHNGEISSYDTNRRAIEMYGYKCSLLTDTEVITYIIDYLHRRKLLTLDEIASVVAAPFWQTIERMEPRDREEHEYLRTIFSSQLITGPFSILVGVNGGLMAPHDRFELRSMVV

SEQ ID NO: 99750 - protein, 265 aa, Unknown
  Obtained from environmental sample
  misc_feature (1)..(265): Xaa is any amino acid
MYEEPFVLQELTLGQVLDRTIAKSPDTDALVYVDRDYRLTWTEFGREVDILAKGLMGLGVKQGEKVAIWASNVPFWVSLMFATARIGAILLTVNTSYQESELEYQLRHSECENLVVIDGFRDHDYLQTLHKILPEIRSQQRGELNSPTLPHLRRVIFLGMEKHRGMYSIPEVKSLAVMVSDAEYEARKALVSPYDVVNMQYTSGTTGFPKGVMLTHVNIVNNGYWIGYHQAFSPKDRVCLPVPLFHCFGCVLGVMACINHGAAMI

SEQ ID NO: 99751 - protein, 73 aa, Unknown
  Obtained from environmental sample
  DOMAIN (3)...(73): ACT domain
  misc_feature (1)..(73): Xaa is any amino acid
MNAIITVVGSDKVGIIARVSAFLAERNINILDISQTVLSGNFVMMMVVDLSSGTKALEVIKNELAELGRSFNV

SEQ ID NO: 99752 - protein, 76 aa, Unknown
  Obtained from environmental sample
  DOMAIN (1)...(72): Phd_YefM
  misc_feature (1)..(76): Xaa is any amino acid
MKVYNYSEARQNFAAIFNTALKEDVIITRKDGNKFKLVTIHEQKKGQSPLETVKGIKTKVTMVDILDAIREGRDRK

SEQ ID NO: 99753 - protein, 247 aa, Unknown
  Obtained from environmental sample
  DOMAIN (113)...(233): Elongation factor G, domain IV
  misc_feature (1)..(247): Xaa is any amino acid
MDELCAGDIGVIIGMKLAQTGDTIGSEGWPVLLEKMQFPEPVISVSIEPKTLSDQDKLKGILAILSKEDPTFTTRDNEETGQLIISGMGELHLDVLVTRILKEFNLSARVGKPQVTYRESISITNECVENFSRIIAGKENTADITLQVKPAERGAGNKYVCTVKNKNEIPEEIFNAVERGIQGAFSSGIVMGYPCIDIEATVTDIRYSELTGTEFAFEACASMAFDEACRRADPILLEPIMAVTLTA

SEQ ID NO: 99754 - protein, 97 aa, Unknown
  Obtained from environmental sample
  DOMAIN (2)...(94): Resolvase, N terminal domain
  misc_feature (1)..(97): Xaa is any amino acid
MIYGYIRVSTDKQTVDNQRFEIEKFCLKNDLKIEKWIEETISGIKSPEKRLLGSLLAEVKKDDLIICSELSRLGRSLFMIMSIPKLFMLNEVRIWTI

SEQ ID NO: 99755 - protein, 267 aa, Unknown
  Obtained from environmental sample
  DOMAIN (1)...(267): Phosphoenolpyruvate carboxykinase
  misc_feature (1)..(267): Xaa is any amino acid
MLVPTIKGWKVETVGDDIAWMRPGKDGKLYAINPEAGFFGVAPGTSMDSNPNAMHSIEENTIFTNVALTEDGDVWWEQIGHDAPGKLIDWHGKEWVQDKSNKDQAPAAHGNSRFTAPAKQCPVIAPEFEKLEGVPIDAILFGGRRPSTIPLVHQAKNWNHGVFMGSIVGSEITAAALDLKVGDVRRDPFAMLPFCGYHMGDYFKHWIEVGKKIPEAGRPKIFFVNWFRKKDGKFAWPGYGENSRVLKWIFEQCDGSGKSVDTPIGLM

SEQ ID NO: 99756 - protein, 306 aa, Unknown
  Obtained from environmental sample
  DOMAIN (129)...(297): Type III restriction enzyme, res subunit
  misc_feature (1)..(306): Xaa is any amino acid
THINEFDKLFNEIKTNGIDDFKTIASVEYSSIKSEDISLKQITENSVVRLVSNPNSTGVVMHIDKVGNTLQYTVFIEGKQKNYFDGQIVLFTKDEESDNNNITEVQRIITAYQIKRPSSDNLYSLNAARIDFVPYQFRPALKLIKSDTPRLLIADGVGVGKTMEAGLILKELQARSSLDTVIIICPRPLVAEHKWETEMKRFDEDFTPVTDGNMFREIIRQTNRDGEWPEKYKRLIIPYSLLKEDLLGGKNKKEQKTNGLFDIDPVPLFDMVIVDEAHHVRNRNTQAYKAVDFFCKNANSAYSNRN

SEQ ID NO: 99757 - protein, 299 aa, Unknown
  Obtained from environmental sample
  misc_feature (1)..(299): Xaa is any amino acid
EDAKIFFSIRETAQGQPGETRTIPISLAGRYRIEAQGAAGLASDSRNRPANASYQGGKGAKISAIFDLKAGDELVVVVGKIGARVDAATAPPDGSAGPGGGGTFVFKKIAAVTDSRYQFTKDGQAYEVLLVAAGGGGTTDLNYSTAPQNGTDGIGASWNDPVNFTAFATYTWALATPSATGNGGRSNQNGGSIAHFIQNNLIGGAYWRNGNQAFGGYGGGGTSDDTRPAGGGWRFASGQAYSWSSGLDTEGFTGVNSEGGFIGVTALGFVGRGIGSISYKWKITSSNTKPVEAWGDEAG

SEQ ID NO: 99758 - protein, 203 aa, Unknown
  Obtained from environmental sample
  misc_feature (1)..(203): Xaa is any amino acid
KILGGEPLLHPHITDFFKIARRLFPSTPIQVITNGILLTGQPEEFWRCCGENNITVSISQYPIKLNKKEIKKIAGAYGVKTVFCGSTGEERMCKLPLDLTGSQDMKKSFQKCAISWGCCVTLRDGRIYTCCIAAHIKFFNEYFKQNLVISDRDYVDIYKVNSKDEIIEFLEQPFPFCRYCMITETKFAQRWAVSKKEITEWIN

SEQ ID NO: 99759 - protein, 118 aa, Unknown
  Obtained from environmental sample
  misc_feature (1)..(118): Xaa is any amino acid
MRKKKKESQIPLLPIDTEKIETRAVLRKEAQTRQILAELKGFAPVIPNQNILVSAIVLQEAQDSSAIENIVTTQDELYKNLTMQPQYMDPMTKEVINYRGAVYAGYEILKKKQLISIS

SEQ ID NO: 99760 - protein, 246 aa, Unknown
  Obtained from environmental sample
  misc_feature (1)..(246): Xaa is any amino acid
MLKELGRGIRESGHDMLAVAPTRSAVEELQKVGFTDAVTIQRLLQDPSAQKRNCVLIVDEAAMVSSSQMSELLKLSERQSCRVIFCGDTRQIQSVEAGDALRILQKESRLKSVSLTTEQRQTAKDYRQAIHQLREDPAKGLDKLERMGAVLEVEGKDRAEAVAKAFSDFTDRNLDTIIVCATHDEIGRVTDSIRRGQRAKGKLGADHNLERDVSLGWTEAHKSDISRLQPGHVLSFHKAVMGVKRM

SEQ ID NO: 99761 - protein, 251 aa, Unknown
  Obtained from environmental sample
  DOMAIN (9)...(251): NAD synthase
  misc_feature (1)..(251): Xaa is any amino acid
MTQSELDKLEDTLVQGIRDFMNKNGFSRAHLGLSGGIDSALVAYLAVQAAGTENVTCISMPSRFSSQGSKEDAAELAASLRCRFETIPIEGIYSTYLTALEKVFENRPFDVTEENLQARIRGTLLMSYSNKFNSVLLATGNRSEASMGYCTLYGDTCGALAPIGNLFKTEVYALSNRINARAVASGGKQIIPQAIVDKSPSAELRPGQKDEDSLPPYDTLDAILRLYLCEKLSSAEIVGKGYDSELVNRII

SEQ ID NO: 99762 - protein, 65 aa, Unknown
  Obtained from environmental sample
  misc_feature (1)..(65): Xaa is any amino acid
MTGVINYGAGNLGSVMNALKRLSVQARFVSNVDELAPGTTPFERLIFPGDGHFATAMASLTKSGY

SEQ ID NO: 99763 - protein, 272 aa, Unknown
  Obtained from environmental sample
  misc_feature (1)..(272): Xaa is any amino acid
MVLIGSEEASKILSKLDPDQVEAISKEIVTLKTITTKEAEGVLEEFRSLLSSPYGYSGSSSGGKEQARRLLYAAFGPEKGEALLVKAVPDAAENPFSFLSEFSGEQLALLFRDESPAACAMVFSRLPSKLSAAALANTGPERKLEIVKRIAKLNDTSPEVIARTAAAIKEKARHFGQSFPAAGEEIDGKGVLTAILKHSDVAFSGRLLDGLEASDPSLSKEMKERLYTLEDVANAADRPLQEKLRTMDDREIALLLRGRSEAFTQKIFWNIS

SEQ ID NO: 99764 - protein, 278 aa, Unknown
  Obtained from environmental sample
  DOMAIN (126)...(275): Peptidase M16C associated
  misc_feature (1)..(278): Xaa is any amino acid
GAGLRGLNCEEPGLPVDEAAKKAEALIIGELERLEKEGIPKEEIEAALLGMEFSNREIRRSGGPFSLVWMSRSLRAWLHGGNPWDSLLFASPFSELKRRIEEDDRYFEKMIRRYLLDNAHRAFVIIEPEENFLEKKEAALSARLEETEKSLGSTEKEAIRSKMAELKEAQEKEDAPEALAAIPHLSRSDLSPEIKGVKREYADLSGAPALFHPIFTNGISYVDLAFPLDLFPPEDYLWFPFFSRAAVSMGLPGMDYGEVSGLWPELPGGFTPCSIPAR

SEQ ID NO: 99765 - protein, 111 aa, Unknown
  Obtained from environmental sample
  misc_feature (1)..(111): Xaa is any amino acid
DGSTAAVTGYTTSGVSSTTAGEKTVTVTYEGKTATFTVTVNAAVPAKTLSSIAVTTNPTKTTYNVGDTTLDTAGMVVTATYSDGSTAAVTGYTTSGFSSTSAGQKTITVTY

SEQ ID NO: 99766 - protein, 138 aa, Unknown
  Obtained from environmental sample
  DOMAIN (5)...(132): Peptidyl-tRNA hydrolase domain
  misc_feature (1)..(138): Xaa is any amino acid
MNTFLLRQSIHAAAEVSFSRSGGPGGQNVNKVNTRVTLRLRLADVDGLSEAELDKVRELLANRITNDDEIIINADEERSQKTNLERAYFRLEALIAAAARLPKHRRPTKPSRAAREQRLQTKHLNSRKKALRRIKPDE

SEQ ID NO: 99767 - protein, 110 aa, Unknown
  Obtained from environmental sample
  misc_feature (1)..(110): Xaa is any amino acid
VQLGILKLLPGTAIARHTAAFGMCYNPSPPYEVMETAAMPAGDLDCLKNFARFWELIVNRGLIDIRQYCGDSPVFDRFMALSDSLFIRFGRNWGIDKKELHEAVIAFFVP

SEQ ID NO: 99768 - protein, 228 aa, Unknown
  Obtained from environmental sample
  misc_feature (1)..(228): Xaa is any amino acid
MIPRVAEETLRRYARGFPVICITGPRQSGKTTLAKLAFPKKQYFSLEDPDTLLLARSDPRGFLDQWPDGLILDEAQYLPELFKYIKAMVDNDPKPGRYIITGSQQFNLMEKITESLAGRASFLTLLPFSFVELVSAAKVGSPLYAENPWELMIKGLYPPLYDRDVSPQDFYSAYITSYVERDLRQLVNVKDLNTFQTFIKFCAARTGGVLNLSSLALDCGITHNTAKA

SEQ ID NO: 99769 - protein, 277 aa, Unknown
  Obtained from environmental sample
  DOMAIN (2)...(250): Pyridoxal-dependent decarboxylase, pyridoxal binding domain
  misc_feature (1)..(277): Xaa is any amino acid
NARGLVSAFSVFPGYKEHFAVKALPNPYILKILAQEGLGADCSSLPELLLADMAGMKGEALMLTSNETPAKEYVKARELGAIINLDDFSHIVFLEKALEKNKGLPDLVSCRYNPGPLKEGNAIIGKPEEAKYGFTREQLFEGYKLLKAKGVKRFGLHTMVASNELSLEYHLETGKLLFELAVEIKAKCGVNLEFVNLGGGLGIPYRPEQEAVSWEALTRGLKTHYDEIVVKNGLGGLAIHTEYGRPITGPYGWLVAKAVHKKEIYRSYIGLDACMAD

SEQ ID NO: 99770 - protein, 247 aa, Unknown
  Obtained from environmental sample
  misc_feature (1)..(247): Xaa is any amino acid
ADFNSRLSLQERERLNNEAVAILEKAEKGTISDTDKSILRRYSGFGGISASDERGVLYDYYTSPPVAHLVWQLLEKSGQIKSGANILEPSCGTGVFFEYAPKDKNLTFTGTELDERTAKVAQLLHDAENINILNSSFEAFNLSDKAGSFDHVIGNAPFGERSAALYALDMPEEKSLDNYFVSRSIDNLKDNGTMALIVAPGVLENKTNEEFRLSLNKKARFIGAVKLPNRSFHHTHTQVMPDILLFR

SEQ ID NO: 99771 - protein, 59 aa, Unknown
  Obtained from environmental sample
  DOMAIN (3)...(59): SecE/Sec61-gamma subunits of protein translocation complex
  misc_feature (1)..(59): Xaa is any amino acid
MKKIVQFVKESYAELRKVIWPGRDDVISSVKVVIISTIIVAAVLGLVDVLLLFGIRAIF

SEQ ID NO: 99772 - protein, 279 aa, Unknown
  Obtained from environmental sample
  misc_feature (1)..(279): Xaa is any amino acid
VDNRKIAHELGGLFLIFWGLFVLLSLVTFDPGDPSLNHVVSGKAAVQNRAGIFGAYLAGFLHDLFGIGAYIWPLVFLVMGGAMVSALFDLPWWRWCGAFLLSICLLAAGEAFSLRIGDMAGGGIAGRGLFENSRRFLSPSGSALLWFFVLLTGVQLSFRLSWLALGKRAWGRLQPSNAAAGGSETPKAGNDTLAAKGASGGAQAKTAPAGSWRAVKAFLRQKLLPPPGYTAPLPPLHTAAGADASGMDKAGAAADDALFTPHGDAPPAAVPVEPPRCSC

SEQ ID NO: 99773 - protein, 66 aa, Unknown
  Obtained from environmental sample
  misc_feature (1)..(66): Xaa is any amino acid
TPFTQFFSIRQNRRQSGTISITEHFKEWERIGMALGTNMYEAKFLVEAGGGTGWFDASYISFSQKD

SEQ ID NO: 99774 - protein, 58 aa, Unknown
  Obtained from environmental sample
  misc_feature (1)..(58): Xaa is any amino acid
TGDVTQIDLPPRTESGLLHASDILKHVEGIHFSYLHTADVVRNPLIKKIIQAYDDKNP

SEQ ID NO: 99775 - protein, 204 aa, Unknown
  Obtained from environmental sample
  misc_feature (1)..(204): Xaa is any amino acid
MGRTPGIICVCSFLAAVIVTLTNLNLSSDGPGDIRDFEVGKVADRDVIAEHSLSYIDNEATLMRVRAQENMVPAVFRSSENIGLEAIESWNKFCDLADKLVTEGSSRNSRQLAIQAEYRDFFTNDTLDAYFNAHDRHEFRTYGIKVLDSVLGKGVFTMDYVDLGSYNPDLAELIISRGDRVERERISYSGIITLANAADAITQT

SEQ ID NO: 99776 - protein, 248 aa, Unknown
  Obtained from environmental sample
  misc_feature (1)..(248): Xaa is any amino acid
VEFDGNGKAIVRESLKAPMPGTSGPISAVSFFDEIAAVTAPLIEKAGKVEGIGFCFSYAMEITKETDGILLAFSKEVDAPEVIGKAMGAELREALIRRNVKPPEKIVLLNDTVATLLSGFSELPSHGGLRRGEDKYGVETGPVVGFILGTGFNTAYPESCIPKINFNSAERPQIVVCESGNFAHRYTGFIDSEYDKTTKSPGGYTLEKATSGAYLGPLTFHVISRALKDGLFSFRKADEFLSWPTMPT

SEQ ID NO: 99777 - protein, 259 aa, Unknown
  Obtained from environmental sample
  DOMAIN (1)...(256): Fibronectin-binding protein A N-terminus (FbpA)
  misc_feature (1)..(259): Xaa is any amino acid
IQKAVQSAFDVLCLKLYGKGGAKTLLVSISPLACRLHETFDSVPKSARPLRFAEFLNSRIINGRIEEAVQLGNDRIVRITVKRNSDEGEERFEERFFIYIRLWSNAANVIVTDADGKVLDAMRRLPKKGEVSGGFYRPEPPSGVNEKSGKEFQVRAFPEDLLAGLPGDASFNQKIDAFYRQEGGALSLDSLRDEAKRKVEASIDRLIASQEKLKEKKEDFSRAERFKEYGDIILSNISLIKPGDEWLEVQGFDGDFDGD

SEQ ID NO: 99778 - protein, 273 aa, Unknown
  Obtained from environmental sample
  DOMAIN (1)...(273): ThiC family
  misc_feature (1)..(273): Xaa is any amino acid
MKCYIGNNQRNTKKILCGEDIYPLIITSIGISENNGSFEKEMSKAKSAIKAGASIINDNSLNGYIYENYERFIDKLPVPFATVGINSLAKKINLDCEIHKDEFINNIIKQIEMGVDIITLHATIFKEDIEAINNSSRIIPCTSRGGVLLLNCMHKYNIQNPFWFYFDDILVYAKKYNATISLCVSFRPASVYDCCFHNDLYWVEIQRIAKLIEKAQVMDVNIMIEGIGHCPINLIPKIIHETKRICHNAPYRIMALSTDIALGYDHISSAYCY

SEQ ID NO: 99779 - protein, 100 aa, Unknown
  Obtained from environmental sample
  misc_feature (1)..(100): Xaa is any amino acid
LKEFAAAINGLEYKFSFPLNTIHYPLPTTNYPLPIIDLQWFADSDDEDAPGKTEPPSEQKLKRLREEGQVVKSQELIGAIGLLLPALLLLFIAPYMLRTC

SEQ ID NO: 99780 - protein, 132 aa, Unknown
  Obtained from environmental sample
  misc_feature (1)..(132): Xaa is any amino acid
MWKCDKCGREFKNTNQDHYCGKFSTIDEYISTQSLEVQPILHRVRSVIRENAPNATEKISWNMPTFWQGENIIHFASFKKHFGIYPGDITLMPFIEKINNYKHTKGAIQFPYDKPIDYDLIAEIVKYKIKLW

SEQ ID NO: 99781 - protein, 86 aa, Unknown
  Obtained from environmental sample
  misc_feature (1)..(86): Xaa is any amino acid
MEPALALDGGVDGLNVIRKIVSHAPEFLCPGGCLLLEADPRQMAAIASLYEEAGFSDIQTHTDLSGRERVIIGIKSNNRVNYYVEM

SEQ ID NO: 99782 - protein, 174 aa, Unknown
  Obtained from environmental sample
  misc_feature (1)..(174): Xaa is any amino acid
MNEYHIYPKQFRNLKIPVVKNTCFFLMPFNNDFDHVYGILKKGLNEIDMICQRADEITGSIPIINKILTEIVRSQYVIVDLTRYNPNVFYELGIAHTFKDARNILLIKQKEDQIPFDLTHLTYIEYDSNNLKLLTSTIKQFISDNKQVSDFYDALNLCGIINVIHEKRYYYIET

SEQ ID NO: 99783 - protein, 189 aa, Unknown
  Obtained from environmental sample
  DOMAIN (6)...(154): Glutamyl-tRNAGlu reductase, N-terminal domain
  misc_feature (1)..(189): Xaa is any amino acid
LKLIMTGLDHKRSTLSVREKFATTKASARKALAGFKDSGIGGCVILSTCNRMELYATLPNDGKSALSEMLCAALDIDYSEYRSHLTERVGDHAIEHLCRVASGLDSQIMGDDQIITQVREALEFSRNQHCTDNYIETMFNLSIHAAKVIKTKVFINSLGTSTVPEHTVEKLKTMCRLSGRNALVIGSGR

SEQ ID NO: 99784 - protein, 132 aa, Unknown
  Obtained from environmental sample
  misc_feature (1)..(132): Xaa is any amino acid
YEDAVEEARDMVDNGAVFINIETNDEKTLNGFLDYALMNPYVAKVPFFINSTDMNVIISGLKRLQGRCLAGPLTLNEGEAEFIKKAELIRLYGAAVIVTIQGQDEAKKLPDILKKNSYPEDNIVVINASMRS

SEQ ID NO: 99785 - protein, 255 aa, Unknown
  Obtained from environmental sample
  misc_feature (1)..(255): Xaa is any amino acid
MRNMVRRYLIQNTENIFVATENKFLSDLMEPQVMLDGFARTVRNMIIRGDDAEKLREYFIEISDYLVSGKDRYLSFNGFLGYFETLPGGPALIESLVWNKPDDFVPTERQWYLDAIAANGQMSETLMYHDIVYENAMLVYAFCLFDDEGRQLGVVGLRVQINTVGDYIVNTAREYGGYGMLLSNDLIILAHPNKPFVGKYADDPEVPFAIFVDDLRNGAEIRERPLISYQNEPSVAFFQHLPNGWVLGVVMPKGP

SEQ ID NO: 99786 - protein, 57 aa, Unknown
  Obtained from environmental sample
  misc_feature (1)..(57): Xaa is any amino acid
WAAAMQIQFHVCDLNQTFKNMREQWAKLYLKHFVTQAKKRASDMITKFVKPFEKYLG

SEQ ID NO: 99787 - protein, 223 aa, Unknown
  Obtained from environmental sample
  misc_feature (1)..(223): Xaa is any amino acid
VNKIIDTLFSGALFHTLRTEDETFRFLGETNGKITFLSDTYPENIHCKKEISLNGAHAYPSFTDAHMHLMYSIAVAALGFHICEIRKNGVVPDTVEGAGLRLREYCSTRGADDIIVANSYVISAIKEKRMPTRHEIDAWTGSRRAVIFSIDGHSSSMSTAMLRSLDINPEGHDGVLQGTEHDFRLGRITEIITKSVGIRDIMRGVAAFINQCADCGITRVCAF

SEQ ID NO: 99788 - protein, 138 aa, Unknown
  Obtained from environmental sample
  DOMAIN (1)...(125): PIN domain
  misc_feature (1)..(138): Xaa is any amino acid
ILDACALLAFLNDEEGADKIENLLNQSASSDISVSMSIINLLEVYYGELRDMGADIAQIVLDMVQHYSIKIINTVSEQVFHEAARLKTSYKMSIADCIGLATAIELSGQFVSSDHHELDAVVSNLHFANKPSLIFWFR

SEQ ID NO: 99789 - protein, 257 aa, Unknown
  Obtained from environmental sample
  DOMAIN (20)...(181): MatE
  misc_feature (1)..(257): Xaa is any amino acid
LTKDMTSGKPLPVIVRFALPMLAGAVFQQLYNVVDMLVVGNAVGSRALAAIGATSATIFFAMSLAMGLTTGFTVVASRHFGAKDMDMLRKTFGASIYISLASIIILAAGGWFGAEPLMRLLKTPSDIFADAVLYVKICIGLSAGMVLYNCATSVMRAVGDSRTPLILLIISSILNILLDLLFVLVFGMGVAGVAVATVISQCVSAAACLIYMYRRFDIFKLTLSDFKPPVSVAGTILKIGLPMSPASLLLAVGDMTI

SEQ ID NO: 99790 - protein, 237 aa, Unknown
  Obtained from environmental sample
  DOMAIN (51)...(237): Branched-chain amino acid transport system / permease component
  misc_feature (1)..(237): Xaa is any amino acid
MVNILKKASPMKRRASLTDSNLLFLIAICVFVILYALAIVFLGGSFSRVQGLADLLNNNAALIILACGLSIVMVGGGIDISVGGVIAVVTAACAVYLDSGHGNVLVSLFIALGIGMAFGLVQGFLVAYLEIQPFIITLAGMFFARGMATIITKYSHAVKLESFLALKNTNIKIKALGYTARSGMLIPVTIDIGVIAALAVVLAAAFVLKWTRFGRNLYAVGGNSQSALTLGINVKRT

SEQ ID NO: 99791 - protein, 151 aa, Unknown
  Obtained from environmental sample
  DOMAIN (12)...(151): Cytidylyltransferase family
  misc_feature (1)..(151): Xaa is any amino acid
MLIALVPSFAAIDRSNTALFLMAGILFYSCVESLRFLGFSLPLVSSVTGIVSRKREQGHFAFAPITLGLGALLAISIFPLPVASAAIYALAFGDSVSTLTGKFLGRIRPAFLFGKSVEGSLACFAVSTLVGYMVFSDLKNAFAVGFASVLV

SEQ ID NO: 99792 - protein, 92 aa, Unknown
  Obtained from environmental sample
  misc_feature (1)..(92): Xaa is any amino acid
MTENATRGRYGRDFIPEAFLPQGKDEYWLRDSQQDLKPWRALKPEEIDILTKNGHYCADWNSFLVVDPFEPDLIRNSNFYGLVRLGTLRDNC

SEQ ID NO: 99793 - protein, 293 aa, Unknown
  Obtained from environmental sample
  misc_feature (1)..(293): Xaa is any amino acid
AKSGLQGHRRKADGVTDTTYVDTIRITGNGGAVAMVVAAVTVKDSLTHKIRATGPVTDPADPDTVVAFSGTANRPPAAKTVTVANQGTGAVTVKIPALGAASRFEIVSGAWTSGTDEAVLSEGGTAEFSIQPKAGLPNGTYTEQMTVSGAYVNKNGGVSSISSNRVTLTFTLTDALTFDISASTTGNGNFGNTGPGYVDLPPARVVTVTNNGTGPVTLSAAQMMTGAGYYNITKPLSSTALAPKGMPGSSATFEVQPALGLAAGQTYEGEAAVSGEGIDDDGNAAPVIASVKF

SEQ ID NO: 99794 - protein, 287 aa, Unknown
  Obtained from environmental sample
  misc_feature (1)..(287): Xaa is any amino acid
VEWREASAALDENPKRLTLPSDAQDLRVRFVTAGASRFAQVADDLIEFPYGCAEQSSSRLIPLALAHDAVRGRDADVGELQSAIQGIETLLRTQRRRLALLAGVDGSFGWWGDTTGGSALMTAYAYYADWLASRSLGITLPADTRQRALDVYRNNGGKEPLLHRILALWLLQQMGLPVGTPVSGVAEQLARQASSLMKQEESAARDTLAPDESLIFAAPESLRGLRAAVALTAYAAGQAQAGLPKEFAALAAHSRAALAVNPSPLIRSLLAMTDSVRSPADLNAVLA

SEQ ID NO: 99795 - protein, 293 aa, Unknown
  Obtained from environmental sample
  DOMAIN (1)...(177): Alpha-2-macroglobulin family N-terminal region
  misc_feature (1)..(293): Xaa is any amino acid
FYYDSEIYNTKIYVVTDRPLYRPGDTVHIKFLGRAFQDANRSQPAAPALLKLEALDPNGAPIAALNVNFTSAAGGDAKFTLPAAAQGGGYTIRFDYNGDSYGGAFRVAEYVKPHFDVNLTMDKPDYATGETPTGRIELRYPNGKAVKNGKVSVTLSAQKTTIVGGELRYSGLFPVQIEQQELQTDDNGNAALVLPAAKDPSRYKLTLLAQDGAAYRVRVTREVLIARGAMPYTLTAPRSFSQLQEPMTFTLAALADATSIPGAATKEHTPAKWEWVRLESQTRAAASCLPPTR

SEQ ID NO: 99796 - protein, 283 aa, Unknown
  Obtained from environmental sample
  misc_feature (1)..(283): Xaa is any amino acid
EGGSHGGGHDREKDGTVNKPNSGQLTCGEWSDIKNYDFYLNLFKITEDADTPENQRRNSYAEYIEYFGFETRYMVPVNVISGELPVGDAIVELYLSGGKLFSAKTDVRGNAYLFPSFKLTGETITIKVNSSGKSSEQSLTYNAEPVKITLENHAEKSSILDLMFVIDTTGSMGDEIKYLKSEISDVIDSISSANPNYTINLALLFYRDKGDEYVTRYFDFTANISAQQQNLAKQSANGGGDFPEAVDRALLEAVDKNWNKDNATRIIFHVCDAPPHDDQESQT

SEQ ID NO: 99797 - protein, 288 aa, Unknown
  Obtained from environmental sample
  DOMAIN (1)...(159): ATPase family associated with various cellular activities (AAA)
  misc_feature (1)..(288): Xaa is any amino acid
MGKYLGESEENLRRALRLAENSSPCVLWVDEIEKAFAGVGGDESGVSQRLFGYLLTWLNDKTARVFVMATANDVAVLPPEFLRRGRFDEIFYVDFPNAPERKEIFKIHLVKGIKKEKLEEIIKDEKISKKFDELTQGTEGYAGSDIESLVNSAIERAWRQEKDFEAEIFDILLLERKYMTPLKEVLAEKIAKNREKFGQYKLTSASQTAENLQRFETDSEGSEKEKVAVAKDEQCPEHILIKLAKNGSKDVKLAVLGNPTCPPTCIVDFMEDSDTDVKAKAQEKQSAT

SEQ ID NO: 99798 - protein, 58 aa, Unknown
  Obtained from environmental sample
  misc_feature (1)..(58): Xaa is any amino acid
IDRTRVLSETGNVTEAAANFFDCLHELDSMGLDFIRAEEVPACGLGEAINDRLRRAAH

SEQ ID NO: 99799 - protein, 219 aa, Unknown
  Obtained from environmental sample
  DOMAIN (1)...(218): TatD related DNase
  misc_feature (1)..(219): Xaa is any amino acid
AKKAGEDSAPPVFRCFAIHPQLSGEKNFFLSRGIELLYSLAVETRLDAVGETGFDLYNEKYKAAENIQEEMFVCHLEIALNWDLPMILHLRKAMHKIFPFMMQLKQLPAVVFHSWPGTRGEAKAMLKKGINAYFSFGTAVLKNHREAMASAGILPEERILLETDAPYQPLRGKEYSTWRDLSQICSFIAALRKEAGSPCASPEELEEQTTKNFFRVFNR

SEQ ID NO: 99800 - protein, 98 aa, Unknown
  Obtained from environmental sample
  misc_feature (1)..(98): Xaa is any amino acid
MKALINEYGVTVLPSRTEAAQLADMYIDAGIIPKRYRTDALHIAIATIAGIDIIVSLNFRHIVKHKTIFETEIINIRERFKRVFIHTPMEVISNDKNS

SEQ ID NO: 99801 - protein, 151 aa, Unknown
  Obtained from environmental sample
  misc_feature (1)..(151): Xaa is any amino acid
MAKPTVDDILNIETGEHYTAEQLLGTDKIKQFKLRHDIEQRIQKHLSKYVCAICLQKIKLRAGDYNRFHFAHLKDSPDCPIKTDTKYTKKEWLALIYHGTKESKRHIKLKNMLNDILELDSRFSDVKLEKTVKEIKDKIKWKKPDLPCMYN

SEQ ID NO: 99802 - protein, 299 aa, Unknown
  Obtained from environmental sample
  DOMAIN (165)...(266): CarD-like/TRCF domain
  misc_feature (1)..(299): Xaa is any amino acid
YHWLWDELRAEANVDAIPAWGEVFAILARHPRLRVARAVDMAGVEMDIDDFPPFRGDFAELSHMCHRLRERGFRIEAITENPRFLDMKEGPFSPAGMFSASLNSAASAFSVNFVEPRPGRLSSGFIDRAAKRAFLSDRELSGISAQTDPASVVQAARVPSEWRDRLAGGQLVVHEDYGVAAFRGIEEIMTSHGAGGETLDAIVLEFAENKRLLIPVLQFHKLTPLAEHEGDETPLDSLSGTRWKKSMEKDRERARAEARALMELFAQRELERREPFANDNDLCRDFAAAFPYAETVDQL

SEQ ID NO: 99803 - protein, 61 aa, Unknown
  Obtained from environmental sample
  misc_feature (1)..(61): Xaa is any amino acid
FIAIKEINREGTTILFVEQNSKIALSTANRGYVMQTGEIVMTDTCDNLMANTEIKKAYLGV

SEQ ID NO: 99804 - protein, 229 aa, Unknown
  Obtained from environmental sample
  misc_feature (1)..(229): Xaa is any amino acid
GIEYGRIEGPTTELDSGDAEFPSVWKQLDAIRRKDFVREDGYVMRISCVMIDSGGIDTTTDTVYAYTIKHEYPERVFAVKGSSQADKPIFNRATRNTRNRCALFIVGVDKAKELIYARLKIEEPGPGYCHFPSDGAAGYTAQYFAGLICERRMIKYLNGYRKLYWWKPKEARNEPLDLRVYNLNAIRYLNPNWDVLEKRYAKPAKTDATPTAKDKAKTAYVRRSEGITI

SEQ ID NO: 99805 - protein, 130 aa, Unknown
  Obtained from environmental sample
  DOMAIN (8)...(130): Malate/L-lactate dehydrogenase
  misc_feature (1)..(130): Xaa is any amino acid
MADISYASFEKLESFMKDVFIKAGVPSEDAAICAEILIESDKRGIDSHGVGRFKPIYIDRIKDGIQNPVTDFEVVKDYLATAVIDGHDGMGHVIGKKSMQMAIDKAKKYGLGMVVARNSTHYGIAGFYAT

SEQ ID NO: 99806 - protein, 162 aa, Unknown
  Obtained from environmental sample
  misc_feature (1)..(162): Xaa is any amino acid
DENLKIEYIHCDARKFIRPEVFDLALNLYNSFGYFESQDEDLCFVRNVYNSLKKGGCFIIEIFGKEVAVRDFVEAEWFERAGFMVLTKYKVLDSWTFLHNRWILIKDGKKYEKTFSYRLYSAVELKSLLLEAGFSKIDSYGEWDGGPYDQYAGRLIVVARKL

SEQ ID NO: 99807 - protein, 260 aa, Unknown
  Obtained from environmental sample
  DOMAIN (83)...(259): Adenylate and Guanylate cyclase catalytic domain
  misc_feature (1)..(260): Xaa is any amino acid
MDEIIETVNLSSQVEAEYRDETGILAVTFNKMTGELDKAYGQIKHYAFDAVLAGKKEERIRQIFQKYVPNDVIERFFASPEKMLVGDNRKLSILFSDIRSFTTISEGLAPDELVNSLNRYFSGQVDIIYKRNGIVDKYIGDAIMAFWGAPEKHQDDALQSVLSGLEMIDAVAAFNANQRKFGKCEFKIGIGLNYGEVTVGNIGSERKMDYTVIGDAVNLASRMEGLTKTYHSELLISEYLFEELRKSSPNAGLSYRLLDM

SEQ ID NO: 99808 - protein, 275 aa, Unknown
  Obtained from environmental sample
  misc_feature (1)..(275): Xaa is any amino acid
YNDSQTAPVNAGTYTVTFNVAAANGFSAAPGLSAGTLTISNATPVADDFIFIGLSQVYDGSAKTVTVTANPGKTAGTVTVKYNGSIAAPSAIGTYAVTFDVAAAANWNGTTGLSAGTFTINDNIPTPVADDFNVSNLSQPVGNVTPVIISPKFGKSTGAITIRYDGSTVLPTAVGAYTVTFDVAATANWREAAWLIAGTLYINPNPTAADFTVSGLTQTYDGNAKTVTVTANDGKTPGTVTVKYNNSIAAPSAAGTYTVTFDVATAAGWNAATGL

SEQ ID NO: 99809 - protein, 248 aa, Unknown
  Obtained from environmental sample
  misc_feature (1)..(248): Xaa is any amino acid
GPGNRGTPVTSITQNEQYTGTVAWSPNHSTFAKSTVYTATITLTAKTGYTLQGVTADFFTVAGAKSVNNNANSGVVTAVFPSTGAYFLGDTGPGGGKIFYYSAEGFTMTDTDEVCHYLEAAPNNMSSTLRWASSDYTSINIAGTETTIGAGRKNTALILATDANAPAAKACKDYRGSNNLDDWFLPSRDELNELYENRSYVGNMGTNNYWSSSQYNDGCVWLQQFDIGFQHGLGPKFINYSVRAVRAF

SEQ ID NO: 99810 - protein, 156 aa, Unknown
  Obtained from environmental sample
  DOMAIN (62)...(106): Bacterial regulatory helix-turn-helix proteins, AraC family
  misc_feature (1)..(156): Xaa is any amino acid
MLKLYNLLENILLDIENGIKNNINASVLSKKYGFSEGHLRRLFNFAFKQAIAAYIRSRTLAASLNDLLETDTNIIEIAGEYGFEYEQSYIRAFKREFGITPGDLRKKRKIIKIKPPLHLFDENKLGDNVFFGPDIVMVPQFHVIGKYYKVSLRIQE

SEQ ID NO: 99811 - protein, 284 aa, Unknown
  Obtained from environmental sample
  misc_feature (1)..(284): Xaa is any amino acid
KEFGYPSIKTLDEYVDLLYKYKEKYPSINGQPTIAFTTLAHDWHSYCMINPPLFLAGFPNDGNGTIDPNTNEYKVFLYQDISKRWFKVFNKMNSLGMVDRSCFIENYDQYLAKIASGRVLGFHDQTWHIKQAEDSLNTQGMFNRTYAPLPIVFDESIRPHYRTRPAPNVVNGLCISIKAKDPVRIIRFLDAQLSEEAQKVFSWGFEGEDYQYDENGKPYRTPEQRKQQEDDAWKLHNRAELWTSHNPKIQGSFNDGYPTNLVDIYSEREATQKPEDKELWAAYG

SEQ ID NO: 99812 - protein, 224 aa, Unknown
  Obtained from environmental sample
  misc_feature (1)..(224): Xaa is any amino acid
VGWPLDALEVAVKERPFRFENAAAMGPPASWLSVQFLAYGMDSRQELILDALEEVLAAPLLPGMEPLGAPTGIVEKSGAKVRELEGLLLREGLVRGNFPSSGIIIFENGLPFAVHLEEGQKTGHFLDQRDNRHLAAACLSRLSQEEKIDGGPRVLDAFSYTGCFGINAARAGAGSVVCVDVSAAALETVKVNAALNGVSDKIKTVEADIFEFLRTEERRTEHYD

SEQ ID NO: 99813 - protein, 194 aa, Unknown
  Obtained from environmental sample
  misc_feature (1)..(194): Xaa is any amino acid
MKTEKKPARKAETLPKRALPRIYRIEKEIASGKYPNSDGLARLLETSVSTISRDIKFMQDQLLAPIEYDAYNRGYYFTEKTYRLPASFTSAEDLLALCMARSIFSLYKDTPLYDASRQFLESITTPITTEGNNDWLENRISVPPIASAKVKPDIWDVIVTGLKGNRIITFDYKGTWDDEYMERKVQPYQLLLTQ

SEQ ID NO: 99814 - protein, 266 aa, Unknown
  Obtained from environmental sample
  DOMAIN (33)...(264): tRNA synthetases class II (D, K and N)
  misc_feature (1)..(266): Xaa is any amino acid
METGEIEVEAEKIVILSRCDVLPFPIDDESEAREELRLKYRYLDLRRESMQRKIRLRHETAFAMREYLSNLGFYEIETPTFIRSTPEGARDYLVPSRLYPGKFYALPQSPQLYKQILMVSGFDKYFQLARCYRDEDARGDRQPEFTQLDIEMSFVNREDILSLIEGLMGYVFKKTLNQQLPPKFTRLGYDEALELYGSDKPDLRYKMVMQDFGPWVATGEFQAFKDALAAGEADKAAAAAKGITAVGGGVKALVVPGQGDYSRKQI

SEQ ID NO: 99815 - protein, 80 aa, Unknown
  Obtained from environmental sample
  misc_feature (1)..(80): Xaa is any amino acid
MAHTDFDFVGELFFGYDVEIRSMVRKIGTKSFTVFHEAWQNERLCVKGSAVMVYYDFINKQSIPIPEEKKKLLAAHLVEA

SEQ ID NO: 99816 - protein, 153 aa, Unknown
  Obtained from environmental sample
  DOMAIN (1)...(152): Chromate transporter
  misc_feature (1)..(153): Xaa is any amino acid
IADNANWLSRESIGNMLAVAQSSPGAIGVNLAAYVGFTYTGPLGGYAAALGLIAPSIVIIIIVARMLEAFKENKIVKTLFTSFRPAAAGLLSAAGFGAITLSVWNAAAPEWYQFIRWKETLLLGVIFLLLYKFKKHPILYIAGAGVIGVLLKL

SEQ ID NO: 99817 - protein, 76 aa, Unknown
  Obtained from environmental sample
  misc_feature (1)..(76): Xaa is any amino acid
MYKYRRQGIGKYVVYYILNKYKGKWQLKYHPKNEISNIFWTKTISDYTNGKYELISNNQEAKYEDGTIGHVLIFET

SEQ ID NO: 99818 - protein, 301 aa, Unknown
  Obtained from environmental sample
  misc_feature (1)..(301): Xaa is any amino acid
TEILQYLIDEYEKNPSGPSAAWCANEKTALEAALGVSFAGKRSIVTMKHVGLNVASDPFINAALLKIKGGLVVAVADDPGMHSSQNEQDSRFYADFAMVPCLEPRSQQEAYDMVREAFDVSERFNVPVLLRLVTRLAHARAGVIIGKKKPQNKFSKTNEKAGWLLLPAFARRNFAKLLDKQPLFEEWSFKHPVNKLTGKKSDLGIITAGLGCNYYEENLDDFNAMRKKQGKKPHLHLHIGAYPLPSKKIKQLCDNADEIIIIEEGYNLIARKIFGITGGSFTNIKTLISCGELDPDNVRTA

SEQ ID NO: 99819 - protein, 267 aa, Unknown
  Obtained from environmental sample
  misc_feature (1)..(267): Xaa is any amino acid
MEIAEGVVATGQQIGVGWTPALSVVKALTAKVEAKRRGLRPVYWLADEDHDRMEVSSAVAFDGDRLVRHRFSFSAPQGTATGWLEWTDGHQQEAQGLWGQLPVPTEPNLRGHVMALGDALWRRGIVPYSPTVDADRAGIQDELGRWRALDLENELCLQADALEAKGEKVILDPRRQSAWFSLDPVTGQRSRLERGQACPKGHWLSPGAALRPLMQSLLLPVEVVVLGPGEMAYWRLIERVWYRLGLRVPLIVPRPTVYVLRGGPGGL

SEQ ID NO: 99820 - protein, 180 aa, Unknown
  Obtained from environmental sample
  misc_feature (1)..(180): Xaa is any amino acid
MLAVLAVIILVISIVLFMQGHSLLVQDGKGRPAATVKRQIAWCGFGLALVLLAFSLIYVVNPGEVGVEVLFGTVQRFSENGMHIKNPLAEVLVFDVKTQRVQQHSDSASQDLQQVRIESVINYRLDATKIAELYTRVGYDYLNKVVLPSIQEATKAATALYKVEDVIVKRHEVKQRIMRR

SEQ ID NO: 99821 - protein, 225 aa, Unknown
  Obtained from environmental sample
  misc_feature (1)..(225): Xaa is any amino acid
MGIRYFVFAVNKMDLAGYRQERFETISREIEKLVGDLKLANAVIIPVSATEGDNITKRGENMPWYAGSTLLSYLESADIAGGQTEAGFYMPVQRVCRPDHTFRGFQGQIESGGVSVSDTLTALPSGEMAVVTAIYAADRQVNSAAAGQPVTIQFDREVDVSRGCVLTREAGLKIVKEFEATLLWMDDQKLIPGKEYWIKIGTKLLPAIVSGIRHKVDVNTGALMP

SEQ ID NO: 99822 - protein, 253 aa, Unknown
  Obtained from environmental sample
  misc_feature (1)..(253): Xaa is any amino acid
VTGNITVYAQWKQVNANSLFVTFNKNGGDTEANPRVKQVDSPDTVIDALPAEPVRAGYTFVGWYDTAAAAGGTKFTAETLVTGNITVHARWAGNEYTVTFNKNGGDTEASPATKTVTVPATTIDALPTALTRAGYTFSKWTKNADGTGGDFTAAATVTASITVYAQWTETSAVEKVQLITAKNSGAPVYRFTPPAGTTWSDYKELTFKVRVEDSSSYSLSTGRLHVYGVYDGTGWTNGWKSLGSDWGNTVRFI

SEQ ID NO: 99823 - protein, 101 aa, Unknown
  Obtained from environmental sample
  misc_feature (1)..(101): Xaa is any amino acid
MRKHILCLMATIFALAFTPIACGGGGGGNNNNGGGETVPVTGVTLSQSSMSLTVGGATGSLTATVAPSNATNKSVTWTVSPATGTVALSGSGATRTVTAVA

SEQ ID NO: 99824 - protein, 60 aa, Unknown
  Obtained from environmental sample
  misc_feature (1)..(60): Xaa is any amino acid
VILVTHDIDDAVFFGDRIFLLNEGKLDGEIPISLKRPRDYQSAEFQEYCRKIESTLIRVD

SEQ ID NO: 99825 - protein, 90 aa, Unknown
  Obtained from environmental sample
  misc_feature (1)..(90): Xaa is any amino acid
MPKVIITGADRGLGLSLCKEFLNRGWIVFAGKYLDDYSFLEDEAKKSPNLHIIKLDMGCADSIACTKDHLLQITDSLDMLISNAALMGPV

SEQ ID NO: 99826 - protein, 276 aa, Unknown
  Obtained from environmental sample
  DOMAIN (1)...(276): Carboxypeptidase Taq (M32) metallopeptidase
  misc_feature (1)..(276): Xaa is any amino acid
KLPELERDFLKVLRRNYDRAVKLPGDFVSAAARAEGLSQAAWVSARRENNFSAFLPHLVKMIDFSRQRAIYWGYKDNPYDGLLDIYERGMGVKAISEVFTPLGKRLAELLKKISSSPRPDNSFLDQKFDVEKQASFSRDLLKRLNFDTSRGRLDVSAHPFTTTLGSDDIRITTRYLERQVQSNIFSTIHEAGHAFYEMGFPEELRVSSLADGASMGIHESQSRLWENVIGRSRVFWEAMYPVLRSCFPGQLSAFKTEDFYRAINLVEPSLIRIEAD

SEQ ID NO: 99827 - protein, 182 aa, Unknown
  Obtained from environmental sample
  misc_feature (1)..(182): Xaa is any amino acid
SSIRYSEEAVRYAGLSDAYVKLRLKMWEAERAIYAAGRRLEYAASVNAARKYPEEYKEAQYSYAEARSFRAAERWDDAIDAANRVLAALAYVDGSVPDPLPAQYTVRAWSTFRDCFWNIAGRPWAFNDPYLWRALYEANKSKLPDANNPDIIEPGMVLDIPSLRGEYRYGMWDPGNTYLLSQ

SEQ ID NO: 99828 - protein, 65 aa, Unknown
  Obtained from environmental sample
  misc_feature (1)..(65): Xaa is any amino acid
MSNRVHFFLATDLSSPVGQQLDEDEYVEVETHATEEVLRNMGKPPYIHALMGTAMALYLQQNSYH

SEQ ID NO: 99829 - protein, 67 aa, Unknown
  Obtained from environmental sample
  misc_feature (1)..(67): Xaa is any amino acid
MLSKKTVEQFVEELASDSPAPGGGSAAALGGALGAALASMVGRLTVRKEKYKDSWELMQKLADKAAD

SEQ ID NO: 99830 - protein, 185 aa, Unknown
  Obtained from environmental sample
  misc_feature (1)..(185): Xaa is any amino acid
GASLKLTDFTIKNAKPREKAFKLSDGGSLFLLVEPTGGKLWRYRYHFNGTERKLALGKYPDISLQEARRLHQEAREQLARGIDPGVEKQAKKKTRGELAANSFEAVAREWHATWCKNKSQGHVGNTLARLEQNIFPIIGRKPTAEIRASDVLEVCRLVEKRGATEMAHRVLTIVSQVMRYAIITD

SEQ ID NO: 99831 - protein, 224 aa, Unknown
  Obtained from environmental sample
  misc_feature (1)..(224): Xaa is any amino acid
VFCNCDDPVGDDEIHTSAFTLYFINNFTALGIKKLICTHFGDNGDLFNQGTKGYVFTKDGFREFKDFPNGYTGSFDHPLSLKILKEDTDIVCTNPPFSKATDYWRITINSGKKFLIISNVTNPITPAFIPYFKDNQVWAGFNEVDWFLTPKRELTRAAGHWYTNIPIKDRPKYKQLKIVPLKDIPVKYKKYDDAKKLVVDSGYIPNDYKNLLPYLPANIKRIIG

SEQ ID NO: 99832 - protein, 219 aa, Unknown
  Obtained from environmental sample
  misc_feature (1)..(219): Xaa is any amino acid
ASIGSGGGTVSRLGLRFEKWVPENVSIDVTVPRNTPVPYKFNIMGFNAKGDASGRVNIIHENRMLEISGSVLANNTELGINFDELMQSRYENEKFAPELPTTVNLTVTTGPVVEFIWPNTSSPILRANPEIGTVMTVYADTLAGQYTINSDISIRSGEMYYFDRNFYIRHGVLVFRENEQQFNPRITAKAEIRERTDSGPVTVSMIIDNEPSVSFVPRF

SEQ ID NO: 99833 - protein, 193 aa, Unknown
  Obtained from environmental sample
  misc_feature (1)..(193): Xaa is any amino acid
DEVFSLADENCPRCEGRDRAELFARTVKILHDHIVVEKGWQMMMWADRLNHAEKFGYHAWEGDIWGTWRALDMIPNDIILADWHYEMNEKGFAGIEALLEKGFTVIPAGWRELKQTRFLLDEALKYAKSAKEKEFSGTMAGMMITCWSEAVNDLLDRLLESVKAREQNEEAKDARGIASSVVYMADKLKDYRP

SEQ ID NO: 99834 - protein, 84 aa, Unknown
  Obtained from environmental sample
  DOMAIN (1)...(68): UDP-glucose/GDP-mannose dehydrogenase family, UDP binding domain
  misc_feature (1)..(84): Xaa is any amino acid
ALPNAKRDLNDVLDKVQFVEDPYEAAKDSHAIFLCTEWQQYATLDWQKIYDSMSKPALVFDGRNILNGEELKKIGFEFISIGKA

SEQ ID NO: 99835 - protein, 64 aa, Unknown
  Obtained from environmental sample
  misc_feature (1)..(64): Xaa is any amino acid
DLKNKFEPFAKYLSDNEQKIVAELANAQGHAVDIGGYYLPDAEKLAKVMRLRLADADKFKTDLF

SEQ ID NO: 99836 - protein, 222 aa, Unknown
  Obtained from environmental sample
  DOMAIN (56)...(160): Archaea bacterial proteins of unknown function
  misc_feature (1)..(222): Xaa is any amino acid
VKRNFLKIGEERTKTIRYIDTLIGLNILRKEFPFGENPEKSRRGIYRIRDNCYRFWYRYVFTNKTAIEHGTGASLLKSFLPELNSYIGGPFEDICMQYMIRMNNLLALPFVFTQSGRWWGTNPKTRQQEEIDMVFSDTTHFIFAECKWRNDLKDTAILKTLIEKSKLLIRDYYNHDYTKQKGVFFYLFSKMPFSKSCISLAQQTGNVFLIGQKELFNPAEKR

SEQ ID NO: 99837 - protein, 283 aa, Unknown
  Obtained from environmental sample
  DOMAIN (160)...(200): Putative Ig domain
  misc_feature (1)..(283): Xaa is any amino acid
TDSTFTITSIPADYNGKYALLTGTPVPNNDSIMLYGFQSFNASTGIATLSLISNGSVKIPMWAISESNENFVKYTGNNTCSFTVLVVNTQTINLPSEVQSITTASFSSVPFTNGGATRAWNGGGGGGGTAPTITTTTLPNGTTGTAYSQTLTATGNTPITWSIESGTLPAGLSLTGSAISGTPTAANTSTFTVKATNAAGSNTKQLSITITSSGGGGTLDFTYTETANAVTITGYTGTATNVTIPAQINGKPVTSIGELAFYEKSSLTGITIPNSVTYIGSSA

SEQ ID NO: 99838 - protein, 131 aa, Unknown
  Obtained from environmental sample
  DOMAIN (57)...(93): CheC-like family
  misc_feature (1)..(131): Xaa is any amino acid
SEIYLKPTTPAIRGVAVLVGLAGDVEGRVLFDMTKETALAVAGAMNGGEVFTVFDEMPKATIQELANMITAQAVTKLHDLNFKFDLTPPALFTGENMEISTKFDLEALVIPLDLGEGGRIEVNVAIREKAK

SEQ ID NO: 99839 - protein, 276 aa, Unknown
  Obtained from environmental sample
  misc_feature (1)..(276): Xaa is any amino acid
MRRRAFDEAVIEKFIHDKNLPIEKDESKFTRLRNKFEDMKITEWETITKGLQAYYRNPAIMEGEKIFSFEYNDDGDTLDVCCEDLNQCFEKVNAPILRKSLEEIKQYFSAHNVDSDDYEHFKVLLVGGFSSFYAVEKVVRESFCVKSTILDKRFEQPFEIRNRALAISKGAALIAKGEFEIEHTCTDSYGYVTYGRDESNESDETVPFYRLVIKKGTDIKELNEPKWDNEKVYIRSTEGKLRIFIDDGRTNNAGRNEYELEESVKELFPNVDANDR

SEQ ID NO: 99840 - protein, 100 aa, Unknown
  Obtained from environmental sample
  DOMAIN (11)...(100): 1-deoxy-D-xylulose 5-phosphate reductoisomerase
  misc_feature (1)..(100): Xaa is any amino acid
VAETGTAPKRVLILGSTGSIGTQALEVIQANPDRFEVVGLAAGGAHPELLARQLAETGAKHVAVARPEAAAALPVTAHTGPAAATRLVQEVSADVILNAL

SEQ ID NO: 99841 - protein, 111 aa, Unknown
  Obtained from environmental sample
  DOMAIN (29)...(111): GcpE protein
  misc_feature (1)..(111): Xaa is any amino acid
VTVNLGTPNPKAPRPQGAAAQEPAVVHPRRNTRQLHVKNVGVGSEYPISVQSMCNTKTHDVNATLQQIAELATAGCDIVRVACPRQEDADALAEIARKSPIPVIAEFTPAA

SEQ ID NO: 99842 - protein, 143 aa, Unknown
  Obtained from environmental sample
  misc_feature (1)..(143): Xaa is any amino acid
VEKLFIPYEESKAFYSSKVQKKLEVSGNPVRPEFLQADGSRGRAFLNIKEGEPILLVLGGSSGSQEVNSLIQKCLPELVRRYTVVHQLGNKEGDVPASTEKYRPYPYFREEMPDIIAAADLIVCRGGAGTIWECAALRQPMII

SEQ ID NO: 99843 - protein, 193 aa, Unknown
  Obtained from environmental sample
  misc_feature (1)..(193): Xaa is any amino acid
VLWEEDPKLHKLEPLITSLEEDLDELDALGKKDDAKKEAGREKLIASMIKDAGKLEAEGLSETIPIAQIRRAAWWSHLAPIGKGKLLIIENADRMQEGARNSLLKLLEEPPPTVSLVLCTTRPKTLLPTILSRLRPYSFASRSEETEKDVIRRIFRSEDFQRGYGHVDVTGAAGTLGTHIHKEKESLVKAYLD

SEQ ID NO: 99844 - protein, 288 aa, Unknown
  Obtained from environmental sample
  DOMAIN (1)...(286): 4-alpha-glucanotransferase
  misc_feature (1)..(288): Xaa is any amino acid
AADIDNLWKNKSLQEEHLFWVWLQEALDTQFSKAAKAIADAGIVLEGDLPILMNEDSCDVWAHPELFIQELSAGAPPDMYSPGGQNWGFPVYNWEAHEKDNYSWWKGRLAAAGKYYQAYRIDHVLGFFRIWACSRSENSAALGRYVPYTPITTGDFKRLNYDKSRFRWVTQPHIPTAEIWDALRNNWGKSFEDSEISAAAGKIFTKALERVNNEELWLFKKKIKGEKDIEALGLHPAAQDYLIKKWHDRMFIEYDKKKFFPVWYYRNSKAYNSFSYEEKNELEALWKN

SEQ ID NO: 99845 - protein, 279 aa, Unknown
  Obtained from environmental sample
  DOMAIN (6)...(216): Protein of unknown function (DUF1538)
  misc_feature (1)..(279): Xaa is any amino acid
MEASSAVLPITAIVLIASMVLPMPSGTILMFLAGAALLIIGMGFFTLGADMSMMPMGEGIGVELTKSSKLFLLIIVSLVIGFTISVAEPDLQVLGRQTPSVPALTLIITVSIGVGVFLMLSVLRPLLKIRLSVILIFFYLITFIVAYFAPDTFVPVGFDSGGVTTGPMTVPFILAMGAGIAALRSDKSSQEDSFGLVAMCSIGPILAVLLLGIFYKPEYAEVATSEIHNAATSRDVVRYFAVELPIFLKESIYFSKRHCALLYYFPIINKAFKKYQMDA

SEQ ID NO: 99846 - protein, 241 aa, Unknown
  Obtained from environmental sample
  DOMAIN (1)...(183): ATPase family associated with various cellular activities (AAA)
  misc_feature (1)..(241): Xaa is any amino acid
MARTLARILDVPFAVADATTLTEAGYVGEDVENILLKLIQAANYDVQKAERGIVYIDEIDKIAKKGENRSITRDVSGEGVQQALLKIIEATVANVPPQGGRKHPNQECIQINTQNILFIVGGAFVGLEKIVSSRLNSSSLGFGATLKNVTTDSTEISNIHNVSPVDLVKYGIIPEFVGRVPIIVGLNPLDKAALVKILTAPKNALIKQYKKMFALDNIELDFDHGAVEAVAALAMELKTGA

SEQ ID NO: 99847 - protein, 217 aa, Unknown
  Obtained from environmental sample
  DOMAIN (17)...(183): DEAD/DEAH box helicase
  misc_feature (1)..(217): Xaa is any amino acid
MTALEALKQYFGYDEFRGGQETLINGILAGKDVLGIMPTGAGKSICFQVPSLMMDGVALVVSPLISLMKDQVNALTQSGIAAAYINTSLTQAQIDKALRNAVNGQYKLIYVAPERLPTPEFMAFARSVNISMLAVDEAHCISQWGQDFRPSYTRIPDFIARLSKRPVVSAFTATATPKVREDILVQLKLRNPQILVAGFDRKNLYFGARKPRNKYDA

SEQ ID NO: 99848 - protein, 144 aa, Unknown
  Obtained from environmental sample
  DOMAIN (5)...(144): Glycosyl transferase family 2
  misc_feature (1)..(144): Xaa is any amino acid
MSLVSIIIVNWNGAEVLPECLRSLLKLNHKAVEIVVVDNASTDSSVAVVREICGDGAKVVRLEKNVGFAAGVNIGFENASGEFIATLNNDMVVEPSWLDSPMRLLEDGSVGVVSCRQMNYYDRSKVDGLYHYITKDLFLCRCRG

SEQ ID NO: 99849 - protein, 239 aa, Unknown
  Obtained from environmental sample
  DOMAIN (22)...(198): Sir2 family
  misc_feature (1)..(239): Xaa is any amino acid
MENINELYTLIKEAKHLVALTGAGVSTLSGIRDFRGKDGLYNDIDAERIFDINFFEVDPSFYYSMAGSFIYNIDEKEASIVHIVLGELEKRGYLKALITQNIDLLHQKGGSKNVIEIHGSPSMHYCMRCAGVRVSYEEAATIVRKGELPKCPKCGKVLKPAITFFGEQLPADALKQAVTESQKADLMLVLGTSLTVFPAAGMPQYTLRGGGKIVIVNNMPTPLDGRALLHFDDLGSVLR

SEQ ID NO: 99850 - protein, 143 aa, Unknown
  Obtained from environmental sample
  misc_feature (1)..(143): Xaa is any amino acid
FTFTSFEARVLDLALVLHAEHGGGNNSTFTTHVVTSSHTDTYSSVVASLGSLKGPRHGGANVKVVQMFRDMKEKISDWNDDAQISAYLERLLNKEEFDRSGLIYGMGHAVYSLSDPRALIFRRFVEQLAAEKTVTMNTSSIQR

SEQ ID NO: 99851 - protein, 52 aa, Unknown
  Obtained from environmental sample
  misc_feature (1)..(52): Xaa is any amino acid
METATEAVLNSGDTAFMIVCAALVFIMTPGLGFFYGGLSRPQNVVSNMMNSV

SEQ ID NO: 99852 - protein, 180 aa, Unknown
  Obtained from environmental sample
  misc_feature (1)..(180): Xaa is any amino acid
AAAAPSGTLTDGRDGKKYKAVKIGDQTWMAENLNYQTGNSWCYDNNNSNCNKYGRLYDWNTAITACPTGWKLPDTADWSRLEEMVSGGLGGAGKRLKSKNGWNEDGNGTDDFGFSALPGGCRGSDGRFFNIGNDGDWWTTTEISEKGAYSRYVSYNNDIEMNYDLNDKSIMGHSVRCVRK

SEQ ID NO: 99853 - protein, 139 aa, Unknown
  Obtained from environmental sample
  misc_feature (1)..(139): Xaa is any amino acid
LPLDVNTEDEDLTIATSYSVTTLLERLEGVRNKVNVVVLDSCRVPPRIGGDGRGRGGETSRVIKTVPQVPPDVLVIYSTSSGAVAYDGEGKRNSPFTEAFKKNIKSAEPLVQMVSHVTSETLSLTSQRQRPYTSGSMGS

SEQ ID NO: 99854 - protein, 268 aa, Unknown
  Obtained from environmental sample
  DOMAIN (196)...(267): Bacterial Ig-like domain (group 2)
  misc_feature (1)..(268): Xaa is any amino acid
NGSLTLHNNIIWNNGTNDLYTTDAGTVTASCNLTGSCNINIQGNRNITPGIAPLFVGGGNYSLQKTSPAIDAGDKNHIGAEFNVDVAGNSRIFNNLVDMGAYEYNQSVLVSVTGISLNKKTLSLAGKGVSEKLTATVAPVNADNKSVIWTSSNLAVATVAGDGTVTTISPGTATITATACAGGFTDVCTVTVEPVAATGISLDDSALTFNVGGYKKLTATVAPANNTYPTTWMSSNPAIASVASDGTVKALSLGEATITATNGDKTAD

SEQ ID NO: 99855 - protein, 269 aa, Unknown
  Obtained from environmental sample
  misc_feature (1)..(269): Xaa is any amino acid
TDDSVEWYSSDETVATVDDDGTVRIIPECISTNCYRTIRIYAFIQDYNANCKVTINPSITIGDAETPVITEQPQPATYNQDATATTLTVTATVNDGGTRTYQWYVSASDNNTGGTAISGATGTSYTPSTATVGTLYYYVTVTNNNNSVTGTKTATATSNTAAITINTLVNAATPSITAHPQDATYIQNATATALKVTATVSDGGTRTYQWYVSASDNNTGGTAISGATGTSYTPSTATVGTLYYYVVVTNTNNSVTGAKTVTAISNTAA

SEQ ID NO: 99856 - protein, 157 aa, Unknown
  Obtained from environmental sample
  misc_feature (1)..(157): Xaa is any amino acid
RYLWTADVVEFHRVTDTESGINIPDARGKWKPYPIEYKRGKPKTNRCDEVQLCAQALSIEEMLGVTINEGALYYCTPKRRTVIEFNADIRSETEATICRLHELIRSRQTPKAIYSDKCKQCSLKDICLPQISNYGTVMDYIEQELGISEEHSDETTP

SEQ ID NO: 99857 - protein, 201 aa, Unknown
  Obtained from environmental sample
  misc_feature (1)..(201): Xaa is any amino acid
SRHKQAFGIDCVLEMRKRTGSDFPIMYRIDLSLALNETYGEGMLATGSLKKFTKGRTIDETLDFMKNLVRAGVDVFDVDLGCYDNWWLPHPPSSMPPGCFLEVCALVKDYFDKNNIKSNQGLPVPITAVGKLGYPDLAESALREGQADLVMLGRPLLADPDWPNKAYAGKVEEIRPCIGCQEGCVNEFVEGGHPSARLIPA

SEQ ID NO: 99858 - protein, 266 aa, Unknown
  Obtained from environmental sample
  misc_feature (1)..(266): Xaa is any amino acid
MQKRLEDIYYEAEDLAAEFRNYRGRLTYDPEKLEEAEERLALLYKLKKKYRPAGNADAGGQDEGGILAYKTEAEAEIETLSGAGENQDRLKAEINRLEKDLSAKAAALSAKRNEGAKRLGEGITGILSRLGMPKAVFAANVKPKTREGGAGLVCGPWGSDEVEFMISANTGEPLKELARIASGGELSRVMLAIKTILLDSAFASASDDTGAETLIFDEVDTGIGGEVALSVGEYLARIGTSPAGKSPADNRKQIFCVTHLASIAVR

SEQ ID NO: 99859 - protein, 192 aa, Unknown
  Obtained from environmental sample
  DOMAIN (2)...(169): Type III restriction enzyme, res subunit
  misc_feature (1)..(192): Xaa is any amino acid
MHPPLTSEQQNALDVLSDMLQANGFRGALLHGVTGSGKTRVYLELARKALSIGMKTLILVPEINLTHQTKKRFEEFLGCEIWVLHSALGAREKREAWRKLLNLNTNVLMGTRSAILSPFEPQLIIIDEEHDSSYKQQDPAPRYNVKEMAFHIAHKYGALVVLGSATPSLETYSNAKNGNLKLIEMKERPGSL

SEQ ID NO: 99860 - protein, 243 aa, Unknown
  Obtained from environmental sample
  misc_feature (1)..(243): Xaa is any amino acid
MRELIWTDDRIEALSANLAVCSEFSDGGKAVIEELISRRSFAGEEMFYPLAMSKENSILDYLGSEGTLVLIDRERLDNAQESISREYHGLYMRSRREGESREFPLPERLLLNFKELIENQQNDKARKIISFLSIKSEARPGIPRVNIPCDPSRSFFGNINYMKDEFAALHASGWHIAVAAESEVQAQRIESMLVPHKSLSIIASPLSSGFSLPDIKLMVIQESEIFGRRKRPPRSLKTVRSSP

SEQ ID NO: 99861 - protein, 213 aa, Unknown
  Obtained from environmental sample
  misc_feature (1)..(213): Xaa is any amino acid
MAEETDGTQKPKAELIKHTQDHGSEKAPPGTPSATQGASPAKSGERHKIVLKKKSPGMAAGSPGSTALSMIKKLPKLVRSSHQDSKADSAGPHGEESQDGASRAETKDTFPGEIAGTPSSGNSPGAFSFAQRPAVVAGRVGGKPAGRKSHNDAAVSSGPPQNKSGSGGYAGAAGKTGSRQGQSNFSGAPRQGGGRFGASGYPAGHDGGRAGGH

SEQ ID NO: 99862 - protein, 154 aa, Unknown
  Obtained from environmental sample
  DOMAIN (46)...(148): Mur ligase family, catalytic domain
  misc_feature (1)..(154): Xaa is any amino acid
MPRVEANKFLKQTANMPLESQGVNAKQPANMPSAKGYTSLLRPNASVYFVGIKGTGVCALAELIHGMGIKTAGSDTNEVFYTDGILRELGIPFYETFDPAHISDDIDLVIHSAAYSAENNAELAEAVRKNIPLMLYPQALGAFSAGFDSTGIAG

SEQ ID NO: 99863 - protein, 59 aa, Unknown
  Obtained from environmental sample
  misc_feature (1)..(59): Xaa is any amino acid
TGNPSATLPVYMARFREQQGQFVAQLSAASTISVFPAIIFGWMSQKALVKGLVSGAVKG

SEQ ID NO: 99864 - protein, 214 aa, Unknown
  Obtained from environmental sample
  DOMAIN (26)...(132): Alcohol dehydrogenase GroES-like domain
  misc_feature (1)..(214): Xaa is any amino acid
MDMRALIIEKPGTARVQTVPVPLVGERDVRIKIKASGICGTDVHIFRGEYLGGYPVIPGHEFSGVIEEIGNKVTRFKVGDHVAIEPNISCDNCHACLNNRQNFCERWNGVGVTLPGGMAEYAVVPEKAVFNIKNLSFLSGAFVEPLSCVLHGIERTRFRLADKVLILGAGPIGILLSKVIQLQGACEITQVDQNKSRLDLAQKSGAAKVCASLD

SEQ ID NO: 99865 - protein, 73 aa, Unknown
  Obtained from environmental sample
  misc_feature (1)..(73): Xaa is any amino acid
MMKGIILPGNSTVEFREYPIPEPGHGQVLVRTKSSTICGSDIRAIYREHVGKGPEGYQGVIAGHEPCGQIEKI

SEQ ID NO: 99866 - protein, 297 aa, Unknown
  Obtained from environmental sample
  DOMAIN (219)...(297): POTRA domain, ShlB-type
  misc_feature (1)..(297): Xaa is any amino acid
GRQFDDSLFWEIQGRLYALEYFDLISPAIERFDSRGEEIIIRFTVTERPIVSRINFIGNSGIRRTELLETITIKTNDVINKAKIAVDELAITNKYLEKGYPDVKVSSEMQPGPNSTVILNFNITEGDKISISEFRFEGNSVFSARTLRSQLSLKVKTLLSDGAFQEKKLIDDIAAIRQYYRDRGYIDAEVIDVTREIEKDAKGNNNMILTFRINEGRIYTFGGVTFEGNQIFSTAQLSALIRSKVGETINARRLEMDLQSVTDLYYENGYIFNTINRDENRNPVEGVISYHITIIER

SEQ ID NO: 99867 - protein, 262 aa, Unknown
  Obtained from environmental sample
  DOMAIN (103)...(216): Response regulator receiver domain
  misc_feature (1)..(262): Xaa is any amino acid
TEEQISTIFTTEYSRFNQEVNRSVEGTGLGMNITWRLVRMMNGMISVESQPGKGTKFTVRLPQQRASSNVLGKELTEKLRNFRISSSAQMKRAKITREYMPYGKVLIVDDVYSNLYVAKGLMSPYGLSIDTATSGAEAIGKVKSGELYDIIFMDHMMPKMDGVEATKIIRDLGYKNPIVVLTANAITGQAKYFLENGFDEFISKPIDIRQLNTILNNLIRNKQTPEVIAEANRQKNDLDSEQRSSLSKPDSVLQTVFLLDVK

SEQ ID NO: 99868 - protein, 256 aa, Unknown
  Obtained from environmental sample
  misc_feature (1)..(256): Xaa is any amino acid
EQKRKEKAPVPVTITVKPVKKDNEYLKRLTGKTDEDYRLYLKLREDYIGSPTFYFDMAEWFYTHNDKKLALRVLTSIADLDLENAMLYRLLGYRLKEYGEYAMEKFVCRKVVKWRPMEPQSHRDYALALADNGEAQAALDSLYGLLKKTYSENIGNRSKGIDEIVITEINQLIAKKPKLNTSKIDTSLITNIAMDVRVVINWNMNNTDIDLHVLDPYDEMCYYRHNATQIGGRISADNTNGYGPEQFLLKKGGKGE

SEQ ID NO: 99869 - protein, 90 aa, Unknown
  Obtained from environmental sample
  misc_feature (1)..(90): Xaa is any amino acid
MEKQPNVIVFFTDQQRWDTMGLYGNPLDLTPNLDRMAVEGTHCFNAFTCQPVCAPARAVLQTGKYATNTGVYRNRIPLGKEHKTLAACFK

SEQ ID NO: 99870 - protein, 279 aa, Unknown
  Obtained from environmental sample
  DOMAIN (37)...(279): Domain of unknown function DUF81
  misc_feature (1)..(279): Xaa is any amino acid
MLTAVVLSYIGLSLISFLSLEPVGSGMGNSTIVLWLLAFFLISLAIALVAVIAGIGGGVIFTPVMMAFTPVNSLVIRATGLIVAMFSGLISTGIFMKKGLGNFKMCITLAVSQGIGALIGAQCAIVAASAFGDTGEGVIRVVLGGILVGVAVYFFTGGKKLEWPDIQKVDIITKWMGLEHTYYEESEDKVYTYKITRIILGLALVLCVGFLGGFFGMGAGWAITPVQNLGLGVPLKVAAANSGIILGMVDCVAVWPYMLAGGIIPLFVLPWLSGQVGAV

SEQ ID NO: 99871 - protein, 197 aa, Unknown
  Obtained from environmental sample
  misc_feature (1)..(197): Xaa is any amino acid
MICVPVAADFGAGVAAYYSAENRLTGRSAATGEKTSLGADDGIGVAIAMAVLDDGEEIVHPPLVAIFTAEEECGLTGARDISADDILGIAPGLDFSRAAFINLDNGHFGQFSVGCAGSANVTVKVPVERTGVAPPPDAFCFELAVHGLAGGHSGLSIHEKRGNANILLCISISTLCHKDIDLPVLGLGLCGDASNAI

SEQ ID NO: 99872 - protein, 274 aa, Unknown
  Obtained from environmental sample
  DOMAIN (222)...(274): His Kinase A (phosphoacceptor) domain
  misc_feature (1)..(274): Xaa is any amino acid
FWINDKDKMFYMDSNAPYAVDPEAPENAWYNKTLYKTKAYNFDINYNPALKVTKLWINAPVLNKERTGPLGAVGVGIDITAFVKRLYEQYKGRAELYYFNADGEITGAHNVDIVVNKEHIEKFLGVAGVGVQTRALRLKEGEIVTYDSPSGKIAIGPVPALGWYAVAIMPDTISDYKSPVAVVFLLMLLLIALIIVIFNIFIAGFLKSLRRTMDSLETSARYKSEFLAMMSHEIRTPMNAILGMAELAMREKELPRAQEHVLTIRKSGMNLLSI

SEQ ID NO: 99873 - protein, 218 aa, Unknown
  Obtained from environmental sample
  DOMAIN (6)...(107): Uncharacterized protein family UPF0004
  misc_feature (1)..(218): Xaa is any amino acid
MSNEQYFSIFTLGCKLNQLESEAIADAFKKAGFRLVPPDPCSHEPRIIIVNTCTVTSKADQKARRMIRKLLKDNPESCVIVTGCYAQLDAEEIRTLGADRRRLFVLGGGEGAASAAPGAKSALLGLPEYLSDVSSGEPLPCLLESWIKNSASVIEEDSVFKFNPDEFSFHSRGYLKIQDGCDNNCAYCRVRLARGKSVSLNHGAVLERLRAFEAKNCP

SEQ ID NO: 99874 - protein, 94 aa, Unknown
  Obtained from environmental sample
  misc_feature (1)..(94): Xaa is any amino acid
MAVGLLGGGVMPVQDDVRVTINVNKDLKDRADALFGRLGMNMTTAINVFLYKAVDEEAIPFSVSAKDAVFRNGYTSADVMEAFDAAVRDEIAAS

SEQ ID NO: 99875 - protein, 280 aa, Unknown
  Obtained from environmental sample
  misc_feature (1)..(280): Xaa is any amino acid
FVSADNANTYNKAQGTENWSYRFNSKILKDGPHVVFIRVIDNYDIPATYASMINIDNTAPEIVLDSPTDGSLSIGRLSLMGRVEDANLDNVNIEIRSLEGATVTPNVRTRKLGALDTIKQDYELTGMKDGLYNIEIVSTDKAGNISRSSRNFALARETFKNIVEIYYPLDNENVQNNFSLYGYAGGTDPAVKVTVKINGSDRVEAEVDPVSGFYTIPLTTEHLEEGNNTVIVYSDFGGYGTIQSRAQNLIYAPNGPWVTIDSFKFGDFAYERPYVSGRYG

SEQ ID NO: 99876 - protein, 272 aa, Unknown
  Obtained from environmental sample
  DOMAIN (113)...(180): GHMP kinases N terminal domain
  misc_feature (1)..(272): Xaa is any amino acid
MPQKTINLFVPGRLCLFGEHSDWAGLHRIINAGIVPGAAIVTGIEQGICAEAEKCEHFVIRNEAPELAGMWVDFDCPMQNRELRAVAESDSYFSYASGVASYIKDHYSVEGVKITVKKMTLPMKKGLSSSAAICVLVARAFNRLYSLNLNTRGEMDIAFKGEQRTRSRCGRLDQACAYGTVPVLMRFDGDDINVERLSVKGNFYWVFADLNAKKNTIKILGDLNKCYPFAETEKEKNVHAALGELNQKITKKAVENLKNGEAEKIGELMTEA

SEQ ID NO: 99877 - protein, 144 aa, Unknown
  Obtained from environmental sample
  DOMAIN (49)...(143): Glutathione peroxidase
  misc_feature (1)..(144): Xaa is any amino acid
MKRISVILIITCVINVSVFGQNKKIPVAVTKAFKEAGIQAASEGVEPVDFTITLLDGTIVNLAQLKGKVVFLNFWATWCGPCRSEMPSMEAVYQKLKDKGLEIIAVNLGDSRKEVTDFMNNYKLNFPAGLDEKKLTGMYYHIQA

SEQ ID NO: 99878 - protein, 285 aa, Unknown
  Obtained from environmental sample
  DOMAIN (4)...(84): Acetyltransferase (GNAT) family
  misc_feature (1)..(285): Xaa is any amino acid
ELDFVALDNNKIVGNIMYAKSAVKNNDLEYTVLTFGPLSVLPEYQNKGIGGKLINHTIELSKGMGYKGVIIYGDPEYYKRFGFKESKEYKITNKDKKFPAALLVLELYPNALNGIEGIFDEGKAYEIDKNEADEFDKNFIAKEKGYLKSQERFKELSNMYLSDIQSRLEKVGITIPEILLPQAELKQWAVIACDQFTQDRAYWKKAADIAAGSPSSLELIFPEAFLDEENLALRIEGIHGFMRNYLESGVFAASRRGFVYLERDTPFNQGRKGLVAAVDLEQYSW

SEQ ID NO: 99879 - protein, 139 aa, Unknown
  Obtained from environmental sample
  DOMAIN (7)...(139): Adenylate and Guanylate cyclase catalytic domain
  misc_feature (1)..(139): Xaa is any amino acid
MREGKTELTPAYKELTILFSDISGFTKWSSDKSPKDVHNFLSDYLESMAEILFAHGGTVDKFMGDGILAFFGDPFDMPDHTERCLRAAIAMQKKVRLLAEKWKPLVGIDLKVRIGINAGKVIVGNLGMKTRMRIHGNRR

SEQ ID NO: 99880 - protein, 242 aa, Unknown
  Obtained from environmental sample
  misc_feature (1)..(242): Xaa is any amino acid
VNIPSLKILDGIGFDAAIDRIAALLGVTDPAEKARSFPRVYPLGLGISAVSPLSMARAFAIFANEGKAVTPYSIKTVEDRNGRILKDFEADIRNKAKEMGKDFQVISPQNAYMMYKLCAKSIEMGTLAFGSGYGSKLNVRDDKGVVYRIPAGGKTGTSQNWSDAWTVGFTPYYTIAIWFGFDKGGNSLGMNVSGAVLAGPIWGNLMHEYNQGLPRRDFPRPSGIVDATVCRTSGLLPTPRCP

SEQ ID NO: 99881 - protein, 279 aa, Unknown
  Obtained from environmental sample
  DOMAIN (233)...(260): The GLUG motif
  misc_feature (1)..(279): Xaa is any amino acid
GSPITPKPSISFKGSTLTEGTHFEYAYDNNVQIGTATLRIVGKGSYSGQQANIAEFKIIAAACGTGFAGGTGTEEDPYEIAEAKNLDAINNCLDSYSDKYYKLQNDIDLDSYLANASAGWQPIGRRGFYGKFNGNGHKVSGLWINRSAANNVGLFGYAGGEIRNIGVEINDDKGGVKGYSSVGGLAGSNSGTISNSYATGNVTGTGNYSVGGLVGSNSGGTISNSYATGNVTGTDDVGGLVGYNDGGGTISNSYATGNVTGTGTGNYSYVGGLVGSGGT

SEQ ID NO: 99882 - protein, 224 aa, Unknown
  Obtained from environmental sample
  DOMAIN (137)...(224): Domain of unknown function (DUF1732)
  misc_feature (1)..(224): Xaa is any amino acid
IRVREEGAPISISINENAAASYKNAINALAKTLGIKEEPGLGIILGLEGVLEIETDRDAEKYRAFIEAVLASASDQAEAERAREGRHTMEDILSHIAVLEESAKSISAHVPEIEKNIRENLRIRFAELLGDKIDENRILAETAVLLMKYTISEELSRLSSHLKEFRLETERNPSPGKKLDFLSQEINREINTVSSKTPMLEVSRIVVEMKNALENIREQLRNVE

SEQ ID NO: 99883 - protein, 61 aa, Unknown
  Obtained from environmental sample
  misc_feature (1)..(61): Xaa is any amino acid
MLSEKGKKEIKIAVSGKSGCGNTTVSRLLADALDVRFINFTFRNLAQEKHLSLKEVLELAA

SEQ ID NO: 99884 - protein, 216 aa, Unknown
  Obtained from environmental sample
  DOMAIN (33)...(216): Bacterial extracellular solute-binding proteins, family 3
  misc_feature (1)..(216): Xaa is any amino acid
MIVKKAFIISLVCVLFIGCVKNNNSPTLKKGVLAVGVEIGYPPMEYYGADGALLGFDIELTKALAEKLDLEVNFIDTAWENILAGLDAKRYDIAVNVTVLPERQKKYNFTKPYINSFITIVTRAGSRIKISKTADIAGYRAAFQGNTTAQYFTERLNNRGIKFSPFSYDKIINCFDDLRLGRVDLVIADNIVAYYHAGKENSGLEIVWEDSPDFPV

SEQ ID NO: 99885 - protein, 263 aa, Unknown
  Obtained from environmental sample
  DOMAIN (102)...(248): ATPase family associated with various cellular activities (AAA)
  misc_feature (1)..(263): Xaa is any amino acid
MKRILAQAPGFPVIMLTGHGSVETAVNAMRDGAWDFLTKPVDMDHLSLIIKRALENRELVFKHRQMTEEIERRKQFKSIIGNSRNIRDVFDTMNKAAPTKASILITGESGVGKELVADAIHELSPRKDFPLVKVHCAALSSTLLESELFGHEKGAFTGAISQRHGRFELASGGTLFLDEIGEIDQNIQIKLLRVLQEKKFERVGGEKTVEVDVRIVAATNKDLKAEIEKGNFREDLYFRLNVVNILVPPLRERKDDIPLWRLL

SEQ ID NO: 99886 - protein, 80 aa, Unknown
  Obtained from environmental sample
  misc_feature (1)..(80): Xaa is any amino acid
MSNHYNMPVLPTASSPLVTIIVDNKEVQVPSDTNLIEALKAVGIETPHLCYHGYLPVSGNCRQCLLEVDGPRGMALTIGC

SEQ ID NO: 99887 - protein, 217 aa, Unknown
  Obtained from environmental sample
  misc_feature (1)..(217): Xaa is any amino acid
MDTNFTDKVLNFFTKVICPVPRASHQEDLIADNLEEFAAVRGLTSFRDDNNNVIVFKPGTGKYAGTSTPVILQAHTDMICVPASADFSFGVEAYYSAENRLTGRSAVTGEKTSLGADDGIGVAAAMAVLDGGDEIVHPPLVAVFTAEEECGLTGARDISADDILGIAPGLDFGRAAFINLDDGRFGQFSVGCAGSANVTVKVPVERTGIAPPPDAFC

SEQ ID NO: 99888 - protein, 268 aa, Unknown
  Obtained from environmental sample
  DOMAIN (36)...(166): Thiamine pyrophosphate enzyme, C-terminal TPP binding domain
  misc_feature (1)..(268): Xaa is any amino acid
CCCLINKILANDQKDDAAIEAQRKNVDELKAALKNDSKSTAKLLLSLADYFIKRSVWILGGDGWGYDIGFGGLDHVIASNRNVNLLCMDTEVYSNTGGQMSKATPVGAIARFAAAGKEIAKKDLGAIAMSYGYVYVAKISMGANLAQTIKAIREAESYDGPSLIIAYSHCLQQGIDMSHGMDQSKAAVTSGIWPIYRYDPRLKAEGKNPFQLDCKDPTTSLEDFMYKEVRFKSLKAADPKRADALLAKAKAQTERVWKEYKYLAERPF

SEQ ID NO: 99889 - protein, 289 aa, Unknown
  Obtained from environmental sample
  misc_feature (1)..(289): Xaa is any amino acid
ETAREIDQSPLAKVNLAQAYQMFGRLEEARLYALDCLKAGDQSWMAYYGIDPVRYKRDIHEILYKTYSGLAKAERFLPWGTIDGVIRSAVRSVSYRFNYAVHRMLYQKYSLASGDAYDIRESNGHPPLDQYIQYYNALETYPRRALVYLRKARDFETTIIPASVGSYYLEEGVLRKNTGLAAQALDALDPVWERDLISNCYREFALRGSASSAEELFALNRGALLQAGISLPLEIRLNYPGGSATNGGVGINKNKEKTFMKALAKAGFVKTVSPNKARFTLDITINAAP

SEQ ID NO: 99890 - protein, 71 aa, Unknown
  Obtained from environmental sample
  misc_feature (1)..(71): Xaa is any amino acid
MPVADKVHFSKEHILRHRLNASPELAEQAVHCLELVAELSLGGLSYQFKGGNSLLLILSEPKRFSIDVDVA

SEQ ID NO: 99891 - protein, 83 aa, Unknown
  Obtained from environmental sample
  misc_feature (1)..(83): Xaa is any amino acid
MERNANFNFSEMGIPIGSILFFSNNKNIKARVINDRKVEFENQETFLTPLTQKLLNINYAIDPTKYWYYKNKVILGYIKKSGT

SEQ ID NO: 99892 - protein, 237 aa, Unknown
  Obtained from environmental sample
  misc_feature (1)..(237): Xaa is any amino acid
MVSPSTITRVVGVEAEYRNFNTGNAAMLNQRLTVIGLGNDDSEYGLEKKQFFSATKVAENYGWGSPLHLVAERFLPSTGKTAEFSVTFNPLKKSAQAVAASGSISATGIATANGSGTAYLGGVAAEFPVLKDATAAEVLAAIKTAINGVLSMPVKTGNIEDDVLPLTSKWSGDIGNQITVVIEANAPGILFVTQNFSGGAVDPDVTPALEKIGIVWETFIFNTFSYKNTGALDKYQS

SEQ ID NO: 99893 - protein, 265 aa, Unknown
  Obtained from environmental sample
  DOMAIN (1)...(260): Alpha amylase, catalytic domain
  misc_feature (1)..(265): Xaa is any amino acid
VFNHTGRDFFAFKDVKEKRENSQYADWYLNTDFSRNNEYNDGFSYEGWAGHKSLAKLNLDCRDVREHLLGAVKYWIEEFNIDGLRLDAANVISVDFLRELSLFSKNIKKSFWLMGEIVEGDYRSLANEGCLDSVTNYELYKSLWSSFHDQNIYELSWTLKRQFSNTGLYQNLALYNFADNHDVNRAASSLKDQANLFPLYGALFCVPGIPSIYYGSEYGVYGKRGAHSDYDLRPAWEDNWSETNIGKDLFREICRFSKLRHESDA

SEQ ID NO: 99894 - protein, 181 aa, Unknown
  Obtained from environmental sample
  DOMAIN (29)...(112): Glycosyltransferase sugar-binding region containing DXD motif
  misc_feature (1)..(181): Xaa is any amino acid
MDEIKIPKTIHYCWLSGEKMPADAVTCMDSWKAHMPEYRLVLWDTNKFDVDSHPFVKEACTAKKWAFASDYIRLYALYTEGGVYFDTDVFVKTSFDRFLCDSFFTGVEYHAGPAKRGRRLLNEDGTLKNPHSGEIFSHGIQIQAAIMGGVSGHPFPKACMDWYDDQHFSLGAWTSSDKLIS

SEQ ID NO: 99895 - protein, 179 aa, Unknown
  Obtained from environmental sample
  DOMAIN (65)...(173): NADH ubiquinone oxidoreductase, 20 Kd subunit
  misc_feature (1)..(179): Xaa is any amino acid
MEVKKAHTRHMKYEDFNDNEYLEQYVAELRKSGATIFVGKINDFINWGRSNSVWPLTFATSCCGIEFMCVGAARADFARFGWEVTRNSPRQADVIFVCGTIVHKMAPVLKRLYNEMAEPKYVMAVGSCAIGGGPFKNSYHTVMGVDKIIPVDVYVPGCPPRPDAMLYGMMQLARKIKVQ

SEQ ID NO: 99896 - protein, 278 aa, Unknown
  Obtained from environmental sample
  misc_feature (1)..(278): Xaa is any amino acid
TGVFRIVGNTFVRTGSGDQRATESEIDALFRDQSFGVRSDLSVEGLNFNDLNKGSLLTYRNRVKSQNPQLPYNNLSDEAFCEKLGITKDGALTYGGLLTLGKEDSIKRIFSSFWIDYLEIPGVSYSDAKTRYTFRIQEQENLWEYYNVLIQRLRNYADNPFRMGDNGFAYEDDTQLDALREGLVNMLMHADYFSVMHSTIRTYNNRIVFQNPGRFDINISEWHKNAISKPRNPVIARIFRWAKLAENAGFGYDKMIAWKHKVEFNTHIDYSEAAFFLD

SEQ ID NO: 99897 - protein, 117 aa, Unknown
  Obtained from environmental sample
  misc_feature (1)..(117): Xaa is any amino acid
MTFRRQRRAGRLKYEMHESVFKGMRMTAKITVIGVGGGGGNAVRNMLNAELRGIDFICADTDASALAELPKEIGRIRLGEQRAKGLGCGADPQIGRNAAIESLAAIKQALGDAHTVI

SEQ ID NO: 99898 - protein, 58 aa, Unknown
  Obtained from environmental sample
  misc_feature (1)..(58): Xaa is any amino acid
AFGANPTPQYSGQLITNHIDDYGFLRYEMGYAAAVSVALLCIVWVFSKLAYTFFGERD

SEQ ID NO: 99899 - protein, 286 aa, Unknown
  Obtained from environmental sample
  DOMAIN (166)...(285): ATPase family associated with various cellular activities (AAA)
  misc_feature (1)..(286): Xaa is any amino acid
VEATKYTEVGYVGRDVESMVRDLMAAGFQMVKQEMQEAVKQEAEKRAEEALLDLLLPISEKKHKDKKQRPGPIMRPMGTFQINPENSNSSIIATTLQLGFPAFKKNQETQDSENEQKNAEGQEESADEIKDGENERFKATREKLRTMLREGLLNDRTVELTVGQNPTIPAFEMMGGSMEDLEASLSGIAGMLGGGQKKKVVTVPRAMEILKAEEAEKLVDRDRVSDEARQRVEETGIIFIDEIDKIAVKGDRGGGPDVSREGVQRDILPIVEGATVNTKWGPVNTD

SEQ ID NO: 99900 - protein, 270 aa, Unknown
  Obtained from environmental sample
  DOMAIN (44)...(109): His Kinase A (phosphoacceptor) domain
  misc_feature (1)..(270): Xaa is any amino acid
VDLVRIPYGDDYAVVGFVHDMREQQRMINEIESALEEAKRASKAKTSFLANMSHEMRTPLNAILGLSELTLETDLSDAVHENIEKIYAAGSMLLSTVNDILDISKIEAGKFEIINGDYDVPSTINDTVTQNILRIGEKPIKFILDIESDLPVRLNGDELRVKQVLNNLLSNAMKYTLEGTVELSIRCKREGNSVLVTVRVSDTGIGIKPEDIKKLFSDYSQFDKNVRHRVEGTGLGLPITKMVLELMDGSIDVQSEYGKGSVFTARFRQN

SEQ ID NO: 99901 - protein, 56 aa, Unknown
  Obtained from environmental sample
  DOMAIN (31)...(54): 4Fe-4S binding domain
  misc_feature (1)..(56): Xaa is any amino acid
MAHRITDACTACGTCMSDCPVEAIKEGSPHYTIEADTCIDCGACLASCPSEAIVAD

SEQ ID NO: 99902 - protein, 284 aa, Unknown
  Obtained from environmental sample
  misc_feature (1)..(284): Xaa is any amino acid
YGFRFIFNEKSFDYIDVRHPCSEAQYDEIVKNISSPINYEEIKTPLQNNNFIKQCSLKNKKEIEEIFNTCLVTSFPAYRHERPGYLTDPYSISINYAIQAAYNGYLTNPLEVQSGLPQLANWILDLVINMTLYKNNSFHQLKFDELVHVFDHMLKSKFHKGTKLGLGTRHQNGERIGVYEASEKGKCLYPSIFNMSSGENSLLCIFGELIRQVDRIAPDEVSQNISGIVLIDEVDKHLHIKLQKEVLPLLFNLFPKVQFIISTHSPFVSMGLAELAKTRTKVID

SEQ ID NO: 99903 - protein, 279 aa, Unknown
  Obtained from environmental sample
  DOMAIN (1)...(221): Glycosyl hydrolases family 2, TIM barrel domain
  misc_feature (1)..(279): Xaa is any amino acid
IYLWDEANVESHCFANQLCADTRWTYAFVLRMQRMVERDKNHPAVVVWSLGNESGFGVNHAAGAGWMRLYDPTRPTHYQGVIRGKPNVLDSWEQGKTITDLVCPMYPAIEYITNYVRYRDDYRPLIMCEYSHAMGNSNGSLGDYWKAIETHHGLQGGFIWEWRDHGFEAYTPEGVKYWKYGGDFGDVPSDYDFVCDGLLFPDQGLKPVMAECKQVQAPVRLTAVPEKPYSFILENRYDFSTLDQLSFQYKIFEDLADGGEARILKQETIDLPLLKPGEK

SEQ ID NO: 99904 - protein, 93 aa, Unknown
  Obtained from environmental sample
  DOMAIN (51)...(89): HicB family
  misc_feature (1)..(93): Xaa is any amino acid
MEYKGYLGTVDYDADAKIFHGDIINTRDIITFQGTTVNEIEKAFKDSIDDYITWCKEDGVEPEKPYSGKFNVRLPPELHRQIAILAKKRADIT

SEQ ID NO: 99905 - protein, 79 aa, Unknown
  Obtained from environmental sample
  misc_feature (1)..(79): Xaa is any amino acid
MEMVFRNPIQANILWADIEGLLVALGAELSNGSGSRLRVKLNGVRAVFHRPHPPKTTDKGAVDSVRRFLVNAGVIYDGI

SEQ ID NO: 99906 - protein, 69 aa, Unknown
  Obtained from environmental sample
  misc_feature (1)..(69): Xaa is any amino acid
MALDGAGWHRSGSLAVPGNMRLLPLPPYSPELNPVENIWEELREKFIGNSVFDSMAALEDCLQTGLKRL

SEQ ID NO: 99907 - protein, 278 aa, Unknown
  Obtained from environmental sample
  DOMAIN (3)...(276): Protein of unknown function (DUF1015)
  misc_feature (1)..(278): Xaa is any amino acid
LNDGVFGEPYQGFIYVERDTPFQKKRRGLVAAIDLEKYDWQSNSLPLIRCTEGTVPERLPPRMNIRRSAPLELPHVLLLIDDDTDTLLPSVGELAKKTAPVYSTPLMIGSGCITGWFLDAQNEDKSLQVLSVITEKLNELCSRSVSRYGNDKSCEPFLLAVGDGNHSLAAAKGIWEEYKAENGLCDHPCRYALAEIENIYDPAIQFEPIHRLVLNADFDEMISVLSILPDFSLNKAGSREEIVKFCACPPEGIYANRFGVVSGDSYALIETSAAGIAT

SEQ ID NO: 99908 - protein, 62 aa, Unknown
  Obtained from environmental sample
  misc_feature (1)..(62): Xaa is any amino acid
MNGYEAIKKLKISDKFREIPVIFLTSMTGEENKMAGYLLSAADYIQKPFVTPVLLERIKKHL

SEQ ID NO: 99909 - protein, 251 aa, Unknown
  Obtained from environmental sample
  misc_feature (1)..(251): Xaa is any amino acid
LGDGIARGKNELTATMSGFVRIGGNWADIVPLAKHSYKINTGSDGLTLFFSFEPGDKRFAPPKGEQILAEAAVMGADAGSLVGAAELDSAIDEAIKNGTLIEAFSLFNPQEAEARVDISQDKTKATLYLRKGVAGAQPLEMKAISQAVKESGVHGYDAEKLKAALHEFMESKALVLPEYVLVEGITSTRGKDRDVKVSVKVLSEEEKKPVIERLKEWSSRDISRAPEFKLDEAFDLAFVEKARNLPKSAKA

SEQ ID NO: 99910 - protein, 174 aa, Unknown
  Obtained from environmental sample
  DOMAIN (6)...(128): GTPase of unknown function
  misc_feature (1)..(174): Xaa is any amino acid
MTPSLPRVALAGRPNVGKSTLFNRLLHRRRAITDPTPGVTRDPISADAVIRGKKITLIDTGGFKLDRDDSPEGFLEKVVVERALEVLKGADLIVLILEAGEITPEDEEFIDLLRPYQEKIIPVVNKCEGGRREAEAWNLLAYGFEKIIMISAEHGDNIDDLEEAITGRLARFTR

SEQ ID NO: 99911 - protein, 149 aa, Unknown
  Obtained from environmental sample
  misc_feature (1)..(149): Xaa is any amino acid
VNLFPPLDAQARRLLDELLTAIDKVFPLPGRFAHGLPGDVAELSRLFTFRRPERGITYLGKPNLLSAYLRYFLPWNVFRLCRLLPALPIDLEDGGVVLDIGSGPLTFALALWISRPDLRNTALEFVCVDRTPSVLDAGKALLVPLVPLV

SEQ ID NO: 99912 - protein, 106 aa, Unknown
  Obtained from environmental sample
  misc_feature (1)..(106): Xaa is any amino acid
IEPTSHSRFISEILVVGRKEPVYGGEKIFAVVVPNLETIKEDYPGLENDEDTVRSLIKKTIEEINRMLPGYKKVSGFTLRKEPFEKNAQQKIRRFIYKSYEERGET

SEQ ID NO: 99913 - protein, 275 aa, Unknown
  Obtained from environmental sample
  misc_feature (1)..(275): Xaa is any amino acid
MGCGGNNENIDPPPPPSQLSSDAGIADLSISLGELAPAFSPGINAYTATVGYLGETSIGVTVTLRDAKARLTLNGLACASGVPTNVTLREGDNRIMAMVVAEDGRTDNTVTLRVNRLTSNTRVWVLNGISGGPVANTKLTLTDTEGKVLADNVTLPREKNGQLIFGLDPNRKYNIYAKGDNAAAACFANFDRAKEDTATLYCLRTSTTYYELEAPIIEEIAFATTNDANALWKTMANNAYYVGTAANMAAVRVTTLTRNLSPVDYAEYLPISLGI

SEQ ID NO: 99914 - protein, 269 aa, Unknown
  Obtained from environmental sample
  DOMAIN (6)...(53): Regulator of chromosome condensation (RCC1)
  misc_feature (1)..(269): Xaa is any amino acid
VALKTDGSLWTWRRNTSGQLGDGTTTHRNVPGRVGTDNDWVAVSAGAAHVMAAKSDGSVWTWGSNSNGQLGDGGTTHRNVPAPVDFDAVEVTGVSLNKATAAIMVGGQEQLTATVAPSNATYKSVTWSTSNSAVATVSDSGLVTTVSVGTATITATTQQGGKTAQCAVTVTPVPVTGVSLDKTTMTLAGSNQEQLTATIQPDNATNKAVSWSSSNNAIARVSDSGLVTGAGVGTATIKVTTQDSNKTAQCTVTVTNVPVTGIALDKSAA

SEQ ID NO: 99915 - protein, 285 aa, Unknown
  Obtained from environmental sample
  DOMAIN (8)...(284): Cellulase (glycosyl hydrolase family 5)
  misc_feature (1)..(285): Xaa is any amino acid
MGIGINIGNTLDAINNHVSNTPAGESGWGNPKITREFIRALKNYGYTTIRLPVTWAEYIGPSPNYVIDAERMKRVEEVVNWILEEDLYCVLNLHHDGGTSPKSWILKAGADPQGITRQFAIVWRQIAGRFSGASQKLIFEAMNEVGFDMWNQWDPSTLDKKPEAYRILNNLNQTFINTVRGTGSNNTDRFLLVSGYWTDIDLTSDPLFKMPVDVINNRLILSVHYYTPATFCILDKDESWGKNRIDWGTDEDYRELAGQFAKLKNNFLDRGVPVILGEYGVTIIT

SEQ ID NO: 99916 - protein, 82 aa, Unknown
  Obtained from environmental sample
  DOMAIN (42)...(77): UvrB/uvrC motif
  misc_feature (1)..(82): Xaa is any amino acid
KSLESTFDRLYDAEDAKKGRRRGERRQPEPVAEAVANPQQAERLIRQLERDMREAARELEFERAASLRDRIRLLRERFIQLS

SEQ ID NO: 99917 - protein, 298 aa, Unknown
  Obtained from environmental sample
  misc_feature (1)..(298): Xaa is any amino acid
VETGQRISMDAVMSRLIEVQYERNDFDFHRGTFRVRGDVLEVIPAYVHERALRLEFFGDEIEAVREIDPLTGDVLGDIGKTVIYPASHYVSDRDNLNRTMRDIREELGERLEEFRRGNNLVELQRLEQRTVLDLEMMQELGYCNGIENYSRHLDGRAAGQAPACLLDYFPSDFLLFVDESHITLPQVNGMYKGDRSRKQTLVEYGFRLPSALDNRPLSFDEFRQRLNQSIYVSATPGSWEIKHSEGILSEQVIRPTGLVDPEVEVRPTRGQIDDLLGACKACIAKGQRVLVTTLNQRM

SEQ ID NO: 99918 - protein, 296 aa, Unknown
  Obtained from environmental sample
  misc_feature (1)..(296): Xaa is any amino acid
INSVALGVYDYSLADNTLEVRYSIGDIARSFLIPPATTEQRMLTFLEQMELDDRRKIEASYRLYDINNLRSSDDKAKLLSNFPDLSRTKMYVLRDTTQEYMKETMEELFAQAGYTFDDYSEDSSLYTLPEGADKPAFNITLRYRLEGKSMVLNVPFDRIAYRPAYPITQLSLLPYMGAGGINDEGYMLVPDGSGALIYFNNRKQNQIAYNNDVYGWDEAMPRDAVINDNKALFPVFGIQKNGNAMLCVIEEGASYAGVRADVSGRNSSWNNVYPQFSIVHGAKMDISRRSDRAVYL

SEQ ID NO: 99919 - protein, 250 aa, Unknown
  Obtained from environmental sample
  DOMAIN (80)...(250): Peptidase family M48
  misc_feature (1)..(250): Xaa is any amino acid
MKMKAILLTLIISTALIGTCATNPFTGKRTMALVGNNELFASSFQQYNKFIAENKVINGTADAKMVERLGENIRKAAEKWLADEGKSDYLNDYKWEYHLVDSKEANAWCLPGGKIVVYTGILPITQTEDGLAAVMGHEVAHALLNHGQQRVSAGVLKQIGAIGITIATLGKSSGTQDLILSAYDAGSSLLGTLPFSRKHESEADHYGLLLTAIAGYDPEAAIPFWERMAEKGGNVPEFLSTHPSDKTRIN

SEQ ID NO: 99920 - protein, 281 aa, Unknown
  Obtained from environmental sample
  DOMAIN (2)...(281): Aconitase family (aconitate hydratase)
  misc_feature (1)..(281): Xaa is any amino acid
SGEQNLRLKFDSLTSHDITYVGIIQTARASGMEKFPMPYVLTNCHNSLCAVGGTINQDDHVFALSAARKYGGVYVPPHLAVIHSYNREMMAGCGKMILGSDSHTRYGALGTMAVGEGGGELAKQLVGRTYDMVYPQVVGIYLEGEPATGVGPQDIALAIIGAVFKNGYVKNKVMEFTGDGVSKLSVDFRNGIDVMTTETTCWSSIWKTDSQVKTYLEQRGRGDDYRELKPGNAAYYDGFIKVDLSKIEPCIAMPFHPSNVYTIKELQHNAKDILAKVEEDN

SEQ ID NO: 99921 - protein, 171 aa, Unknown
  Obtained from environmental sample
  DOMAIN (5)...(171): Bacterial fructose-1,6-bisphosphatase, glpX-encoded
  misc_feature (1)..(171): Xaa is any amino acid
MEIPTRNLALDLVRITEAAALASARWLGKGDKQAGDGAAVDAMRISFNALSVSGRIVIGEGAKDEAPMLYNGEIVGSGGAPSLDVAVDPVEGTNLLAYGRPNAIAVIGACPAGAMYDPGPSYYMQKLVVGPAARDAVDLDAPVKVNLERVARELGKDIGDLIVFVLDKPRH

SEQ ID NO: 99922 - protein, 190 aa, Unknown
  Obtained from environmental sample
  DOMAIN (33)...(190): Bacterial extracellular solute-binding protein, family 7
  misc_feature (1)..(190): Xaa is any amino acid
MITAFRKVVPILAALLILLPTASQAARKVVIKAGHVLTESSAMHQAWIQFKKLAEQRSNGEIAVEVYSNQQLGGDRELIEGVQLGSVTAASPSSAPLAAFEKDFFILDAPFLFSSRAEAFAALDGEMGQFLLKKLESINLVGLDYWENGFRNLTNSRNAVHAPEDVKGLKLRTMENAIHLATWRALGARP

SEQ ID NO: 99923 - protein, 246 aa, Unknown
  Obtained from environmental sample
  DOMAIN (42)...(230): Leucyl/phenylalanyl-tRNA protein transferase
  misc_feature (1)..(246): Xaa is any amino acid
MYLKYTISGHLFISPEDDCKAIVDAILATGYNEEFCAARDFSPEFIVKLMEAGFLVMSADIAGENDDKPVYILLPKLHLVRSVLFFENLHIKKSIRRLLNRYELRPDAEFDRILERCVEKHGSDWLTPPLVESIKKIRHSALKPERLTPSDSVYPASFALYRDGRLAAGEFGIVCGRVYTSYSGFYDEDNAGTVQLILTTCYLKEHGFSFLDMGMPLEYKTALGAVDISPEEFICLFRYWRCPISK

SEQ ID NO: 99924 - protein, 265 aa, Unknown
  Obtained from environmental sample
  misc_feature (1)..(265): Xaa is any amino acid
MDNIVFKAMLSSDTEDSREALRSLLSACTRREVSGVQVRNSELLPAHLGAKAPRLDVHVVFNDGEAADLEMQIDKTADNLRDRAAFYTAMLQAVQSRKGHTYKEIKRVYQIFFLNCVLYPQSNKLPRRYFYMEEEEHDRLTDLNEIIFYEMPKLEQQVNDMLVGTADINSLSKEEEWCMYMKYRHEDWAAELIKKLCHKEEGIMRAERAAAKIDRDYWKAARKMAELKDSMDEAQRIYDAKQAAMTEGRAEGHAQGRMEEKLEIA

SEQ ID NO: 99925 - protein, 280 aa, Unknown
  Obtained from environmental sample
  DOMAIN (124)...(275): Glutamine amidotransferase class-I
  misc_feature (1)..(280): Xaa is any amino acid
VPFIRAAGELKSKPTQHSVKALRSLGLQPDVLVCRAEQDVPSNLKEKIALFCSVTPDAVFSARDTDYIYEVPLNLNKEGLDAKVTSLLGLKDAEPDLQAWTDLVGRIRNPKRSVKVAVVGKYVGFKESYKSLEEAINHAGYGLEVQVDIKWVESEKLESAPFSTHLGDCQGILVPSGFGVRGMKGLILAAQYAREKGVPFFGIGLGMQMAAVEFARNVAMLEGADSTEFEESPRHKIIFQYGEIADDEEPRGLMRLGSFPCTIKEGSLASKAYQCSIIGE

SEQ ID NO: 99926 - protein, 280 aa, Unknown
  Obtained from environmental sample
  DOMAIN (1)...(279): Protein of unknown function (DUF342)
  misc_feature (1)..(280): Xaa is any amino acid
MPAGNGVDGKSITGKILPAKDGNDIPLPLGSNVHVGDDGETIFSDINGQVILIGDKINVEPVFTVEGDVNLKTGNIIFLGTVIITGNIEDGFTVKAAGNIEVRGTVSKAELDAEGDILLHQGVNGKGGGKIRAGKTIWSRFIENANVEAGSMIFVTDGIINSYVDAIKSITCMGKRANIMGGRLRAGEEISANVLGNPTSGTETICEVGFDPNSIKELERLMTEKSTLEEEADTVKLDLQTLINTKKQRKNLPEDKEAYLQELMERRQILTDDLNGTVES

SEQ ID NO: 99927 - protein, 249 aa, Unknown
  Obtained from environmental sample
  DOMAIN (3)...(156): short chain dehydrogenase
  misc_feature (1)..(249): Xaa is any amino acid
GRSRGCSFYRRPEPEGAQKLADDINAIENRTAALAVQVNVADEASVEAMFNTVAKNAGGLDLCVSNAGVLKAGSVLEQELADFKFVTDINYTGFFIISKYAGRLLRAQHRAAPRWKTDIIQINSKSGLEGSNKNGAYAGGKFGGLGLVASFAVELVEYNVKVNAICPGNFLDGPLWSHPEKGLFAQYLNAGKVPGAKTVADVRAFYESKVPMKRGCTGKDLVRAIYYIVEQEYETGQAVPVTGGQVMLH

SEQ ID NO: 99928 - protein, 269 aa, Unknown
  Obtained from environmental sample
  misc_feature (1)..(269): Xaa is any amino acid
LAEIDFDADITAASKYAEGGGITERHLLAAVAGKLIRAYGKGPGIIGGLAASLGIAPAPKTAALLSDSNNPHYLYDLLGVLKTEFLPRIYIQPDESECIPAGRVTAFAESIGAVSAYAYLGDVGESPTGDKKAEKFEDDYIEELFAELSRLGYRAVAYMPPRNTAEQLRRVRRLCAEWGFMEISGVDINSSRQSFNCPEVLRDECRHLLDTTWALIAHERLSSADARFGLFSPDNPLAGEGLSRRLAAYAAAGKKLDLFHPDESAAEIV

SEQ ID NO: 99929 - protein, 285 aa, Unknown
  Obtained from environmental sample
  DOMAIN (99)...(285): RNA polymerase Rpb2, domain 6
  misc_feature (1)..(285): Xaa is any amino acid
AQANVEVDENDYIKDESVVARIAGETRVVERKKVTLMDVSPKQLVSVAASLIPFLENDDANRALMGANMQRQAVPLVRTEAPIVGTGMEYYAARDSGNCVICRRSGIVETVDANRIVVRVEDDPDTEGVAESGADIYTLVKYARSNQNTCYNQVPLVGRGEYVVTGQILADGPCCDHGELSLGRNLIVAYMPWRGYNFEDAILISERVIKEDHYTTIHIEEFEVHARDTKLGAEDITRDIPQVREEMLKNLDDSGIIRIGASVKHGDILVGKVTPKGETVLSPEE

SEQ ID NO: 99930 - protein, 134 aa, Unknown
  Obtained from environmental sample
  misc_feature (1)..(134): Xaa is any amino acid
MRTLQIADLFCGAGGSTTGIRQAVTRMGKKANILAINHWDVAIQTHSANNDGVMHLCESVDHIDPTKVIPGQELDLLWASPACTHHSVARGGRPRCEQQRAPAWIIPFWLENLKVKRLIVKTFRSSKIGTALVP

SEQ ID NO: 99931 - protein, 130 aa, Unknown
  Obtained from environmental sample
  DOMAIN (2)...(130): Phosphoribosyl transferase domain
  misc_feature (1)..(130): Xaa is any amino acid
LSRPLYGKEEMAEALAALADEILATWPEEPVLLGIRRGGLVLSDRLAELIRAKLGRPPAQGTLDINLYRDDWTRARALPKVGPTEISFSLDDRRVVLVDDVLFTGRTIRAALEALADFGRPAPHELAVLV

SEQ ID NO: 99932 - protein, 76 aa, Unknown
  Obtained from environmental sample
  misc_feature (1)..(76): Xaa is any amino acid
LKYVILIGDGLADRPCRALGGLTPVAAAPTPNLDFMARHGRLGLAKTVPNGMTPSSEVAILSLLGYHPLGLITGRG

SEQ ID NO: 99933 - protein, 277 aa, Unknown
  Obtained from environmental sample
  misc_feature (1)..(277): Xaa is any amino acid
VRDAVNNLASRLNVLLEVSIGSFTLDGTETPSEFSRLLAGKVNHYATNNDLFRVIAKSRSISSTRPGGPPKGTISGNYTVAGDNVNVILELVSDSNGVRLASQQFTLSLAELKKAGYEVLPENIKTTQEAKEQDQLINPPSSPNTAPSSNNPNNPTNPAFIIRAWPDSDTNTYIDGDEIKISIESSQDCYFKVYHIDIDKKMQMIYPNAQNPDNFLRANNIRTIPEGNIRYNVEAPFGQDSILVVASKQRFPNIEAEYSQIRSATRDVVSNASRGIG

SEQ ID NO: 99934 - protein, 251 aa, Unknown
  Obtained from environmental sample
  DOMAIN (13)...(250): ABC transporter transmembrane region
  misc_feature (1)..(251): Xaa is any amino acid
MGTVGFSFLNPQIIRFTIDSVIGNSPVNAPASVKVLVERLGGVLYLRHNIWICALFILGAALFSALCNSLRRFTDIELGETVAWRLRNTLYAHIQKLTYDWHVSCQTGDIIQRCTSDVDTIRNFIQNQVSELMRVFFVMVIALLMMFSMDLFMSLMALILIPVIFVFSFLYFRKVSKEFTKADIAEGIMQATAQENYTGVRVVRAFGREFHEMEKFSEKTKIYQDIWIRIGKMLGLFWGAGDFMAGLQLFI

SEQ ID NO: 99935 - protein, 287 aa, Unknown
  Obtained from environmental sample
  misc_feature (1)..(287): Xaa is any amino acid
TEIHFSCAINEKGEISALDINAVVNLGSYLVNADEILKFVNLGSIGVYKVKNIRFRGSAIRTNIPPQGPLAGFGLAQGFFALESYISYIADSIGQDPAQWRKQNFHSIQSGTSNKGTAAKGAVKDTSLGNQLIDNVINISDYRRKWTAYEFLKSVRKKNSEVMTQNEQGPSHRDSHLTRWMERTEGLRGIGIALGYQGNDLLYDNTAMYPSNVELTLNGEGVLEIKTNMVRYESDHGILAGLAAKILEIDRKKVRISYNAASQDFGPSTTMRNIAVLTKLIEQACKL

SEQ ID NO: 99936 - protein, 242 aa, Unknown
  Obtained from environmental sample
  misc_feature (1)..(242): Xaa is any amino acid
EIDEENRKAKIDEEIKKNNEIITNNEENLKKLKEVKDERSAKSNDEITNIKNEIAKKDETLKMLEQKITHDKEKAVKKANEEKSDEESTSAAQNEAVAVDSNIQHNIKDLRAAINKLKSDEVQKNKDITTMENKFQSDVGKIKNDIKRAQAEIDRLEKSKRHTVAPQNKESSLNIFNRNKNQNENKNVLPVPTHLRKPQIGKLYQVGGNNGSGYLAISDWDDVDSGKQEAKRLSAKLCVERS

SEQ ID NO: 99937 - protein, 214 aa, Unknown
  Obtained from environmental sample
  misc_feature (1)..(214): Xaa is any amino acid
MQAAQEREMDVSLYAINHWERAIETHSANYPAAEHLLQSVEHIDPVKVIPGQKLDLLWASPECTHHSNARGGRPRSEQGRASAWLILKWLSELYVERAIIENVAEFLSWGPLDAAGKPVKSQKGKTFRAFVASIRSLGYTVDWRVLCAADYGDPTTRKRLFIQAVKGRKKIVWPQITHMDGDANLLGCLPWRPARGIIDWSVPGESIFGRKKPL

SEQ ID NO: 99938 - protein, 239 aa, Unknown
  Obtained from environmental sample
  misc_feature (1)..(239): Xaa is any amino acid
MPKRSEDTSFFTIIPITVLHDESLSPNAKLLYAEITGLTKQTGYCWAKNQHFAKLYKTSERTIIRWLNELQANGHISVQYQYFPNSKKIAKRRIYCTFSPKEPAEPYPDVEEKMHIYAENCIHSSQPDNLVVTQVSPPEGLVVTKMSPPGGDKNVIDNNINSNRSSSSDPPEIEKPPPFEEEAETFEKMNNYSENRAPEDFAEESLKRLLKQLNPSFIFRRAFLPESPYFLASNGLIQL

SEQ ID NO: 99939 - protein, 79 aa, Unknown
  Obtained from environmental sample
  misc_feature (1)..(79): Xaa is any amino acid
MALEVFSDMSERLNYNLPGFPIYARKAELRNFDKYAAACHWHPDLEFILILDGTMDYFVHGQTLHMNKGEGIFVNGKRL

SEQ ID NO: 99940 - protein, 274 aa, Unknown
  Obtained from environmental sample
  DOMAIN (15)...(274): Homocysteine S-methyltransferase
  misc_feature (1)..(274): Xaa is any amino acid
MKNAYMEMIDRREPVIFDGAFGTELQKAGLAESDFGGYAGCNEYLNVTRPDIVEGIHASYLAAGAQVIETNTFGGSRVKLGEFGLGERAYEINKAAAAAARRAIEKFAGINSSNSGDRFVCGSIGPTGFLPSSSDKELSKIRFDELVDVFTEQAKGLIDGGADVLLIETSQDLLEVRAVAIAIRRLRAATNKYVPIQAQITMDASGRMLLGSDISAFLGAAHGLGVDVIGMNCSSGPDEMGPYIDKLLELSTIPVSMLPNAGLLVNVDGKAVYK

SEQ ID NO: 99941 - protein, 66 aa, Unknown
  Obtained from environmental sample
  misc_feature (1)..(66): Xaa is any amino acid
MLEKLEAIHQRYLEIEQQMNEPDVMSDMKRYIKISKDYKDLQPIIVAYKAYKNLLENIVHAKQVIA

SEQ ID NO: 99942 - protein, 89 aa, Unknown
  Obtained from environmental sample
  DOMAIN (6)...(88): Ribosomal protein S15
  misc_feature (1)..(89): Xaa is any amino acid
MALDAEQKKVIIDDFRTHPTDTGSPEVQVAILTKRINDLTEHFKTHTKDFHSRRGLLMMVGQRRRLLDYLKRKDRARYATLIERLGLRR

SEQ ID NO: 99943 - protein, 295 aa, Unknown
  Obtained from environmental sample
  misc_feature (1)..(295): Xaa is any amino acid
CGNPNGIANNVGQVDTGLGNQVAPLAYPPVVGYGFFDPQTEDELKAVVQEGSLAGNPIVNYGYMIAKVKPSFNPAKLESYGLEVRGSITAGAARYYYLHKDSDLVETMKSVRQELGGVMYIEPDIAHYSTATPVEFNWDKPDTLVANQQQYGVLVTQTQKAWQTYGFGPNRVAVCDIDSGVSFNHEDLKSVVRHAYTWYAANGTTLLPSQDPYLDPEPTDFCVSNPTANDGTDGFGHGTHTAGTIAAEGGNGKGVAGICWNVDMVTYKGLSNSGTGGNWAVYGSLWHLVKWKKAN

SEQ ID NO: 99944 - protein, 285 aa, Unknown
  Obtained from environmental sample
  DOMAIN (23)...(182): Flagellar hook capping protein
  misc_feature (1)..(285): Xaa is any amino acid
MAIGSVSQSVDSLLAQSAPYSVTSSISGDSESGYGVGGAVYTGSTTGPLWEETNKMGKDQFLHLLTIQLKYQDPLSPMDNTTFVSQLAQFRALETSENTENAIRELGRAFDENLAAQIVSSQSIANSSAMSLIGHEARMRQTSISYDGKADTKVPIRVHLGNSNKATVEIKDDDGNVVRTMTASGKDAQNSVTINWDGVDDQGQKAKPGKYSLNVVGSDKDASLYCYVQEVVEGVRFTGEGAMIKIGGKEISIGEVLDVSINESGEGGSYITPSNALSMLGRTVR

SEQ ID NO: 99945 - protein, 282 aa, Unknown
  Obtained from environmental sample
  DOMAIN (1)...(282): C4-dicarboxylate anaerobic carrier
  misc_feature (1)..(282): Xaa is any amino acid
LFITLLGIAASTIGMFEETLPFIPIFIGFAIAMGYDAVVGMAIVAIGPALGYSAAAINPFTLGVAQSIAELPPLSGAWYRVICHVVFIVVASIYMIRYALMIQKNPEKSVVYGDDFKEFTFDPEALAKQPFGIREKLVILTFMGGIAAVVLGSFLKGWYFEELAAVFILMGVISGFIMGWGPSNLARRASASFGDIATAAMMVGFARAILVVMRQGNIIDTVVYYMSLPLNYLPRWLVVEAMLVFQTLLNFLIPSGSGQASTSMPLMAPLSDILGINRQIAV

SEQ ID NO: 99946 - protein, 262 aa, Unknown
  Obtained from environmental sample
  misc_feature (1)..(262): Xaa is any amino acid
MDIKKKRLQLNNEQQAAAFCEENAVVAAGAGSGKTMVLASRFAWLLTEKGYNVDEILTLTFTKKAAAQMFRRIHSLLTEIAGEDNSVKAARARKALDNFVHARIQTLDSYSSAIVKQYAPRYGISPDFTIDQERCRQIAFEESLPFLISRRHHPAIERLYSDNRPKDIARYIFTDVLLNYCRIDKPRDFTEDVKTQFNIVCIEWEKQSENLITLLYEIRSLIEEDNSLLPDLVPIIKNNRNISVPAAEEVRKYFDFLLCVTA

SEQ ID NO: 99947 - protein, 101 aa, Unknown
  Obtained from environmental sample
  misc_feature (1)..(101): Xaa is any amino acid
MSEKYFPLNKAELEKLAERYPTPFYLYDEKGIIENALRIKAAFSIFPGYKEHFAVKALPNPYILKILAAEGLGSDCSSYTELMLSEMAGIRGENIMFSSNE

SEQ ID NO: 99948 - protein, 219 aa, Unknown
  Obtained from environmental sample
  misc_feature (1)..(219): Xaa is any amino acid
MSKLCYDSELSLLKLVPDVLRAREFRLYTKNGRLVDLWQNNGAAVLGHTPPSLLRELKNTASRGLYAPFPHFLEARYHKALSALFPGRHFRLYSAPPPGLETLAVEGSASLWRPFADSASPLAVPENPPILIPVVPGIQTWRGGLPFGLCVLAVKYEAAIGGDFLPPVLLAAAARGIYGLISAAQARANPMYPRSESAEKQRRAKLLAAQRHIPYSRQK

SEQ ID NO: 99949 - protein, 264 aa, Unknown
  Obtained from environmental sample
  DOMAIN (14)...(158): ATPase family associated with various cellular activities (AAA)
  misc_feature (1)..(264): Xaa is any amino acid
MTRLLELARTVAASPSTVLLQGESGTGKELLARFIHQHSPRADGPFVAVNCASLPENLLESELFGHEKGAFTGAVARKQGKFELADGGSILLDEISEMDLALQAKLLRVLQEGEIDRVGGKEPQKIDVRVIATTNRNLKAWAESGRFRSDLYYRLNVIPFFLPPLKERLDDLPLLADHFRRKYARLNNKQVTGLSPEALARLESYDWPGNIRELENTVARGVLLAAGPEVTPGDLFMDEAGFMAALERSQPAGPQGPAVTSRPP

SEQ ID NO: 99950 - protein, 206 aa, Unknown
  Obtained from environmental sample
  DOMAIN (12)...(194): Pterin binding enzyme
  misc_feature (1)..(206): Xaa is any amino acid
MAEKYMVTLAENLNVINKGVGAGFKDKDPKPVRAMVENIIKSEPDWVDINLGPARKNGEELMPWVVNIVQEVTDLPVVLDTSNIAAIEAGLKVCKKPALINSIMCRPERYNAMLPLVKKYNADYVALMWGPNGMARDANERAELTTELLMAAQALEIPVERAWIDPIITPVNIQQEQLMQNLHFFEMLPHIVDALQPGGATKSTNG

SEQ ID NO: 99951 - protein, 176 aa, Unknown
  Obtained from environmental sample
  misc_feature (1)..(176): Xaa is any amino acid
IGIGLGGTEKLGPSKDYAEVFKKAREHGIHCVAHSGEDMGWEQIGETITYLDPERIGHGVSAIQNPKLVKYIAENKIPLEICPTSNLFTRKYVSEIETHPVKQFYENNLFVTINSDDPVLFSTSLVDEYMLLFNKGVFSQNDILTLIKNNIYASFLTEDKKNTLWKNCNTIYKNKL

SEQ ID NO: 99952 - protein, 298 aa, Unknown
  Obtained from environmental sample
  misc_feature (1)..(298): Xaa is any amino acid
YYVRAVDTTGAVSVKSFMFSIGSEGPSGGIIVNSPFDGETVTGDFEISGIAAGAETIHWRFLGPKMDSISKGEAGREAMNAARAFMANPNVPFEEMSAKRNFSVPVEIASLSDGEYDCEVYVKFRGGTQSETISHLVKVSTAAPVTRILSPPITRYSSHVILVRGYSGDANGLEKVTVSMDRGLTWQSVTLKDDGNWELPLNTAIYTDRVYSAFIRAEDKCGVTSFTNAMINIDNTPPAVIITSPASGQYVGTEMPIMGRVADNIKLKSLNFQVIGVVNPNNRIALDVEIQPTIFETV

SEQ ID NO: 99953 - protein, 299 aa, Unknown
  Obtained from environmental sample
  DOMAIN (12)...(299): Iron-containing alcohol dehydrogenase
  misc_feature (1)..(299): Xaa is any amino acid
MNAQAVKEFRLPPDTYIGAGAIACIGEAVAARGIRTVFVVIDRLVADLGLAEGMYRSLAQSEIRYCEYFQPVGEPHSGLVEKEVGRFVESGCEGMIALGGGSAIDAAKAIVTLAANPGLTVRDLLDPARIRNKRLALIVAPTTAGTGSEATNVAVITDTHSRRKQVIVHPALTPDLALIDACLTVRVPPRVTAATGIDALTHSIEAYVATRATPLTKALAYQSIRQIGEALPVAVGRGDNVQARESMALASYMAGVAFSNAGLGLAHSMAHQIGPRYGLTHGIANAILLPSVMRFNHWS

SEQ ID NO: 99954 - protein, 307 aa, Unknown
  Obtained from environmental sample
  misc_feature (1)..(307): Xaa is any amino acid
TIKFINTDKMVTCPYGTIASTLIEHFGIPPEKIAAVKENNELRPLGTSFLVNASVEPVLMDSTEGAMVYRRTLSFVLAIAARKIFPNNGVYVGHSLGNSYYYSLSSGEKPKENDVKNLADEMRNIIKENLPITFKYLSYEEALQLFKENNQTDTVLLLDHRSSPLIKVNECKGYMDIYVQPLLDRTGFLSNFELMPYQDGFLLRFPGIGKGDTIAPFVDEPQLFQIYSDYKKWGKIIGVRVVGELNARIAHRNFLEYIRIAETHQERKLGDIARQICEQRENIKMILIAGPSSSGKNDSAKRLGIEL

SEQ ID NO: 99955 - protein, 93 aa, Unknown
  Obtained from environmental sample
  DOMAIN (26)...(92): Peptidase S24-like
  misc_feature (1)..(93): Xaa is any amino acid
MKGIKPVLLAISTALVLKLFFFDFIIAQGHSMEPAIRDGAVLVVSRINYGLQLPTNKYLLRWGEPKMGEVVVFYTPSGELAVKRCAMQAENGM

SEQ ID NO: 99956 - protein, 283 aa, Unknown
  Obtained from environmental sample
  misc_feature (1)..(283): Xaa is any amino acid
MVDLSNGAKKLISEKIELPNAGFPVKWSPDSRLFVYSKGGRIYYFPILNDLSVLVDERFRMIGSGGIESVLWDQQGVFYYMTGNTLYRVTNPELFTRTIYGDFLSIGAVAAVLPLDFDPGFDRYWIAPDSGSILINKGGKGIFFFLLGENQISAGASQTVILPHALTPNGTDNFNVLWPSVEPERRAGNPARPGRVNSGNLTVIYNVQGETFVLRFEVKGNAINLLPNKSFPLASSCALSPDGTKAVFWGNNGLELWDYANWRIIQRLSNIPVFPARDQDRQY

SEQ ID NO: 99957 - protein, 281 aa, Unknown
  Obtained from environmental sample
  misc_feature (1)..(281): Xaa is any amino acid
GRGLARLCNYWWKSPGETELFQFVGKDNIPFHTVIFPSSLLGSGENWTMLHHMSSTEYLNYESGKFSKSRGVGVFGTDVIETGIPADIWRFYIYYNRPEKSDTLFTWKDFQEKVNGELIGNLGNLVNRTLSFVNRYYGGRIPDGIANAEFRETIRKKEEEITAALERADLRDAFHLVFELSSIANKTFQDGEPWKKRQGDSAEQQKAAALIRDLSYVVRDIAVLIQPFMPQAAEQIASFLGLSFGKDLVYQKGEGKLSWDDLGKDSGLDKVVKCEVLFSIL

SEQ ID NO: 99958 - protein, 288 aa, Unknown
  Obtained from environmental sample
  DOMAIN (154)...(287): Predicted permease
  misc_feature (1)..(288): Xaa is any amino acid
ARTESEYEGIILSGAPVKFYFNKDMEQRISGIDGVGRCTSQFFLASLAASCCSEEVQLIGIDYDTDFVIKPWISQVYGSQIKDGELIVGDAINVENEKTLTFFDHEMKVAARLAKTASGMDNSVYVNMNTMRILAEAARKKGAITDELDVGDAVSAVLVKVPPDYDIETVYDNIRWDAPEVGIVKSQSIVASIAGNLNIVSGMIRYVAAVLGILAVLILIILFSVFTLIRKKEFAVMRIVGATRSTLAGIVLFEALIVSLYGAVSGIVLAALMVLPFSSYWGKRMGLP

SEQ ID NO: 99959 - protein, 288 aa, Unknown
  Obtained from environmental sample
  DOMAIN (18)...(288): Phage terminase large subunit
  misc_feature (1)..(288): Xaa is any amino acid
VGRALVILGAKNPLRILCAREFQTSIKDSVIALLKDQIRRLNLHSRYKFGTTYIEGKNGTEFLFKGLRINPDEIKSLEGVDICWVEEAQRVSEDSWTYLIPTIRKEGSEIWGTFNPMDADDPTFQRFVVNTPPHTLLIKVNWCDNPWFPQTLDQERQYCLQTDPDAYDWIWEGKPRKISDAVVFRGKFSIETFETPSDAYLFFGADWGFGPDPTTLVRSFIKDRCLYVDHEAYALGLELNSIAGVFDAVPGARDWPIEADSSQPQTIKHVATFGFKIRAAKKWPGSVE

SEQ ID NO: 99960 - protein, 82 aa, Unknown
  Obtained from environmental sample
  misc_feature (1)..(82): Xaa is any amino acid
AGQPSSVFLKNLNEDIFKSGDPNLIVAAIGDVARAQGMSKIADDANRGRESLYKSLSHGGNPSCETIVKVLASLGFGLRPVS

SEQ ID NO: 99961 - protein, 263 aa, Unknown
  Obtained from environmental sample
  DOMAIN (2)...(263): Glycosyl hydrolase family 9
  misc_feature (1)..(263): Xaa is any amino acid
MQDVDGGVFFKVTTLSFPGYIMPEEDKGQRFVIGKSTTSSLNFAAAMAMAARAYAPFDSAYAKNCAERALLAWDWAQKNPNAVFKNPADVKTGEYKDAAFDDEFIWAAAELFITTKEKRFADFLKGKDISYAGEPSWQNVHSMAALSLASVKNGLDPQRLETVRKSITKTADRWLSEMDKHLYRMPNIKFIWGSNSSFANIGVGMIYAHIISGDDKYLLAAVEIADYLLGKNAVGISFVSTFGTKAMSNPHHRQSVAGKVGAI

SEQ ID NO: 99962 - protein, 264 aa, Unknown
  Obtained from environmental sample
  DOMAIN (149)...(229): Cache domain
  misc_feature (1)..(264): Xaa is any amino acid
MITRYMQIVFVALAFALMIIASYLFVSDIERKHLKRYVRDAILYTEANINADLKEPETILAGFSETIRGMLMRGDDDMTVREYIMYINNYMQGNEENRLMGFLRFYGFFEVFGGKYITGAEDWLPPEDYVLQDRPWYAKAVEANGEIGVTQPYTDIKTGIVSITFSRRILGENGESLAIICLDIKLDRIRQHAVSTQSAENGYGFLLSENMEIIAHPEPKMLGMPFGDVNSRIATYMDELIKVGHVYEVTSTDYRNIESIVFMK

SEQ ID NO: 99963 - protein, 109 aa, Unknown
  Obtained from environmental sample
  misc_feature (1)..(109): Xaa is any amino acid
VSVYALDSNIISFYLKGNITVIENIEKSISEDNNIVITPIAYYEVKRGLLLINATKQLSKLETLCELFPVGELGDYLLENAINIYVQERRAHRNTEDADIFIAAFCIHH

SEQ ID NO: 99964 - protein, 288 aa, Unknown
  Obtained from environmental sample
  misc_feature (1)..(288): Xaa is any amino acid
YLYKYPAGQQASSFTAPNSVTRIEPFAFKHCTALRSLNIPDSVTSIDDDAFNECIGLTEINVDDNNTIYSSDDGILYNKEKTALLRYPAGKTDSSFTVPNGVTVIGKSAFEECIALEVLNLGSNVSIFKEDSFYHCVNLTAINVDKNNTEYSSANGVLYDKKKIILYRYPKEKQDSSFAIPHSVTEIRARAFWNCKNLKSVTIPKNVTAIQEGAFYYCDNLAEVTFEGIIREDYFSETETFCGDLRKKYIESGVGTYTTENPGLEAEWSTGQKNRERDIWSLGEYYDS

SEQ ID NO: 99965 - protein, 268 aa, Unknown
  Obtained from environmental sample
  DOMAIN (70)...(141): HAMP domain
  misc_feature (1)..(268): Xaa is any amino acid
MAGKYIGNFLNSVKTGKYYSFSNYIESIEKEMRMFIIPIPFGETETTWSYAIAVMNDVVMSPVYEMIFMTILISALVLGIVIFAAIFLSRSISKPIIKASETLKDISEGEGDLTRSIAVNSKDEIGNLALYFNKTIEKIRLLVITIKNEALSLNNTGAELASNMTQTAAAINEINANIQSMKGRVMNQSASVSETHATMEQVVSNINKLNNHVENQSNNVSHASSAIEEMVANINSVTETLVKNTNNVKTLKEASEAGRNGLEEMASD

SEQ ID NO: 99966 - protein, 296 aa, Unknown
  Obtained from environmental sample
  misc_feature (1)..(296): Xaa is any amino acid
GYLLRLRSGAVAMKKFIAWDVFKQNSIKSKVQNKKSIPSALRKIFVGLLLKENAEKCKQGKEPLFSSLINIQWADRASSFVPWLAKILPQLGTWFAKTVGLSIKTISGADTERETASQLETFRFENDERDMFVIAKHYAQFLDKHDLFEPAWETPPFDEEGMDCFIFFPRSLSDYGEYRELLASSGHVKTIDAAGAETPPCDTFFYTNSRREITEAALYIRALHEKQGINWDSIAVCIADTQDYEPYVIREFTNRNIPFVRRISRPLADYSAGSLFRSVLDCVSQNFSFSSFISLI

SEQ ID NO: 99967 - protein, 88 aa, Unknown
  Obtained from environmental sample
  misc_feature (1)..(88): Xaa is any amino acid
VRRLYADYYKEEPFVRVLPQGVMASTGRVRQSNYCDISVNMDQEGSTLIVITAIDNMVKGAAGQAVQNMNIIMKFDETEGLDTVPALF

SEQ ID NO: 99968 - protein, 221 aa, Unknown
  Obtained from environmental sample
  misc_feature (1)..(221): Xaa is any amino acid
MKIKLRLSLAMIALMAVVVTVIASVLLRRTSWMSLDLNMRSVEFLAGQQAEFWKGREDGYIRALHTLAGVMRDYDTIPNGERRNRYDKMLKSVLESEPDMVSLYMVWKPNAIDGMDERYIGRVGSSPSGQYAIAYTRETGQIKAYTSDDIENIMTHISGPNARRDRVDNPVPQKVNGKDTFTLRMSVPIISAGANKVIGCVGCVLDIEIIQRVVENTIKTN

SEQ ID NO: 99969 - protein, 282 aa, Unknown
  Obtained from environmental sample
  misc_feature (1)..(282): Xaa is any amino acid
LHSKKPEEAKRQFELAVKQNGKFTEAILRLGAINMQEGKTATALEYFAKAYKGAPTNQDAWNFYSYGLLVAKDTAGAITVLKNVGDNPEALAQLGRIEGLRKHYAQAAEYLSKAVNRGASPQAMLDLASVQIDGGKCGDALSVLSNYFGKETNPSIDSWLLAGFAAKECHGAAKALEYYEKGLKRHPRDPLLMQNAGQMYFSLKNYAKAEDMWSGVDNSYSDPQMYYMRAVAARLRNDFGAAERHIKKAISMDEKADYYDFLGVLSHAKGDGKAAEEHFKKA

SEQ ID NO: 99970 - protein, 81 aa, Unknown
  Obtained from environmental sample
  DOMAIN (3)...(41): Ribbon-helix-helix protein, copG family
  misc_feature (1)..(81): Xaa is any amino acid
MTTVTARIDEETHGKLDNLAKAVDRSRSWLVADAVRRYVEEESWQVAAVEEGVRQADAGNFAAEDEVKAAFAHWGVRANSL

SEQ ID NO: 99971 - protein, 232 aa, Unknown
  Obtained from environmental sample
  misc_feature (1)..(232): Xaa is any amino acid
VKKNDIKPWLQKEWCIATPSAEYVQRMEDVLEVYKRPYDEKQPVVCIDETNRQLIGEMHSPRPVKAGQTALYDYEYVRNGVVNLFMLFEPLVGMREVIVTERRTMKDFAHCLRYLAEERYPDAEKIIVVMDNLNTHSLASLYAAFEPEVALRLAQRFEIHYTPKHGSWLNMAELEIGVMSRQCLKRRIATIEKMASEVQTWVTERNNHKTTVHWQFTTADARIKLRHLYPCL

SEQ ID NO: 99972 - protein, 270 aa, Unknown
  Obtained from environmental sample
  DOMAIN (30)...(250): Glycosyl hydrolases family 18
  misc_feature (1)..(270): Xaa is any amino acid
VEVANTPEEIDELPITLPLKGEPLRSSEFKEIWGYVVTGREDALTNTLPLSDIGYFAAEVDSYGKLTDIPKRGKIKFPGRVHLVVVCNSRSLTHFVLLPGSVHRKELIADLLEAAKDYDGLQIDFENIPKLDGDTFVSFLKDLRKGLPSGKMLTIALPARNKKISDDQYDYEKIKPHVDRILIMAYDEHWSGSKPGSVASMQWCKRVAEYSLGAIGKEKLIMGLPFYGRAWGDYTPSRALIYTTTEKIIDEHKIKEIRRENGIPVLNTEN

SEQ ID NO: 99973 - protein, 265 aa, Unknown
  Obtained from environmental sample
  misc_feature (1)..(265): Xaa is any amino acid
MRGKNKNKWVFFAVLLLISLILPTKIAAEANGDIVEGNGSVSGSGGSSGSGSGGGAGNGGGTGSGSGTGSGSGTGSGSGTGSGSGTGSGGGTGSGGGTGSGNGTGSGGGTGSGNGTGSGGGASSEAGSGSSSGSGSNPIGGDNPASGSNPTDGSNPASGSNPTDGGNPTGGSNPASGSNPTDDSDPTGDSGENSNGSGGEGNSNTQTQQSEEVDPIVQDTIGKGEELVHNAEGISGAVDGAVANALGQAEAVTHKVVVQPYLKKI

SEQ ID NO: 99974 - protein, 100 aa, Unknown
  Obtained from environmental sample
  misc_feature (1)..(100): Xaa is any amino acid
GIECGDELPLLLNSRFPAPEITIFFDIAPEIAIERMKNRDSLEIYEYREFQEKVRQKYKSALARYRENGARVEIIDASKTAAEVADQVWSILSVMPIFNI

SEQ ID NO: 99975 - protein, 276 aa, Unknown
  Obtained from environmental sample
  misc_feature (1)..(276): Xaa is any amino acid
ALCAVFNPDQDKIIWDVGHQCYAWKLLTGRAERFDSLRKLGGLSGFPKPCESPYDHFGTGHSSTSLSAALGMAMARDLCGQKHHVLAVIGDGSLTGGQALEGLNLAGDMQRRLIVVLNDNEMSIAPNVGALSLFLSRTLTRAWVRQTKKDVLRLLRSIPRIGGDLAGIAQRSEQSFKSFFTPGMLFEAFRFNYIGPVQGHDLKELTRHLHMASQVEDRPVLLHVLTRKGKGYPPAENNPMYFHGVGGFEPETGMARAQRQMPPGFTDVFGEALCEL

SEQ ID NO: 99976 - protein, 183 aa, Unknown
  Obtained from environmental sample
  misc_feature (1)..(183): Xaa is any amino acid
MDWAEEPSAVQKPEDTSHIYDTTAIKASNLLADGIQGYSFARNQAWFKAALEDVEDMSDDENEWLTYAEKIMYRQTQKSNFYDEGRAFVKCCADFGTAIMTREDDVIRKIPSYKTQHLKYCAVDENPYGEVDALFRDFWIDAYRAASIFGADSLPKNIREAYDKGSMKLWKFTQAILPVNRYD

SEQ ID NO: 99977 - protein, 272 aa, Unknown
  Obtained from environmental sample
  misc_feature (1)..(272): Xaa is any amino acid
RHIVNKRLLFAPDTGEAGTPPATPPAEPPAPPPGQQTTPPAQPPAPPPTDEWTGWWAAQLPKETREKHKENLQGLKGKQLGEVFDDYFSTRTKLQNAIVFPGKDATEDEIDAFLKRMDIPKTSEEYGIDPKLIPGPDTDETKAAAAKGLADFFRSIGLTKKQAKEMLGQYVGIIKSVSEAGAARQKALADTFEERLLKETGDEKSATEYKEFFKRALIALGDKGLVQELNQSGMLYSTAFVRGLADIFKAGNSEPPIPQAGPGREEPTKDAL

SEQ ID NO: 99978 - protein, 287 aa, Unknown
  Obtained from environmental sample
  misc_feature (1)..(287): Xaa is any amino acid
CAKLNSEIDTRENRFVDDLSVIIPDVDKSMVVGLLADTFTKAQILVSELAVNKQNAEKKLSELVARREKAAKRNVDAEASYKSALTLVGERGVREGEQKAASDKARTDYVNSLNVNGFKDEAEYAAVLVTEETLSNMVRLLADYEKAGEQLKRDINRLEEETAGKERPDMEKLSAENNAIMNEIGELNKSRDVLRVRNEQTRRALNELRRSAETFVKLDKEYAAAKQLSDVANGRLDFETYAQAAYFDRVLHAANLRLSFMSQSRYTLLRKTDGADKRSKTGWTGSS

SEQ ID NO: 99979 - protein, 270 aa, Unknown
  Obtained from environmental sample
  DOMAIN (122)...(270): Binding-protein-dependent transport system inner membrane component
  misc_feature (1)..(270): Xaa is any amino acid
MISLVILAALYVVMTFAEFFAPYSPNTSFPDKSYHPPNVRFYQGKPQAQEWWITNTVSWKYTRVRGQYAAIHFWGKGEPYRLWGIIPAERHLFTVNPGSYPVFLMGTDSLGRDLFSRIVYGSRISLTIGFVATFLSLALAVLFGGLSGYYGGLTDWSIMRFSEFLMLIPSLYLILFLRSLMASTMDTGQSYMMITVILSLVGWPGSARTIRGMVHSIKREEFVLNAQLEMIPSPLIIVNHIIPQIASLLIVSVALSVPGFIMTETVLSYL

SEQ ID NO: 99980 - protein, 137 aa, Unknown
  Obtained from environmental sample
  misc_feature (1)..(137): Xaa is any amino acid
MGDVLAEITLKNGGDLVRARDGHITEQNIRSITVSALVDTGARTLVINENIRKKLGLTIVNEFSATLAGGSKTSCNVTEPVQIYWNGRSSSVQAWVLPNEEDVLLGVIPLEEMDLMVDPANRKLVGVHGDTMTGRIK

SEQ ID NO: 99981 - protein, 89 aa, Unknown
  Obtained from environmental sample
  misc_feature (1)..(89): Xaa is any amino acid
FRPSYEEILQVRNRLKRYGVSAVNYSEVRTYLDSKPVYSVVNENDPRAIYDFFVERRDTCLLRKKVSAPGPLHTLEEIYLKYRIILEST

SEQ ID NO: 99982 - protein, 161 aa, Unknown
  Obtained from environmental sample
  DOMAIN (7)...(129): Cytidine and deoxycytidylate deaminase zinc-binding region
  misc_feature (1)..(161): Xaa is any amino acid
MGDYKRPSWDEYFMEVCEAIAKRATCDRGRSGCVIAKDKQILVTGYVGSPVGLPHCDEVGHQLKKMVHEDGRETTHCVRTVHAEQNAICQAAKMGISIDGATLYCRMTPCRTCAMLIINCGIKRVVCQRRYHDSEDSEEMFKKAGVALEHLIDEVQQYEKQ

SEQ ID NO: 99983 - protein, 68 aa, Unknown
  Obtained from environmental sample
  DOMAIN (4)...(49): Uncharacterised protein family (UPF0150)
  misc_feature (1)..(68): Xaa is any amino acid
MTYKCTVVIQQEENWYVASCLENNVASQGKTIDEALANLKEAVALYYEDETQLPETSQVYVTTMEVAV

SEQ ID NO: 99984 - protein, 128 aa, Unknown
  Obtained from environmental sample
  misc_feature (1)..(128): Xaa is any amino acid
MINDYQKHEITRLGKEFLKLSRGKTRLLRLLDQAELPELVYNSNAIENSTLTLEETEKILLEQRVPRLTSTRELYEAQNLANVQKFLWDNPGHPLNKEIILLLHQKLLTGINDDFAGRFRRGKEWVES

SEQ ID NO: 99985 - protein, 272 aa, Unknown
  Obtained from environmental sample
  DOMAIN (63)...(142): OB-fold nucleic acid binding domain
  misc_feature (1)..(272): Xaa is any amino acid
RKEYPDFKFEEFPEISNADKLKTEKELIGFYFSAHPMDEYKAIWKDLVKADLGHPETFVLGNQILVGLVKNVKVITTSKGDRMAFATLEDYNGVIELTFFPAAWTQCGEKIENDKVAILKGRIDYQQKKDKYSFTVEEFLEMNEAGIASEIIQFSNDKNVKEENIEDTRQPDRFANLRKYAKDMELNLLDFSKAEAGTYIAIGTLKSVRTHIDKKGNEMAFGTLQDDLGEDTIDLLFFARAWENCKAKAIINEVLAVKGTIEAQHNRNNGQN

SEQ ID NO: 99986 - protein, 259 aa, Unknown
  Obtained from environmental sample
  misc_feature (1)..(259): Xaa is any amino acid
MAGALNVAQMVPFNPVFLASDFRQFWFIGAYYIIYGVPFFIIAAFVGTAFIALRDKIQKVYFWNMIGSGVGGAFIVVFMFLLPPQYLILPILGLSIAAALLSSCFQEEGKSRFPLAYLIPLGLSAIGSVILVLASGNIRVSDFKDISYVRKYSGTQLVHHSYGPGGEFHVYNSRYFHFAPGLSDNAALKIPSNLSQLYWGLFIDGSGPIGIMGTLKENEQAYMDYLPMAAPYTMISGPDVLLVNLNGGINANMALYNEA

SEQ ID NO: 99987 - protein, 246 aa, Unknown
  Obtained from environmental sample
  misc_feature (1)..(246): Xaa is any amino acid
MLLGNYNDCTVLEELPQGFYVETKEGKDRVLLPKTKAPKNLNIGDEINLFIYLDNEARPIATTQKSKACVDEFAVLRVKDVNDAGAFLDWGLDKDLILPYNNQLGELQKNDTCVVRIFIDEKSGRLSSTEKLRRYFDREVSELKEGMEVSLIAYDFEEERHIDFIINKRWTGRLYCNPISTGLHIGDFCTGYIHSIKDDSMIALSLSPIGFDALVDKHQEALLKALKDNNGFLPFSDNSSPEEIRK

SEQ ID NO: 99988 - protein, 257 aa, Unknown
  Obtained from environmental sample
  misc_feature (1)..(257): Xaa is any amino acid
VAKSSQEKNYQDKIIQKYFEKYDRDIELGRVDAIFYRKNDKVKNAILLVEFKFVVKNEADIYKALVQIVLTARKNNHYGCFYGVIAQYQEENIFYYFQHDDFIFNTNAVNTENETPNNPSTEAINNLTPILKEKIKIVKSEQLQPAIDSLMSGDIEIIITEHNVVSIFQSYIDRISFEENLTEEQMIDVFITDILFGAKYKRVDKGQYQQLSIIETNWEIVKISGKTAFKDQDDKLHFVKNNKFYNEFWTLYHRPPT

SEQ ID NO: 99989 - protein, 223 aa, Unknown
  Obtained from environmental sample
  misc_feature (1)..(223): Xaa is any amino acid
MLPPEDRLVGAQLDRYIRDKLYWVLHAPRQTGKTTFLQSWMREINSGDEAISCYVSVERCQGLEEIERAIPAICSSIKDRARQSELPVPDVNSTDASSMLYNILLNWSLLVAPKPLIVLFDEVDVLQGDVMINFLRQLRDGFADRGVGKFPVSIVLVGMRDLRDYITASKGGIPPNPGSPFNIKEDSAVLSNFHKDDVAKLFAQRTAEHGQQITQEALDYIYD

SEQ ID NO: 99990 - protein, 273 aa, Unknown
  Obtained from environmental sample
  DOMAIN (1)...(272): Glycosyl Hydrolase Family 88
  misc_feature (1)..(273): Xaa is any amino acid
MAESVMNRFRPGQVQWHYEHGLVLQSIFLLGQKTEQDNYCRYVKEMYDSMISPDGDILSYREGEYNLDQINPGKTLFLLYARYGEEKYRKAIEKLREQLRSHPRTKTGGFWHKQIYPWQMWLDGLYMQGPFYAQYAKEFGSSADFEDVTRQFSLIESKTRDMQTGLLYHAWDESLKQKWANPVTGCSPHFWGRALGWYCMALADTLDFIPPEHSEKAETLKAIARRLFTPLLKYQDDDTGLWFQVLDCRDRPGNYTESSASSMFVYFLLKMIR

SEQ ID NO: 99991 - protein, 196 aa, Unknown
  Obtained from environmental sample
  DOMAIN (3)...(196): Ribonuclease HII
  misc_feature (1)..(196): Xaa is any amino acid
MLCGIDEAGRGPLAGPVCAAAVTLPVDFPVNLLNDSKKLKAKQREEVRDIIIEKALAWGVGWATHIEIDSINILRASLLAMRRAFEYLLTPRVEARKWPSKLETENPFGLPFSPTGVPPGLEAVIDGIHAPELPVPCRTLVKTDATVHEVMAASILAKTARDQIMAYYGKLYPQYGYERHKGYPTVEHRRLVLKFG

SEQ ID NO: 99992 - protein, 248 aa, Unknown
  Obtained from environmental sample
  misc_feature (1)..(248): Xaa is any amino acid
GTDAARNRPFVKDLFLRIACGDRVDFPRNNVSKCGNILSAAPDRAIAVEAAENAARCILIRLDPSDPETGEFLSKTGNREQGTGNGEWGRGGCTALSGVFKFMRQCGSPRKCPSLQKRREGFSLSGGRITGFPPDAYPLGSELKAALAALPETRIEGQRESLQIIPFPAFQASGLKDYAGRSVAESLEAVRELSGLKLPEFHAENAINTPKSSDNNRNNILGKEFWAALIRGGYQGAVYYIEGLGIRD

SEQ ID NO: 99993 - protein, 237 aa, Unknown
  Obtained from environmental sample
  misc_feature (1)..(237): Xaa is any amino acid
SARKKDAPAAPPHELSDQRAMSVDDLRRLVEALYLAPESPLDRTLLQDGVTVHNTAILVDTSGSMEHDDPHLAKLKDALTQFSARLVAYAARGIRLNVCLIGFSEKITAFFATDDFTHFAPRPDDPLYKAIHALKARGGTNYQAAFHKAGAWLAERVGEHTSSAVFFITDGRPTCYFHDAFTHSIAPSKSGVYIYNGAEFAYNGKGRMYYDANGNAVSSNSGVRRYRASEDGVLKCV

SEQ ID NO: 99994 - protein, 221 aa, Unknown
  Obtained from environmental sample
  misc_feature (1)..(221): Xaa is any amino acid
DYHFLIFPGGFLDGDDLGAGHAAGMRWRYMEDADGVPLLQRLNTFLEDGKLLLGICNGFQLLVKLGALPALDGARFERRVALGHNDRGRFENRWVYLVANPDSPCVFTKNLDILAMPVRHGEGKLIPDAPELLDRLDQENLIALRYADPESLAPTQEYPANPNGSPLAIAGLTDPTGRVLGLMPHPEAFHHATNHPGWTRGEVNAPGTMIFANAVRYLKSL

SEQ ID NO: 99995 - protein, 279 aa, Unknown
  Obtained from environmental sample
  misc_feature (1)..(279): Xaa is any amino acid
SISPGYDGEYEVIRTFAPGETKEISVNQCNLWSLSEDNIVNNTITKKKPRQTKQKAAAIINSEKPLPRERSFSLNADQLAVVSSDLRKGIIIAGPGTGKTAVLAAKIARVINEGEPPASVLALSFTVKAAAELRDRVLHLMQKPKVEKPETEKPVIVTFHSLCASIMREQYAATGLPADFKILSETERDDLLAKLCAAANNKDLSPRRLGEYIEERKRHLLLPGEKPKDLSRILPSSLVSFIPDDNSRDNDSVSADAAAAAAADAYAYAEYRKQLHSLG

SEQ ID NO: 99996 - protein, 73 aa, Unknown
  Obtained from environmental sample
  misc_feature (1)..(73): Xaa is any amino acid
IVALNTATEMERKFVLYQEAGVREYWIVDSKNNILKVHCFQDSGISTKTYKSADTVPVAILPGLSIALEQVFA

SEQ ID NO: 99997 - protein, 285 aa, Unknown
  Obtained from environmental sample
  DOMAIN (146)...(226): Cache domain
  misc_feature (1)..(285): Xaa is any amino acid
GIRPFHLQMLFVALAFIAMVVSSTFQVNAILRNHLRKEATNLLDQTKIQIEASLLEPATMLTVIANTVRAMIVRGDSADMVYAYMQSTVNMFRHKEQGFKLYSIFGYFEAFGNKFMATDWEPPADFDVAARPWYTAAHKAGDKPVLTPLYMNVRWKQYMATYALNIFDQNGKRLGIVCLHVPLAHIIAHVADMRLAKSGYGMFHDDALTVFYHPEQEAIGKNVRDLHGGIALLADEIAAGGVLFERETPNYQGVGTVIFSTRLHNGWSLYVMTPKDEYYQELYNL

SEQ ID NO: 99998 - protein, 275 aa, Unknown
  Obtained from environmental sample
  misc_feature (1)..(275): Xaa is any amino acid
YISRALEYVNENEKTEELCQMAVKQDGDALEFVPEKFKTAKLCLEAVKNDKWAFEFVPEKLKTPQLCTEAVKEDHRMIKFVPETLKTKELCLLALSPIDNLVFMDSKEGIECPLAWVPQEFITKETCLDAVAAYSESVKFLPDKFKIPEVYLAAVTKSGWALEYVPEEFKTYEFCLAAVKEHGSALKHVPEKHKTAELLDAALKNDGTALEFVPEEYKSREICLAAIKKDWRGLAIKYVPVPLLTKEFYTEAFELNAKIFEHIPKEFITRSMCKE

SEQ ID NO: 99999 - protein, 236 aa, Unknown
  Obtained from environmental sample
  DOMAIN (30)...(206): RNA polymerase beta subunit
  misc_feature (1)..(236): Xaa is any amino acid
VEKNRVQPTRGGGPTRASYSRIAEVLEMPDLIEVQKDSYRWFLKEGLHEVFRDISPITDYSGNLILEFIDFTLDDKPKHTIEECKERDATYAAPLRVKCRLRNKEVDEIKEQEIFMGDFPLMTRTGTFIINGAERVIVSQLMRSPGIYFGASLDKAGKMLTSATIIPNRGAWLEYETDSNDVFYVRVDRTRKVPVTVLIRSLLGEGRGSDSEILALFGEEPKVLATIEKDIAKTYE

SEQ ID NO: 100000 - protein, 265 aa, Unknown
  Obtained from environmental sample
  DOMAIN (162)...(265): RNA polymerase Rpb2, domain 6
  misc_feature (1)..(265): Xaa is any amino acid
MCPIETPEGPNIGLINQLTTYACINEYGFIEAPYRRVSHAGPEPQVTNEIIFVTADEEENYIIAQANEPLSEEGYFLRRRVSGRFRDEIQEFDRARIDLMDVSPKQIVSVATALIPFLENDDVTRALMGSNMQRQAVPLMTTDSPVVGTGMEYKAARDSGVVVPARNDGVVEQVSASEIIVRNTAGTRDFYRLTKFMRSNQGTCINQKPIVHKGDQVTEGQVIADGPSTDHGELALGKNPLIGFMAWEGYNYEDAILLSETLVQD

SEQ ID NO: 100001 - protein, 263 aa, Unknown
  Obtained from environmental sample
  DOMAIN (159)...(263): Peptidase family S41
  misc_feature (1)..(263): Xaa is any amino acid
VVRMETVATKIHQNYVEEVSSKDLVDNAIKGMTQILDPHTTYFEAKEYEDLRTQTEGKFGGLGIIISVRDKVLTVMTPISGTPAFRAGLQSGDQIIRIDGVSTRGYTSDKALTKLRGEPGTEVKLLIRRKGEAQDHEYVIRRDIIQIKSVPFYGVLEGGIGYLTLQQFSQEAGAEVEKAVKELLKKNIKGLVFDLRHNPGGLLPQAIEVSEKFLPKKSLVVSTRGRVRNQNKEFYSNSGPVLPLDMPLIVLVDRASASASEIV

SEQ ID NO: 100002 - protein, 213 aa, Unknown
  Obtained from environmental sample
  misc_feature (1)..(213): Xaa is any amino acid
MAVYSSNGRINVSGTALVTSANTDNTIGTTGTIYIVGSTQFAITGGTIENTASATPASRTIINGSANSGITISGGTVQSAMASAVYNYATGTVTITGGTIQTGGASSFAVLNYSTGNINISGGTVQSTALEDSITGGAISNSGAGKITVSETAKITSAANTIGGGTILLTGTTGSTDERLVITGGTVENTAGPSYSYGRTIRNYSVGAVTISG

SEQ ID NO: 100003 - protein, 265 aa, Unknown
  Obtained from environmental sample
  misc_feature (1)..(265): Xaa is any amino acid
MSVETSGIHLIDLVGQIKGLESAREEFEKQLNAMSAGVDERLKNIREKMNEFKDAGAEIPKGLLRLEVQAMSERTKIFNDGYAAMDAIIADFYTKRKIESLKSLENEKLSVKQEVEIRRQATKEIFEAMKDHGIVTREVVDAISRAAFSSKKLGDEQGKLAKEMRIAAIEASRLKVELLGVDAAMAVASFSANSTTENIFAMAIATQNLAVALKRLKDLEDVPLPTFVTGAGSGGINEQRKALEEIQLTLAKLNSDFATVRAIEA

SEQ ID NO: 100004 - protein, 269 aa, Unknown
  Obtained from environmental sample
  misc_feature (1)..(269): Xaa is any amino acid
CGQPARQKHSVRFFGNAGGVKRDEMRYNDTSVDTSWDGVWESAVSDDEDGWTAEIKIPLTLLRIRSGGGAQTWGINFYRQDQGDLREYSRWECVPRGQSAFVSRFPLLVGIEGLEPHLRREFIPYASSQRKFETTETRFDDRKWANWIGLDAHLGVTTSSQLDLTVWPDFGQVEVDQAVINLGTIETYFQEKRPFFLEGTDLFRVMGQDMFYSRRIGRGVYAPSPLDGETLLDAPKSTDIALAAKYTAKMPTGLNFGVLGASGNPPGQK

SEQ ID NO: 100005 - protein, 143 aa, Unknown
  Obtained from environmental sample
  misc_feature (1)..(143): Xaa is any amino acid
MFEEIAVMYQKGTDRSSARMRLGNLIKSNNNQPIVIRSKDGEEAKLSKNSIGKLLSDDAIQKSIGNGFKREQHFAAAANIDNLFRNSVKVLSRPDRNNDPNVKAIHKFAAPLFGDNAAYITVKEATEQGKRIYSVELIEMRKQ

SEQ ID NO: 100006 - protein, 55 aa, Unknown
  Obtained from environmental sample
  misc_feature (1)..(55): Xaa is any amino acid
DSKAPCIFITHDREEALMLGDKVALMKDGRIVETAAGKEIISAPKTEFAREFFNK

SEQ ID NO: 100007 - protein, 252 aa, Unknown
  Obtained from environmental sample
  misc_feature (1)..(252): Xaa is any amino acid
LAAELKAAEERRTAANDRLAAIEVEVTGILNEREAVANLLKGAQPKIDQADETLKKNLLVDRELKEALESAKQMHSESRIFEAEVRGRRDTMAKELELALGLSISDFINSITPAEKEAWEQGQLVHQAAHSELESRRLQLGSVNPLAIQELEEVESELGFLNRERADVIESIANLEATILECNATSEERFREAFDFINLKFQEVFRQVFGGGAAHLSLQDPRDILECGIEITAQPPGKTAKALSLLSGGEKA

SEQ ID NO: 100008 - protein, 278 aa, Unknown
  Obtained from environmental sample
  misc_feature (1)..(278): Xaa is any amino acid
IAPLVFYESYTSDKKTLWNMRRPILGAAIMLVLITVIAAGYITNFFIPAIPLAAAFALIGALGPTDDVAVGAIAKRVAVPKKIMGILSGESIINDASGIVCFQFALAAMMTGSFSIKQAAFRFVLLGIGGLIAGVVLTQIKYLIVKWLRLLGLANVTLHILIEVLTPFIIYMIAENLSVSGILAVFAAGITHSFMRDKFNPETAKLNIAQDSVWEFLTFTFEGIVFVMLGTQLPGILKKIGNGAFPINGFMIAGCILLFTFIFGVLRFLWWIILVRKK

SEQ ID NO: 100009 - protein, 284 aa, Unknown
  Obtained from environmental sample
  misc_feature (1)..(284): Xaa is any amino acid
DASTAQRPFANTQTNTNSNDIACRCSCWLLILFATIIFVFSSCTTTSLVSPKREPPSVYTTIQDITPQWQVFANGVDYFHAKISSPTLEFHALKIDLTAQDLDIVVKGGAYKENQTLSQKVSSSVRDNNLMAGINATPFDIVSSKEGKAIKNMGIVISNGKMLAPANSNYDALVFYKDGKAAIVNQSSINSVENIENAVGGFHQILTNGEPAQRTHGKEARHPRSAAGISQDGKYLYLVVIDGRRAGSVGATEEETALLLRSLGSWEGINFDGGGSTALAMRFA

SEQ ID NO: 100010 - protein, 293 aa, Unknown
  Obtained from environmental sample
  DOMAIN (26)...(111): Bacterial Ig-like domain (group 2)
  misc_feature (1)..(293): Xaa is any amino acid
SDLDRLREKKPQIEEAIKEMMNKPIPVEHVVLSVSAVTLPAGEKGRLAVRLLPGNATNTLRTWSSDNPSVATVDFDGLVKAVAVPPGSMTGKATITVTAFDNPLIKATCTVTVTPAVHVTGLALNKDTLTLEYGGTETLTATVQPSNATHKVIFWSSDNESIATVNSAGLVTAVNPGTTTITVTAEDGDKTASCVVTVNGAPPIVEMVRVDGGTFQYGKNLGTVGELVYGNDDRTPVSTVTVGSFYIGKYEVTQEQWLTATRFTPRNGFKNGAGDNYPAYNVSWFDVLVFCNR

SEQ ID NO: 100011 - protein, 264 aa, Unknown
  Obtained from environmental sample
  misc_feature (1)..(264): Xaa is any amino acid
MFRNPDIFLSEQRTWQLREDFISGDAWGKIDALNSLVSNEENAAQKEKWLYGISELEKAVGWIPIEEADFSPHSSWIQEDIINAWVRDEDGLDRPNLLEHGSLKRNGSGKWGILYFEDHSYYDPGSRCYRNVSAGQWEELANEIVYYLNMQKQRSKYNDTEIFNREHNESFKNYIANHSTYRDELERKYNRIFNTEIGVPVKTYPVYIEGWRTDAKTLKGHQWQSVHHLYREGKGISALGTGFGKTLTAIALHALLKQEGCIHR

SEQ ID NO: 100012 - protein, 57 aa, Unknown
  Obtained from environmental sample
  misc_feature (1)..(57): Xaa is any amino acid
VENIWEELREKCIGNSVFDSMAALEDCLQIGLKRLEDHPEITKSISAWPWIINAIAI

SEQ ID NO: 100013 - protein, 249 aa, Unknown
  Obtained from environmental sample
  DOMAIN (2)...(237): Protein of unknown function (DUF1703)
  misc_feature (1)..(249): Xaa is any amino acid
GLLRHFYSGGKFSDYWYETATPSFVVDLVTDNKINILNLKNMQAMQSDFSKYDIDNMSPVPLLCQTGYLTFSDYDEKSGEYTVDFPNNEVRACFAGSLLEQYAGISYNDRLDTKFIRAIVHGNLDDAMDTLSRFLAAIPYEIADNKEKYFQLVTHLIFMMLGFNCRSEVRIATGRIDTLVITRDFVYCFEFKLDGSAKEALAQIDSKEYAVPWTGSGKKVFKVGVNFDFEKRNIGEWLSTVDDQKNPIP

SEQ ID NO: 100014 - protein, 255 aa, Unknown
  Obtained from environmental sample
  DOMAIN (13)...(145): SIS domain
  misc_feature (1)..(255): Xaa is any amino acid
NAKLSGLDNSLRELRSIDRVIITACGTSYYAAMVGEYLIEEWAGIPVEVEYASEFRYRNPIIGANTLIFTVSQSGETADTLAALKEAKRRGATVLSICNVVGSTIARAADGGVYLHAGAEIGVASTKAFNAQVVVLALIALLLGRQRRLSFEQGIEITRAIGALPGLVEETLKLSDEILSIANDYYTCTNFLYLGRHYHYPVAMEGALKLKEISYIHAEGYPAAEMKHGPIALIDANMPVVIVAPKDACLTRSSP

SEQ ID NO: 100015 - protein, 85 aa, Unknown
  Obtained from environmental sample
  misc_feature (1)..(85): Xaa is any amino acid
MDLGIYTWFGFSYPFSEIIKLIKEAGFQSVITWWGDEYLNSTGPKEQHPEIIRNAGLKLENVHFTFEGVNDIWEDTIAGQKIFDQ

SEQ ID NO: 100016 - protein, 268 aa, Unknown
  Obtained from environmental sample
  DOMAIN (103)...(136): Tetratricopeptide repeat
  misc_feature (1)..(268): Xaa is any amino acid
ALFILFKNRAPREDNHGLPDDFGILAAGAPFPEDSPLSAAVGAWKSGYPWRALDLFEEALTGNLSQAERIAVHNYSGHIRIALADMAQARAAFNTAKNIAPNPGAEYGLGRVAQLMKDIPLALECYGRAVKLRGDFALAWRRQGDCLSGEGEYAEARERYNRARIYSDEELIRFRLAECALHLREPREAESQFRLLLDNAHAKSIIAYSAARLADMASDNGDFTAAIAYYRQAIMIYPSVPAFRHNLGGLYLMSGQYDLAIKEYNELR

SEQ ID NO: 100017 - protein, 77 aa, Unknown
  Obtained from environmental sample
  misc_feature (1)..(77): Xaa is any amino acid
MEVDGNGTDDYGFSALSGGWRGGDGSVAGVGEYGAWWTYTETGNGGVYAKVMGSDGTKVGEVNFGKVMGVSVRCVAD

SEQ ID NO: 100018 - protein, 204 aa, Unknown
  Obtained from environmental sample
  misc_feature (1)..(204): Xaa is any amino acid
LSRKGTITRRIGQEHRAELVKLLCEFQYKFSTWQVWDDFVFACAAALAQPCQFSQKREDEYMNRIKRYPKDLQQLFPQMLAEIVLAFEQESFADILGEIYSQLELSNHWRGQYFTPYNICRMMAKMTAGNPAEEIKQKGYITVNDSCCGSGAMLIAFAENCYEKEVNYQRDVLFVGQDVDPVVARMCYIQLTLLGFAGYVVIGN

SEQ ID NO: 100019 - protein, 117 aa, Unknown
  Obtained from environmental sample
  DOMAIN (4)...(115): Response regulator receiver domain
  misc_feature (1)..(117): Xaa is any amino acid
MSQPLILIVEDDGALRHFLGGSMQKQGYPTIGAASGEEAELLAKTHNPELVLLDLGLPGMDGAEFLKSLRSWSKVPVIVLSARHHEAEKVKLLDCGADDYLTKPFGAMELSARIRVA

SEQ ID NO: 100020 - protein, 129 aa, Unknown
  Obtained from environmental sample
  misc_feature (1)..(129): Xaa is any amino acid
MKNIEKSSKLENVCYDIRGPVLKEAKRLEEDGFRIIKLNIGSPASFGLNAPDEILHDMIVNLQNAQPYGDSRGLFAARKAVMQDFQLKGIMDVGIEDIFIGNGVSELISMSMQALLDLNDEVLIPMPDY

SEQ ID NO: 100021 - protein, 151 aa, Unknown
  Obtained from environmental sample
  DOMAIN (50)...(73): 4Fe-4S binding domain
  misc_feature (1)..(151): Xaa is any amino acid
MDGSEALILDIMRMSTEDGPGLRTTVFFKGCNLVCPWCHNPESISKKPDLAWFSRKCMGCNICRDSCPQKGISRDERGIRFNRPLCLACGTCADECPNAAIELKGKVMPVTELAALLVKDKAYFGADGGITLSGGEVMIQHEAALELAKLL

SEQ ID NO: 100022 - protein, 144 aa, Unknown
  Obtained from environmental sample
  DOMAIN (12)...(125): Glycine radical
  misc_feature (1)..(144): Xaa is any amino acid
ASPDGRKRGQFLSNAICPSNGADINGPTSNSNSVGNVLGGKDPGGAYVNYLPNGASHTITMSPSLIRDDEHRTKFKSFLRGYVENGGTALQINVLDPETLRDAQKNPEEYRHLLVRVTGYNAYFTSIGLELQNEIIERESHGRF

SEQ ID NO: 100023 - protein, 263 aa, Unknown
  Obtained from environmental sample
  DOMAIN (29)...(221): Stage II sporulation protein E (SpoIIE)
  misc_feature (1)..(263): Xaa is any amino acid
IRKNGCDLYARVYPAREVGGDFYDFFFIDDDHFAMLVADVSGKGVPAALFMAIAKTIIKNRLQSGEDPERAMDNINRELCGSNSMDMFVTAWICVLEISSGCLAYINAGHNPPLVMRHGTGFDFLVSPPDLVLAGMDDTRYHSRLTRLKPTDMLFLYTDGIVEAENAKGEFYGKDRMKAFLDANAGRPLRELIDAFREDIAAFAGSAEQSDDITMMALRIGGLTTSGDLVTSGDLAVSGNSITLKAGLKTWKNYRLLGKELTQ

SEQ ID NO: 100024 - protein, 64 aa, Unknown
  Obtained from environmental sample
  misc_feature (1)..(64): Xaa is any amino acid
VADLMLVLGTSLAVFPAAGVPRITLRHGGKIIIVNDMETPMDSFTVLRFWDLGTVFEGIDSLQI

SEQ ID NO: 100025 - protein, 246 aa, Unknown
  Obtained from environmental sample
  DOMAIN (3)...(140): Alpha-2-macroglobulin family N-terminal region
  misc_feature (1)..(246): Xaa is any amino acid
VRTPLEKGKYLLTIEREKIISRKIIELEGSALTIDIPVTEAYMPIVYVALSSYTVRSGPPHNTYHEPDLDKPKGVFGVTPIYVDYESRHYQIEITGNKNTYHPAEEAEVKIKVLLNGKAAANTEVTFMAVDRGVVDLIDYHVPDPAAFFYDPRNFPLGVRGADSRSLLIDPVTYSLSDLQGGDSEDSGKGGEAARLKSGMMNERRDFRSMAVFEPYLLTGPDGTATVKFNLPDSLTTYRCPRSRRT

SEQ ID NO: 100026 - protein, 237 aa, Unknown
  Obtained from environmental sample
  misc_feature (1)..(237): Xaa is any amino acid
VSGAEVFSGAPAAFNGGQTDTASGDKIWHFDFSSVKTPGRYYILDKTNNLRSFSFSIANDVYNNVLKAAIKMLYYQRAGTDKPSQHAGQSWADALNFGQDRQTRDFFKKNDASTERDLSGGWFDAGDYNKYTKWTTDYVENLLLAYEENPEAFADDYGIPESGNGIPDILDEVKWGIAWLLKMQNSDGSVLSVQGLSDGSPPSSVTKASYYGPANAVASYGTAKAFAIASRIFGKLG

SEQ ID NO: 100027 - protein, 193 aa, Unknown
  Obtained from environmental sample
  misc_feature (1)..(193): Xaa is any amino acid
ALQFEVYEQAMAEAAAKLVFVRVEAVRELSALTSDYYAEISGGAEAADVEYAPKIKCDILDTKEWQNAYLTSLAQRRERDAELRHTALGPHRDDLRFTLGGRAAKSHASQGQCRSFALSLKLASARFIEQRRSGGMVFLVDDAVSELDPERTSRVYPLLEGRGQVFIATPRCQAALGGGVLRCAVESGKVKTT

SEQ ID NO: 100028 - protein, 307 aa, Unknown
  Obtained from environmental sample
  misc_feature (1)..(307): Xaa is any amino acid
GSKSIHEWAKHAGYRSGESLGELNTELVSILTYGDCLVVLDRNPRAPEGTIAARLKLIDPLCVRTPPKFQNKGLVGGKKVVLGVVFDSKDMEIGYYVLNAGLDGSKDEHYTYFPCYESDTGRFVAALVCRPCSRFPNQARGFPWLLASLFGINAIDKLSGFSVVEACTKSLLGIAIVTDSVQAPQSLGAKVFSAAKNSIEGEGAPEKKEEPKVNLSQLESGDVPVLPPGTDIKTFNNSGNLDISSGILDQIKLIGASLGVPWHILLKAFEGINFSAGKLEIDALFRLFDLWNYGPIMRVFGEIYKWV

SEQ ID NO: 100029 - protein, 76 aa, Unknown
  Obtained from environmental sample
  misc_feature (1)..(76): Xaa is any amino acid
MVEYWADFPGQSLVVRVAIKPTPSIAKEQRTVDGTTLQPIQLAIKGRHDPCIVLRAIPVVEAAVALGVLDRLLVTG

SEQ ID NO: 100030 - protein, 206 aa, Unknown
  Obtained from environmental sample
  DOMAIN (12)...(164): Shikimate kinase
  misc_feature (1)..(206): Xaa is any amino acid
VHGRNIVLIGLSGSGKSSFGKKAAKLFDMPFVDMDAEIEKREGMPVREIFERHGEQYFRDIETAMAKEAAAARGTVISTGGGVVLREENVQALRENGLVVFLDRPPENILKTLDRGNRPLLANGDAALFRMAKERRPLYLAAADIVLSHVNGKQAMLNALAAVIRGEYPENGFAVIGDPIAHTLSPLIHETVFLSLGVQDTYHAMH

SEQ ID NO: 100031 - protein, 63 aa, Unknown
  Obtained from environmental sample
  misc_feature (1)..(63): Xaa is any amino acid
VVCDIVYNPPETGCFKEAAKLGLKTQNGLGMLVYQALLADEIFLGRGLDKPALYKTVIEKMKG

SEQ ID NO: 100032 - protein, 68 aa, Unknown
  Obtained from environmental sample
  misc_feature (1)..(68): Xaa is any amino acid
MRSTSVIIDEGVNCLLDKLGSVETEIFISHFLREPFDYTKWRRDNLYENLSLSELNRKAAEFVRDNSN

SEQ ID NO: 100033 - protein, 215 aa, Unknown
  Obtained from environmental sample
  DOMAIN (77)...(211): Response regulator receiver domain
  misc_feature (1)..(215): Xaa is any amino acid
VRRFGGTGLGLAISKSIVEMMGGTIRVSSEQGKGSAFIFTVLAKKDTPEDDVINGSPETKKDIKEGKHDLAGLFAGHCILLVEDVEINREIVLALLEPTQLEIDCAENGAEAVRKFNEAPGRYDLIFMDIQMPEMDGYEATRRIRAIEAVRNAGTNRGGASFRGSEFPNGVPIIAMTASVFREDIEKCLQSGMDGHVGKPVNFDEVLEKLKRYLD

SEQ ID NO: 100034 - protein, 185 aa, Unknown
  Obtained from environmental sample
  misc_feature (1)..(185): Xaa is any amino acid
MSDLVADSHSIMARWRNYFSQILNVHGVSEVRQAEIHTAEPLVPEPSALEVELAIEKLKSHKSPGIDQIPAELIKAGGRTIHSAIHKLIIAISLPEEWKESVIVPLHKKGDKTECNNYRGISLLPTTYKILSNILLSRLIPYAEDIIGDHQCGFQRNRSTTDHIFCIHQILDKKCEHNEAVHQLF

SEQ ID NO: 100035 - protein, 89 aa, Unknown
  Obtained from environmental sample
  DOMAIN (12)...(69): Protein of unknown function (DUF1232)
  misc_feature (1)..(89): Xaa is any amino acid
VGTIVNTLGHLMSALDNPDTPERYKAAIIVAVGYIVLPLDTVPDILPIIGYSDDAMVAGGVLALVISYSTFKLEDLDAEIDREAAGEAP

SEQ ID NO: 100036 - protein, 241 aa, Unknown
  Obtained from environmental sample
  misc_feature (1)..(241): Xaa is any amino acid
MQVGLGVSVGSIDVLTGQGNLQNTGRIFDLAIEGNAFFGVSDGNGTYYTRNGAFQLDSEGYIILPTNGMVLQGRMADSFGNFPPGTAIGNLQIPMSQQAPAKETTQVDIGRNLNSEADAKGSVTYSQRMLHPVDSFRLPETNTVNDPGRESTTLNSLYNSKGQSLNIKENDALTISWYDQASVTSGAPAFGSVTVKVSEQEGDRSINGIRTTVWTIDDFAEAITEALNHDRNGNRLTYTAE

SEQ ID NO: 100037 - protein, 173 aa, Unknown
  Obtained from environmental sample
  misc_feature (1)..(173): Xaa is any amino acid
IFNAVFAYLSGIRQENVANFGIYKLKVIVEYNKMKEYARSFGTLIRYLGFNSCIIDVKHAERFEGKSSYTFAKLFRLGIDTILSTTDKPLKLTVKLGFIISICSFILALYNVIAKLIGIIQITGFTTTVFSIWFVGGVILFVLGILGLYIERIFTQVKGRQLFIVKDKVNVNE

SEQ ID NO: 100038 - protein, 76 aa, Unknown
  Obtained from environmental sample
  misc_feature (1)..(76): Xaa is any amino acid
MEIDDIIEKFAEQFEETDASEFKADTEFKRLVDWNSMVALSIIAMVDDEYGITIKGDDIRKSTTIEDLFHIVKEYK

SEQ ID NO: 100039 - protein, 58 aa, Unknown
  Obtained from environmental sample
  misc_feature (1)..(58): Xaa is any amino acid
MEWERYGIILNRLTFDKIELVRNWRNDPKISQYMFYKEYITQEMQLEWFKNINNELNY

SEQ ID NO: 100040 - protein, 89 aa, Unknown
  Obtained from environmental sample
  misc_feature (1)..(89): Xaa is any amino acid
GCADDVMAEARKAGAHGGTILTARGTGTAEDVKFFGITLVPEKEVLLIVTEKDGAEPVLAAIRSVPVLHEPGGGIVYTQNVERFIILGN

SEQ ID NO: 100041 - protein, 170 aa, Unknown
  Obtained from environmental sample
  DOMAIN (57)...(150): Methyltransferase domain
  misc_feature (1)..(170): Xaa is any amino acid
MRINNEVYDAMAEHWWAEDGCGTMRTILYFVNNVRFAYFLSILKNEAHFEYARECLIDIGCGGGYLSEEFAKLGMKVTGVDPSKESLKVAEKHAGDNKLNIEYVHGYGESLPFASQSFPFAVCCDVFEHVNDVNAVVCEISRILTPGGIVFFDTINRTIISKISLKISQD

SEQ ID NO: 100042 - protein, 71 aa, Unknown
  Obtained from environmental sample
  misc_feature (1)..(71): Xaa is any amino acid
KPPVYAPGMVREALAAGPVLLLLGTSHGLAPEALAACDGQLRPLRFLDAYRRFSVRAAAAAYVDRILNDLY

SEQ ID NO: 100043 - protein, 263 aa, Unknown
  Obtained from environmental sample
  DOMAIN (1)...(263): Glycosyl hydrolase family 26
  misc_feature (1)..(263): Xaa is any amino acid
MMLDMMDYSPTRVMYGTKSKAVEDAIEWHNMGGIVKFLWHWNAPKDLINNEENKWWSGFYTRAVTFDLEKAMSKEDPEGYNLLLRDIDIISENLKYLCDLDIPVLWRPLHEASGGWFWWGASGAEAYKQLWILMYERMTNHHGLNNLIWVWNGGHKDWFPGADYVDLIGEDIYAPKRDYGSQASKFYDIVEYLYELRTMKPIGLTECGTVPDINEMERDKAMWFMFAAWNSDFVQKKSGSRYTGEYSEEYTEAAHLTMMYNDR

SEQ ID NO: 100044 - protein, 231 aa, Unknown
  Obtained from environmental sample
  misc_feature (1)..(231): Xaa is any amino acid
MNKTVRTVVWSVMMAVIAVLTVGAAGAWAQSNVMFNKLNKQTAKPTAEEDTAETKVYKHRDRDRDRYRDRDRDRDRDRDRQTQTATQTPEPAPAPVPEPAPAQITTPTPAPAHAPVQTTAQSPASDKISDGENYYDTPDTTKTPASITKSQGKVVVEPLIKTEWNQYDPYNILLPVCKAVGGVCEKVGEHPVTRCLVTATAQIMKYHKHPKMRVRHPNEAYDYDNMLDVYH

SEQ ID NO: 100045 - protein, 256 aa, Unknown
  Obtained from environmental sample
  DOMAIN (65)...(254): Adenylate and Guanylate cyclase catalytic domain
  misc_feature (1)..(256): Xaa is any amino acid
MISKIYIGFAVPLAATSLTFISMMVIKFLTASREKAFLHSAFSRYLAPEVITELINDPDKLNLGGEKREMTAIFTDIQGFSTISEKLDPVHLVQLLNRYLTTMSNIIMENLGTIDKYEGDAIIAFFGAPIFRENHSALACRSALAMKLAEKELNKIVMEENLSPSPIFTRIGINTGEMVVGNMGAENKMDYTIMGNAVNLAARLEGVNKQYHTGGILISEYTREKLGDEFLLRRLDRVRVVGINTPLRLYELLAIT

SEQ ID NO: 100046 - protein, 226 aa, Unknown
  Obtained from environmental sample
  misc_feature (1)..(226): Xaa is any amino acid
SWEDDRRAAAFVSPRDSSVRIFSRYVASALLAQELSGASSANAPKNVRYAAAMFEALRLYGISYVVVPATSYKNLSANEAALDNVSYPYQALYYRGGDCTYLSILYCSLLEAVDVETAFITVPGHLYLAFEVGDNNWQKGNKDIIEIDGKRWLPVEITIPGEGFNRAWKTGAGEWRRYGKEAALYPIREAWELYPSVTIPASGDHPPEMPDASSIVRAMETELKKQ

SEQ ID NO: 100047 - protein, 213 aa, Unknown
  Obtained from environmental sample
  misc_feature (1)..(213): Xaa is any amino acid
MSGGEISGNTSSSSGGGVYVYGGTFTMSGGEISGNTSSSSGGGVYVNNGGTFTMSGGEITGNRSSSYGGGVYVGSGTFTMSGGEITGNTGSGVNVSYGTFTMSGGEITGNTSRESGGGVYVYYGTFTKTGGGTIYGYTDGDAKSNVVKDSSGVVQNNRGHAVYVDSSLIKRKETTAGSGVNMDSNKMGAAGGWENNLGGLAAQLTWLQTNAAS

SEQ ID NO: 100048 - protein, 266 aa, Unknown
  Obtained from environmental sample
  DOMAIN (160)...(218): Signal transducing histidine kinase, homodimeric domain
  misc_feature (1)..(266): Xaa is any amino acid
VDGGLPILQVSVKFDENSMMNTVGGIQVYAALKGITTVLRTVPEFESLYEDNFFPIVDYYVASTKEPEEIKKYVLIPDVSLSADIIDLSKPGAPKPLITSAAAAAAPAAAAPKPAATAAAPAAAAPKPAVAAAAPAAAAPKPAAAASASEDAKKAGKEAGSILRVDSKRIDDLLNLVSETVITKATFNQISMQFGELQAQLHTIEGVYREKIKSLFDTLPEYLGNIQEGKSVKDVRKDINEKYGDIFSLFDSFETTLKTTVGKFRS

SEQ ID NO: 100049 - protein, 76 aa, Unknown
  Obtained from environmental sample
  misc_feature (1)..(76): Xaa is any amino acid
LNTERKVLVTGASGGIGRAIALAVSDAGYRLTAHYNKGKEAAEALQKEILQKGGSVELIQFDVSNRDECQEKLERW

SEQ ID NO: 100050 - protein, 268 aa, Unknown
  Obtained from environmental sample
  misc_feature (1)..(268): Xaa is any amino acid
ALIEISQSFNICEPYPINARLFKMYEPMEVGGFRVKPYLMDHSAFDSAAFEIQCEGKTVIYSGDFRGHGRKAACLDSFIKQATKEADVLFTEGTMLSRSDELTKTESELEDDIVEKLKNKTGIALVQLSSQNIDRIVTLYCAVLKLGKTFVVDVYTANVLHELQALGNNIPYPSASFDRIKVFFPHRLTTMIINRMGWKYARRFSQFKITKKQVEERQNEIIMLARPSMKKDLGLCNLSNGIFVYSMWEGYRDSQYQQSFEAWLKGLG

SEQ ID NO: 100051 - protein, 279 aa, Unknown
  Obtained from environmental sample
  DOMAIN (1)...(212): Bacterial extracellular solute-binding protein
  misc_feature (1)..(279): Xaa is any amino acid
MSNFPKDLVQLYSYNGKNYGIPKDMDTIALWYNKTMFDEANLPYPDDTWTWDTLKDTARKLTTDDRYGFLSVISNQEVYFNFIFQNHGWVISEDKKRSGYDDPRTIEAIQFLVDMVKEGISPGLNITAENTPEALFQSGTVAMAFFGSWMFSSFCTNDSICANGDLVVLPSGRDGQRATVYNGLGWVASSNTRHPEEAWKLLEFLSRKDIQQRLSASGIAISAFNGTGVEWANHNTSFNLKAYTDHIPVGVFYPFSRNAVVWHTMTDRLLRDAWLGTKP

SEQ ID NO: 100052 - protein, 159 aa, Unknown
  Obtained from environmental sample
  misc_feature (1)..(159): Xaa is any amino acid
MGAAGGVRQFFNPATGEYGPETPNPMKPGYAFVPDGSGALIRYNDNTVSINRYVGKVYGENPAESMFYYDDTVYAVKKKEPLMPVFGVAIGNNQQGFAAWADEGGEQMEIVMSPKENMTKYNFIYPRFVYNRQMYQVYNRKGEGYFRLYPDRLHYDISL

SEQ ID NO: 100053 - protein, 171 aa, Unknown
  Obtained from environmental sample
  misc_feature (1)..(171): Xaa is any amino acid
LANWTVLYDEIIKKINKNESYYVFLDEIQMVENFEKMVSGLFVKKNIDIYITGSNALLLSGELSTLLTGRYIAINITPYSFAEYREAFNKETNTDKLFRRYINVSHFPEAVNISQTAPELVNDYIRSIYDTVINKDISQRYKLRVVDNLRRVIDFVFNSIGSPISASNIAN

SEQ ID NO: 100054 - protein, 61 aa, Unknown
  Obtained from environmental sample
  misc_feature (1)..(61): Xaa is any amino acid
LAVFLISIEEINKVVETYPRNKRYTLAILQDIQRVFGYVPKEAFEVIACYLGIKISALYSM

SEQ ID NO: 100055 - protein, 95 aa, Unknown
  Obtained from environmental sample
  DOMAIN (3)...(95): ThiS family
  misc_feature (1)..(95): Xaa is any amino acid
MRVRFFAYLRNFTGCVEADIPYEETAGALARSLCARYGEKLRQKIFPADNPGAQDEFSPEIIILVNGRHVCHLGGVTAPLKSDDRVDIFPMLAGG

SEQ ID NO: 100056 - protein, 106 aa, Unknown
  Obtained from environmental sample
  misc_feature (1)..(106): Xaa is any amino acid
MPSRNPCLANLKAGYLFPEIAKRRHEYTAAHPEVKIISLGVGNTTEPLLPHIDAGLVEGARRLGTLEGYSGYQDEGLLSLREKISRVFYGGQFGADEIFFQMEQNA

SEQ ID NO: 100057 - protein, 262 aa, Unknown
  Obtained from environmental sample
  DOMAIN (1)...(63): His Kinase A (phosphoacceptor) domain
  misc_feature (1)..(262): Xaa is any amino acid
NFLASMSHEIRTPLNAIIGMTAIATTSPEPERKDYCLAKISGASTHLLGIINDILDMSKIEEGKLELSNTEFNYESMLNQIASIFEFRMKEKNLVFTVNTDPLIPDFIVTDKQRLSQVITNLISNAVKFTPEEGSIRVDSKLIDIDETSCTLEIKVTDSGIGIAREDQDKLFHSFVQVDSSISRKYGGTGLGLAISKKITEMMHGDIRIESELGKGATFIVTIKAEMKKLDSVSSQSDLDTESAVTTEGFKGKQILLVEDVE

SEQ ID NO: 100058 - protein, 273 aa, Unknown
  Obtained from environmental sample
  misc_feature (1)..(273): Xaa is any amino acid
AQTAAWPRLAALASFPLPERTQQALERCLTDDAGLRDESSPDLLLVRQQLRGYHQNCLHKTREFAKQYNMEQYLQDTFMSLASDRYVLPLKANFKGRMQGIIHHWSQTGESLFFEPIFLVDINNQIQELKQREREEERKVLAWLTALVYEELPAVRAAFDFLERLDLLLAQCKLADMLDAVCLSLGEEGGAELLLARHPLLVLSGTAQPVDILLRPGERCLVISGGNAGGKTVCLKTLGLVSALALTGLPVPVAKSSHLPDWTNIHAFIGDEQ

SEQ ID NO: 100059 - protein, 85 aa, Unknown
  Obtained from environmental sample
  DOMAIN (2)...(81): Ribosomal L27 protein
  misc_feature (1)..(85): Xaa is any amino acid
MARKRGGSGAKNGRDSNPQYLGVKVFGGGVVKAGTILVRQRGTHIHPGTNVGCGGDYTLFALKDGTVSYSQRHGRKMAVVSPAES

SEQ ID NO: 100060 - protein, 275 aa, Unknown
  Obtained from environmental sample
  DOMAIN (95)...(242): DEAD/DEAH box helicase
  misc_feature (1)..(275): Xaa is any amino acid
MLTTPGLPPVLRNRILRLASFANPEFYLAQKMRLPTWNKPHILYCYEFFPKYIGLPIGCLDGLLAILEHYQITPELQNKQNHGQSIDVQFTGELRDDQKEAFQILMINQIGILSAATAFGKTVVALKIIAERRVNTLILVHRKLLADQWVERINQFLGIPKKDIGYYSGTKKKRTGIIDIAVMQSIVKKDKVEDWVAEYGQIIVDECHHISAASFERIIRKCPAFFRLGLSATVIRKDGQHPIVLMNLGDVRYSNTRSIPLFVQKVFPRYTNFNI

SEQ ID NO: 100061 - protein, 278 aa, Unknown
  Obtained from environmental sample
  misc_feature (1)..(278): Xaa is any amino acid
KIFVHPKFFIGDISPRLYGAFLEPIGTMVNGSMYNPKHPTADAKGFRRDYMDALKESGVPAIRLPGGNFVSGWTWKDSIGLMEKRKTQLDTAWFQYYTNEIGLDEYLQWTNMVGAEPMYTVNLGTDSLIDALHVVEYTNHKGGSYWSDLRREYGHDAPYNIKTWYLGNEMDGPWQIGSWQKNPRGYGVLAHEVSKGMKWIDPSIETTACVSSSPFLAHYPQWDLEALQECYETVDYISLHHYHIAAPGDYAALLGGSCFFEDYIHTEIGLCDFIQPSF

SEQ ID NO: 100062 - protein, 254 aa, Unknown
  Obtained from environmental sample
  DOMAIN (28)...(141): Alcohol dehydrogenase GroES-like domain
  misc_feature (1)..(254): Xaa is any amino acid
MPSTMRGVYLPGNSTAVFKDVPIPKPGYGQVLVKMKACTICGSDIRAIYREHTGRGAEGYQNVIAGHEPSGQVVEEGPGIRRFKKGSRVIVYHISGCGICHDCRMGYMISCSSPLRAAYGWQRDGGMADYILCDEKDLVELPDELSYADGAQVACGFGTVYEAINKVGVCGTDNVLVVGLGPVGLATLMLCKAMGAQKIIGVESNQYRIDLTNKLGLADKVLKAGPDNVKEIRDYTGRGVERALTHRQATADGR

SEQ ID NO: 100063 - protein, 210 aa, Unknown
  Obtained from environmental sample
  DOMAIN (27)...(209): CobQ/CobB/MinD/ParA nucleotide binding domain
  misc_feature (1)..(210): Xaa is any amino acid
MTGQASMETVTQPIELNAQPLFHSRVIAITSGKGGVGKTNVVGGLALSLAKAGRGVVVLDADFGLANLDILFGLSPKYTLQHVLRGERVIEEIIVEGPYGMRLIPASNGIQQLTKLDSVDEMRLIQGLQRVSIGTEWLLIDTAAGIHDSVVKLLMAAQEVILVSTPEPTSLVDAYAMIKVIHVRDKRKPIWLLINNAHNQEEAQETIEQL

SEQ ID NO: 100064 - protein, 266 aa, Unknown
  Obtained from environmental sample
  misc_feature (1)..(266): Xaa is any amino acid
MIFDIRHETMPRDELEALQLRRLQDVCHRLYACVPFYTRKFNELGLKPEEVRGLDDLRRLPFTEKQDLRDTFPFGLLAVPRDNLIRIHASSGTTGRITVAGYTRRDVDNWAALMARSLAAAGAGRGDVVHVAYGYGLFTGGLGAHYGAECLGALVVPASGGATRRQVQLMSGLGATTLCCTPSYALHLYDAALEEGLDFRDKSVLPLRTGVFGAEPWTEEMRRDIEAKMHINAMNVYGLSEIMGPGVSMECLESRRGLHIYEDHFL

SEQ ID NO: 100065 - protein, 266 aa, Unknown
  Obtained from environmental sample
  misc_feature (1)..(266): Xaa is any amino acid
MKDNLGGQYVLANDIFVSSAWTPVGRYDESNPKAAFHGKFYGNGHTITLNKSFNAYNNSAGIFGHITNFNSERSYFDWSNWSVIRDINLIFDGVVYNSAASYFGGVAGTVKGTLSPASIGTFGDGVEIRNIITGGGIQVGFNNGPEIKYLGGIAGHLDGNTRVLNCNAGVDIEILYDQGEGDIYIGGVAGCSSGGDFNIRVEYIHCSGTIDSMSHESWNTGPMKANSIILGGIIGEISGTTVFNSDMIGGLYITKTEAKNIKVGGI

SEQ ID NO: 100066 - protein, 168 aa, Unknown
  Obtained from environmental sample
  misc_feature (1)..(168): Xaa is any amino acid
MGNYKLDKIIADRKSKKIYLDGDKVIKLMSEEYPAPDVLSEAHNLAAVGETGLRVPRLVEVTKINGQWAVVWEYVKGSTLAQLMEKNKDNEQQYLERFVDIQLDMHRYSATRLPLLIEKMERKIKVSGLDATARYEILGRLASMPKHTKLCHGDFNFSNVIIPTGMKR

SEQ ID NO: 100067 - protein, 280 aa, Unknown
  Obtained from environmental sample
  DOMAIN (152)...(256): Pyridine nucleotide-disulphide oxidoreductase
  misc_feature (1)..(280): Xaa is any amino acid
YAGVLTAKKIAKRVKKRKLSDQVEITIIDKNPFHTMLTELHEVAAWRVEEDSIKISLERVFAGRDVNVVMDTIKSVDYDKKQVVCTGNTFNYDYFILATGSQPIFFGVQGAKEHSFTLWSYEDAVLLREHIMNMFRQAACEPDLAKKKTLLTFVVVGCGFTGVEMAGELSELVPSLCDRFEIDPSLVTMINMDMLSKVCNILPDHLSAKVQRRLEKKHVQVLLGANTTSIGSDYMEYKLKDEVKRVATKTVIWTAGVESSELSKSSSDKLGASARGRIQT

SEQ ID NO: 100068 - protein, 215 aa, Unknown
  Obtained from environmental sample
  misc_feature (1)..(215): Xaa is any amino acid
MPFKGVDVMDVKKEFVLKALDDRVVFTELCREYGIGTKCGYKWKQRFLEEGYAGLEEHSRKPLTNSRGIPEPVSVEMLRIKKLHPAWGAKKILEIYKRNHTGKYAPARGSVENLFVRAGYTGVRRRRNIRGGQIIQNRIIPTKPNEVWTVDFKGWWYTRNREKVNPLTIRDEFSKFILAIDVVEKGDESHRKTGLPACFQAIRVTAVHTQRQRPA

SEQ ID NO: 100069 - protein, 287 aa, Unknown
  Obtained from environmental sample
  misc_feature (1)..(287): Xaa is any amino acid
SGHNAYVRTLAYSPDGKKLISTDYVKVMKIWDIETGRELKSTTLSDNVSSINFSADNRRIVYSSSFGGITVLDAGNYQELFTIKALSTITNTNYTVNEKQAIVQTDNNISLWDTEAGKRIWITNKSKGYIGNKILYFSPDRQLFANTEDVTTANKFQINIYNSATGNQVRSLQHIVNISSISSTDEVINDYGLIWSQDGKEIASYAGSVIINASARTVRYYFYINLWNVSDGKLISSNRHERGTISGTNTSSFSSGRVYFSPDVNRIIYVYDDSLQIYETRGTRKLF

SEQ ID NO: 100070 - protein, 267 aa, Unknown
  Obtained from environmental sample
  DOMAIN (1)...(140): AIR synthase related protein, C-terminal domain
  misc_feature (1)..(267): Xaa is any amino acid
DGIGWGLQSSSKSHTSSSLETCGADVQKGNAPEERKLQRLFRNPKAARLIKRCNDFGAGGVSVSVGELADGLTVNLDKILKKYEGLDGTELAISESQERMSVVTSKKDAQAFMELAEDENLEAVIIAEVTKSPRLVMNWNGKKIVDISREFLNSNGAKKQAKAQIKKIEIKKTDNHEVDAKELETFLSGLDICSQKGLVDRFDSCIGAATVIAPFGGKYFNTPAQVMAAKIPVLNGETKTCSLMSWGFDPYVSSLSPYHGAVFAVVH

SEQ ID NO: 100071 - protein, 264 aa, Unknown
  Obtained from environmental sample
  misc_feature (1)..(264): Xaa is any amino acid
PNFLIPVFPGTNSEYDSAGAVEKAGGKAQIFVIRNLTSAAIAESVRDFEKAARKAQVIFIPGGFSGGDEPDGSGKFITAFMRNPAISDAVTELLQKRDGLICGICNGFQALIKLGLAPYGEIRDMTINSPTLTFNAIGRHQSTLVNTKIVSNKSPWLSHLEPGDQYIVPISHGEGRFIAQESLIRSLAANGQIATQYSDFNGNASQDIRFNPNNSDFAIEGITSPDGRVFGRMAHNERFENGLYRNIPGIRKMDIFAGAVKYFR

SEQ ID NO: 100072 - protein, 280 aa, Unknown
  Obtained from environmental sample
  misc_feature (1)..(280): Xaa is any amino acid
MKINNINKFIIAVLCGAVFIAACEKAEIMPGGNNYVIDSIYANGSESAGTTALTITVNDDKLVLTAEDIIINAAFPVIKGGINKTDTAKTYELSITSGDTGIIRVGLNPYRGFTGWDAKTAVVYAEWFFSGTTELTITGCSLSPFPSDKIPLEIAGLPVTAIGNRAFYGEGLTKVIIDDMEDGIKVIGDGAFAGNLLTEIVIPQSVTTIGSGAFESNKLTSVILPKNVTVIGNSTFADNLLEEIVIHEHVFYIGDDAFASNELTYACIPKSVVFIGKGAF

SEQ ID NO: 100073 - protein, 196 aa, Unknown
  Obtained from environmental sample
  DOMAIN (74)...(196): Malic enzyme, NAD binding domain
  misc_feature (1)..(196): Xaa is any amino acid
MLMKYLGGVDAVALCVDSKGPDGRNDPRRLIDFVKMAQHSFGAINLEDISQPNCYRVLDELRETCDIPVWHDDAQGTACVTLAALINALKLAGKKMGDARIVLLGAGASNTTIARLILADGGDPAKMAIFDTKGGLHQDREDIRADKKNYRKWELCEKTNPRKVIDIAEAMGGADVLIALSSPGPDTVKREWVRGM

SEQ ID NO: 100074 - protein, 279 aa, Unknown
  Obtained from environmental sample
  DOMAIN (35)...(279): Aminotransferase class I and II
  misc_feature (1)..(279): Xaa is any amino acid
KMKQQYTQAERLQGVRYDVRGPNMVEAMKMEARGERILKLHIGNTGPFGFRAPESMVKAMVSHLIDAEGYSDSAGIHSARTAVMNYYQAHGIDVDVDQVWLGNGVSELISIVLQAMINPDDEILIPAPDYPLWTGQTTLSGAKAVHYLCDENNGWNPDLEDIRSKITPRTKAIVLINPNNPTGAVYSREIVQGIVDIARENDLIVLSDEIYEKIIYEGQHVFSAELCGDDVLCITFSGLSKAYRACGWRAGWMVITGPLQKAASLIEGITLLCNMRMCA

SEQ ID NO: 100075 - protein, 220 aa, Unknown
  Obtained from environmental sample
  misc_feature (1)..(220): Xaa is any amino acid
SAQQALTPQSARMIQRFLSDPQARLPTFPRDGNFEYPFAVAVKTGTSEGFRDAWCVAWSDRYLVAAWMGNADNRSTKRMTGYDGAAPLVKKILLRLHPNERDGLYEGGFPVPDGWLPFSICRLTGLLANENTPYVTSDYFAPGTEPTEASAVLRPLPVDRRNGLLANQRCPKQYREYRQFLFLPPEYEPWGRAYGLPIAPRLQSPLCPGGESLPAEYALE

SEQ ID NO: 100076 - protein, 64 aa, Unknown
  Obtained from environmental sample
  DOMAIN (12)...(63): Phd_YefM
  misc_feature (1)..(64): Xaa is any amino acid
MCAEGGVMRLSQDIKPVSYVKAHTAKVLEQANTSGPVVITQNGEASAVLMGVKDYDKMRESFAL

SEQ ID NO: 100077 - protein, 96 aa, Unknown
  Obtained from environmental sample
  DOMAIN (3)...(70): Ribosome-binding factor A
  misc_feature (1)..(96): Xaa is any amino acid
SGRFKDLSYADVYVSDIRGNITEKEVEGLQSAAGFIQSQLGAAMRIRKIPHLRFHSDKSISESFEIIKKIEELVEPENRSGAISGAKSTIRTDTAQ

SEQ ID NO: 100078 - protein, 209 aa, Unknown
  Obtained from environmental sample
  DOMAIN (38)...(184): TruB family pseudouridylate synthase (N terminal domain)
  misc_feature (1)..(209): Xaa is any amino acid
LNRKTEAAQSAAQKVQSGLILLNKKPGVTSFEALGEVKRALGSGKVGHTGTLDKFAQGLLIVLTGRALHLSPWFSHCDKQYRGRIHFGAETDTLDPEGNVIAEAGLPSREKVEQAIQMFKGQIMQKPPVFSAIHVNGQRASKLARSGELPEMKERAVTIYKLELEEWTPPFADIFVHCSSGTYVRSLARDIALAAESRAHLYSLLRTQI

SEQ ID NO: 100079 - protein, 145 aa, Unknown
  Obtained from environmental sample
  DOMAIN (17)...(145): Acetohydroxy acid isomeroreductase, catalytic domain
  misc_feature (1)..(145): Xaa is any amino acid
MEQAMKIYYEDDAKLDAIKKKTIAIIGYGSQGRGQALNLRDSGCSVTLGLREGGVSWRNAQKDGFTPLPVAEAAKKADIIQILTPDETQGETYKNEIAASLTAGKTLMFSHGFSIHYNQIVPPKNVDVVMVAPKGPGHTVRSQYE

SEQ ID NO: 100080 - protein, 167 aa, Unknown
  Obtained from environmental sample
  misc_feature (1)..(167): Xaa is any amino acid
MQNKVVHVFCDGRRVGRAAETPERLLAFEYDAEWLGDGFPISPFRLPLERRVFIAEREPFDGNFGVFDDSLPDGWGRLLIDRMLKKKGIPPSEVSVLDRLAIVGSSGMGALEYTPEERLIGKAVKAAGMAAGDLHTLAREAEAMLQTEYNGDTLEDLVKLGGSSGGA

SEQ ID NO: 100081 - protein, 240 aa, Unknown
  Obtained from environmental sample
  DOMAIN (1)...(145): Type III restriction enzyme, res subunit
  misc_feature (1)..(240): Xaa is any amino acid
MESAKPMDRLICGDVGFGKTEVAMRAAFKAVMSGHQAAVLAPTTILAAQHFATFSERMSSFPVRIEVLSRFQKGKEVKTTLEKLAEGKVDILIGTHRILSDDIKFKNLGLLIIDEEQRFGVKHKEALKQLRYKADALSMTATPIPRTLHMSLVGARDLSIINTPPRNRLPIETVVAEYHDDLVKSAIETELDRGGQIYFVNNRISNIPALQDRLEILAPKAKTISAHGQMDESELEAIMK

SEQ ID NO: 100082 - protein, 210 aa, Unknown
  Obtained from environmental sample
  misc_feature (1)..(210): Xaa is any amino acid
VARCTVASVTENSTAPAAPVPASTAAALDAPLPYKIARPEHDVKGFCRQFLRELTYTQGTTLERATPNDKYVALARTVRAYLTARWNTTSTQQQHDQRRAVAYLSAEYLLGRQLDNNLIATDLVDIAEQGLSELGLSLDELREVETEPGLGNGGLGRLAACFIDSLAALDIPAIGYGIRYEYGIFRQTFVDGRQVEEPDAGSTTAPRGDV

SEQ ID NO: 100083 - protein, 254 aa, Unknown
  Obtained from environmental sample
  misc_feature (1)..(254): Xaa is any amino acid
TTVLIDTSHLARFREAIDTVRSDVRIRFQGVPTGLHSTSALDPGTLPGRLDYANGPFEGWLREHLAEQFAYVCVDQAASLSQYSKALTRSGQLSSGARGAHGGHGRANVLGFTNDRRLKDLDRQIDVARERLRLASEALRGAELAQQAAQEQAAAARVITEMTWTDVDVTAARADVERWTHVIMQARESSPDLDDLRERAETLDSQIDALTRELGVTRQQAADLAALWERVSDDVDAAHAVCDAPSDRGDVLTD

SEQ ID NO: 100084 - protein, 249 aa, Unknown
  Obtained from environmental sample
  DOMAIN (1)...(249): MutS domain III
  misc_feature (1)..(249): Xaa is any amino acid
MDFTKTAMGARCLREWISHPLVSLESITDRLSCVEELVESPLFLDEAAEAMKPILDMERAMGRIGSGRANARDVQSLGKSLLQAESIIGILQKLKGKKFAEIANNLVLAKGKGQEICALLKDELPLTIREGNLIRQGASEEIENFRREIQGKKDWIANLETHEKERLGIPSLKVGYNKVFGYYIEITSSHSHKKVPAEYIRKQTLSTGERYITPEMKDVETFILNAEVRLFEKEYKVFCELRDKVHEWR

SEQ ID NO: 100085 - protein, 260 aa, Unknown
  Obtained from environmental sample
  DOMAIN (164)...(260): Response regulator receiver domain
  misc_feature (1)..(260): Xaa is any amino acid
MNLAPDLPQRIITDDQRLAQIVTNLLSNAVKFTPEGGSITLTARRMEDKEPNFCTMEIAVTDTGIGIPKEQQGKLFDSFVQVDSSISRKFGGTGLGLAICKRIVELMNGNIKMESETGKGATFTFTFRAEIGTQASSGENGAADGGESKAGAPKGADKLDFTGKRILLVEDVEINREIVITVLQPLGLEITEAEDGQRAFDLFRANPDAYDLIFMDIHMPGVNGYESTMLIRAFDHPKAKTVPIIAMTANVFREDIDRCH

SEQ ID NO: 100086 - protein, 206 aa, Unknown
  Obtained from environmental sample
  misc_feature (1)..(206): Xaa is any amino acid
MKLFHSLRFRFAFIFSVFIIVLSVSLSLLGIRQTTKAASDVFSAQGIAIVEKAVSFVDGDSFETLVKSLDKNDPFYEETRIKLFDLKELSGCRYLYTMSQVDKNIWQYIIDGSGDPEDSENFSDIGEKEDTSSYDSAFKRVTISGKTENGELVNQDEWGWIVSIYSPIRNSSGKIVGIAGCDFNGTDLRNSIVSEMKQQSIIGGIS

SEQ ID NO: 100087 - protein, 126 aa, Unknown
  Obtained from environmental sample
  DOMAIN (1)...(125): S-adenosyl-L-homocysteine hydrolase
  misc_feature (1)..(126): Xaa is any amino acid
IKKRNIKPQYDEWIFKDGHSVLILAEGRLLNLGCATGHPSFVMSASFTNQTIAQIDLWLNAQGKKTVSGLKYQNGSVYTLPKILDEKVARLHLDKLGVELTKLTKEQASYIGVDVNGPYKTDIYRY

SEQ ID NO: 100088 - protein, 278 aa, Unknown
  Obtained from environmental sample
  DOMAIN (11)...(278): CTP synthase N-terminus
  misc_feature (1)..(278): Xaa is any amino acid
MGSDDCYNGKSKFIFITGGVLSGLGKGVAAASIGALLSRFRVIPVKCDGYLNVDPGTMNPIEHGEVFVLDDGGEVDMDFGHYERFLHINGKSEWSLTMGKVFSTLIDSERQGVYAGTTIQFIPHVADVIKNHLFKTASKESADIMLVEIGGTVGDLENEFFIEAARQLSNIVGPENCIFVHLTYVPIPNGTHEQKSKPTQMSVRGLNERGIYPDIIIGRCSEPLSPKIKEKIALYGNIPSKNVISGLDMESVYEIPLSYQEEGILDIIFKKLKIVGVS

SEQ ID NO: 100089 - protein, 271 aa, Unknown
  Obtained from environmental sample
  misc_feature (1)..(271): Xaa is any amino acid
VNRGGYVDNVGYYYAPNDYFDATLAVKAQEFNSFVLSTRERYNLRYTLDGEVSGRYVIDNRLETSSRQWALDYRHNQLLSPDGRTRLSGYGSLVSSSTFNQMYSDRTYDLEKQQLDANMSLSHRFDAINASTNLVWRRNHNLTTDKIVEDMPTFDFRLQNRALIPYKAGGSKSGPSWYNNIFYAYDTKANVRREAYGGDSAAGFIRPAMEHNLNLTSSHKILKYLDVSPYFNMRASMFYGAIDTLVRDTLYLRDTIVYKVSDPDAHTRAPG

SEQ ID NO: 100090 - protein, 272 aa, Unknown
  Obtained from environmental sample
  DOMAIN (1)...(163): NAD dependent epimerase/dehydratase family
  misc_feature (1)..(272): Xaa is any amino acid
VDRSILGPEAFIKTNVMGTFTLLDVARNAWKDARPGRDTLFHHISTDEVYGSLGETGYFTEETPYDPRSPYSASKAASDHLAMAYSHTYGLPVTLSNCSNNYGPYQFPEKLIPLMILNMLEGKPLPVYGDGKNIRDWLYVEDHNAAVWTIMLNGITGETYNIGGENEWENIKLLNVLIDITAAKAKLAPAKLRNTVTYVKDRPGHDRRYAIDCSKIKRELGWKQTVSFEEGLAHTVDWYLANPRWIESIRSGEYQRWVEKNYGNRGIRQTVC

SEQ ID NO: 100091 - protein, 80 aa, Unknown
  Obtained from environmental sample
  misc_feature (1)..(80): Xaa is any amino acid
MTDSIWLIGCKGMLGAEIFLLLEKSGRSFIGTDREVDITDAAALKQFAKKEAVDWIINCAAYTAVDKAEDDAEHCRRLNT

SEQ ID NO: 100092 - protein, 294 aa, Unknown
  Obtained from environmental sample
  misc_feature (1)..(294): Xaa is any amino acid
FTWTDAVFVDDNGADNADVKTIDGTISGAIADKNVVLKTLKLEGKDAGKYLLEKPNLKAKIDKANGAAVTDYPHVNKITSFKIYLDAVYLAANATELQKAQQTVEYGYRLPSESTFTRWYDNPIITGLTPLATYYVAARSKETQNFKAGNPVRPNTSAIVTIKGSEVDSAVTAAVTLDPMETGEDGFTVTPVTVTSPAYNQVVEYAASTVNNVTLPDSAYTTETTINGLEGGTGYYIYARAKKNEDYDTGTVKVSAAPSGKNNDGKFWTKNPIVSFVDPEFGIGMPEIEDIPKG

SEQ ID NO: 100093 - protein, 230 aa, Unknown
  Obtained from environmental sample
  misc_feature (1)..(230): Xaa is any amino acid
MPIMKIFTGRCPLVLIICSLVLSSCEFENLWMKEILSFKTVSFNTNGGSYIPSQDLIMRETVKRPPDPSKAGFVFSDWYTDNDTFELMWDFDTAPNGYMTLHAKWDISVPGVNTFTVTFDSDGGSNVSPPLTVETGKTIAKPADPTKTGYDFIFTGWYEEGQTDTFDFSTPITANITLYAKWRPYELGETGPGGGIIFYRSEAGFIMTDDNSTLTAHYLEVTPVDIGSCF

SEQ ID NO: 100094 - protein, 261 aa, Unknown
  Obtained from environmental sample
  DOMAIN (105)...(248): SpoU rRNA Methylase family
  misc_feature (1)..(261): Xaa is any amino acid
AKIFEGAKRRLIAFGEIPADEIEYLRCLAKQLADEEGFQPAAVELLENAQLTFSTGAKTDVKETRRMLNGVYHLLLSETGRTKADWDFLNSPGVLDPSKRRPFAGMQVYLEDIRSPFNVGSMFRAAESFGVEKIWLSPFCADPKHKRAERTAMGCVDVLPWERLSHDPFADPRKKFTEESIFALETGGTPLEDFTFPKQGILIAGSEELGVSPGALAAADASRGRVSITCYGAKGSLNVSVAFGIVMQAWSSSKSSEQIAK

SEQ ID NO: 100095 - protein, 209 aa, Unknown
  Obtained from environmental sample
  DOMAIN (46)...(172): Phosphoribosyl transferase domain
  misc_feature (1)..(209): Xaa is any amino acid
MLMTERNIEEAKNAMNDISSLLKETGAMLEGHFLLTSGRHSNRYFQCAKLLEYPDKAAIALAEVARKIRADLDAGKLELDAVVGPAIGGIIVAYELGRQLGLPAFFTERDDSGAMILRRGFEVKPGQKLLIAEDVVTTGKSSGECAAAVQAQGASIAALACIVDRRAGGEVMEWPMYKAITVQAENWDADNCALCKKGIPAVKPGSRKV

SEQ ID NO: 100096 - protein, 286 aa, Unknown
  Obtained from environmental sample
  misc_feature (1)..(286): Xaa is any amino acid
TPKEVIEEPVEASDNSITFDEIVEICVIIEETPISPAVTSEPSPQISDKVVEESAEAQVAEVLEATEETDSSLIFDEVVEICEIIEETPVNLEVTTELSPTAPDVIIEKPTIVPDEVIEESAEIQVAEALEATDSREDSDASLMFDEVVEICEIIEEPTVNLEVTTELSPVTQNEISEEPEETPVVETTEAANASLIIDDVIEESEKAPVDEALDATLTSLAFDEAIEEPAETPFAGTLEITEATDTSLTIDEVIEEPAESTVAEVLETTEATVTSLIIDEVIEEP

SEQ ID NO: 100097 - protein, 251 aa, Unknown
  Obtained from environmental sample
  DOMAIN (5)...(249): NADH-Ubiquinone/plastoquinone (complex I), various chains
  misc_feature (1)..(251): Xaa is any amino acid
MLFGSVDYDTMMGLTRDFMARPDVTLFGMTHSAAWWMNLVGICLFVGACGKSAQIPLYVWLPDAMAGPTPVSALIHAATMVTSGLYMICRMNFVYANAETALAVILAVGAATAFFAATMGLAQYDIKKVLAYSTVSQLGFMFMGMGAGAFTAGMFHVFTHAFFKATLFLGAGSVIVACHHEQDMRNMGGLRKYMPITFASMGLATLAICGIFPFSGFFSKDEILWKVFEGWYNHGHYDGPTLHLVSWILRM

SEQ ID NO: 100098 - protein, 231 aa, Unknown
  Obtained from environmental sample
  misc_feature (1)..(231): Xaa is any amino acid
MPPSIPWFNNLPLWVTAVPLVGALLLLFVPGTKRRVFELGALVVALIDFGLSVPLWFQYDRSTAAVQWVTWLDWIPSLGVRFSIGMDGISLVLFLLTTLIGVIVVWCSFTAIAERFKEFYIWLLVMQFTMLGVFICQDMFLFYLFWEIMLVPMYFLIAIWGGPQKMYAAIKLFLYTLTGGVLMLVGILAIAFLQYKTTGMWSFSIASFHAMAGTIASQTTTYQVLLCLAFF

SEQ ID NO: 100099 - protein, 251 aa, Unknown
  Obtained from environmental sample
  misc_feature (1)..(251): Xaa is any amino acid
MSEGTSELWRPSPERIQAAHLTRFMPQVSARRGRPLATQADVYAWSIEQPEEFWAALRDFAGVRGEWTGPVLENPAAMPGARFFPRARLNFAENLLHAVAAGPVALEEQPALIFRNERGEQRECSYGALRSEVARVAAGLRACGVGAGDRVAGYLPNVPEAVIAMLACASLGAIWSSCSPDFGTPAVLERFGQIQPAVLFAADGYHYGGKTHDCLPRVAVLAQQLGVRRLVLVPYTRPLASQASPASLQQL

SEQ ID NO: 100100 - protein, 281 aa, Unknown
  Obtained from environmental sample
  DOMAIN (1)...(281): AFG1-like ATPase
  misc_feature (1)..(281): Xaa is any amino acid
AADVAQQAALEKLALLREQLIGRAPAESGLLPRWLRPRAPREAPRGLYLWGPVGRGKTWLMDLFFSSLPFRDTRRRHFHRFMQDVHAELRTLKHQESPLEAVAARIARDTRVLCFDELFVSDIADAMILGGLFEALFRRGVTLVATSNSPPAELYKDGLQRQRFLPFIDLILRHVEVLKVDGGVDYRRRQLTQAGTYLPAESPATPRQMEQLFAQLSGHASGTEEPLEVEGRLIPVIRRAPGTAWFSFEALCAGPRSQNDYIQIARENASVLLSDVPVLDA

SEQ ID NO: 100101 - protein, 95 aa, Unknown
  Obtained from environmental sample
  misc_feature (1)..(95): Xaa is any amino acid
KLKLPQVNNAYLKKGRLSVEVLGRGMAWLDTGTYDGLLEAANFIETIQKRQGMYVSCIEEIAYNNGWLSRGELLKLADGYKTEYGSYLKYIAEEK

SEQ ID NO: 100102 - protein, 281 aa, Unknown
  Obtained from environmental sample
  DOMAIN (22)...(104): Bacterial Ig-like domain (group 2)
  misc_feature (1)..(281): Xaa is any amino acid
KATSALDTAKFGTATVTVLVPVVTNVTISPSTANIPRGGIQSFTATVTGTNNPAQTVTWTVTGGKAGTVITNGTLTVAADETATNLTVKATSTEDTTKSGTATVIIVIPTVTTVTVSPATANVYKGRTQDFTATVTGDYNPAPTVTWSVSGTLSTIDQFGTLSVAANETATSLTVKATSTVNTTKFGTATVTVITRELEEALSGAVSINGTLKVGYSLSANTNNLKGSGTFSYQWKRGNSASVAGTNIPGATSQNYTLVPADQGKYISVTVSRAENTGSIT

SEQ ID NO: 100103 - protein, 286 aa, Unknown
  Obtained from environmental sample
  DOMAIN (2)...(228): ABC transporter transmembrane region
  misc_feature (1)..(286): Xaa is any amino acid
MILCSLLAVIGNVAANRMSAGVARDVARTLRHDLFTKISYLSCRQIDKITVPSLIARLSSDTYNVHRMVSSMQRIGIRAPILLLGGIVMTLTLDVSLTLVMIAVMPLAFIVIYLVSSKGIPLYTKLQQAVDTMIRVVRENATGIRIIKALSKAEYEKKRFASANKDVTDREWTANIIMGITNPAMFIFINLGLVVVIITGAYRVNAGLSQPGVILAFLTYFTIILNATLSITRMFVMFSRGGASGDRIGEVLAFPEDLKLTEKNHEESPYHLVFENVRFSLYPNPS

SEQ ID NO: 100104 - protein, 285 aa, Unknown
  Obtained from environmental sample
  DOMAIN (28)...(283): ABC transporter transmembrane region
  misc_feature (1)..(285): Xaa is any amino acid
GTDVKSKAQVTKTIFRLWRYLSRYRLRIVIVISLTVLSNFLALLGPMLSGRAIDAMGTGKGMVDYDKVFYYCSWMALFYVISAGLNFLLSAQMISLSQRTARQMRNDVFEKLMVLPVSFFDTHQTGDIISRISYDIDTINTSLANDLLQICTTVVTVSGSLFMMLSISPLLGTIFLVTVPLATLFIKHNTTKIHGFFRTRSVKLGALNGFVEEIVSGQKTIKAYHQEKTFITRFDKCNEEAVVAYYDADYHSSSLGPMVNFINNLSLTLISVFGALLYLAGRITL

SEQ ID NO: 100105 - protein, 244 aa, Unknown
  Obtained from environmental sample
  misc_feature (1)..(244): Xaa is any amino acid
MSNEQWKRKKITMLRLTAFCLLLAVISPMAWAGAKKDIETVTAEGNETWQHSFDINGRKKGTYNYLVTGYDHAGNETIDGPFNIKIDPNSGLAAVKVLYPEPGFVIRQDVNVLGTASAYYGVEKVFVRLDNGAPVEAEGTEYWSAPIEFEKIIDGKHTLFFRASDIKGTPGPETRVDFILDTSPPKIDLLSHRVGDTISRNVNIKGSASDPNGIKTVELSEDGINFNGLRLTKRRDVVEFSIPV

SEQ ID NO: 100106 - protein, 218 aa, Unknown
  Obtained from environmental sample
  misc_feature (1)..(218): Xaa is any amino acid
MKKYLLIPLLAALFIACGQKEQAVSEQNLLAAELVGQTIALADFVTARPAPILSSRSTIELEFKQNVVLPIAVGIDLAVNPIDFEPAVKGKAKWLTTSLLQFVPDEPLQNGKAYKAKFDGKKAFGKAADVDDYAFEFQVIPNEILDINGGFEPVTGKVNTAKLMLELRFADKPDSVKLIKDLTLNFNSKRMQYKISFDGRGNFVKIESEEVSRVTKRK

SEQ ID NO: 100107 - protein, 287 aa, Unknown
  Obtained from environmental sample
  misc_feature (1)..(287): Xaa is any amino acid
MADGTEKCISAIQEGEFIATLDKSGELVISPVLDCLLTGNDVVYEVTLESGRTVRANSKHPFLVSEDGVGVWKQVWELELGDLVSMVTPVLFKDAEEFTEERKGTECAPNTTSGSESMELPMNSPTVTVDTFRVKTSALPTGVPPCPRVGTCASRAMLNGFETQVGLKNLPLNKKETDSFGLGTESDWKTTITYLLNNKEFVQYAEKRLKELEMAQDGTGNSSLTTTIILEESEDFSVTPAISWSGTGNAPNYLPKLPGIWQRGLDPIVKIIPVGVEPVWDLQVYGT

SEQ ID NO: 100108 - protein, 258 aa, Unknown
  Obtained from environmental sample
  misc_feature (1)..(258): Xaa is any amino acid
MLFTSEAAASGKTSAMTTTAALCSRPIEATGTSYAVTAILQEASSTGNLGVPTLYLDEVSSIFGRSGLNNTNNPIGDILRKGYKRNATSTISRSGSAVRFSIYTPFLMTGLKTAVPDDIRTRCIVVDMKAGTPKRYYDVRRSEAEAAFLSRSLQSAVHRKSSELSMYVVPRLHDKLVARNAEVWEPLFAVAHHLGGQEWVDRCLVAFKTMHLGHYDTELLSMAQTIVKDMLQAAEEYGHNFIPGRHLVQGLSQLDNPL

SEQ ID NO: 100109 - protein, 249 aa, Unknown
  Obtained from environmental sample
  misc_feature (1)..(249): Xaa is any amino acid
MYWRLSREYPNFPKLPEAYYQMSQNYLFAGHLDTVKVILEQLVSRFPNSPRVSPALFRLGELAFMDNNFGKAYEYYKKVKKDQMPLEAWEMNHYRLGDCASHMGDLDKAVEYFHTYVEACDRNEYRKKEFREMALEYMAISFSDMPNGVDEAIKFFKKNSGKPYEAQVIYMVGAKNRDHGQWDQAIDALSGALKKYPMYKDAPLARQKLIECYVVKKEHEKANKERESLVDDYGEGSKWYTANSKERKV

SEQ ID NO: 100110 - protein, 210 aa, Unknown
  Obtained from environmental sample
  misc_feature (1)..(210): Xaa is any amino acid
MKSKAFVLVSVTFFLALPLFAETDVKSETSLNLALTSVPEAKLIITQSFIIPCLQGENPLIKDNNIKFSLNTELTPISMNLLGNAVLTPVAFFELSAGGMMGTGWIINLFDSELRGIGLNRPDEHNLTSVDGSNFDGFYGKGYAGGALQFDLAALIPGEWNHVVFRSYHEIGYKMYSRAGKGDSWFYEGDFGENQNGWNYYGSYLAGYRM

SEQ ID NO: 100111 - protein, 277 aa, Unknown
  Obtained from environmental sample
  DOMAIN (176)...(276): B12 binding domain
  misc_feature (1)..(277): Xaa is any amino acid
VREAMHSVFLFHAGAAGLTMAIVNPAALIAYNDIEEDLRSAVEDVILNRNPEAADRLLKFAEKRNSPSTPSAQHSPPANDWRNESAEARIIHALVKGVDTFIEADVLELMNNKGSTGKTALEIVEGPLMDGMKEVGKRFDEGTMYLPQMIRSAQVMKKAAAALEPYMEKKTDALSPKIILATVKGDVHDIGKNIVGVVLACNGYQVIDLGVMVPAEQIFETAEKEQTAMIGLSGLISPSLDEMAHVARDMEKRRMRIPLLIGGAAASLVHTSLRLAP

SEQ ID NO: 100112 - protein, 250 aa, Unknown
  Obtained from environmental sample
  misc_feature (1)..(250): Xaa is any amino acid
AAILAAIGRKPDNLVPLKTWTSAERAFISIPGTVKTISGTEEARRRPFVKDLFFRIAYGDKVDFPRNNVSKCGNVLSAAPDRAGAVEAAESAARSILIRLDPSNPETGEFLSNTGNGEWGVGSGEWRTGFPPDAYQLSHELKATLNTLPDTKLQEQREDLQLFPFPAFQASGLKDYAGRSVAESLEAVRELSGLPLPEFHAENAVKPPESSDNNRNNFLGKEFWSALARGGYQGAVYYIDKIREQITESR

SEQ ID NO: 100113 - protein, 247 aa, Unknown
  Obtained from environmental sample
  misc_feature (1)..(247): Xaa is any amino acid
NKPVILSADIADTGCVRDPFILRGADGNFYMTLTDMKSGNGWGSNRGIILLKSQNLLNWTSARINIANKYPANFSNILSAWAPEAVYDRKEGKYMVTFSSYRNNVPHKIYRAYTNDDFTDFIEEPVQLYNHPDNKDAIDGNIAYLNGKYHLFYKNENDGNHISRAESDVLNGGYVRKSANCDGESVAVEGCQVYRLFGTNTFVLMYDKYNNSPAQFGFKKSTNLTSFTAATGSLNFAPRHGSIIPIT

SEQ ID NO: 100114 - protein, 151 aa, Unknown
  Obtained from environmental sample
  misc_feature (1)..(151): Xaa is any amino acid
GCGVVAADSIGYGYGLVKFLSEHKEITVIPVNGSMKAINQRKYHNRRSEAYGRLSEHFDKLRFLTGGVKQNDLEDICRQLESIKISYDRDMRITVLPKSEIKEEIGESPDLADALAYSFMVSHEHGQTPEAHKAKMLEIRRIQMSSNPYRR

SEQ ID NO: 100115 - protein, 201 aa, Unknown
  Obtained from environmental sample
  misc_feature (1)..(201): Xaa is any amino acid
MSETKTEQATTTATPAMETAPPQTTPPSAEPTQQEKATKMDAIVGKIAGNEKPPEQPPKETPKTEEPPNTEPPKPPKSEPPKPPKRVDKLLNKYKELQAKLSEIEAKEKEGKATELDQYKKEELTKEHTELVNAEVQQFHEQAAEVLGDKYEVFADNNEYYAPILNQNANAFANAIGAMENSFALLNEFYTAFSDGSIDLN

SEQ ID NO: 100116 - protein, 276 aa, Unknown
  Obtained from environmental sample
  DOMAIN (2)...(132): Type I restriction modification DNA specificity domain
  misc_feature (1)..(276): Xaa is any amino acid
DIAECQYITANTASKAARFKAKKNDILIAMTGSHITQPSSMVGRVTRYNSSIEAYINQRVGKIITLDNNLLNEDFLYHFMVQEDTAYSLANIASGSANQANISAGQIEALPFALPCIKEQYVIAEVLSSLDDKIDLLMRQNSTLEVLAQTYFRQWFVEKASEEWETMRLGDILESIESGSRPKGGIDPNLLDGVPSLGAESINGIGVYDFSKTKYVTREFFSNMRRGIVKSHDVLIYKDGAYVGKKGMFGNEFPFAEFAVNEHVFILRSNARASQI

SEQ ID NO: 100117 - protein, 264 aa, Unknown
  Obtained from environmental sample
  DOMAIN (80)...(161): Toprim domain
  misc_feature (1)..(264): Xaa is any amino acid
KELINKFIVARNARDAARNAKDLIRRKSNLETTTLPGKLADCTEKNPDLCEIYIVEGESAGGTAKQGRDRRFQAILPLRGKILNVEKARLSKVLENAEIKNMITAFGCGIQEDFEMTKLRYGKIICMTDADVDGSHIRILLLTFFYRFMKPLVEGGHVYIAQPPLYKVTKNKIDNYYYSDAELEKALGKSRAGVTVQRYKGLGEMNAEQLWETTMSPANRTLLQVSLEDAFMADEIFSTLMGDKPELRRDFIAEHAAQYTEVEV

SEQ ID NO: 100118 - protein, 169 aa, Unknown
  Obtained from environmental sample
  DOMAIN (20)...(168): tRNA synthetases class I (C) catalytic domain
  misc_feature (1)..(169): Xaa is any amino acid
MIKKPLFLYNTASRSKEAFTLPEGVPEVRLYACGPTVYHYAHIGNLRTYLFEDLLRRSLEYFGFKVRHVVNITDVGHLTSDQDEGEDKMEKGAARTGQSVWEVAEFYTKKFKEDLELLNVLPPTIWCKATDYIKEQIKLIEKLEETGYTYRTSDGIYFDSLKFPKYTEF

SEQ ID NO: 100119 - protein, 192 aa, Unknown
  Obtained from environmental sample
  misc_feature (1)..(192): Xaa is any amino acid
MDKKALKTLEFDKILKEIASLASSERARAEILSIMPFGNKTDAENALTEVWEADKVLFEHSVHLSFAYDDIEVPLQKAAVMSVLTCGELLKIARTLRVARSLKDNILKVPDEQIVRIKALAKDIHTDRPLEEDIERAILSDTEVADAASTELRALRQKSRKIGEQIKAKLSHFVSSPTYAKYLQDNIVTIRG

SEQ ID NO: 100120 - protein, 79 aa, Unknown
  Obtained from environmental sample
  DOMAIN (2)...(79): Ferredoxin-fold anticodon binding domain
  misc_feature (1)..(79): Xaa is any amino acid
ERSVPAAKLIACIKEHGGEILESADIFDVYTGVQVPESMKSVAVKLTFRTSRTLRDEETIAAIKEILVALERTTGAKLR

SEQ ID NO: 100121 - protein, 204 aa, Unknown
  Obtained from environmental sample
  DOMAIN (85)...(204): Peptidase family U32
  misc_feature (1)..(204): Xaa is any amino acid
VPSLGKASAINSLQLPELLAPAGSFLALKLAVYNGADAVYFGATDFSARAKAENIEDLEGAIRFCHLHNVRAYLALNTAVKNSELDAVTALIRRARDAKIDAFIIADLGVLQIIKREAPGIPLHASTQTGVSNAVAARFLAGLGFTRVVLARETSLADIEDICKNCDIEVEAFVHGALCAAYSGACLFSGVACGESGNRERCLQ

SEQ ID NO: 100122 - protein, 272 aa, Unknown
  Obtained from environmental sample
  DOMAIN (122)...(258): Thiamine pyrophosphate enzyme, C-terminal TPP binding domain
  misc_feature (1)..(272): Xaa is any amino acid
LPVESIRKLCEKAERVLLIEEGQPFIEERIKGILPQNIKVSGKLDGTLNRVGELDPDNVRKGLDLKPRPSVLDSGLKIPELPGRPPQLCQGCPHGDSYTAINKALAELGSGQGSPDSAITSDIGCYALGASPPYSTIESCVCMGASVSMARGAADAGLKYAVGVIGDSTFLHSGITCIVDAIQSDTPMTLIILDNSIVAMTGCQETIVPSAKLKDLILGLGVKPEHLVELEAKGQFLEENTAQLKKEFEYRGLSVVIFRRECLEAFTKRNRK

SEQ ID NO: 100123 - protein, 270 aa, Unknown
  Obtained from environmental sample
  misc_feature (1)..(270): Xaa is any amino acid
VCPEDPNILKRLEWFKDQKLALMMHWGIYSQIGLVESWAMSDSDSDWSRRGVDWDVDAHSFKRQYRDLYRSFNPIRFEPDKWAEAAASGGFKYLIFTTKHHDGFCMWDTKLTDYKVTSRDCPFSINKRADIVSNVFNAFRRQGLGIAAYFSKADWNVPFYWAEGQFKSEFTSRGPSYVPAEQPELWEKFVDFTHAQVMELVTFYGRLDILWFDARWVCRQNGQDIRIEELVEKARRVQPWLLSADRTCGGVCENYVTPEQSVPCKPLAVP

SEQ ID NO: 100124 - protein, 230 aa, Unknown
  Obtained from environmental sample
  misc_feature (1)..(230): Xaa is any amino acid
MLLRALCAISLYILACSSKDSGLVVYGGETYETVVIGKQKWLKRNLNYIPIDTSAAMNFKCYEDNGDNCDKYGLLYDWATAMALPAICNEKDCSLTINKKHRGICPGGWHIPTNADWDELLHYTDSTSGTDSPYRSTIAGKHLKAVEGWRDYEDKSGNGEDTYGFSALPGGAGYPDGNFYSLSDYGYWWSTNEINRGNAFRRSMYYDSDSIGYYSYGKNLLLSVRCLEDN

SEQ ID NO: 100125 - protein, 85 aa, Unknown
  Obtained from environmental sample
  DOMAIN (7)...(52): SpoVT / AbrB like domain
  misc_feature (1)..(85): Xaa is any amino acid
MFTSHLRKVGGSVMLTVPPAILETAQLRPGTAVRIAVEGGRMVIEPEVGKRYSLRELLAQCAGAAPLSGEDAQWTASASKGRELI

SEQ ID NO: 100126 - protein, 270 aa, Unknown
  Obtained from environmental sample
  misc_feature (1)..(270): Xaa is any amino acid
VREALECMERCLVAETETVRLQEAVARLESERDALLIPLKQLLDKLGRAPLSGPDGFPDWPASLDALLRDTRLAERAAEERAHKAQRIAEEEIALRAAQSAFNDERNAEAELFALAQVDNAEDFLRHAAIQAERETLTRRRRDLEDALRLAAGDTPFDEFTASFASFDRQEREQRLAVLDAELERQDQEERALVDTLGELTARLSSLDAAAEELGKLRRQENALLENLRQLTLEYGRHALARQLIHTAQLNFERESQPAVIRAASSIFGA

SEQ ID NO: 100127 - protein, 214 aa, Unknown
  Obtained from environmental sample
  DOMAIN (2)...(214): Bacterial extracellular solute-binding protein, family 7
  misc_feature (1)..(214): Xaa is any amino acid
MHLSLAGDIIQGAVFTSFGLSAIDPGIMTLSAPFLIRNESELNAVMQEMQRELDQRFNRGNYFILAWSKSGFVNIFSREPVYTPDDLRKMKIASNTEASEMNTVFKTMGFQIIESDWGDVGNKLNAGTVAAVYQQPAAVAAFQLQSILKNMLSVNIAPVLGGIVLNQVTWKKIGDLNPQYQQQLLDVTRKIANEFDSSLTKTVSDAVATMKRSG

SEQ ID NO: 100128 - protein, 191 aa, Unknown
  Obtained from environmental sample
  DOMAIN (27)...(167): Bacterial flagellin N-terminus
  misc_feature (1)..(191): Xaa is any amino acid
MRISHNIAALNTHRQMGISELDGSKSMEKLSSGYRINRAGDDAAGLAISEKMRGQIRGLNMASKNSSDTISLIQTAEGALAETHSILQRIRELAVQSANDTNTDSDRTELQSEVKQLKAEIDRIGNTTEFNTKKLLEGSAKGVADEIKGTSRLNNNSSLVLDAGKITAMGDAVAADKSWVFDGAYMLVRTG

SEQ ID NO: 100129 - protein, 109 aa, Unknown
  Obtained from environmental sample
  DOMAIN (16)...(109): Pyruvate flavodoxin/ferredoxin oxidoreductase, thiamine diP-binding domain
  misc_feature (1)..(109): Xaa is any amino acid
MSAELLFVQGNEACVRGALYAGLQFFAGYPITPSTEVAEHLAEMLPREGGCFIQMEDEIASMCAIIGASLTGAKSMTATSGPGFSLMQEALGYRIMAEVPCVVVSVQRG

SEQ ID NO: 100130 - protein, 39 aa, Unknown
  Obtained from environmental sample
  DOMAIN (3)...(39): UBA/TS-N domain
  misc_feature (1)..(39): Xaa is any amino acid
MAFTAMDVKALRDKTGLGMADCKKAMEENNGDIDKAVDW

SEQ ID NO: 100131 - protein, 267 aa, Unknown
  Obtained from environmental sample
  misc_feature (1)..(267): Xaa is any amino acid
KNYIANHKTYRDELESKYNRIFNTEIGVPVKTYPVYLEGWQTGVKNLKPHQWQSVHHLYREGKGISALGTGFGKTLTAIALHALLKQEGRINRAWFQVPNNKVKDWIKEIHEVLPSRTIGYVDPEMPGYASREKRYALYQRLANSAYEIILMPESSAGEIQLSPEQDSLIAQEVIYKHIGEKGEGKSDRYIENLKESVSRKLENGKTNRTICFEDFGCDAIFVDEGHRYKNLFSSTLSRETGMNDGRQSAKAMSLFKKAEYIRRTNN

SEQ ID NO: 100132 - protein, 274 aa, Unknown
  Obtained from environmental sample
  DOMAIN (210)...(258): Regulator of chromosome condensation (RCC1)
  misc_feature (1)..(274): Xaa is any amino acid
MTVICEPEEAGTYIVTVTAAADASKKANATVTVTKPEVSEMVQVSAGGSYTVGIKEDGSLWAWGSNYDGQLGDGTTEMRTAPVRVGAVTDKWVQVSAGWLHTVGIKEDGSLWAWGDNSSGQLGDGTTERRTAPVRIGAVTDKWVQVSAGGYHTAGIKEDGSLWVWGSNSDGKLGDGTTERRTAPVRIGAVTDKWVQVSAGWLHTLGIKEDGSLWAWGGNERSQLGDGTTEMRTAPVRIGAVTDKWVQVSAGYYHTAGIKEDGSLWAWGYNYYGQ

SEQ ID NO: 100133 - protein, 65 aa, Unknown
  Obtained from environmental sample
  misc_feature (1)..(65): Xaa is any amino acid
MDTQTNYIDTLIRRYPPLETVKNDISAAFDIIAGSFSNGGKLLIAGNGGSASDAEHIAGELMKTL

SEQ ID NO: 100134 - protein, 268 aa, Unknown
  Obtained from environmental sample
  misc_feature (1)..(268): Xaa is any amino acid
GTISTNGINANSVNSADNQNIRGDVGAGNRQGVIDNPRGVNNSSGVGINTNSNVRPVDNSVGMNVNVRGVNASGINPIDNQNIRGDVGVNNRQGSVDNSRGVNNPVNLGINTNSNVKPVDNPVGAGVNPTYSQNIRGDVNVGVGVNNRQVPVDNFRGVNNLSNVGINTNNNTNINIRPADNSVAMGINTRGINTIGINTSGINPIDNQNLRSINNPGSIGINTANTTNTANTTNTTPINVPAIKERCISIVDNLKSSAAPILRELTQR

SEQ ID NO: 100135 - protein, 177 aa, Unknown
  Obtained from environmental sample
  DOMAIN (38)...(128): Helicase conserved C-terminal domain
  misc_feature (1)..(177): Xaa is any amino acid
MTLIGYFNSLRELGGMRRLAEDDIQTRSYRVEMSDVIRPGLKQRSVRRIDELTSRVSNKDIPEKLKALETIYKKNYAEDDLKALDIVLATNMLSVGVDIDRLGLMVVNGQPKNTAEYIQATSRIGRKYPGLVVTVLTWARPRDLSHYETFEHYHESFYKHVEAQSVTPFSSRAMDRG

SEQ ID NO: 100136 - protein, 114 aa, Unknown
  Obtained from environmental sample
  misc_feature (1)..(114): Xaa is any amino acid
MKRVLIITVMLCFMAAAIFGQNRKISDAVIKSFNEAGIQTVSEGVNPIDFTLPALDGSRINLAQLKGKVVFLNFWATWCGPCRSEMPSMEAVYKKLKTGVLKFSRELGDPKSKV

SEQ ID NO: 100137 - protein, 53 aa, Unknown
  Obtained from environmental sample
  DOMAIN (1)...(48): Phosphopantetheine attachment site
  misc_feature (1)..(53): Xaa is any amino acid
SSAFIGDLGADSLDLVELVMDLEEEFGVSIPDEDNDKLRTVQDAIDYIHKAKS

SEQ ID NO: 100138 - protein, 205 aa, Unknown
  Obtained from environmental sample
  DOMAIN (3)...(205): Beta-ketoacyl synthase, N-terminal domain
  misc_feature (1)..(205): Xaa is any amino acid
MYRRVVVTGVGVTSPVGNDAESFWEALCAGRSGIDRVTSFDVTDFPTKIAGEVRDLDLARYVDPKDIRRNDRAILLGLAAARMALDDSGLDLANEDLDRVGVIVGSGVGGLHTMEAEHIKLLDRGPGRVSPFLIPMMITDMPAGCISMAHGLKGPNYSVVSACASASHSLGDAFMMIRCGMMDAAVAGGTEAAITPLSFAGFCSM

SEQ ID NO: 100139 - protein, 270 aa, Unknown
  Obtained from environmental sample
  misc_feature (1)..(270): Xaa is any amino acid
DASWGYQPLGLFAPTSRYGQPDEFKAFVDAAHVAGLGVFLDWVPAHFPEDDHGLAFFDGTHLYEHADPRQGRHQDWGTLIYNYGREEVRNYLISNALFWLDQYHLDGLRVDAVASMLYLNYSRKEGEWIPNRYGGKENLESIAFLRRLNEVVYGHFPGVMMIAEESTAWPGVSRPTDVGGLGFGLKWDMGWMHDTLRYLGRHMLHRRWHHDEITFSMLYRNAENFVLPLSHDEVVHGKKSLLWRMPGNREEQFANLRLLYAWQYALAGKK

SEQ ID NO: 100140 - protein, 281 aa, Unknown
  Obtained from environmental sample
  DOMAIN (1)...(281): Ethanolamine utilisation protein EutA
  misc_feature (1)..(281): Xaa is any amino acid
VLNIDVGGGTSNYVVFEAGRVVDTACLNIGGHLIETFGDGRVKTVREPARRICEAHFGTRVDPARIGRRELETLSAAMAGLIVEVMQGTPSEPARSLLMTECLRPGWRFDQVFLSGGVGECYYHPESAASPFAYGDTGPLLAEALRRREELARMTGEKPRQTLRATVIGAGAHTLSLSGSTIWLTAERLPLRNIPVLQSGLAWQHAAPTQLVESWRVAAKRMDIDPVADLYALALPDDIPVAYKDVVAVSGALRQFNENHPNTAHPLIVIARQDFGKVLGM

SEQ ID NO: 100141 - protein, 80 aa, Unknown
  Obtained from environmental sample
  DOMAIN (8)...(78): Chorismate mutase type II
  misc_feature (1)..(80): Xaa is any amino acid
MNIDTLNQEIDGIDEQLLKLFEQRMELARKLGQHKQDISQPVMDTEHQRKILYQMCEQTQPELAGYVKVLFSSLFEISGS

SEQ ID NO: 100142 - protein, 261 aa, Unknown
  Obtained from environmental sample
  misc_feature (1)..(261): Xaa is any amino acid
SYMKALRQGAVPGEDFEELGRDVDEALEAAKILQEAGYDAFDADAGTYDSWYWAHPPMYFEKGLYLPLAERLKKVTKVPVIVAGRMQDPDMAADALERGRIDAVGIGRQLLADPAYVNKVMLEDFQDIRPCLGCHDGCFGRLLEGGRCSCSVNPECARETFVKLEPAVDKKHIVVVGGGPAGLEAARVSALRGHRVTLFESSDRVGGALIVGGIPSFKRDDLALVSWYEHQMNKLGVNVKCLVTATRALVLEQKPDAVFIG

SEQ ID NO: 100143 - protein, 84 aa, Unknown
  Obtained from environmental sample
  misc_feature (1)..(84): Xaa is any amino acid
MTRKGKLIERFLTKPADFTFDELVTLLRQLGYTQTGSGQTSGSRVAFANDEGDYLQLHKPHPRNILKRYQIEELTAALKERGLL

SEQ ID NO: 100144 - protein, 89 aa, Unknown
  Obtained from environmental sample
  DOMAIN (55)...(89): HicB family
  misc_feature (1)..(89): Xaa is any amino acid
MNGHINYQGYTGSIEFSEADAVFHGKVIGIKSLITFEGASAADLTHDFHNAVDEYLAFCAETGKQPEKPFKGSFNVRIKADLHRQAAQA

SEQ ID NO: 100145 - protein, 98 aa, Unknown
  Obtained from environmental sample
  misc_feature (1)..(98): Xaa is any amino acid
MTRATSVGFLLLSPICTSLTGMFIKFIPWSPWAIVGWRSLFSSLFMLAVFKTLFPREFRFDWSPGNLLIAASYSVFALLFTISTKLTTSANTVFLQYT

SEQ ID NO: 100146 - protein, 212 aa, Unknown
  Obtained from environmental sample
  misc_feature (1)..(212): Xaa is any amino acid
MSTNNTASKIRALQTANEDFEFYPTTPEIMEAMKNDLWDYLRSHDNDYSARRRNTDCEDIYINKSYERTGKRETKIESIKISSFLDIGAGDGRVLDFLSAGKKYGIEIARAQADDLIRRGIFIVGRNYWDVSLHNNYYSLIYSNPPFSNFVRWVNKLLAECNFCVLYLVMPVRWNNQEEITRELKRYETSVVGEFDFSNADREARGKVNLVR

SEQ ID NO: 100147 - protein, 256 aa, Unknown
  Obtained from environmental sample
  misc_feature (1)..(256): Xaa is any amino acid
MENNVNEFKMINYLGVSSITFLRKLENGWYIGVITPENEYYRELKNIRLILIFLGILLATLLSAVLLSIISAKKKSEERIQIMFDAMPLGAIIHDRNFEHFECNKSAFSMFDLSNKQEYIDNFHLLSPEYQPDGRISNEKMDELVDKAFKEGYARFEWMHQKLNEEPLPCEVTLVREEYENEFILAAYLRDLRDLKAAVTQKNESEQSLRLLRNIINSIDAQVYVTVPHSGEILFVNDYMKKEFNVEDDCIGNICY

SEQ ID NO: 100148 - protein, 220 aa, Unknown
  Obtained from environmental sample
  misc_feature (1)..(220): Xaa is any amino acid
VLERLSIHNVGGISRCELSFEKGLTVVTGESGAGKSSIVRAIELAAGKRAQAAFIQAGEEEAAVEAIFQTDVCLPGLEEDLQPAEGSFFAKRSLSRNGRGRASLQGIQTPVTLYSSSLSRLIHIQSQFAQMELLDVGRQLAMIDSCGGPELHAVLRELREVFENARLKERELREIAERRAEIERRYANAAEVVPLAKKVNPEAGLEAALENEISELSRQI

SEQ ID NO: 100149 - protein, 86 aa, Unknown
  Obtained from environmental sample
  misc_feature (1)..(86): Xaa is any amino acid
MFHWEKTYDWGAMFQPAGFDVLEKYVNKEFKERYEDFDAYIGLYRFTESNHLEYFVGMSLPVNTPAPDGFVKFDFPPSTLGVCWVY

SEQ ID NO: 100150 - protein, 186 aa, Unknown
  Obtained from environmental sample
  misc_feature (1)..(186): Xaa is any amino acid
MTGLEQGIFPREDKKDDELEEERRLFYVGATRAMDELYLTTCAERRMYGKTAQTQPSLFLREIDKSCLQIEELAATRSFVVPQYSGGRSFIGRSFNPLNPQNLQTSGAGSGAGSGVNSGANSELEERAGWRRGQRLFHEDYGYGAVMGVKDSDDGPVVHVRFDSGQDKRFLSEYQGRAYEKIGEDC

SEQ ID NO: 100151 - protein, 80 aa, Unknown
  Obtained from environmental sample
  misc_feature (1)..(80): Xaa is any amino acid
MNINTENLVTISEADQNFSKVARLVDERGTAVILKNNAPRYVLLDYNLLRQDAVATDADLATAASRILAKHIKAFEELAK

SEQ ID NO: 100152 - protein, 279 aa, Unknown
  Obtained from environmental sample
  misc_feature (1)..(279): Xaa is any amino acid
ILEFCGEIFDRIHHAVECPATQRRISACVFWVFIAALAGVGANRLGMLPQGFILHVPHNFLEAIDLAFTFMLALELLSLVFAISCSLSRALAKQFQVLGLILLRNAFKELTHLHDPINIALDWVSVLNIGILGASALVVFICLGLYQRLPQATVHLEREMHMGYVLSKKTLGLVLLAVFAYAGLDDLWIFLSTGKSTRFFETIYTVLIFADVALVLIAQRYMQSFQALFRNAGFVVATLLIRIALGSPPPWDALIGIGAMLYSLALTWAIVRFEPHAAP

SEQ ID NO: 100153 - protein, 236 aa, Unknown
  Obtained from environmental sample
  misc_feature (1)..(236): Xaa is any amino acid
MMFEHDALAEESKAAKETKKNRGINVVIGNPPYSGESANKGNWILSLLDDYKKEPGGIDKLKEKNPKWINDDYVKFIRYAQLYVGRAGSGIVAYINNHSFLDNPTFRGMRWNLLKSFDKIYIIDLHGNAKKKETTPDGNKDENVFDIQQGVSINIFVKNLTTDMELHGREKSFGLTEVYHYDLYGLRDDKYEFLLEKKIKFVEWNEIKPSIPQFFFVEKDFTNQIQYENGFSVEDL

SEQ ID NO: 100154 - protein, 293 aa, Unknown
  Obtained from environmental sample
  DOMAIN (8)...(122): Response regulator receiver domain
  misc_feature (1)..(293): Xaa is any amino acid
MQMANEQKKIIIAVDDILENLLIIKEILKNLYEVHTCQTALNMFELLQHFTPDIILLDVEMPVMNGYEAIEKLKSDDKYKQIPVIFLTGRDDVKSEVEGLSMGAVDYIHKPFISSLIIQRIKTHLVLQEYQKIEIINMATVVAMENIKEGFVLVDDKNNYLSSNPASKKMFPEISKLSKGESIFSISCWPNELKNNENNPVEFSITGKSTRHYKASISPVIIDNETFIARIFLFMDITDNVILLKELEEAAYIDSLTGIYNRKHFLELADTNIKRAARMEQTVFVAMIDIDFF

SEQ ID NO: 100155 - protein, 239 aa, Unknown
  Obtained from environmental sample
  misc_feature (1)..(239): Xaa is any amino acid
MTKLFIDIETYNETVSLRTSGLYKYAEKAEVLLVGYAIDDAPAKVWCAQSESFPHDLYELVYKQEKDKYQVIAHNAAFERTIFAHQRRDDIYEIWANQRNWHCTMAQALAHGLPGGLQYLSDIFKLSGDKAKDPEGRALVNLFCSPRDGKRATRHTHPVEWQKFKEYCRRDVEAERALYYKLPAWNCRQSELDVINLDYQINSRGFQVDVGLAEAAVAVVKGKSRRATIKCSSFRRPRV

SEQ ID NO: 100156 - protein, 248 aa, Unknown
  Obtained from environmental sample
  misc_feature (1)..(248): Xaa is any amino acid
VPIILIPTIILLAFALANAERVVGANNSLETPQGARSAGVGATVLPMQNDLPSLAQNPLQLAWLEKLSISFAHVSYFEETSFNGVAMALPLKDAGAVGISASRFGASDIPHIKENEPLPDGDNYNTMNISDWIFTSAWGKNFGKWNLAFALHLLKRELDQSGWGFRSDIAAGYEFSKKLMLAGMVKGWTSSAVKWESGNFEYSSPEAYAAFKFREPFPYFYGNLNFYWQSTGILHSESEKETRAWKNF

SEQ ID NO: 100157 - protein, 294 aa, Unknown
  Obtained from environmental sample
  DOMAIN (1)...(245): Subtilase family
  misc_feature (1)..(294): Xaa is any amino acid
VYVGIIDSGIAAHPDLKENLSTGDGWDFYNNNATTTDDPTSHGTHVAGILGGVGDNKTGISGVCWNVTLVPLQVVDPSTGKRPIDKVTKAINYATDYNIPILNYSGGGTSNNSQREQAIRQYPGLFVCSAGNNNNNNDNPLTPHFPSNHPFDNLIAVGAIDKTGSRRASSNYGATTVDLFAPGGSIYSTIPGTYDYMSGTSMASPHVAGVAALIKSKYPMMSARQIKKAIMNNVDPDPALKCVSGGRLNAAKIFGALTSFDGGSGTQNDPYRISNVAQLLNISQKSSSHFQLTA

SEQ ID NO: 100158 - protein, 254 aa, Unknown
  Obtained from environmental sample
  DOMAIN (1)...(247): UvrD/REP helicase
  misc_feature (1)..(254): Xaa is any amino acid
DTYVCVVGDDDQSIYRFRGAEVKNILEFPNRFKNADIIRLERNYRSTPPILKAASSVVNYNRGRLGKTLRAEKGDGPLPILAYLPNQDEEAKFCADKIEGSVQNGEAAWSDWAVLYRTNAQSLGFETLFLRRSIPYRVVGSLKFYEREEIKDALALLSLLVNPRDEVAFRRVVNKPARGIGPVSIDKLVEASADYGGNLLKAGRNLEFKQKARTGLDTFLTVIENGRALLEKDASAEPQKGKKRKKKKNALYPV

SEQ ID NO: 100159 - protein, 118 aa, Unknown
  Obtained from environmental sample
  misc_feature (1)..(118): Xaa is any amino acid
MNPVFTKAYKAAAAISAYQIVKLDANGLVVPASAAADKAIGVSGAVATDIDAHTDVHRLGIVNVQLGGAVTIGAEITANAQGFGVAATAAGNESIGRAEQAGVAGDIIEVFLRLRSDV

SEQ ID NO: 100160 - protein, 266 aa, Unknown
  Obtained from environmental sample
  misc_feature (1)..(266): Xaa is any amino acid
TSDPDNKEPGDKNPDTKEPGEKEPGNNDDDDDDYDNPNAGLVRELTFSHDSGLYNAQFSLTITAEGSEIYYTTDGSVPVPDKAGTIKYSGPITVKNRNGEKNNLAAYAEQFYMASDDARGSVPAVYKPKDDQVLKATVIRVIAVDSSGKQSGVATKTYFIGNNLDGYGNTRIVSLVSDPDNLVSEDRGIMVRGKASYRWDSNPPYNYRMKGADWERPAYLELFEGNDRSKAALSTGVGIRVRGGYSRGVRQKSFSVYFKEQYGIKT

SEQ ID NO: 100161 - protein, 231 aa, Unknown
  Obtained from environmental sample
  DOMAIN (1)...(66): Bacterial Ig-like domain (group 2)
  misc_feature (1)..(231): Xaa is any amino acid
MFVGDTRKLNATVSPNNAPNKQTTWSSNNNSIATVTNDGTVTAKAIGTAQITVTTVDGNKTKTCTLEVKEEKDAYVFVDLAEVIKNVTVPIDINDWSDFNSLFYGLPLVQAGWLDPDQDVTFKIISEGGVKKLQINAYALWGPGLDIRAGDSGIDFQAGDRIEVKGRIQKIRASNVVLNIIGDNTVKPNDNYWEPLQGWSSDGEFQKTFTLTQYDADTINENHSVRIRPDG

SEQ ID NO: 100162 - protein, 244 aa, Unknown
  Obtained from environmental sample
  DOMAIN (51)...(242): Glycosyl hydrolase family 10
  misc_feature (1)..(244): Xaa is any amino acid
MIKIFELYNVIVYVIVICFITACHSSDKTGNASKPTSTPKETNGNGTQPSAIPLHSKWPFFVGAAAPGNAFNSSNGQYPLLWHFNVLVAENNMKPASIMPSEWQNFASSPAYNASQSYRWTEADKLVNYAEANNTKIRGHVLFWHEQIPGVFFKTDGPTSAYITKDVLYSRMELHAKTVFQKYGGKVLWWDVANECVGDDGNPRVTGGANIANSDGKSGFTAVMEASGLKGDDRYEWIVNAFKY

SEQ ID NO: 100163 - protein, 63 aa, Unknown
  Obtained from environmental sample
  DOMAIN (4)...(63): BMC domain
  misc_feature (1)..(63): Xaa is any amino acid
MDLTVLGVLEFNSIAIGIKSLDAMAKAASIRIIDAKPICPGKYMIIIAGELAAVDASLTAGKK

SEQ ID NO: 100164 - protein, 204 aa, Unknown
  Obtained from environmental sample
  misc_feature (1)..(204): Xaa is any amino acid
MGIYDALVTLNTERENSPLPFVILLDEANLSPIEYYWSNFMAATEIDKSHNKPVWIDIGTEEQIYIPETLKFIATINNDETTENLSPRLIDRAWVIKLPVTKKYENKATPVGGTAAADTILWRDLKTAFSSGNKQNESDSAKQQKETLTEIYEKFDAHRMEISPRIINVIDNYISAANGLMEKDRKNDPLNQEPEQAALDFVVV

SEQ ID NO: 100165 - protein, 256 aa, Unknown
  Obtained from environmental sample
  misc_feature (1)..(256): Xaa is any amino acid
LPYKVDDNFEDRIADGIEKIRGAADSLDEAALELCGSDGVFRLTSGKDEVIRNRLSPEFSTLRKSINSLASFVRELLEKIPEENEDDPVVWEIRSALRRLDTVSTVCTSFLEYRENYDDVMWIERRGAEAGAAGSARKRAFDGPWAVFNVTPLDVAPHLKEALFEPNKTVICVSATLTTGGSSFNYWKSRSGLSLVTERETLCGVFNSDFPYESNVLLASPLDAPLPTEAPYGSFVDAAAASLAEVSGGSALILFT

SEQ ID NO: 100166 - protein, 164 aa, Unknown
  Obtained from environmental sample
  DOMAIN (11)...(128): Miro-like protein
  misc_feature (1)..(164): Xaa is any amino acid
LNETPSANRVHIGFFGLRNVGKSSLVNTVTGQDLALVSEVKGTTTDPVYKAMELLPLGPVVIIDTPGIDDEGVLGELRVARARRVLNKTDVAVLVTEAGLTHCAVEEELIGIFKAKNVPYIIAQNKSDLKTGSGGAAFSAVDNVLPVSAKTGLNIHELKEKIAA

SEQ ID NO: 100167 - protein, 290 aa, Unknown
  Obtained from environmental sample
  misc_feature (1)..(290): Xaa is any amino acid
NRVGSFPGWAQGSWILIRRRDTGNATRIRIFLRSDPYTYVEFRPFSPDKCQMDVVLYNAYIVRALTLPVTLERLYTMQLGDALDLAGSQFPRRYFEPNPDDYRLHRQFIAKVRENIKGLEFADDGAIDQNGNYVYINTGLVQKGQPGLNCSGFAKWLVDGILRPITGERLEIPPLKEPFGERGSSLTDLWEKQRDPFFGLDWIRNLASAAWSKLLAPAFGSLDEIEVRSDRFSQMTLRTRNNTTIYAYPGFLENAGYGVEGLQPLLYMLAIDEPGKFYLAAINNEIGPPA

SEQ ID NO: 100168 - protein, 262 aa, Unknown
  Obtained from environmental sample
  DOMAIN (82)...(140): GHMP kinases N terminal domain
  misc_feature (1)..(262): Xaa is any amino acid
CKINLHLGIGKKRADGFHSIESICATLAFHDTLRLEFGGSDGEIRLFTNWQTPAEDIPDEKNLILRAISLFREQTGFKKGLIVRLDKRIPLGSGLGGGSSDAAATLLALNLLSGAALPMQNLMEMAAILGSDVPFFLTGGTAFVSGRGETVEPIKSPGGLWVVLVKPPFKSNTVDAYSLLDRLREKGEFEEKKAIPREILLRTLKGDSKKWNFFNEFLPVLLCQRYDTNGIFYHEIFVSLIGGSGASFASISGSGSCCFGIF

SEQ ID NO: 100169 - protein, 233 aa, Unknown
  Obtained from environmental sample
  misc_feature (1)..(233): Xaa is any amino acid
MQAAKILNEDAGYIAKLQLTADRLPPMRIGRHNQLQEWLHDADDPQDDHRHVSHLYGLYPGSQISPYRHPILFQAAKKSLLYRGDMATGWSIGWKVNLWARLLDGNHAYTIISNLITDRTYPNLFDAHPPFQIDGNFGYTAGVAEMLLQSHDGALHLLPALPDVWKDGCVKGLLARGNFEADIQWKNGRLEKAAIKSNLGGNLRLRSYIPLKGAGMKEAKGENPNPLFAPAHI

SEQ ID NO: 100170 - protein, 70 aa, Unknown
  Obtained from environmental sample
  DOMAIN (4)...(49): Uncharacterised protein family (UPF0150)
  misc_feature (1)..(70): Xaa is any amino acid
MSFIGTIIIKEEEDWFVATCLENDIASQGKTINEAIDNLKEAIALYYEDEEDVSIAKNKQVYVTTLEMAI

SEQ ID NO: 100171 - protein, 257 aa, Unknown
  Obtained from environmental sample
  misc_feature (1)..(257): Xaa is any amino acid
MPVAAADGAVKIAVLVNLKAGENSRQFIEGCVSEGRALDFTVDSFVSGEDEKRCGEIAKDIALADYDGLIFAYGDVGFSYDILKPIADKGIPVVTFEALPYRDGKSIKGLVTTFQDDYRLARLSIETLLSLTPDSQGSLDKPARIIRVGCEPGITFLDRRAWAFGEFVSRGEIEEAAFVKLDGLENPHGAAWEALAAILPDFPPGTVDGLWVPWDEFACGCAEAIASAERQDIKLTSIGISDDDIHRMLRHPDIWLA

SEQ ID NO: 100172 - protein, 99 aa, Unknown
  Obtained from environmental sample
  misc_feature (1)..(99): Xaa is any amino acid
MPISMEKRLAFARQFGESAWEDGLLPLAIALALSVLCALWVIPLLRKLKFGQSIKEIGPNWHMSKQGTPTMGGFLFMPAITVVVLVYGVLQEELGRYLD

SEQ ID NO: 100173 - protein, 264 aa, Unknown
  Obtained from environmental sample
  DOMAIN (24)...(264): Aminotransferase class I and II
  misc_feature (1)..(264): Xaa is any amino acid
MSKYWNNRTKTQHPYVPGEQPRDRKFIKLNTNENPYPPSAKVIEAIQKAVNGDLRLYPDPQCTAFREAIAARYNVQPRQIFAGNGSDEVLAFAFGAFFEGTNDGPDTQSAAILFPDITYSFYPVYAGLWGIPFRAIPLSPDFSINCDEYKIPSGGVVLSNPNAPTGKPVPLADILPLAQYLESQGRILLVDEAYTAFGAESAVPHIGDHPNLLTVHTFSKSASLAGLRIGFAIGSEELIEGLCHVRDSFNSYTVDRLALAGGTA

SEQ ID NO: 100174 - protein, 279 aa, Unknown
  Obtained from environmental sample
  misc_feature (1)..(279): Xaa is any amino acid
NGSDPSIQLEIMQNGERSNIYPNCVHEDALNAPLKNTTDEGLPGAIIRSTPDETDTINIDIFLPNGIGGYDKEGELKSVSVSVQALYKKSGEPDSTYKTFGSFGVISGAELKTKRYQTTQSGLVPGSYTVKVERLTPDSTDTKIIDQVYLGSIRSSKSVRPIREERQKDLTVIAMRVLAASQLNGILDRLNYIAVSKLPVYSGNGSGKLYWLESKTTRNPAAMLLYALQGRAVQQAVDSGDIDWPSFETFYSWCEKKKYTCDAYLAEAVTIADMMRMIG

SEQ ID NO: 100175 - protein, 109 aa, Unknown
  Obtained from environmental sample
  misc_feature (1)..(109): Xaa is any amino acid
VEDFIKGDIVILNFPFSDLSSTKRRPAFVLANLGYGDVVLCQITSKPAKNEFSIKIEPNDFEAGSLPIVSFIRTDKLFTADKELILYKAGHIKQEKTDNITQTAISVIS

SEQ ID NO: 100176 - protein, 265 aa, Unknown
  Obtained from environmental sample
  DOMAIN (189)...(258): Helicase conserved C-terminal domain
  misc_feature (1)..(265): Xaa is any amino acid
METPLGGLVGYKMRFEDRTSLQTKIKILTDGMLLQELKLDPWLSKYGVIVVDEAHERSLNIDFTLGLLKRVLESRRDFKVIISSATINAQVFCDYFGGCPVVKIDAQRFPVTLIYDAPYSGVPPHFAGTDNGADNGGDTAAEALLMKIEKIVTRFIAEKREGDILVFLSGEKAIKDCMNRLSLCRAGGKLHLIPLYGRLGKEEQERVFDPAPKGKTKVVLSTNIAETSVTIEGITAVIDSGLSKLNWYNPNTYTSSLVEAPISKA

SEQ ID NO: 100177 - protein, 276 aa, Unknown
  Obtained from environmental sample
  misc_feature (1)..(276): Xaa is any amino acid
MIVESDQYNEGKVFDFMPFKFEGCQNKPSVFSIDFIHDNVEYEYSFTLNKKEILKESLYYYPNGRRAKVYTRDETKGLTKTEIYSFADGVIPRPFDVAVNTSKKTLFLSRASQMDRELCKKLYRFFMLDFLVGFAPLDYRKYEFDVQDLFAKNKDLFLYALYICDSDISEIKLLSEKVKYDGTYKYNGTINHSGSTLKFETFHKAAPSITFDLLNEESAGTIQLFSMLFFLLHVIKGEKIFMLDEFDLSLHTKLAEFVIDLFHAGSTAQFLFTSHN

SEQ ID NO: 100178 - protein, 267 aa, Unknown
  Obtained from environmental sample
  DOMAIN (34)...(267): Putative esterase
  misc_feature (1)..(267): Xaa is any amino acid
MAPIGWSHAHPINIIDFPFEGADYFLLKDVPHGTVARDYYFSKTCGCYKSCLVYTPPDYTLGKWDNLPVLYLQHGYGENETSWVHLGKVNWIMDNLLAEGKAEPCVIVMNNGMVQTEHSDGSRDWDPMTIEKLLLDDCIPYIEKHYRVASDKWRRAMAGLSMGSMQTSVTTLKHPELFGYAGIFSGFLGKIGDPGKVENSHFAILEDKQKMFDSYKLFFRCIGDGDQFIGQFKSEAAMLQEKGLAPDQWKAHKEVIYPGGHDWNVGV

SEQ ID NO: 100179 - protein, 80 aa, Unknown
  Obtained from environmental sample
  misc_feature (1)..(80): Xaa is any amino acid
MLGLNCRSEVRIASGRIDTLVETKQFVYCFEFKLNGTAEEALAQIDAKEYLLPWAGSGKQLFKIGVDFDCEKRNIGDWSR

SEQ ID NO: 100180 - protein, 112 aa, Unknown
  Obtained from environmental sample
  misc_feature (1)..(112): Xaa is any amino acid
MKVVLLAGGFGTRLSEETDIRPKPMVEIGGHPILWHIMKIYSYWGYNEFVILTGYKSHIIKDYFLNYYTRYSDMTIDMVSNSVQLHNIRTEPWTVTMLYTGPDTKPAAGSCG

SEQ ID NO: 100181 - protein, 287 aa, Unknown
  Obtained from environmental sample
  DOMAIN (54)...(238): Pyruvate ferredoxin/flavodoxin oxidoreductase
  misc_feature (1)..(287): Xaa is any amino acid
GDGQAVFDELGKDKPKNHFIIGINDDVTKASLDFDHKFTIETHEVHRALFYGLGSDGTISANKNSMKIISDTTPFYTQGYFVYDSKKAGTMTTSHLRFGPKPIRSPYLITSAQFVACHNFTFMEKYDMLKNLEEGGNFLLTSEYDKDAVWDHLPGWVQKQIIDKKVNFYVIDAVKIATEVGLGNRVNTIMQTAFFEISKVIDEKVAIDHIKHAIEKTYKKKGDDIVNMNIASIDGAIKGIQKVSYPSAPTKPVEERKVVSDDATPFVKDVTATIIRQEGENLPVSKM

SEQ ID NO: 100182 - protein, 249 aa, Unknown
  Obtained from environmental sample
  misc_feature (1)..(249): Xaa is any amino acid
MNEQELTAQLFFNAAFPVMQVVLDDDPSMNAKFRDVAATVQICAKNGNELVACHMVFDRGKLSVNQGPAQAPDITLSFSSLAKMNTMFRGGAALPSIKGFLKLGLLIKIFSLLMSLMIMMPSSRPKDPAKQRLKVKMSLYMITRALSTYNKLGNPEMAEWCRRQPDRIYQFIVDSEGDSNAGVEPEIACYLRVKAGKSKSGHGVYKRRSPFVLFHFFNVAGALKVLLKDVAFVEGVEKGCVEVIGSPEY

SEQ ID NO: 100183 - protein, 166 aa, Unknown
  Obtained from environmental sample
  DOMAIN (5)...(64): Collagen triple helix repeat (20 copies)
  misc_feature (1)..(166): Xaa is any amino acid
AGDPGAKGDKGDPGDPGAKGDKGDPGDPGAKGDKGDPGDPGAKGDKGDPGDPGAKGDKGDPGDPGAKGDKGDPGDPGAKGDKGDTPTIAAAAGANIGAVGTPSVTPSTSGNTTTFTFNYLKGAKGDKGDTGSAGSNGAKGDKGDKGDTGSPGAQFSLNGTVLTITI

SEQ ID NO: 100184 - protein, 284 aa, Unknown
  Obtained from environmental sample
  DOMAIN (1)...(284): K+ potassium transporter
  misc_feature (1)..(284): Xaa is any amino acid
IMGLIGGSFFYGEVVITPAISVMSAIEGLEIVAPQLDTWIVPLSIIVLTLLFMIQKHGTAMVGKLFAPIMLTWFLILAGLGLRSIIANPEVLHALNPMWAVHFFLEYKTVSFIALGAVVLSITGVEALYADMGHFGKFPIRLAWFTVVLPSLTLNYFGQGALLLKNPEAIKNPFFLLAPDWALIPLLIIAALATVIASQAVISGVFSLTRQAVRLGYLSPMRIIHTSEMESGQIYIPFVNWMLYVAVVIVIVSFEHSSNLAAAYGIAVTGTMVLTSILSTTGHV

SEQ ID NO: 100185 - protein, 253 aa, Unknown
  Obtained from environmental sample
  DOMAIN (15)...(252): Beta-eliminating lyase
  misc_feature (1)..(253): Xaa is any amino acid
MSNQENIVYLDNNATTRVAPEVLEAMMPFFGDRYGNPSSIYRFGGTVRRQVEEAREKVAALIGASPDEIVFTSCGSEGDNMALKGFFQEHGERTHIITTTVEHPAVRNTARFLGGRGARVTELPVDGDGLLRDGAIESIAINPDTLASIMWANNETGVVFPVRELAEAVKARGGFFHTDAVQAAGKVVIDVKKAPVDMLAFSGHKLHAPKGVGAAYFRKGTPARAILHGGHQEGGIRAGTENVPYIVGLGRAC

SEQ ID NO: 100186 - protein, 115 aa, Unknown
  Obtained from environmental sample
  misc_feature (1)..(115): Xaa is any amino acid
LKAPFKINTQAIKELEEEQRQMIRGVVELSGTTVKEVMVPRTDTVFLSAATPKEELLKCISESEHSRFPVFMDTVDNVIGILHVKDVLKALVNNRPFDINTMVRKPFFVPLSKHI

SEQ ID NO: 100187 - protein, 256 aa, Unknown
  Obtained from environmental sample
  misc_feature (1)..(256): Xaa is any amino acid
MAPNANDPAYWENIRQGLAIQQASAAPQGAPQGDWRVEPSDGGVVITEYKGKDTAVQIPSQIDGKPVTGIGEKVFSRKGISSVTIPDGVTSIGAKAFADNQLSSVAIPDSVTAIGEEAFIRSQLSSVAIGGGVTTIGKAAFALNQLSELTIPFSVTSIGAEAFRRNRLSSLSVGSSVIDIGAQAFADNQLAEITIPNSVKTIGRDAFADNQLKKVIIMQPNIANVAIAGSSPFGKAEVLTEEAYSFERDEGANYTD

SEQ ID NO: 100188 - protein, 187 aa, Unknown
  Obtained from environmental sample
  misc_feature (1)..(187): Xaa is any amino acid
MKKTEEAPLHWSQHKEKAAGYWHIKLMLILFRLFPVVIMRVIAFPVGFFYFLFSKRARAESKRFLQKAAPFVAKPQTAKKCRSPFGPLRHIVSFSLTLIEKIESWGGKFQFKNIHFQNDDVEELIQELENGKGVFLITSHIGNIELLRGLASFNRTRVSRKTPITAVIDMKVNKNFSRMLKELNPQS

SEQ ID NO: 100189 - protein, 195 aa, Unknown
  Obtained from environmental sample
  DOMAIN (8)...(135): Acyltransferase
  misc_feature (1)..(195): Xaa is any amino acid
LLLLSGCTVIVKGRENIPKNEGVCFVSNHCGYFDIVLLLAYCGRPIGFIAKKELLFIPLVNIWVFLIGGLFIDRGSSRKALRTIHNGVERIKKGNGMIIFPEGHRSKGKGLLPFHPGSLKLATMAEAQIIPVAISGSYDIFEKNGRVVRSLAQISFCPPIITATLPPEERKQVLSDRIFMVIKDELEKHATATCN

SEQ ID NO: 100190 - protein, 256 aa, Unknown
  Obtained from environmental sample
  DOMAIN (11)...(185): DHH family
  misc_feature (1)..(256): Xaa is any amino acid
MEDAVDRILAAKEEGEKVLVFGDRDVDGISGTVLLSGFLDSIGMDIRWRVPEGDEPYGLSIEVVEEFAASSGTLIITVDCGISNIAEIKRAVELGIDVIITDHHNPQGEIPDALAIVNPKLPESKYPFRDLVGCGVAYKLVTSLRFALNSSLYGQSICLLNTRPVNDAWIVEIAKLRNLVLISSLTETLVPDSEGHSVVSIGNTRLPAFLEAQQILVWDAPLQKRSLKKIFGSSRGNHMLDIAPEIGKEIPSSAGK

SEQ ID NO: 100191 - protein, 295 aa, Unknown
  Obtained from environmental sample
  DOMAIN (151)...(295): SecA Wing and Scaffold domain
  misc_feature (1)..(295): Xaa is any amino acid
KHHEREAEIVAQAGRRGAVTIATNMAGRGTDIILGGNAEGLAKVEAKKKNIELYDEDGRNTPEFDALVASLEERTKAEHVEVVDAGGLHILGTERHESRRIDNQLRGRSGRQGDPGSSRFYLSLEDDLMRIFGGDRLKSIMGTLGLNDEEPIEAGMVTRAIGNSQKRVETQHFEVRKHLLQYDDVMNKQRIFFYGLRTEILKGNTKEYVLRVAGEVVEGLVHDHLPQKGDKDIEGLKERVEQLFAMSDLDFEGLAAMTQASAIEALAKIVHDAYEDKEERLGSEEILRWHERIAI

SEQ ID NO: 100192 - protein, 272 aa, Unknown
  Obtained from environmental sample
  DOMAIN (1)...(271): N-6 DNA Methylase
  misc_feature (1)..(272): Xaa is any amino acid
GYGLWNGGMLSTTYDFLHRLNNNIDVRLFGQEINPESYAICLADMLIKGQNAENIRFQDTIIKDCFPNQSMRLVIANPPFGTSWGGKDAPEGVERAVKDEYETKSHGRWKGGLPSTGDEQLLFVQHAVSKMDEHMGRAAIIQNGSPLFSGGTSSGESQIRRYLLEQDLLEAIIGLTTDLFYNTGIGIYIFILSKNKRPERRGKVQLINAVNYWKQLGKSLGKKRREISREDMKAITELYADFHESKDCKIFEINEFLYKEYSVYQPLQRNYA

SEQ ID NO: 100193 - protein, 63 aa, Unknown
  Obtained from environmental sample
  misc_feature (1)..(63): Xaa is any amino acid
MAMKHSGIEWIGDIPSDWDIKKLKYVTRLRNEIGRFYNDAIYLGLENIESSTGKYIIQKQNTM

SEQ ID NO: 100194 - protein, 226 aa, Unknown
  Obtained from environmental sample
  misc_feature (1)..(226): Xaa is any amino acid
EGSRRIYTQERIKQLKNFSDFKKLVETILDPKKFYGLGITIENAVVHINGYLILDGYEVHHDEKGYHLSSNTSKIVEHKTTSTLSHDFIIEQVDKCEEKLATGDYDGAITNARSLIESVSIEIIKIQNNQDYKSEGNLINIFKDLKKCLNMTIDENQSPQFLIEIIQGMTTTIQGIAALTNRASDRHNRIYKPQKHHAKLAVNCAFSFCDFILESFHYQQDKRKVS

SEQ ID NO: 100195 - protein, 282 aa, Unknown
  Obtained from environmental sample
  DOMAIN (43)...(123): Bacterial Ig-like domain (group 2)
  misc_feature (1)..(282): Xaa is any amino acid
ATINASTGVVTAKNNTGTVNVTVTTADGGHSDSVTVTVVEQMPITEVRITNKPATPQIGVGGELTLTAAVLPEGAADKTVAWTSSVPGVATVNNGVVKGVSLGKTIITVASTVDSTKADSVEVSVVPPTAVTDIKLKTYPELEDITFLEPPNANINAIVYEEGEVNIAVFLSPLGASDQKLKLTYGTGTVSVEELPGPSGADFRILKIKGIHDGTTTITVASNSNQEKFAKYTVKVIPYATENTKVVIKNSTGANDLNESVAFTILKGKPTSIHAYVTSDDP

SEQ ID NO: 100196 - protein, 275 aa, Unknown
  Obtained from environmental sample
  misc_feature (1)..(275): Xaa is any amino acid
KFIYQNARPLDFARWQLHFENGSREQILQILAQYQNQDGGFASALEADSWNPNSSPIQTWVATELLKEINFVDKKQPIIQGILRYLDSGENFLQDKWVNTVPSNNDYPAAFWWNYNEETNKTDYNPTACLAGFALAYADKGGTLWEKSVRIAKNAVDAYLKFDLLNDMHTVLCYIRLMEYCELAKITNVIDIEALKVKLIKQVKYCLTKNTDEWNKGYICKPSQFINSRNSIFYKENKKLAEYECEFIRKTQQDDGSWEIPWNWNNYPEQWAISK

SEQ ID NO: 100197 - protein, 234 aa, Unknown
  Obtained from environmental sample
  misc_feature (1)..(234): Xaa is any amino acid
VSVFGYHSKTSEVVDVSDPSLLNLSGIVIITPNSGVTTGTELTAVYSGSETVNYQWKKDGINVGGNSYKHTPTEAGSYTVTVSAEGYNPKTSAAVNVVVEYTIVIEMFDNISGDTVTATPDKGIATDMVTLIYTVANTAANNQLDFGGVTADIASVTGYGAGTRTYTINAADASNGVITITAIFTHTDLEIDHIAFNEHDGGHITKTYGDAPFTNAITTAHHGTGAITYHSSDE

SEQ ID NO: 100198 - protein, 270 aa, Unknown
  Obtained from environmental sample
  misc_feature (1)..(270): Xaa is any amino acid
KLFGRENLPYDRENAEAARVLFERGVGLDAGNIRKAAALLGLGGYVSKPAFFDLAARFLSEGRNAAEIPLTDMIISNRLLAEAQLKLTAEAAARLDNQIKINTEPQRENLSRLQEREQALYGRLLKYAGDGEPATRVPGTANGDATALLAKTIETLIDLKPLTANAHYNALRGIKPFTIDGIHESLLEARAREGYETFATVPDPRYGDSFAKVRSQFAPLLAELGVAPTADAVKAAAICSKNSMDVTPDNLAAVMEIDAQIDAVASGLHP

SEQ ID NO: 100199 - protein, 273 aa, Unknown
  Obtained from environmental sample
  DOMAIN (217)...(273): Histidine kinase-, DNA gyrase B-, and HSP90-like ATPase
  misc_feature (1)..(273): Xaa is any amino acid
MDINPVVVRMFGEGRSFIIGKHCHEIFCPADKNACPIIDLKQDVDRSERKFINNKGEIIPIIKSAIKINYNGQPALLESFTDISNMKKAEEQLRIMSIAEKANQAKSDFLSRMSHEMRTPMNAIIGMTKIAEKTDDVSKLKYCLSTINTSSVHLLGIINDVLDMSKIEAGKFDLEKIPMNIEKMLMKVSNIIIDNIEKKNQKLSVNMAQDMEMDYIGDDLKLSQVITNLLSNAVKFTPENGEITLAVEETGSKGNVNTLRFSVTDTGIGMTHE

SEQ ID NO: 100200 - protein, 293 aa, Unknown
  Obtained from environmental sample
  misc_feature (1)..(293): Xaa is any amino acid
FKNRVVYIKNVDSRLERTSSEGRGDREMTISELLRNVQTAKEANAQLSLEHERTLVSMEGATARQSTDSTEPAVAVTPAKKKAPRRERNTVNQYENRLEQIAKSRKANDAVIAQYMVEVHKKFAIPAACLIFVLIGAPLGIMARRGGLAVGASYSVFFFIIYWVFLITGENMADRMIIPPAVGMWAGNVFLAICGLVLIALMTRETTIGFGFLKTFFGKLSPAFKRLSSVKAFSLPGALFRFPRRFLNKTVGILPGYLIWMFLSYVIGLLAALIVIFVTIDYVSNLRKFDNAT

SEQ ID NO: 100201 - protein, 267 aa, Unknown
  Obtained from environmental sample
  DOMAIN (167)...(233): His Kinase A (phosphoacceptor) domain
  misc_feature (1)..(267): Xaa is any amino acid
MYQREMQLAHAKELNELQLAKLNLVVQGTKIGLWDMEVVMDDPINPNNTFVWSDEFRHMLGYNDENDFPNILSSWSDLLHPEDKERTLSAFANHMLDRTGKTPYDVEYRLKRKTGEYAYYRASGESIRDRDGNAIRVAGALMDITETKNMLINKDRQREEAEAANRSKSTFLANMSHELRTPLNVVIGLTGLIMEDKSLDKHVTDNLIKVSNAGSTLLSIVNDILDLSKIESGRLELTPDEYYTASMLNDTVTLTLARIGEKDINFH

SEQ ID NO: 100202 - protein, 180 aa, Unknown
  Obtained from environmental sample
  misc_feature (1)..(180): Xaa is any amino acid
MYMARQYAHVWDSKIDGYIKVLQSLSNVMNFYENLPLEARRREYENTMESVFEDMPEFVRMFTVWKPDAIDGMDRRFMGKTGATPTGQFAFALTRENGQIEKQTSDVVHAAMTHLTGSNSKKVEMADPIVIKLAGKDTWCLRIMVPIINKRLNESVGVIGCQFNIDLIQPLVEEAIRDNE

SEQ ID NO: 100203 - protein, 226 aa, Unknown
  Obtained from environmental sample
  misc_feature (1)..(226): Xaa is any amino acid
LKANILYYGGLAMAQPYDNKSIEEIKILIISGLQQEFNNKLRILPKSFIAILAKILAGVFVILYKQIGWLFLQIFPETAYWNEINVLGVRVRPLVKWGVLIGVGEPRRGTQWKGIIQVNVTRINTFLDSGAQLKSDITGKIYLTTETVTLQNTTELIPVVCAESGTAGNLEPGETLNFVNPLGNVLKAATVENVTKDAIDSETEADYRFRVVSRWRMQPQGGAGAD

SEQ ID NO: 100204 - protein, 283 aa, Unknown
  Obtained from environmental sample
  misc_feature (1)..(283): Xaa is any amino acid
VQISKDWQHVKIPLADFPDRGMYWDDTKKTELPDRINWDKIAEFRVSVDKGTNPQGFLVWVANVEIVKGTVPVAKPKPKIVYWDEKTETIDGPKDPAKLDGKAKAVPNGVFYAGNMQGFGYVYGGLTAFKEQPTKTPGRNVLASYMDDNEYSGVTLSLGEGKYIDLSKVRDKGGVYFWAKGKQGGEKVAFGVLDNQGDGIKSQTKTNLQDWVDGQILTKDWKLVKIPLKKFVDAGKAWDANKQAEVTKKMQWNKIQEVRFSVGKAENKRDGRQDDPVTIYVDQ

SEQ ID NO: 100205 - protein, 205 aa, Unknown
  Obtained from environmental sample
  misc_feature (1)..(205): Xaa is any amino acid
MRKKKTLFLCLLLLIINKIHVFSQNEAWDVHVSRNAGENIKHGLIASTETIVSVGLVTVFNFYINKTPWALPTKESIHNNFTQPWWWEDNDDFAVNQIGHPVQGLLSFGAGRANGFDFYQSVFFNSLGGFVWETLGESNFASMNDFITTVTGSPAVGEMFYRLYLEAYTAGLPEPLLFFINPMVSAHRLVTGWKPPDTGRNLNCS

SEQ ID NO: 100206 - protein, 94 aa, Unknown
  Obtained from environmental sample
  DOMAIN (7)...(40): Tetratricopeptide repeat
  misc_feature (1)..(94): Xaa is any amino acid
MIISEDAKNWIDKGKKFYKSRRFEEAIKCYAEAANLESDNADIFYNWGNALAHLAYIKQDKSLFKESFEKYGKTASLNPKHSFVFNKWGMHFTI

SEQ ID NO: 100207 - protein, 94 aa, Unknown
  Obtained from environmental sample
  misc_feature (1)..(94): Xaa is any amino acid
MLVKREPGMRVPMERLLEINRDPATRALYEAREKDRRDSRARERYAMQKGRAEGKAEGRTEGIFEIARKMKNAGRPLSEIEEFTGLPTETIEKM

SEQ ID NO: 100208 - protein, 294 aa, Unknown
  Obtained from environmental sample
  misc_feature (1)..(294): Xaa is any amino acid
LTEVLKTDERFFTTDGTLLRNKVYESAMNMDVRLIGLLLGNVETKKRFFAEVNGTLVFDKVGFGWVVNNRQFLPDSYTRFKNRIGLTDTRGELISTVNDVVLSFPYKDCVLEGGQTKDDEKRDEVFYNVTLAPDEVDRLLYPKVLVGARRYTATGVEEGVSFNDDDNLIIKGNNLLAIASLLKRYENKVKCIYIDPPYYFREKKEVDSFKYNSNFSLSTWLVFMKNRLDIAKRLLVKGGTIWINIGEDGMHYLKVLADGIFGADYFVGTIPRRTRNGKSDVPFHFSQDFDWVLC

SEQ ID NO: 100209 - protein, 264 aa, Unknown
  Obtained from environmental sample
  misc_feature (1)..(264): Xaa is any amino acid
ATSAKYLFADEIFIDGENVKINEVSNFQATNPDAINICFTTTQGLHSDMWFQKENSPSFADFTDTKTVLIADEAHHLNVDTRRGKVNAAEESLRQSWETTVRRIFEANRDNILLEFTATCDLQNPFILNEYENKIIFDYPLHKFREERYSKQVRAIRADIGYVDRMLTALMFNQYRLKVFQDHRLHIKPVILFKAKTIIESKEFEQTFHGMIRTLTGSTLERIVSASPLAEVKRMADYYAAKGIDFEMLAQELRDEFGPGRCIQ

SEQ ID NO: 100210 - protein, 121 aa, Unknown
  Obtained from environmental sample
  misc_feature (1)..(121): Xaa is any amino acid
MKLNNNEKITKKLSMAFGLAVTFGVVMSLIGIVLRIKGDFFSLPFIVILAVMMAAASVYLAVSSLKTLKDAFKPTDDRIFWYESILDALPFPLLITDMDMKLTFVNRPVENFLNTKRSEVI

SEQ ID NO: 100211 - protein, 212 aa, Unknown
  Obtained from environmental sample
  DOMAIN (3)...(211): FAD dependent oxidoreductase
  misc_feature (1)..(212): Xaa is any amino acid
MHDILVIGAGIAGLTVALKAAESGKSVLLLTKGASPDGSTNYAQGGIASVTSQEDSFESHIADTLEAGDGLCKKRQVEILTKNAPKAIEQLLKWGVNFTTSKDDENVFDLHLEGGHSFRRILHTADLTGKEIMRALLAELKRHPQGIDFMEHSTVLELLTQKSRCVGALHCVGAIVASRGRHVGLPLLAKTVVLATERRRGSFGCIQLTHQM

SEQ ID NO: 100212 - protein, 250 aa, Unknown
  Obtained from environmental sample
  DOMAIN (3)...(249): Transketolase, thiamine diphosphate binding domain
  misc_feature (1)..(250): Xaa is any amino acid
MRSRKELANALRILTVDAIEQAKSGHPGAAMGMADMAEALWRGAFKHNPANPKWADRDRFVLSNGHASMLLYSLLHLTGYDLDMDEIRRFRQLGSRTPGHPEYGKTPGVEMTTGPLAQGLASAVGMALAEQVLAAEFNRPDMPIVDHHTYVFVGDGCLMEGVSQEACSLAGTLGLGKLIVLYDSNGISIDGKVSNCFADNTADRFAACGWNVIKNVDGHDGEALDAALTLARAVKTQPSLICCQTVIAYG

SEQ ID NO: 100213 - protein, 249 aa, Unknown
  Obtained from environmental sample
  DOMAIN (27)...(137): Transketolase, C-terminal domain
  misc_feature (1)..(249): Xaa is any amino acid
TSINLNPTELEAITKARFVRYETVKANETRYEDIGCEDADLVLVAYGTSARVCLGARMLAEKEGIKLGIFRPITVWPFPFKALSGLAAKKKTFLTVEMSEGQLVEDVKLAVYEAVTNGLSLTLEEVELLFKTTRERIRQIEAKAQRHLKKDPGRSIDEEVADAFFILSEQEQENLKMRFPEQVEQLFKATRERKRQIEAKAQRRLGHPQRSILGHPRRSIGKVHFLGHSGGIIPTEEEVFAEAKRILGK

SEQ ID NO: 100214 - protein, 123 aa, Unknown
  Obtained from environmental sample
  misc_feature (1)..(123): Xaa is any amino acid
MIRLKTEKQIEGIRKSCKMLSAMYRDLVPLVKPGIETIEIDKWVRNWIKRAGGVPVFLGYSQSKNNVPYPAAICISINDEVIHGIPSKRKIREGDLVGLDCGIGLGGYISDQAISIEAGKVSK

SEQ ID NO: 100215 - protein, 99 aa, Unknown
  Obtained from environmental sample
  misc_feature (1)..(99): Xaa is any amino acid
MSIKGKAAVVTGSATGIGQGVALALAKAGARVAVTFNLNPADETMRLITEAGGEAILVKTDVRSRESIRNLMKETHSAFGRLDILVNNAAVQPKQLLFD

SEQ ID NO: 100216 - protein, 205 aa, Unknown
  Obtained from environmental sample
  DOMAIN (6)...(202): Male sterility protein
  misc_feature (1)..(205): Xaa is any amino acid
MSKILVTGGTGFIGSHTVVELQNNGFDVVIADDLSNSNESVIEQIVKITGKKPRFELVNLAHEEVCKTLFAKYSDIAAVIHFAASKAVGESVEKPLFYYKNNLGSLLNILENMMQYNIKPIVFSSSCTVYGQPKTLPVNEQCPLQPAESPYGNTKQIAEEILSDCTKATPIRVIALRYFNPIGAHESAMIGELPIGVPSNLMPFI

SEQ ID NO: 100217 - protein, 129 aa, Unknown
  Obtained from environmental sample
  misc_feature (1)..(129): Xaa is any amino acid
MNYTQIPSPCYVLDEALLKRNLQLIDSVRKRANVEIILAFKGFAMWSAFPILNACGFRRATASSLAEARLAVEEMGDFAHTYSPVYTDGEIDELAALSSHLTFNSLSQYERFFKRATSANKVISLGLRV

SEQ ID NO: 100218 - protein, 149 aa, Unknown
  Obtained from environmental sample
  misc_feature (1)..(149): Xaa is any amino acid
FIAILIFGGIFVFPALSQEWTKEDLQNAYMEYLRQEGYLPTVDMDGDIQFKVAGDTYFIIVDDKDLQFFQVYTGFKLDTVSQDTVLNAANSSNRSSKVVKIAFSPDRNVISITAELLLNDPKDFIPVFSRAISLIRNAENNFMTQLKNF

SEQ ID NO: 100219 - protein, 276 aa, Unknown
  Obtained from environmental sample
  misc_feature (1)..(276): Xaa is any amino acid
MTSKMENQTLHTLFIIEEDVGIPGRNDYSFNGVFQVVTNSATGISWNEYYYIPVTIGITGKGKLFLTSDGYLLNINGQTLIIDGEVTLEGRKNNNLPLIFVKNEYSVNAVTKLELRNGTLRGNGHGAVEIHSGEFTMSGGAITGNSSLNGGGVCIMGNTDEVRFTMSGGTISGNTAVYNKSAEGKGGYGSDSRTGSGGGIYIQGGRSYFTGGTISGNKAVRGGAVFIYGAGGGGLINKSRGVIYGNDARAPERNTASGGDTWGHAILFEEKSAGFP

SEQ ID NO: 100220 - protein, 253 aa, Unknown
  Obtained from environmental sample
  DOMAIN (71)...(253): Penicillin-binding Protein dimerisation domain
  misc_feature (1)..(253): Xaa is any amino acid
MSLIPERGQVKPKRLLGRPGEREIAAGRLPWIFAIIFFWAALVAVRLVWIQVFQHQAYQEKASRQHTVKVIIEPIRGEIRDRNDEMLATSLPSESLYVTPPAFYPNYSREREDDGKVVEHWGDPDMVFARNYAGRVAKVLERPERYVLDRFLRKKDWFLVERQLSPIKAAAIKELNQEILKEINKDITKNAPADGRRGESRRALRREPALVFIPEYRRYYPRNSLACQVLGFVNDRGEGQLGIEKAYDKMLGG

SEQ ID NO: 100221 - protein, 80 aa, Unknown
  Obtained from environmental sample
  DOMAIN (22)...(79): Mur ligase family, catalytic domain
  misc_feature (1)..(80): Xaa is any amino acid
MKFGELIEGLGLADARGDFGAEVIDVDCDSRFVASGWGFVALKGASSDGHDFAPQVVAKGASCVFSERGLPDINARASAT

SEQ ID NO: 100222 - protein, 286 aa, Unknown
  Obtained from environmental sample
  misc_feature (1)..(286): Xaa is any amino acid
IALKYLRCDYNQLTALDVSNNTALTELYCNNNQLTTLTLDVSNNTALTDLRCYVNKLKALNVSGATALTTLICGFNQLTALNVSKNTALKWLDCTVNQLTELNVSENKALEILKCDETRLTELNVSKNKALKELSCVYNPLKTLDVSNNIVLEELSCGRGCSSCGELTKLNVSGATALKKLDCYGNQLTTLDVSSNTALEELQCSYGQLTELNVSNNPKLEMLSCVGNQLTALNVTKNTVLKGLYCANNQLTELNVSNNPELTILYVNSNYFPNESAITGLNKSNL

SEQ ID NO: 100223 - protein, 274 aa, Unknown
  Obtained from environmental sample
  misc_feature (1)..(274): Xaa is any amino acid
FSEIDFDRDVLAKSKYGEGGGITERHLIKAVADKVILKFGKGPELVEELKLKMGVTIPPRQIALFTDVNNPHYIYDLLGILKTEFLPGIFIQPDEQECIPAERVTAFAQSIAAIPAYAYLGDVGESPTGDKKAEKFEDDYIEELFAEISRLGYRAVTYMPPRNTQEQLRNLRRLSAEWGFMEISGVDINSSRQSFNCPEVLKSEFRHLLDTTWALIAHERLASLDERYGLFSAANPVSSMSLAERLSLYAGLGKKLDLHRPDESAATLVKEIHN

SEQ ID NO: 100224 - protein, 33 aa, Unknown
  Obtained from environmental sample
  misc_feature (1)..(33): Xaa is any amino acid
TYGSYYVYFDDLRAVTDLFAENNRDPDDMNDGW

SEQ ID NO: 100225 - protein, 157 aa, Unknown
  Obtained from environmental sample
  misc_feature (1)..(157): Xaa is any amino acid
MTENLNCKVAGSECYDENENNCNTYGRLYTWEAAKKACSGGWRLPSYDEWEALVAAAGGSSTAGKHLKAKEGWNNCGPSGSGEDYLCEDTYGFSALPGGIGYSDGDFDDVGYNGDWWSSTEGNSYYAYFRYMGYDSEHVLMNYYDKNGLFSVRCLQD

SEQ ID NO: 100226 - protein, 281 aa, Unknown
  Obtained from environmental sample
  misc_feature (1)..(281): Xaa is any amino acid
MVLFFQSSDSVLAVGIEQPLEENDIQKLEWLFSGARYVDAPALNAKQAYVGPRREMVTPWSTNAVEITQNMGLKGVVRIEEFFPAASRSSKFDPMLQAMYQGLAQDVFTVKHAPEPIFYVDDVSAYNKKEGLALNDDEVKYLQDLSKKLGRKLTDSEIFGFSQVNSEHCRHKIFNGTFVVDGREMPSTLFALIKKTTQQNPNRVVSAYKDNCAFIQGPVVEQFAPTSEDKPDFFATSEMETVLSLQAETHNFPTTVEPFNGAATGTGGEIRDRIARGKGSL

SEQ ID NO: 100227 - protein, 304 aa, Unknown
  Obtained from environmental sample
  misc_feature (1)..(304): Xaa is any amino acid
MGLVLHEEDLPLLRRIAERERAPMYVIGRTTGDMKFTFENFVTHEKPIDLLLDDMFGNPPKTVMKDTTITEKQPTAIDVDNDWEELLQEVLKLEAVACKDWLTNKVDRSVTGKVAMQQCAGEIQFPLNNVAVVALDYHGKRGVATSIGHAPGAALINAAAGSRLAIAEALTNLIWSPVEGGLKGVSLSANWMWPCKNEGEDARLYAAVKAASDFAQALGVNIPTGKDSLSMTQKYPDGKKVYAPGTVIISTVGEVTDIRKCISPVLKPNPDSTLLYINMSKTALTLGGSSVAQVLGEQGGASPR

SEQ ID NO: 100228 - protein, 287 aa, Unknown
  Obtained from environmental sample
  DOMAIN (119)...(286): Competence protein
  misc_feature (1)..(287): Xaa is any amino acid
GQGIVEEVLNRPNGHAIILKTDFGKTRLSYIGENVPLPGDSIFWQAKWFPITPPTVPGSFNAPEWMRSQGYRASGSLEKVEILGSKFTFQRFSFSVKQKLEKYFSNYYAKPESALLMGLLAGDRSGISETLQSDFRKTGLVHVLSISGFHVVMLAGMLTLFLRALRLPRKVSQILSIALLCLYAPITGGSSAVWRAVLMFCVMESGNIFQKSANSINALGVALVFILIFSPEQAFSAGFQLSAAATFGILLGQGIKLPNFRGKIGKVFSSFIFNPSFITLCATLSTL

SEQ ID NO: 100229 - protein, 157 aa, Unknown
  Obtained from environmental sample
  DOMAIN (1)...(125): Type I restriction modification DNA specificity domain
  misc_feature (1)..(157): Xaa is any amino acid
MQWLLMANTPFFTCAKEVYQIDTYAFDCEALLLAGNNAAGIYDVKHYVGKFNAYQRTYIITLKNSDYSYIPFKVMLEQKLEQMRELSKGTNTKYLTMTILESFDFIVPPLDLQNRFATLVSTADKSKFVALNALKFANYCANNIFLNGMKGGLPHVQ

SEQ ID NO: 100230 - protein, 116 aa, Unknown
  Obtained from environmental sample
  misc_feature (1)..(116): Xaa is any amino acid
MYNEPDLEKLVVETIAANGWEYIEASNLPRRHSDVLVEPFVRDALIRLNPEIAEDPSRADDVICKLRTLILSVRPHDLVSQNEQFKKLVFEENSFPFGKDGRSVPIRFFGMGTKEN

SEQ ID NO: 100231 - protein, 288 aa, Unknown
  Obtained from environmental sample
  DOMAIN (2)...(57): Glycosyltransferase 36 associated family
  misc_feature (1)..(288): Xaa is any amino acid
FGQYRTETNPEAVERGSCSGSFELGGNHCGALRRVIELEPDAEIRLVFLLGEGNRDTGKKMRSKYCAAGFSQVDEAFKNLGNFWKEKLEKLQINTPHDGMNVMLNTWTLYQAEINVIFSRFASFIEVGGRTGLGYRDTSQDAMMVPHSNPEKSRSRLVELLKGLTTDGYGLHLFSPEWFEKQTKAAFKSPTVVPLPPMSQRVHGISDACADDALWLIPSIVEYIRETGDFDFAEEKFTYADTYNPETNEGMSETVFDHMKRILDFSAREIGPHGICKGLRADWNDCLN

SEQ ID NO: 100232 - protein, 244 aa, Unknown
  Obtained from environmental sample
  misc_feature (1)..(244): Xaa is any amino acid
LKINGPEGAAELYRYGVEAVPGSAGPEVTAEAWEGCRFTGWSDGALGTVRVDTVRGDAQFTAKFDRSGGPALRKYRYVAWAGGSLTASGVSGYVSIIDTSVAGIGAFVVAAAPERGYRFAGWSDGIEGVVRADAVLPNAAPAARFAEAGAGGEAVEVSRYADLFLIGKYVTHPLDGIYELTCDIAIPATGRFEPIGSESAPFTGVFRGNGYKISGIDMGRGGNVGDFTGLFGYAEGADIRDLFV

SEQ ID NO: 100233 - protein, 263 aa, Unknown
  Obtained from environmental sample
  misc_feature (1)..(263): Xaa is any amino acid
MEGPLLRAVWSQWTTDEEYRKQLTAAAGKGKAGKLARILNQEWDFINNDDKKRLHGLLPKADFVRELALEQVIKDIKEDAQLDITEALDEKGILTGFVLGEDLERRVKEGIGEELYRRIQHKPLAEWTLAEAEELTAAVDRLTSEGRRELRAKNEARRRIDELYRNKVLEAVNSIPKYADKEGDTPEERERKERKRQEILGKFAGENRKRNRFWNNFFDADLRRFCTELDGGRKGVFNNLLYWGENDAYNWRETRIAARRLAV

SEQ ID NO: 100234 - protein, 266 aa, Unknown
  Obtained from environmental sample
  DOMAIN (106)...(263): DEAD/DEAH box helicase
  misc_feature (1)..(266): Xaa is any amino acid
MARLEELTVGVSVAGLAGSASVSIVATKWHGSAVLEATFRDAKGQLGSQLLYREDEARLSVADGSLPWSFDADADQLRLASEAYRIHLAHLFDPYLAVHTSVVDPYPHQISAVYQEMLSRLPLRYVLADDPGAGKTVMTGLFIKELIVRGDLKRCLIVSPGNLAEQWQDELFSKFNLKFEILTNDRIESAVTGNVFAEAGLCIARLDKLSRNEAIQEKLKVTQCDLIVCDEAHKMSATVFGGEIKYTKRFQLGQLLSNIARHFLLL

SEQ ID NO: 100235 - protein, 263 aa, Unknown
  Obtained from environmental sample
  DOMAIN (31)...(107): Helicase conserved C-terminal domain
  misc_feature (1)..(263): Xaa is any amino acid
MFGEDGLREKLIIFTEHRDTLNYLTKKIRSLLGSEQAVVNIHGGMLRDDRHKIEELFKQDKEVRVLVATDAAGEGINLQRAHLMVNYDLPWNPNRIEQRFGRIHRIGQTEVCHLWNLVSKETREGMVFQRLFDKLEQEREALHGKVFDVLGKVTFDNMSLKGLILEAVRYGNDPEVKARLHQIVDNSLNHDALRLLMEEHALTEDTMDVHKVMAIREDMERMEAHRLQPHFIESFFAEAFASLGGKMRPRENGRFEITSGAIC

SEQ ID NO: 100236 - protein, 275 aa, Unknown
  Obtained from environmental sample
  DOMAIN (56)...(107): Regulator of chromosome condensation (RCC1)
  misc_feature (1)..(275): Xaa is any amino acid
MAIKTDGSLWAWGNNGCGQLGLGDTTDRNAPVRVGTDSNWVAVSAGDYHTLAIKTDGSLWAWGDNYYGQLGDASATGNGAYKSTPGRVDTANDWATVSAGGYHTLAIKTDGSLWTWGDNYYGQLGQGNATNRNSPVQVGTMKDWATVSAGHEHSVALKSDGSLWTWGYNNNGRLGLGDTTNRNAPVQVGTMEDWAVVSAATNHTVAIKSDGSLWAWGYNEYNQLGLGDRTSRNVPTLVGPVVMAPAPITLFPKTATLLVGTKQIFRATGQALPTK

SEQ ID NO: 100237 - protein, 270 aa, Unknown
  Obtained from environmental sample
  DOMAIN (115)...(151): Sel1 repeat
  misc_feature (1)..(270): Xaa is any amino acid
MPVFPFVSSLCYEKLGNKDEAAKTALNALHEIFEKWDYDSSFLSVCDRDYLYNDCPFDIDCAEIAPLVFNRAEEGNKDFFKYAGDFYRNGEGAGKKPDYVNAKKWYDKAVENKDINAFYIVGLCLKNGICGYNKDKSLAVKYLKKAASSGHFLAEEELKRNGFVSFLFGLVGSVGILFTAILITEKIDFSSMISDFQLVLLPKIFIYIAAPITGFILTYKAWRNRKNILLIIMLALCAPGCIQLFNLIQADQATAVKNIELLSSITYMEN

SEQ ID NO: 100238 - protein, 69 aa, Unknown
  Obtained from environmental sample
  DOMAIN (1)...(68): Domain of unknown function DUF37
  misc_feature (1)..(69): Xaa is any amino acid
MKQAALLMISFYQKAVSPWLPPACRYYPTCSAYAIEAIEKHGLVRGGLLALKRILRCHPFHAGGYDPVP

SEQ ID NO: 100239 - protein, 102 aa, Unknown
  Obtained from environmental sample
  misc_feature (1)..(102): Xaa is any amino acid
MIYEFEGRTEKEAIDRAAEELGLEKDDFDVEILETQRQGLFKKGHVRISVHTDGPVSPAYKGPAAQDVDGNENRQAPSRQKVFGDPAAQNEFERKMTAFVEG

SEQ ID NO: 100240 - protein, 118 aa, Unknown
  Obtained from environmental sample
  DOMAIN (21)...(118): Phosphorylase family 2
  misc_feature (1)..(118): Xaa is any amino acid
MNTIEKIKETAEFIKSKIPQVPDVAIVLGSGLGNLAEHIQHPIVLPYSTVPNFMQSTAVGHKGNLIYGELGGKAVLAMQGRFHYYEGYSMEQVTLPMRVMNRRGYFDPYLFPMLQAAS

SEQ ID NO: 100241 - protein, 279 aa, Unknown
  Obtained from environmental sample
  misc_feature (1)..(279): Xaa is any amino acid
MKDILPQLPQLVAMAKSSKPADAAAPPTQAPAASTAQGAPVAYYGGGAASYPAAPAPPAPPPPPPEPKKIILTPVDWTVTDAQTWIDMVNGVRTGGDKKAHNVTIDTDRDIVVPVEDGYTFGSVVHIAVVLNGRGVITTSNGGSLITVGANQKIGLMGSVVLKGRENNSGSVVVVDSGGTFRMEGHSSIIGNSVSGDGGGVFIGNGGVCLLAGNAAVAGNSAKGSGGGIYVSRGKLGVQDSARVYGNVAGNGGGGIYIEHGRCVIVGNATVSGNTVWFG

SEQ ID NO: 100242 - protein, 231 aa, Unknown
  Obtained from environmental sample
  DOMAIN (43)...(231): Baseplate J-like protein
  misc_feature (1)..(231): Xaa is any amino acid
MSASFLPELPDYRFVDDDPAAVEKGVFDAYERMCGQKLYPGRPERMFCEFMVYLLAHERFNLNKTARSQLLAYASGALLDHLGARALCERLPASPARAEMEISARDPAERPRLVPAGTRMTGDSRVFFALAENLILPAGERSARAFAVCLTPGEAGNGYKPGQMNVLADPPPFAASVANVSESAGGADREDDEHFRERIHLAPARMSAAGPADAYRYFALSVHADIMDVAV

SEQ ID NO: 100243 - protein, 113 aa, Unknown
  Obtained from environmental sample
  DOMAIN (1)...(105): Mannitol dehydrogenase Rossmann domain
  misc_feature (1)..(113): Xaa is any amino acid
MRAVMYGAGNIGRGFIAQLFAESGYEVSFIDVAKPVIEALNREGRYPIRFVSSEGSREVWVEGVRAINGIDREEAAEAIAGADIMATAVGVRILPEIAPIIAAGIKSVFALQR

SEQ ID NO: 100244 - protein, 117 aa, Unknown
  Obtained from environmental sample
  misc_feature (1)..(117): Xaa is any amino acid
NNLPKALEAIRGFGVTEWAVIHSPEGGYGIDQKGAYVESEAIDLPPAAIKGKVGAGDAFCAGILYSALHNGDLKDALELANAAAAASLMQSGAVEGMMKAEDLRKLRTSFLQSTTPP

SEQ ID NO: 100245 - protein, 274 aa, Unknown
  Obtained from environmental sample
  misc_feature (1)..(274): Xaa is any amino acid
FATNIPIAVAKLTTREKVIYGVGAFGYGAVNQTFGNFLMFFGTVYLGLSGTLMGLAISVSTVWDAVTDPIVGAMSDRHRSGKLGRRQVFMLVGAIGIAVINIGIWSVPTGWSTSMKFFAILAALLAVETFNTVYSTPYGALGLDMAANYDDRTDIQSYKTAFSFISLLVPSALMFLGYIWISVVTGTLCVATGLITIYGTKKYRSFAPATGPAGPRDNFVTRFLAVAKIKNVGVLMLGYTVSLLCTAVITALGMHVFTYSFGFNALEVPFILLC

SEQ ID NO: 100246 - protein, 278 aa, Unknown
  Obtained from environmental sample
  misc_feature (1)..(278): Xaa is any amino acid
LSFQAKYNILCQTKTVTEVLETFLADDDFHVIDKLLLTHNGSARVKNIYAFLNKLRGASYADTVAQYVYMYKEGLLDIQIDTSAGGDSVKIMTIHGAKGLEWPVVFLYNAGRKFSVQDSRKKILEHKVYGLCVYCNSPEENTKRVSIARLGSALAAKYLQIGEEMRLLYVALTRARQRLFIVGSGKSYDDTTPLDDFEILEAKNYFDFIRPRDTIPPAAVPPIMPKVETFVPPTNADPAQAAGFADTFAKAESYPHKTDGNIKASVTSLTNLNSKRWT

SEQ ID NO: 100247 - protein, 274 aa, Unknown
  Obtained from environmental sample
  DOMAIN (1)...(272): C4-dicarboxylate anaerobic carrier
  misc_feature (1)..(274): Xaa is any amino acid
IILTFMILSGVLTKVLPSGTFERIVSEGRVLVVNGSYHEISRPDYPFWRWFTAPLEVLFGPDNLTPVILIIFIVCVGGSISILDNAGVMKTLINFLVFRFARKKYFLIAVMIFFFMAVSSLVGMFEELVPLIIFIIPVAISLGWDSLTGLGMSLLPVAFGFASAITNPFTIAVAQKIAGLPLFSGALLRLVFFLIILFLVCFFVMRYAKKIEKNPQSSICYKEDEALRQKLAISSNEQDNSIKNIGKGQWKALIWFGSCIVLSLILVLSLTRLP

SEQ ID NO: 100248 - protein, 64 aa, Unknown
  Obtained from environmental sample
  misc_feature (1)..(64): Xaa is any amino acid
MRTNIELDDVLVKKAMKITRISTKKALINKALEELIKSNNRKEMLKYINSNVWEGNLKEMRSMR

SEQ ID NO: 100249 - protein, 271 aa, Unknown
  Obtained from environmental sample
  DOMAIN (1)...(241): Alpha amylase, catalytic domain
  misc_feature (1)..(271): Xaa is any amino acid
NEIHRRGMKCIIDVVYNHTSPDSWLAENHPEWFFRKADGSFGNKAGAWLDVIDLDYNQAALWDYQIETLKSWAKIVDGFRCDVAPLIPLDFWLRARNEVAQVNPNCFWLSESIEPSFISYLRSLGFIALSDSEIFQAFDAAYDYDIFPCYTGYLEGKYTLTEYSDKINNQETIYPANYVKLRCLENHDRSRAKFLVPDERALLNWTAFLYFQKGITMIYAGQETGNEHRPSLFEKDTVNWHTGCDLSKFMAAMYKIKKDTLFANSQFFTHA

SEQ ID NO: 100250 - protein, 273 aa, Unknown
  Obtained from environmental sample
  misc_feature (1)..(273): Xaa is any amino acid
LKAAIGLSAGTLTIVSTPTAADFFIGYLSQVYVSVTSVTIAPKQGKSTGTITIYYEGINGTTYTKKTMLPASVGTYAVTFDVAAANEWKAAIGLSAGTLTIRPLNVDELSEFLDRKPTNNKNNPYIIEINVGNDDFSSLARTLYLAKNKYVYLNLSVITTSIPNEAFYSFKYESLAYHSVGATLTGITIPKSVISIGDDAFCACTSLTNIIIPNSVKTIGAYAFSSSGLTSVTIPDSVTSIGNNAFLTKDLAVINVDTGNLNYSSDQGVCITK

SEQ ID NO: 100251 - protein, 291 aa, Unknown
  Obtained from environmental sample
  misc_feature (1)..(291): Xaa is any amino acid
GRPETTIHLKNLKGDYRDDSKKDIEYLTDQILHHFYTHLYYLLGKKKKFEIKIIDDSGKIKESVINDAKLKNDKIRKDSFKITDPASLDGLGTEAFEILHIKTLNIKGNKAFYVVDERSAGEIPKLNLPPCVLKDENENTFNYFVYLKSDFFNSYLNDSRTKLSLPTDNRNPQKRFFTEEKIIEHLQKKIDSFLEYELGILEKETEKKISEALSEGKNNLIANNKSYLYILADDDTKKELLKKIKFGDSEREIIKKIKNFHEDLQGKTVEQINVLVEKLKMIKKLKMLILT

SEQ ID NO: 100252 - protein, 76 aa, Unknown
  Obtained from environmental sample
  misc_feature (1)..(76): Xaa is any amino acid
MSNKSLIIKNKIYEVRRQKVMLDRDLAELYGVELKRLNEAAKRNIGRFPADFMFQLTQKEWDKFAVANCDRKKGRI

SEQ ID NO: 100253 - protein, 248 aa, Unknown
  Obtained from environmental sample
  misc_feature (1)..(248): Xaa is any amino acid
YYLPVTGALENYQAGLRYTTTIGPADIGGQYFYGHLFTPSFTVAGVDAFLDDLANGILGASPPLTTNPLYQGNPDLISPKIKYNRYHQIGIDYAQVLFGFNVRAEFAIHLTEDLSGDDGSVQNPFIGWSAGFDRDLIWGVNLNIQCNETVRLFNDKIGDNPILDAEAGTNAISTRLTIRLSKNFFRDNLESSATVIWDVENSDYYIIPALVWTEGSMSWKLSGGIFAGKETGDLGQYWRNNYVKFGVT

SEQ ID NO: 100254 - protein, 269 aa, Unknown
  Obtained from environmental sample
  misc_feature (1)..(269): Xaa is any amino acid
VYNWAAALMACPNGWHLSNNEDWDALIDTAGGNEIAGIKLKSETGWPSGANGTDEYGFTALPGGFMTSTSIGLVGFWWSANESPNQGNYAFGYRMTGNINNYSKVEKIPQQSKADNGSVRCVANTIVPKPTPTQTKFTYDGGSKSIVIEKSPYYTVTGGVETNARTYTAEVVLNDTLAYEWDDGSNTNLSFEWTIAKAPVLSPLPFTQTEVITYDNSPKTLELPDGALYHVTYGEDQINAGTYNAQFTLNDKNNYMWASGDTNSVPFTW

SEQ ID NO: 100255 - protein, 262 aa, Unknown
  Obtained from environmental sample
  misc_feature (1)..(262): Xaa is any amino acid
DETPYKVTLINGAVPEIGALSTQLVTITAKTAGSGEEFFKWTADRVDVIFDDSTDNMTTFTMPARDVVVTAVFVDVEHKISFFLNYGTSTTPYDSTKTWGNVTKPEGVVTGTLKSFPTPPERTGWTFAGWYSAAVDGNAVTATTTFSEPTALFAHWNEDEYTITWDTDGGTPAPTQTTVTYADTIAAPEVTKTGHTLKGWYTNLDDSTTKQSFPISGVIGDIELYAKWERDRYTVIWHFNDGRLPIDGDVVEYEGNIYKKIG

SEQ ID NO: 100256 - protein, 105 aa, Unknown
  Obtained from environmental sample
  misc_feature (1)..(105): Xaa is any amino acid
MNDFADLGVLPELIDRLAKKSVIQPTAVQRLVIPKLLENKSVVFRSATGTGKTLAYLLPGLQLLLGDTETPYESPRLLVCAPTLELCSQIKDEIDFLLEGKSGLN

SEQ ID NO: 100257 - protein, 88 aa, Unknown
  Obtained from environmental sample
  DOMAIN (8)...(87): GTPase of unknown function
  misc_feature (1)..(88): Xaa is any amino acid
MLQFRMALNCGIVGLPNVGKSTIFSALSSAPAEAANYPFCTINPNVGIASVPDSRLDKLSALFKPKKTIPATVEFVDIAGLVKGASKG

SEQ ID NO: 100258 - protein, 291 aa, Unknown
  Obtained from environmental sample
  DOMAIN (53)...(290): Competence protein
  misc_feature (1)..(291): Xaa is any amino acid
FNAVSVHIVKPASAVEILRTRLRAALLGRFQNSRNRKGLAAKPPVWGGLASALLLGMRDDLDSELSDGFRNSGCTHILALSGMHLAILSGILAFLIRKPLGIRWASLVGAVFVLLYVFVAGSQPSLVRAAIMYLIGTFAIWGLLKPRPLSLLCMAFIIQLLFQSETGVSLSFILSYLALLGILSLGEIVRDLFRGRLPELIGAGLSASIGAFIFTAPVVALYFASVRPIGILAGLVAAPLASVFMVLSLASLAASFLPFPIWNIFDFILERIYRLLELFVSLAGRVPGFSV

SEQ ID NO: 100259 - protein, 157 aa, Unknown
  Obtained from environmental sample
  misc_feature (1)..(157): Xaa is any amino acid
VFENLLGQSAASQLIADIGCASLAPAMLFSGPPASGKGTAALELARVISCEASANAAGEPSRASWNCPCPSCNRHRLLVHPDLLCLGNKPFSAEIAASASSFLKEAGSPSSRILFIRSVRKLLARFNPVLWEDEPKAGKISPIVNSLEEDLDDLAFL

SEQ ID NO: 100260 - protein, 162 aa, Unknown
  Obtained from environmental sample
  DOMAIN (3)...(122): Rnf-Nqr subunit, membrane protein
  misc_feature (1)..(162): Xaa is any amino acid
YTHSHFHYCYRRVSTVIDYVLKAWFPGLSKAMGVFIPLIVVNCIIMGRVEGFASKRPLRDCLADSLGMGLGYTWVLAGIALVRELLGNGTILNYQVMPLNYKPVLFFILPPGGFFVFALFIALNIYIKSRLKDPSKADEDGGFGCCKPNDCAGCGADAGGKK

SEQ ID NO: 100261 - protein, 92 aa, Unknown
  Obtained from environmental sample
  misc_feature (1)..(92): Xaa is any amino acid
METLLTSFVSLFNSWSTLGVMVFFLVACFLLGMPIFSALAVSTALGLLHGGSLPLSVIHNSLFEGLNIFPLLAIPCFVIAGSLMEHGNITQQ

SEQ ID NO: 100262 - protein, 231 aa, Unknown
  Obtained from environmental sample
  DOMAIN (26)...(186): MatE
  misc_feature (1)..(231): Xaa is any amino acid
VELIILKTSLIGNRLFYRNILTIGLPIALQNLLTSTASMVDTVMIGTEGELAVAAVGVCALFSMLLFSAYFGFCNGGMIFFAQYWGAKDENGICRAYGLTLICMMAAGFIFGSLAILAPEFIIGIYTDKENIRQVGVPYLRIVGWCYPLQTLAMAMGCLLRSVEKVKIPLFASIASLATNTFLNWVLIFGKFGFPHLGVRGAAIATVIAQVVHIFVLYIYCFADKHSFITR

SEQ ID NO: 100263 - protein, 226 aa, Unknown
  Obtained from environmental sample
  DOMAIN (3)...(137): KilA-N domain
  misc_feature (1)..(226): Xaa is any amino acid
MAKKDTINVQGTEIILLSHQKEDYISLTDMAKYKNAEATGLVIAHWLSTRYTVDFLGIWERVNNPNFNVTEFGNIRNETGTNGFILSSKQWIEKTGAIGIIAKPGRYGGGTFAHKDIAFEFASWLSPEFKYLLIIEFQRLKEDENHRLSLEWNLQRTLSKINYRIHTDAIKEHIIPKIVTKEQISNTYAEEADLLNVALFGKTRKRNGGKKIPPTKATSETMPHRT

SEQ ID NO: 100264 - protein, 309 aa, Unknown
  Obtained from environmental sample
  misc_feature (1)..(309): Xaa is any amino acid
TRRRPRPRFLDRTYRPDARVGRFLSVLVLAGVSYGLYRGIQDNYLAEIMRVTPFERGIVEFFREIPGLLLILVLALMYKFADSRIFKIGVALMAGGVAGLLLTSGNAFFMTKVFVVIFMVFYSIGEHVIMPVRATIAMDLAKPEKSGASLGITGSISQLGNIAGFILVAVIFSLLGKRGFDRTDIMGYRIVFGAATALMVTAALVAVALRETTLKSQRRRFYFAKKFKKFYMLEVFYGARKQIFLTFAPYVLIVQYGADASIISQLYAICAVFGMLLSPLIGRIIDQVGYKAVMVADTLILIVVCLFYG

SEQ ID NO: 100265 - protein, 260 aa, Unknown
  Obtained from environmental sample
  misc_feature (1)..(260): Xaa is any amino acid
MGYAAVALLTAYDVWPKAFEDDHSPTYGPPNGIADVLDEVKIATDFFMKSFPDTNTFVYYVGDGGYDHTEWVTSAFQSTRPVEKGGDPRPSFAATDKGGAQAANYASALALMAMHYPDKKYAAKCSTAAVSIHKFARKNPDNINIPGFYDPTSEVSDEHGLMCILLYKLTGIEAYKNEAIDIVQNKWESNYPLAFDTVADIFYYYLIKAVPNATNDKNNQYSVPVHDFLRKNVQSGISGVTNYGIPWKWFRSTWGTNKLA

SEQ ID NO: 100266 - protein, 235 aa, Unknown
  Obtained from environmental sample
  misc_feature (1)..(235): Xaa is any amino acid
SKDKPCEKEKFETKYRAFAGCFTFKHDNLNLFRLYGKDNDKEGTGLSLIFHEDFFCRGLKMPTEKDGKKRQPNNILFDIKDEKYTLFRCIYIDQKERQVKTVGQRETTDENYKEYINDVFDIVNEKMKELRSLVNGLDENVIGQLLINLRYLTKHTAFKEEQECRIVRICSINEEGKIHFNEEKMYIEYESDVIPRIKEVYFGPKATNIKSFQDRLKINKLYDKIKCKESENPLA

SEQ ID NO: 100267 - protein, 203 aa, Unknown
  Obtained from environmental sample
  DOMAIN (139)...(172): Tetratricopeptide repeat
  misc_feature (1)..(203): Xaa is any amino acid
GAPLELEDHALRACTAGIMMKRIENDVNRYVLERGISPSPLLTRIGINTGEMVVGNMGTQKKMNYTIISNAVNMASRLEGVNKAYGTWILATDTTIQETRGKLLTRRLDRVRVVGINEVVRIHEILELKSESSDALFEQVYLFHKAMDLYEARNWKDAQDAFNQVIKLFPNDGPSPVFLERCRQYLEHPPRDDWDGIVNLTEK

SEQ ID NO: 100268 - protein, 58 aa, Unknown
  Obtained from environmental sample
  misc_feature (1)..(58): Xaa is any amino acid
MFVGRKYELAEMEKYYKEGMFQFAVFYGRRRVRKTTLINKFRGKRKSILNDTFYSFVT

SEQ ID NO: 100269 - protein, 80 aa, Unknown
  Obtained from environmental sample
  misc_feature (1)..(80): Xaa is any amino acid
MNFELLSENVKKERPVSIVVIGTGGGGSNAVDGMIDSGIKGVKFVAVNTDIQSLRNSKAETKIQIGSELTEGMGAGGIPE

SEQ ID NO: 100270 - protein, 297 aa, Unknown
  Obtained from environmental sample
  misc_feature (1)..(297): Xaa is any amino acid
FDRSFGKPNFGGWSTTKNGTAISGTTYKVTKNTTLWAVWTAAAATPAVVKFNANGGTGTAPPNMTSTVGGSIVLPAKGDLAKAGNVFGGWSTAATGTDLKAAGSSFSVTAADVTLYAVWDAVWTVTFKPGTGATGTPEPAGPLTQTAKGAGITLPAKGNMAGPTTPTAKPNFAGWATADNAEVNATTRVTSPYTPTANIDLYAVWSATEVKFKVSFDANGGTGNIAEIEQSAAEAVITLPTTGVTRVNYTLDGWSETATGAKIAGTTYKPTQDTKLYAVWVGVAATVTFDGNGSTGG

SEQ ID NO: 100271 - protein, 197 aa, Unknown
  Obtained from environmental sample
  misc_feature (1)..(197): Xaa is any amino acid
MESKKNDFLEGFFSHPYIIVFVIAVITVFFAFQLPKAELDNNNIRFVPEKDEAREVVRYIDDTFGSSFFILVALERKYGDVFDAVFINRIREFNKRMEDIEIAGNISSLVSSDYIYSEGDSIIVQKISGDNFTGTKAEIAALKKKLLSWDIYRRALVSDDFRATQILIPLDISVEMASRPEIIEGFIEIRDIAKEMF

SEQ ID NO: 100272 - protein, 95 aa, Unknown
  Obtained from environmental sample
  DOMAIN (8)...(94): Nucleotidyltransferase domain
  misc_feature (1)..(95): Xaa is any amino acid
MRISEREKQVLVKSVQKIDRSASIWLFGSRTDNSKRGGDIDIAVLSDKIHIKEKMQLKRAIYNELGEQKIDLVISVDGKEPFFKLATENGIRIDG

SEQ ID NO: 100273 - protein, 92 aa, Unknown
  Obtained from environmental sample
  misc_feature (1)..(92): Xaa is any amino acid
MDSTVVSSLKNSLDDFKSALEWLNHSYELCKKTGIKDNYSIEELDAFENLTSRYARTTDFLIHKLFRSIDAVEFLEIGTIIDSANRAVKRGF

SEQ ID NO: 100274 - protein, 272 aa, Unknown
  Obtained from environmental sample
  DOMAIN (86)...(204): Response regulator receiver domain
  misc_feature (1)..(272): Xaa is any amino acid
DKANRHIEGTGLGLAITRRLVEMMEGTINVESEHGKGSTFSFRIKQGFVDDSVLGADVSDKLRKFKYTDDRRVISKKMKRVNLSYARVLVVDDMQTNLDVASGILRKYKMQVDVLTSGQEAVDRIQGELPIYNLIFMDHMMPGMDGIETVDRIRALGTEYAKKIPIIALTANAIQGTEKLFFEHDFQAFVTKPIDIIEMDAVVRKWLYEKKRGSVNVSGVPDSDFIEDDGNEMDIYIPGVDTKKGLSLYGRDADIYVPLLRSYVANTPATWK

SEQ ID NO: 100275 - protein, 131 aa, Unknown
  Obtained from environmental sample
  DOMAIN (10)...(122): MutS domain I
  misc_feature (1)..(131): Xaa is any amino acid
MSEGKKYVETPMMKQYYAFKAKYPDALLLFRIGDFYETFGEDAIKTAEILGITLTRRANGAASMVELAGFPHHAIDTYLPKLVRAGQRVAICDQLEDPKLAKGIVKRGVTELITPGVTTNDNVLEHKENNF

SEQ ID NO: 100276 - protein, 259 aa, Unknown
  Obtained from environmental sample
  misc_feature (1)..(259): Xaa is any amino acid
DRHTVLTTYQKVPSSIDTNAWVYYIWSPDAVRPSTGAPPVPVPNGPPEADKVFGTPAPVNGQDYWALGQGLIYFGTDGTMRGMVDTGPTQADLIAMFPINNEYGTATSGAIANNTDYEKYDKARNNLGSLAPGLPGTPNPDGDSNPYFAVAWSNGAASQAIKWTVNTGGLTGAGGTPKFLVTQTASASGTTNSQQNGYGAGTIKGLTVDQNGFILGTFTNGQTYPLARVALSIFTNNNGLEKVGENVWKETIASGPANI

SEQ ID NO: 100277 - protein, 235 aa, Unknown
  Obtained from environmental sample
  misc_feature (1)..(235): Xaa is any amino acid
VVIPHNGSLADLRHVLHHEFVHAFVFGIVYGGGIFRAAGAQVPLWFNEGLAELLSSGWERQADMFMLDRMLNSTVPPPSSALDGYLAYKGGQSFLYYLHSTGGDSLFNIMLIEFKLTRSAEAAIERVYAKKMEDLGKDWLKELRRVYWPEAGRRVNPEAQGAPVTKNPRSRANVYPRASPDGKRVAFFSDRHDYTRIIITDTAGKELNRIGGEHSLGSSFESFRPMSGAIAWSPD

SEQ ID NO: 100278 - protein, 159 aa, Unknown
  Obtained from environmental sample
  misc_feature (1)..(159): Xaa is any amino acid
ALEWILGRARFIERREKIPIGSMAVLFRINDTLNSVAGHYKSIGLTDDEIPQLLTVHASKGLEYPAVFLCDLEEGVFPHYRLPKEKRIRTWLELLKAIVKPDPKQDIDVSRDCDIEEELRLFYVGVTRAQRYLFFVTMSSKPFYGRAMRFRPSRFLRLT

SEQ ID NO: 100279 - protein, 146 aa, Unknown
  Obtained from environmental sample
  DOMAIN (47)...(97): Protein of unknown function (DUF1568)
  misc_feature (1)..(146): Xaa is any amino acid
LLEQNAVYHVTARINRGEMVFNDIAMRSLFLTFVTMTKKKYSLAIYHFCVMGNHVHFAIRPDKGNSLSKIMQWLLGNYAKAWNKAHGVKGHLWGDRFFSKIIRGREAFNGVFKYISENPVKAGLVGGAEEWEYGGVCHFIKGETSI

SEQ ID NO: 100280 - protein, 288 aa, Unknown
  Obtained from environmental sample
  DOMAIN (70)...(135): His Kinase A (phosphoacceptor) domain
  misc_feature (1)..(288): Xaa is any amino acid
TQKQMFLGDGPHEWISEMDGDTYLTNTVPIYDADGNVVGITGTTDNITEIVRLNKELETALEAAEAANRGKSAFLANMSHEIRTPMNSIIGFSELALDCEIPEEPKSYLRLIIENSKGLLQIINDILDVSKIEAGKMTIENVTFDIHDVFEMCRTATIPKAMEKGLLLHFYAEPVINKRLVGDPTRLRQIFINLISNAVKFTNTGIVKVLATIVSTDDDTIVIHFEVKDSGIGMTAEEIKRVMEPFTQADHSTTRKYGGTGLGLSIVKSLVELMGGELLVESTPGIGS

SEQ ID NO: 100281 - protein, 248 aa, Unknown
  Obtained from environmental sample
  misc_feature (1)..(248): Xaa is any amino acid
MNNIKIGVKLIFSFLLVSVLATIMGIYMSGQLTELNGQSDFIYRKGAVPLGNLVETLKQTQEMRVQMRDWLSSGTKAKREAVLAKIDAARDIALENIQEQINTSIKEETRVLLRQLSDACNSYAVEARKFSDTNTEWDPITGSYPRGTPQHIVKIGDDILELTNKAKEVRIGAVKESWEIGNESAANAKRFAIILLVVVVVFSLTIGIYLTLSITGVVKVVVATVGKIEKGDMTARTNLNAETIRPAL

SEQ ID NO: 100282 - protein, 230 aa, Unknown
  Obtained from environmental sample
  DOMAIN (76)...(145): HAMP domain
  misc_feature (1)..(230): Xaa is any amino acid
VSKVTDDFIDTLEAFAKRAKNYSPEGVCLDPLPDGLTKVGSQALADLDAVKDYMTKQTRDLADVAASNASSSESQATVILVIVILIAIALGIYLTMSITSPLSRTVGTLGKIEKGDMTVRVNLERGDEFGQLSKSVDNVASRLQSIMKDLHVESDSLATSAEELSVISRQLVTNSEETAGKSKTVLGVTEDASKGVTSIASTAEQASAQINDVASAVEEMTVNINAMASG

SEQ ID NO: 100283 - protein, 158 aa, Unknown
  Obtained from environmental sample
  DOMAIN (1)...(99): Guanylate kinase
  misc_feature (1)..(158): Xaa is any amino acid
GEVDGRDYHFIDDTTFDRMLVEGGFVEWVRAYGNRYGTGKAWIEEQVEAGRDALLDLETHGAKRVKDLFPDAVLIFLAPPSAESLAARLTGRGKDSKEQIATRLEQAKHELEQWPHYDYLVLNDDIESAYATLKAVIIATRASTARMADLAQSVLEKF

SEQ ID NO: 100284 - protein, 280 aa, Unknown
  Obtained from environmental sample
  DOMAIN (1)...(205): Pyruvate phosphate dikinase, PEP/pyruvate binding domain
  misc_feature (1)..(280): Xaa is any amino acid
KAKKVELDTELTASDLEKLVEEYKKVVKKNTGKDFPQAPLDQLWGAINAVFGSWMSNRAVTYRKLENITTLKGTAVNVQSMVFGNFGDDSGTGVCFSRDPSTGINEFYGEYLMNAQGEDVVAGIRTPERIATLEKKNPTIYKQLVVIKNRLEKHFKDMQDMEFTVQQGILFILQTRNGKRAGAAAVKCAVDMVNEGLIDKKTAIMRVTPALLDQVLHHQIDFKAQKQAKALTRGLTASPGAGAGRIVFNAQDAETWHQRGEKVLLVRKDTSPEDIGGMVV

SEQ ID NO: 100285 - protein, 250 aa, Unknown
  Obtained from environmental sample
  misc_feature (1)..(250): Xaa is any amino acid
LPTIFDNINGDKLAEALNQTLNGAKRADFCIGYFNLRGWNLLIDSVEQLTGGQLAEKYEDDTTYKARVLIGMHKNPQDELEECFSLNPTELDNETANKIRKVKTAEFRKQLTIGRPTNRDEATLKKLSRQLREGTVKVKLHLEFNLHAKLYLAYREEYNTPIIGYLGSSNLTFSGLKNQGELNVDVTDKTAAQQLEEWFQKRWEHRLSIDISLELADIIEQSWASEVLQKPYYIYMKIAYHLSQEARSGI

SEQ ID NO: 100286 - protein, 212 aa, Unknown
  Obtained from environmental sample
  misc_feature (1)..(212): Xaa is any amino acid
ELTAASEFCEGEGIRHIVCDSEELNIEGFAKNPANRCYLCKTELFTKIRAIAKEEGMEHVAEGSNVDDDGDYRPGLTAVKEQGIKSPLRHVGLTKAEIRALSKEMGLAVWDKPPFACLASRFPYGEYITPEKLNIIDQAEQFLLDMGLKQVRVRHHGGLARIETDDAGFLILTDRENRKKIYERIKGYGFTYVSVDLLGYRVGSMNDTLPSA

SEQ ID NO: 100287 - protein, 56 aa, Unknown
  Obtained from environmental sample
  misc_feature (1)..(56): Xaa is any amino acid
VCGLNDFITNTAKLWLNNGPTFGLGGEGFQRMNAACPRVVVKEALERLKAAVTGLG

SEQ ID NO: 100288 - protein, 241 aa, Unknown
  Obtained from environmental sample
  misc_feature (1)..(241): Xaa is any amino acid
MIAFAYQQMEAYPMAALYFDMIVKNYHDLTVMGKSIHLACLNQLILLVDNPLQREWYYDELISRFLDQIDRGSSYFMLGQACEGTGDWNNAIKAYAQYLSYMGSNVPGFPNADNYAKQLVDFNNSAKDWTFENLNSLVNAVKEALDNGFSNRLWQYHAKVNFFTRTWEQEDAGEVGVAGHVDFNLSDFMRGNRIRYAENLDISSTANEAYLRTWGWSQYISTWYLYFRKIYFPLDPEIHGR

SEQ ID NO: 100289 - protein, 282 aa, Unknown
  Obtained from environmental sample
  DOMAIN (50)...(83): Tetratricopeptide repeat
  misc_feature (1)..(282): Xaa is any amino acid
AVKQYTEVWNAFPDCYPAALGIARVMEGEGKYLEAESFLSDLEGLFPENAQIQRQLALSYYHSGRWVRAQAAVDEILQKNPRDGEFVLMKAHILVEQGQLLQAQAPLDLYAGINPNNRFALFLRARVQAEAYNNREGALNYLRSIIRSSTPADDYYNEATIYAARLLMESNRQQDQTEGRDMLAKLLAVPSDYSPPGFSPHPSLETLSLAVWDAIRRESYRDARLYLGRLLEERRSTQDLLAAYTVEKEQGNFAAALSYARELYQQDRSNDEGILAYISALI

SEQ ID NO: 100290 - protein, 199 aa, Unknown
  Obtained from environmental sample
  DOMAIN (115)...(199): RNA pseudouridylate synthase
  misc_feature (1)..(199): Xaa is any amino acid
MIELKAGKDDDGRRLDRILRKALPDLSLSLIHRLLRQKKILIDDKPVSLPNHRIKQGMTITVTVNAPVNNTRNQVNSAFVNHKKLTVNKEFSRSLNCSLLIAHCSLIPVLWQGSSLIAFNKPRGLSTHGPDSLDSIVNAWLAEEGALPRSLSFKPGPLHRLDKPTSGVIVFSQTLEGAKLFSAMLREHKLEKTYIAMSK

SEQ ID NO: 100291 - protein, 155 aa, Unknown
  Obtained from environmental sample
  misc_feature (1)..(155): Xaa is any amino acid
NRTGDVLFFTEGYGLPGGDKFDARTAINGDDLAKALDIPGRKIVLLDTCESGGVDANRLVRTLKNRSTVVFTASREGESALENIFYGGLFTNSIVEGIGGSAQRNGNGIQINPLGEYIMTRVEELSRDRQTGAVRQHPVKYIPDGYRDFIVSVVE

SEQ ID NO: 100292 - protein, 254 aa, Unknown
  Obtained from environmental sample
  misc_feature (1)..(254): Xaa is any amino acid
MRKYTFVVYSNDYADFLRALQDVGVVHIAEKKSAMDDDGVRQLGVYAARINRALQILGRRKPEAGVAAVNKDSAEAILSELDGLLQEKEKLDQGLTVLNKEIGIAQPWGDVPVTALEALAREGVQARYYVVSNKKFSEQWFSTHAIAVVHDDGTNKYFVRFIREGGEAETELAGAEEVRLPQRVLSAALAEREKSLKTSAELQTRISALAAGNAPDLLRAELAHSLSEADFSRASLSADAGVEDQVRILQGWVP

SEQ ID NO: 100293 - protein, 255 aa, Unknown
  Obtained from environmental sample
  DOMAIN (36)...(246): haloacid dehalogenase-like hydrolase
  misc_feature (1)..(255): Xaa is any amino acid
MDISIIEHAREKNLTDLWEGYKKVDEIPFDFNRRRMSVAVEDKSGQVELITKGAIEEMLAISTNAEDNGETIPLSDDMRKKIIDTCYDLNEKGMRVLGLARKPVNNNSTALSVADENEMIFVGYLAFLDPPKDSATAAIKALNEFGVRVKVLTGDNDAVTVAVCKRVGLDIKHILLGSQIEEMDDETLKRAVEVTDVFAKLSPVQKARIVTALRNNGHTVGFMGDGINDATAMKAADVGISVDTAVDIAKESANI

SEQ ID NO: 100294 - protein, 237 aa, Unknown
  Obtained from environmental sample
  misc_feature (1)..(237): Xaa is any amino acid
MILTLFIGLISVSPVPSLTFLVVLGLGGALAVKTSRNILDRYANEVYTTDYHVNKITHLALHGLKEIRLYGREDLLFNTYTHQLGEAVKAKIRQQTVTRLPVASLETLGFGTLVVVMLYLVLLQEAGMARIAGIMGFMAAAAWRGLPVANRLVDSVGALRGGLPYLRKAAELITLERTLAAELLPLDTEPEPLSFERDIILENVSFRYPKAAAAAVRGVSMTITAGKMVGLVGLSGR

SEQ ID NO: 100295 - protein, 206 aa, Unknown
  Obtained from environmental sample
  DOMAIN (12)...(189): yrdC domain
  misc_feature (1)..(206): Xaa is any amino acid
MAKICSLEEMARHMREDGIGAYPTETFMALGCRAGSAAAVAGLYEAKRRPHRLPLPLIAADRAQVESIARLLPEAEKLMELFWPGPLSILLPVCGLTPVAASGGTGEVAVRISSHSGARELALAVGEPLVASSANVSGAPPAKDARSMEPILLERVPLVWDAPPKPAGRLPSTLVRLLGGDAIQVLRRGAVSTHALKQAGFAVELV

SEQ ID NO: 100296 - protein, 159 aa, Unknown
  Obtained from environmental sample
  misc_feature (1)..(159): Xaa is any amino acid
MKTQNLLKSVLDAAIFGGLLLMASCDSDNIDSRDGKKYGYVKIGEQIWMSENMNYEAKGSKCYGNDPANCQKYGRLYNFETAKEACPKGWHLPSNEEWKVLVNLTGGRHLKAASGWSGAGNGRDMYGFSGLPGGYGISDGYFLNAGYIGYWWTSTEDNS

SEQ ID NO: 100297 - protein, 150 aa, Unknown
  Obtained from environmental sample
  misc_feature (1)..(150): Xaa is any amino acid
MTSFGQDTFNNITAAGVIGLGLTGTMGVMGQLKDLTFAPDLKHNLRVAYVRGTNSSEAVKLRNGVDPNDPTDLGGTWTYVKGTQSYTYLTDKDNALEFNLDTYYDVYKNLQLIVELGYIKLDLDEKTWGKRMKDREQDMYKINVGMRYTF

SEQ ID NO: 100298 - protein, 36 aa, Unknown
  Obtained from environmental sample
  misc_feature (1)..(36): Xaa is any amino acid
MAHKKVERKKEIDRRRQRREQRLKARVKEAKAAAKK

SEQ ID NO: 100299 - protein, 126 aa, Unknown
  Obtained from environmental sample
  misc_feature (1)..(126): Xaa is any amino acid
MFEFMSGWGNGFGDKATSGSGVQGGAGSSGKNHSFGQRERLFIDVAASEALKGVIGLEHNAQWGRNAPNGYGSNTGLTGRNSGGGLGSRGVAVELLHAYVDWLIPQTSVRIRMGLQSFANPTFVQS

SEQ ID NO: 100300 - protein, 125 aa, Unknown
  Obtained from environmental sample
  misc_feature (1)..(125): Xaa is any amino acid
MAEGSFDIRSVINQVKRAFQGLTTLQKSMVIAITAVLLLALVGPLLSLANRPEEMGVLASDLTPVDANTIVEDLKKQGIRYDLSSDQTKIMVPQKLLGQQRLRIAGENLLGGDRLGWDKLESPGL

SEQ ID NO: 100301 - protein, 116 aa, Unknown
  Obtained from environmental sample
  misc_feature (1)..(116): Xaa is any amino acid
MQNLSDILGRPLRICLLMQDEALADTLRSLWTSDRITWTVFPSGRFALERLFSDPPDMVIAEQFLPEINGIDVLRMLKTENVYRQICAVLIVKCEHLSALPDANLNVDELIILPVS

SEQ ID NO: 100302 - protein, 255 aa, Unknown
  Obtained from environmental sample
  DOMAIN (157)...(254): DHHA2 domain
  misc_feature (1)..(255): Xaa is any amino acid
ADLLSKRGMDARPAAQGKPTPETEFVLKKFGLSAPEVVESVAGKKLWLVDYSDLAQAPKGLAEAEILGIVDHHKLGDVTTPNPLEIWTWPVGCTGTVIKAMYDFYGVEVPKGLAGGLLCAILSDTVMYKSPTCTEADKKAVEALAKIAGVSDVMALGMEMFKVKSAVEGASMKDLVFRDYKDFDMGGKKVGIGQLEVVDLSILEPVKDGLYAEINKVKGEGRHSVFLLLTDIMKEGSEMLIVSDDPSVVEKAFGV

SEQ ID NO: 100303 - protein, 254 aa, Unknown
  Obtained from environmental sample
  misc_feature (1)..(254): Xaa is any amino acid
VTGGEISGNTAYYGGGGVYSSDFTMTGGEISGNTARNSNGGGVYSSDFTMTGGEITNNTAHYSGGGVYSSDFTMTGGEISGNTTTTSGEGGGVYSSDFTMIDGKISGNTGTNAGGVYSSDFTMTGGEISGNTAYYSGGGVYSSDFTMTDGEISGNTARGGLGGGVYSSDFTITDGKISGNTGSSAGGVYSSGTFTMTGGEISGNGGSGVYSTGTFTMTDGKISGNTASNGGGVRSSDFNMTGGEISGNTAHYNS

SEQ ID NO: 100304 - protein, 242 aa, Unknown
  Obtained from environmental sample
  misc_feature (1)..(242): Xaa is any amino acid
MYQICLTNKTYFLGSVILKQQQTSTNQQIGDRRIVIDGQQRLTTLNIFFKVLCIKCGKDSTFERIFKLLNNEIALIHNYNDSNAFNKILNLDKLDEIDENDSISLCYKYFNKNLNEKKLDINILLKKILFVGIDIDENEDEQQIFDTINSLGVKLTTAELLKNYFFNKDNIIMYESYWKNIYELDEETKEYWDTEVTTGRLKRTFIDLFLFSYLQIKMQTKLLNVKTEDKLEFSKVEQLFLS

SEQ ID NO: 100305 - protein, 131 aa, Unknown
  Obtained from environmental sample
  misc_feature (1)..(131): Xaa is any amino acid
MSTITSRKKNPIRAIPGSKGLTYKNVRAMRRVNTERFEREMRERDERLEREKKERDERLEREKKEHDERLEREKKERDERFEQEKKEHDERYEREKKEHDERFEQEMKKQKEEFDREMKETNRQLGKLSRR

SEQ ID NO: 100306 - protein, 261 aa, Unknown
  Obtained from environmental sample
  DOMAIN (75)...(237): Type III restriction enzyme, res subunit
  misc_feature (1)..(261): Xaa is any amino acid
IDYYKIQKYIGKDGFSPELSQLGSPAWARKKERTREQLQEMALKMVKLYAKREFNEGLVFDTDNKWQKEFEDLFEFEPTIDQISAIEQVKRDLEDKKPMDRLVCGDVGFGKTEVAMRAAFKAVMNGFQTAVLAPTTILASQHAQTFRTRMAQFPVKIEELSRLIDDAKSNEIKQKLKDGKIDVLIGTHKILSKDVIFKNLGLLIIDEEQRFGVKQKDVFTNFRHSINVLSMSATPIPRTLHMSMAGIRDLSLINTAPQNRL

SEQ ID NO: 100307 - protein, 225 aa, Unknown
  Obtained from environmental sample
  misc_feature (1)..(225): Xaa is any amino acid
TSLKLPLSTTYVTFMVAMGTSLSDGAWGRDTAVYRVTGVFTVVGGWFFTALAAFSAALCIGFLLYFGGYFAVAGLMIVVFLAMWRTQTIYNRREKNIANAEKSFIIEKGDIPKIRQIAADTLCSSLQKMEHLYSETIDALSKESIKQLEAVRRDLSDIREQTKLMKNNLNVTIQAFNEKQLENVHYYVQAVSYLREISFALKSFIEVSFTHTNNKHKPLIAEQQN

SEQ ID NO: 100308 - protein, 262 aa, Unknown
  Obtained from environmental sample
  DOMAIN (166)...(258): 5'-3' exonuclease, C-terminal SAM fold
  misc_feature (1)..(262): Xaa is any amino acid
LLTGTHRNRAFYGIRQLTANDGTPTNAVYGFITILQKLSGEESPDALCVTFDLPAPTFRHVRYEGYKAKRTGMPDELAAQMPILKDVLDAMNVPRYELAGWEADDLLGTLAKKCESESWECVIVTGDKDSLQLVSEHTRVKHVKTRLGQTETKDYTTDSFFEEYGFAPQMIVDLKALMGDSSDNIPGVAGVGEKTALELVRRFGAIGDIYASLDALDIKDSVRKKLEAGRESAEMSLDLARIRTDAPLEFDLNDHLLRMFDN

SEQ ID NO: 100309 - protein, 186 aa, Unknown
  Obtained from environmental sample
  DOMAIN (123)...(175): Sigma-70, region 4
  misc_feature (1)..(186): Xaa is any amino acid
FTGTDRWQVVGTASTLAEAKELVTRVYADIFLLDIQLEDGWGLDIIPYIAKQERPAGEGLALQARPIMAVYSSFDDYAHVSAALGMGVQAYICKRRSEKELEAALRSTLDGNQYIDDTVQSKLNKTVNLFSLLTRREKEILRLVTQGLSNKQIAENLKISLRTVENIISCVYDKTGIRSRAELERL

SEQ ID NO: 100310 - protein, 151 aa, Unknown
  Obtained from environmental sample
  misc_feature (1)..(151): Xaa is any amino acid
NPPLRSEDDRESLIAAINDGIIDAIATDHAPHSENDKAAGMPGFTGLETAFAVSLSYLPDIGLQRLSALMSANPARIISLEDRGRIEKGLRADLVIADTGAEWKVEPEKFKSRGKCSPFAGKTLRGKILMTLNAGKIVFGGDGVSKGAGIV

SEQ ID NO: 100311 - protein, 269 aa, Unknown
  Obtained from environmental sample
  misc_feature (1)..(269): Xaa is any amino acid
TKKVTINSKATNLNNVFQWTSLAEQILKRYSDFDEKLILELKYNMASVLIDKSDYYKAEKLLKNVIKMYCKQSKPDRKKLSECYWYMATTLRYIGDYKNARTNILNAMKNIKNNSNYHCEYAKILYKLGSIKEAEENFEKAMEISAKKKGKLHQATATILSHYGLFLLSTGKKDLAIKIMNNAYSILKDTLGEENLYTIRLSSHICNIFYMEKKYAGSFEKMKAVFLKTKKILGDDNSETLICKTNCSKWLIKMRKYADALDYLETPFV

SEQ ID NO: 100312 - protein, 258 aa, Unknown
  Obtained from environmental sample
  misc_feature (1)..(258): Xaa is any amino acid
VPYNYDDMLDDYPAANSGTVSQREAVSTLVYHSGVSVGMDYRQTESIAYSEDMATAMVRNFKYDNSIRYIESIKPVRSWDSDNSLTNDWKDLVLGQIENNSPLYYCGYDTTNGIRSGHAFIIDGYDDRIDKFHINWGWGGSCDGFFALTALNPDTHRFDNSHSMIINIMPKTNGNPPSQIKVTDFNVSLMPFALSARITAKMNYGNEYTGWIGLAVAHGDSVGMVLDSAKIGIYNAHDYSSLTYTINYLNRTITKRFG

SEQ ID NO: 100313 - protein, 160 aa, Unknown
  Obtained from environmental sample
  DOMAIN (1)...(84): DNA methylase
  misc_feature (1)..(160): Xaa is any amino acid
MRGANPGDVWAFSHVHYCNVNRQEHPTQKPEGLIERMVSASSKEGDLVVDPFSGSGTTLRVCQQLNRNCIGIELNPEYVQLTKERLNQPFAGFDSIDERMERVPNDLNNLKFRNEYLKNHETWFLKYHPNAIKAFEDEVNKKYGAKDKTEAELELFSDFG

SEQ ID NO: 100314 - protein, 277 aa, Unknown
  Obtained from environmental sample
  misc_feature (1)..(277): Xaa is any amino acid
MKLALDSRYWGHSLIQFGDIISTAGKRRFEKVELVPRMHVIPEHGVIIKELGDDWRRGIDYRSGRIAEWCIEAGKPNDLGLLLKCSPQALSKKNMLAFWDGFGELFGMPIRIAKTASRDEKEISKIEKMMGGMGAAAWGLFPDGTEIEIKESSRGDAFNVYDKRIDRANGEISKGILNQTMTIDNGSSLSQSAVHLEIFQNVVERDADFIRDLINDRLLPFMAMHGFGVEGYRFDWDSGIDYTPEQQLAIDTMILQHFEVKPEYFSEKYNIPMSGKR

SEQ ID NO: 100315 - protein, 249 aa, Unknown
  Obtained from environmental sample
  DOMAIN (1)...(144): MatE
  misc_feature (1)..(249): Xaa is any amino acid
MSAVGEYAISGVSLVDAIATLLIIAFGALATGGAVVISQYLGRRDVKRASAAAKQLIYVSAITACIIMLIAVFFRTFLLRTIYGNIEANVMTAAKTYFFYSALSYPALALYNASAALFRSMGNSRVTMVVSLIINTVHIIGNFILIHALHLGVEGAALSTLASRILGGVMLLYILIKGGRQTISLEGLMKIRLELKHIRGILRVGVPSGIESSLFQFGKILVSRIPTSFGTTAIAANAVTGSMNSLSLM

SEQ ID NO: 100316 - protein, 269 aa, Unknown
  Obtained from environmental sample
  DOMAIN (82)...(264): Hexokinase
  misc_feature (1)..(269): Xaa is any amino acid
MEITKDADGILLSFSKEVNAPEVIGKAIGKGLRDALVRRKLKAPERIVLLNDTAATLLSGLSEIPSHGGLRRGEDRYGVPSGPMIGLILGTGFNTAYPESRIPKIGFDSPNNPQIVVCESGNFAHRYVGPIDREYDKTTNSPGGFSLEKAVAGAYLGPLCFLIYKQAIQDGLLKFKRSDEFLSWPTLQTKDLNAFQHAPLTMEGPVAELFGKDEADALATVAYLSSIVTQRGAVLSAAVVAGAVERTGSGFNPFVAIRIAVEGTTFMIY

SEQ ID NO: 100317 - protein, 212 aa, Unknown
  Obtained from environmental sample
  misc_feature (1)..(212): Xaa is any amino acid
CAVSLESLPGQTFNGRVETLRMVPVVSSNVVSYTVLVRVENVRGNLFSGMTCAVDFIVENSENALMVSNAALRYQPNSLSAETIADMVFNASLENMNEEQRIAAMVSREQPRVQNVSQPPSTTTGITDVLMGGGRGFGGGQFNAGGGRQGQGGQGQSRNAAPAVVMRNLWYINNEGKLEVMQVRTGISSGSYTEIYVSDDLEGKQVILREKI

SEQ ID NO: 100318 - protein, 278 aa, Unknown
  Obtained from environmental sample
  DOMAIN (154)...(278): Predicted permease
  misc_feature (1)..(278): Xaa is any amino acid
SRAGPNMQMRFSGFTKKDVQKLKEESSYAAAISGVVNSNANVIGAEGNAQVSIMGVEPDYIIARNYNVNTGAFFDEEDLRNRSMVAVLGPTTADNLFGGAESAMSQRIRIGTNYFTVIGILESKGAGMGGGNQDDVVMIPLDTAMTRLSNTQTIAQIVMSVKSKEYMDAAQKETTAILCESRRITDTANADFDIMNQADMIDMASATMKTLTTLLAAIAGVSLLVGGIGIMNIMLVSVTERTREIGIRMAIGGRKRDILFQFLYESVILSLMGGLIGV

SEQ ID NO: 100319 - protein, 179 aa, Unknown
  Obtained from environmental sample
  misc_feature (1)..(179): Xaa is any amino acid
LKYSNPATLAIIACPGGEVFADEVIVHLKRLYRRFSEKHAAELSRRYNTDVEKVIEQINFINEVVFYGKSRHHVPKFKIPVKFTCFANGEFKTEIQESIRGKDVYIFQDVENHYPLHFSGCENGKILSINDHLMMLFVTIDAARQAGAQQVTLVIPNYPYARQHKAKGREALTASRIGK

SEQ ID NO: 100320 - protein, 260 aa, Unknown
  Obtained from environmental sample
  DOMAIN (1)...(170): EAL domain
  misc_feature (1)..(260): Xaa is any amino acid
VVRRYAIKKYAEENQKKYLFINIRLAWLMRYADKPEEMITLQLAKEFNIPNDRLVIEISEDEFNASEEYIRSIVHYKKAGCRIALDDYGRRASNIERLAKLQPDIIKINIDYIHNSETSYHYREYLRSIAAFADSVGIEVLYEGVETERQLDICISSKGRFYQGFLIAVPQPSMLSAINQSVFSASIETAYMAIQKKAIDAESIKQSLDLKIERFLLQNPFDREKEADGDMYLMRLFRELPELRRIYLCNRKGVQLSDNI

SEQ ID NO: 100321 - protein, 229 aa, Unknown
  Obtained from environmental sample
  misc_feature (1)..(229): Xaa is any amino acid
MSGKMAAALMGDVELDKIPELDIFPPERKISQDTNSSGVNTKKNYSWMIIPKKEGTFKIPGKEIVWFDPNSATYKTASTGSFTIKAGAGNYSQQTQTKRYLTQSEITTFGDDIRYIKTEFSTNDINQNEIDKNLLLGLFLSAWGLSLLFILAKLKIILFPKNIHEERKSKAFSAAVRQLNRILNGKENTSPMAVIIKYLSAKTGKETGSMKHEEIEKLLESRKVGANTR

SEQ ID NO: 100322 - protein, 64 aa, Unknown
  Obtained from environmental sample
  misc_feature (1)..(64): Xaa is any amino acid
MSIATEAVLANEAQIPYAAIAMSTDYDCWKTDEEPVSWEAISKIFAENADKVTTLLKSVIPLIR

SEQ ID NO: 100323 - protein, 159 aa, Unknown
  Obtained from environmental sample
  DOMAIN (2)...(144): Resolvase, N terminal domain
  misc_feature (1)..(159): Xaa is any amino acid
MIYGYIRVSTDKQNTENQRFEIKNFARVNNIIIDEWIEEVVSSVQELRKRKLGRLITRAKEGDLIVASELSRLGRNLLQVMGILNHLMTTGVRVWTIKDGYKLGDDISSKVLAFAFGLSAEIERKMISQRTKEALARIKAEGRALGRPVGQRNVRSKLA

SEQ ID NO: 100324 - protein, 244 aa, Unknown
  Obtained from environmental sample
  misc_feature (1)..(244): Xaa is any amino acid
MGKEKTAKIQADKISRPIGAKLITIITILLLFSLGAITVLVSVLVSNDVRVTAEDNNFTANRRSASEAESFLVMVRSNALVLLDTLNALGRTSPVANLAAGFFFERNQDIAFIGICQKKTDGYTLTRNLINDRFFLSNELNTGVIGNFIAVEEDALERCSIGETLLLNAAPVFGIPALAFVFPWQEAGEQEVALVFFSSNTITETFGGGANISFMINDAGDYLIHADYDLIKAGANAASSPFVA

SEQ ID NO: 100325 - protein, 261 aa, Unknown
  Obtained from environmental sample
  misc_feature (1)..(261): Xaa is any amino acid
VGIITFRYNTAQRRFIDRVLWDRLHNDSPVYNGDVIRTADLSEATITFSSGDIVDLTSNTLIQVFTDKDASRIDFSGGGISVNASSGMVIASGSNLLTVDAGAVLQAAAYKNGAFDLAVSEGSAVLKNSDRQTAKTQGAKESHVITAGASLLLNASGEAQDVPRAAAVYPPPGARFLSQTKEGLALEFSWNRINYQSDGLTRLEVAQDRSFNRILFAENLGGSRINMTLPEGTWFWRLYPLMDGTFEIPYSKITVVPNPIP

SEQ ID NO: 100326 - protein, 278 aa, Unknown
  Obtained from environmental sample
  misc_feature (1)..(278): Xaa is any amino acid
ITPDGTHGRLCSGCAMDSQILKELFDACISASRILNAEPEFENVLATLVKKLPPISISKNGTIQEWAEDYGEAEPGHRHISHLCALFPGTQITVKDTPDLIKAARRTLERRLSHGGGHTGWSRAWIANFWAKLGDSEKASENIDLLLANSTLPNLFDNHPPFQIDGNFGGTAAIANMFLQSESDSLTILPALPGKWRSGEVKGLKAKGGLDVGIEWENGALVSVSLISKNKYEGKVIYGGAEITVSIAAGEAIRLDGCLEITGRTTTNPIIKGDVPDL

SEQ ID NO: 100327 - protein, 258 aa, Unknown
  Obtained from environmental sample
  DOMAIN (41)...(213): AIR synthase related protein, N-terminal domain
  misc_feature (1)..(258): Xaa is any amino acid
DSEVFGFAQANSEHCRHKIFNGKFIIDGKEMPKTLFQMIKETTKENPGLVVSAYTDNVAFIKGPTIMQWAPNKDGTFELTPIETVISLKAETHNFPTTVESFMGAATGSGGRIRDGMGGGEGSKPLASSAVYMTSYPRTGEKLKPWEKEPRPWLYQTPQQILTKASNGASDYGNKFGEPLINGALLAFEHEENGIKYGYDKTIMMSGGVGYANAQHAFKDPSKEEPEQVVILCGGLNYRVGMGGGSVASPHTGDAISA

SEQ ID NO: 100328 - protein, 273 aa, Unknown
  Obtained from environmental sample
  misc_feature (1)..(273): Xaa is any amino acid
VQLVSQESRVTVNDFSPVMANFAVDTKIPFTFNLAKAATTPEFFMFDMGLTIQKDQFICKKPLSSAFGTLIEDFERGYFHDSLWWSESSASFEWDIDSTEPHEGQYAMKSTKIGHDRECNMYTRAFDLLGGDSIVFYYKVSSEDCSTAYGEECGDALEFSSVNAVGNWTKIKAFYGEIPWTRAAFPVAEGVQSFKWAYSKDAMVSGGKDCAWVDYIIFPKFRKAPNIPSATRPAIPDHIAFDVVVNNGQNARSHQRRNSRKSRNLAYKYAGQT

SEQ ID NO: 100329 - protein, 262 aa, Unknown
  Obtained from environmental sample
  misc_feature (1)..(262): Xaa is any amino acid
IAIGLENGLKQREIASVLNRSPSTISREITRNKSYIRGAKYRATWAQFQTNQRKKNSHRKLRIPNKKLRRFIQKRLEDGYSPEIIAVMAFEKNERWKTNYETIYQWIYSDRKDLIPFLTKCHRIRRKRGSANQKRCPKIPNRTTIDKRPDYVNLRCETGHWEIDTAISRKSKAAIMVLVERKTRYVIIKKLQAKTAYFMHNATVKSLKDYPIKTRQSITYDNGTENTLHELTNKVLGTKSYFCNPYHSWEKGTVENIIGIVR

SEQ ID NO: 100330 - protein, 158 aa, Unknown
  Obtained from environmental sample
  misc_feature (1)..(158): Xaa is any amino acid
MPASSAVKSGGATKDGGVYIFLGPEIGKKQDETEQIRKKLSANVAAGAFEETVFYAGETPITNIVNTIQNHSLFAQSRLFIIKNAEQIKKNDEINAVASCMKELEPGTALIFVSDEFKLSAGLENACPKENRKVFYEMFEREKSAWIRSFFQRAGRDI

SEQ ID NO: 100331 - protein, 214 aa, Unknown
  Obtained from environmental sample
  DOMAIN (27)...(209): Outer membrane efflux protein
  misc_feature (1)..(214): Xaa is any amino acid
MNVMFTALILFISAALYGIDVPHSLTFAGAMDLAIASSADLRHAYASQGIKEGAWMLGLRAYFPRLSLSVSENDRLQKIGADSFMKNYGINVDQLLWDGGRTSMSRKLEKMELNLSSSALERMASDIADSAMAAYRNVLSSREIMAIKETAMRVLSEQRRILDEEVKLGLALPVDLAKADINLAETRLELISLGLDLAEMEQQFAQLLGLQSLP

SEQ ID NO: 100332 - protein, 159 aa, Unknown
  Obtained from environmental sample
  DOMAIN (42)...(143): Acetyltransferase (GNAT) family
  misc_feature (1)..(159): Xaa is any amino acid
MFFTKLSASYDRSSFDCDNMELNTFLKEYATSFVKRKLCQVHVLIDNNAVIGFYTLSPFTLYIRNFPEKIARKYPKSMPFSCWLLGKLALDKRYQGQKLGEKLLMAACDHAAMLSSDGAGGFCVIVDAKDQNAKNFYLKYGFIAFKDDPLRLYLPLPIP

SEQ ID NO: 100333 - protein, 275 aa, Unknown
  Obtained from environmental sample
  misc_feature (1)..(275): Xaa is any amino acid
EESLRFIQSEMDLSIQVDTDRANVLIRAIYDLGVQIQQHTLKGVSNPNDLMDKRDQLVRDLSELVDVEIYQRETFYQVRLKNGSLLVDDVKGHFELEVRGPKAETQLAQLQGSPAQLSNYTGQVSFLGSDTYEYTLEITRGGNADGPLASPPANPPQFRVSLDGGKTWLRDDDGKDLLFDIPPNYVDPNTGNVTTGTQYIQVKNLRVSFEDLTGGNTNFNVGDKFTIVPKTGLYFVAPTKGSVEGLPWYGTEPYTGPLNITPQAYFDGSENGNRI

SEQ ID NO: 100334 - protein, 262 aa, Unknown
  Obtained from environmental sample
  misc_feature (1)..(262): Xaa is any amino acid
YDPVLAGYPEDYNGFNNGSQLIIRPAAYYMGDTNDPPQLIDSYGSFPAANCASVGNFPGNVRIRIDGDPFDPTRTQYSTGNTIYFSYSADNGSTWTPAQTVMENPSTRLLVNGGFMDLDVSGPGQIDVGQQFVIRPQRADLEYEIMSGEYMAVNNVGKDIFGGLYQTYDMKRANPPVAAQPVFDGDGRNLFEVVSRLIAFTECNNQEGVQRCLAELTTAHQTVLTAEAKIGGKENRLAITKQVLNYQKLDKEERLSYVEDVD

SEQ ID NO: 100335 - protein, 252 aa, Unknown
  Obtained from environmental sample
  misc_feature (1)..(252): Xaa is any amino acid
DNAQYINEWIKSLRETQDFRKQIGILNYRGNDFQHESYIFIDNLGAENSTKFSININNLIEASVYLSVRKVVKPIWLNDRDQFLCPNDGWKNDISFQNDCLAFTIFNTNIQSKYGVNHWIPFTEEEVSARNNFESHFIVDYIKDKTIHEESAELFGELTKKHKALKFSDEAKAVFKAGKKLWQYYHSQPTANVNASLYDIREFFQGRDDNGKMNNTSGDTQYNELIADLRSALKTLSLKIQPKVYEYGFLIK

SEQ ID NO: 100336 - protein, 277 aa, Unknown
  Obtained from environmental sample
  misc_feature (1)..(277): Xaa is any amino acid
FSERELDANRQTDAKAYEPVLSEASYDEASGDTVRVVDFSALSEPGKYFLIADGEKVTITIKEKPYHELSNALVKGLYYQRCGCELPEKFAGPFRHAPCHLGKATLVKDNGELDTNTVIECAGGWHDAGDYGRYIAPAAVTVAHMLYSFEFFPQVYKDQLNIPESGNGVPDILNECRYELEWMLKMQRADGGLYHKVATRYFAKFIMPEEDKDDLFLFRVSHCSTAGFAASAVQASRVYRAYDAAFADRLLVAAKKPGTGWRRTLCSSLSSIRPTII

SEQ ID NO: 100337 - protein, 113 aa, Unknown
  Obtained from environmental sample
  misc_feature (1)..(113): Xaa is any amino acid
MEKMNAMSLKAKIRNIAKAKGVSAQVVLQNYFFERFLDRLSRSEYRDKFILKGGFLIAAMAGLDARSTMDIDATAHSFPLDEEHIRTAIDAISKTPVDDGIVFQIGKIAFIRE

SEQ ID NO: 100338 - protein, 271 aa, Unknown
  Obtained from environmental sample
  misc_feature (1)..(271): Xaa is any amino acid
LLNACFHGYTRVPRVQVQGEFALRGEVLDIFMGGDEDAYRILFDFDKVETIKSFDPLMQGTGNVKLPELVIRSMKEVIWTDDRIEALQKNLSTCREFSDGGKSVIENLISSKSVKGEEMFFSLAFEKPSCLLDYIGQKGALFLIDRERLENTHESLVREYHGLYSRAIREKCEYPLPDKLLFNFDELLNEYSSSVSRMISFRSIKGEEKKGVFHIELSCEPGRSFFGNINYLKEEFASLLDGGWQIAVAAESQVQADRIKMILEPHKSLSI

SEQ ID NO: 100339 - protein, 276 aa, Unknown
  Obtained from environmental sample
  misc_feature (1)..(276): Xaa is any amino acid
VIEINALTLFFVPDAYKTEELCTLAVIRNGNALVYVPPKMKNYELCRKAVFYNGYTLQDVDDELKTEKLCRMAVKSAGSALKYVPRNFITPELCAAAVKDSEWALEYVPEEMKTPELCAEAVKKDSRLLKFVPEALKTKEICLLAVSPNEFENFRLFEPGVHCALAYVPETLLTKELCLDAVMSDSESLEFVPEKFKTPELFLTVARKNPWALKLVPDELITYELCLDAVKVYGPALKYVPENYKTKEMLDTALAKDGCVLEFVPDSYKNEKVCLT

SEQ ID NO: 100340 - protein, 270 aa, Unknown
  Obtained from environmental sample
  misc_feature (1)..(270): Xaa is any amino acid
MPLYLLTLFAEKKWLDKDDVPKICTRVDDMTELLSLYWKDGKKPLSHQLVKGLARTIPAFDEYKFAKYNRSKSVKLRDVFRIARPKPKDDAQSALWKRVVADELAVPDTWEVAISACGDDNEKKKAEFTRLLTEKARDRETGKMFNKLGDLAFLRNLRKMKEVGVDEAAIRKSFEERNWGWIIPYQFITAASRNPALEDVLEQAMFKCLDGQELIEDTTALLVDVSGSMDSRISGRSEVMRYDVAAGLAILLREVCKDVKLYAFNTDLRV

SEQ ID NO: 100341 - protein, 267 aa, Unknown
  Obtained from environmental sample
  DOMAIN (207)...(267): Histidine kinase-, DNA gyrase B-, and HSP90-like ATPase
  misc_feature (1)..(267): Xaa is any amino acid
SERPYLSSAVPIVCLLLIAACVFGVVLYLRGKISKVSVFADAVAAGDLSKRLDVGSFDGFALMEQHLNAMLSSIEEMNGRALDGLSAAEFANRSKSEYLSRMSHEIRSPMNAIIGMTQIARASASNPEKVQDCLTKIDSASKHLLALINDVLDMSKIEANKFELLNAEFSLDTALNKIYDMMNVKAEEKKQTLSLMIDKKLPEYVVSDELRFSQVVANLVSNAVKFTDEGGKIDIGVCLAGGIGGECVIKVDVKDTGIGLTKEQAAK

SEQ ID NO: 100342 - protein, 268 aa, Unknown
  Obtained from environmental sample
  DOMAIN (18)...(268): Phosphofructokinase
  misc_feature (1)..(268): Xaa is any amino acid
PLITFTGGKNEDLSGELKVGVILSGGQAPGGHNVIAGLYDGLKNGNPHSVLYGFLGGPSGLTDNKTKILTGEIVDAFRNTGGFDIIGSGRTKIETPQQFAASLETAKKLGLNAIVIIGGDDSNTNAALLAEYFLAQGSDIQVIGCPKTIDGDLKNEYIETSFGFDTACKTYSELIGNLMRDANSAKKYWHFIKLMGRAASHIALECALQTQPNVCLISEEIETKQTSLDAVVNMICDSIVKRADRGDNFGIVLVPEGLVEFIPEVQFS

SEQ ID NO: 100343 - protein, 228 aa, Unknown
  Obtained from environmental sample
  misc_feature (1)..(228): Xaa is any amino acid
DIENPNNFAIPLPKMDWDYSVSGKSLLKSSNTKTGQIAAASTGAANFEISVAYADMFKLIDSLKNATEAKSNLFLDADFSMPAFDETKNTLDIPATIPILQTPAIAFQGITRKSLGRTMEFDLALEVDNKNNFAFNLDNFLYDFKVNNSQWAQGQINNPPKVKASGKTLIPLTVSVSSTQVVAEIVDILNRGSAVNYVCSGSANFISDLPGLTIQNFLMDLQGSTRIR

SEQ ID NO: 100344 - protein, 264 aa, Unknown
  Obtained from environmental sample
  DOMAIN (188)...(211): 4Fe-4S binding domain
  misc_feature (1)..(264): Xaa is any amino acid
MSKVFFTNMRTKLDESLLIKMDKLIQKAGIGNIDFKQKFAAIKIHFGEPGNLAFLRPNFAKVVADRIKSLGGMPFLTDCNTLYVGRRNQGLNHLDAAAENGYSPLSTGCQNIIADGIRGGDDIDVPVNGGVYFKTARIGRAIIDADIVISLNHFKGHEGTGFGGAIKNIGMGSASRAGKMELHNDGKPNVDSSVCTGCKICARFCAHNAISFNGRKALIDHDKCTGCGRCIGACTKDAIGNNWNSSAEALTCKIAEYAKAVLDG

SEQ ID NO: 100345 - protein, 254 aa, Unknown
  Obtained from environmental sample
  misc_feature (1)..(254): Xaa is any amino acid
VITVTASGNTGNTGATSGYENGFRWKSNNSGVTIELYDGPGGNVIIPAVIDGKQVKVIGMGAFIGCKSLTSVTIPNGVTSIESGYGGGGPIPMGAFAFCTNLISVTIPDSVTSIGNNAFYVCGLTSVTIPDSVTSIGDYAFFECTSLTSITIPGSVTSIRRSTFAECTSLASVTIGNGVTSIENNAFYGCTSLASVTIGNGVTSIRDYAFYECGLTSVTIPDSVTYIGAKAFNCESLISVTFNFNNDGRHYFGS

SEQ ID NO: 100346 - protein, 114 aa, Unknown
  Obtained from environmental sample
  misc_feature (1)..(114): Xaa is any amino acid
VVDNKIYYINTTDGLFKLYTIKTDGSDRQKLTDDVLVSSRGSVTRIFVIGNRIYYRNGDDGIYTIKTDGSDRRKLTDDNVNSFKVNGNRIYYSIDDDDKKYSIKLDGSDRKLEK

SEQ ID NO: 100347 - protein, 94 aa, Unknown
  Obtained from environmental sample
  misc_feature (1)..(94): Xaa is any amino acid
MQSLGLDPEQVTQLYKGNGCVTCNGTGFEGRTAIFEMLQITKNIRKLILKNASTLEIQEAAVTENMKTLRQAGIELALNGTTTIEQVLAATIEI

SEQ ID NO: 100348 - protein, 85 aa, Unknown
  Obtained from environmental sample
  misc_feature (1)..(85): Xaa is any amino acid
MLFYDMLIDGIKTKKAGKIAAAVLLCLVPIITSLPLIFVANLADSDAFSTPFIRIMLKACLLLPNILMVEGSYIMVALGVLFYAL

SEQ ID NO: 100349 - protein, 268 aa, Unknown
  Obtained from environmental sample
  DOMAIN (92)...(266): Lon protease (S16) C-terminal proteolytic domain
  misc_feature (1)..(268): Xaa is any amino acid
MEIIEVPGYGENEKLSIAKQFLVPKELRENGLSSAKITFRDDTIKNIIRFWTMESGVRNLERETARCIRRIARDAVNKGYGKDKAVSEFNKIITPANLEKLLGKKKYKRDVVYREARVGVTYGLAWTETGGTILPVETIRYSGSGELLITGNLGDVMKESARIALSYLRSTSNKYNFIAKDLLKSDFHIHVPEGAIPKDGPSAGVTLASSLLSTLCKVPPRPCIAMTGELTLTGRILPIGGLKEKVLAAIRNGMETVLLPKDNTEDWN

SEQ ID NO: 100350 - protein, 239 aa, Unknown
  Obtained from environmental sample
  misc_feature (1)..(239): Xaa is any amino acid
VLLDGQNRPVPDNYSPHERPWHMEAVAAGGEIIFLQPHTGVLLPDTVITCARGLFDDEGNLLGVVAMDIGFQRIREYVIKENSDSSWFGVLLNEQYEFIAHREPLLEGTKLEDMNSDSIRLVDEMGAGHDISEFRMRNHKNVPSITFIRKLENGWYLGIVTPEADYFAEVRRVRFILIILGVMLSIVFSVIMITIVKGKQKSDADKEKADAEKEKADAEKARADALLKEANNRIADIQI

SEQ ID NO: 100351 - protein, 217 aa, Unknown
  Obtained from environmental sample
  misc_feature (1)..(217): Xaa is any amino acid
MRGGEKMLEALLEMFPFADIYTHVYDPQAVSNTIKSHKVYTSHINRLPFAKKLYQLYMPLMPAALMEFDLQKYDLVISSEAGPAKGVVPNPNAFHICYCHSPMRYLWDMYHEYFRKTNPLVRFFMKRLIPSLRVWDVTSSNLVDRFITNSSYVAKRIRRIYNREAEVVYGPASIERFINIERKPSDYYLFFGQITGYKRADIAIEACIKSGRKLIVA

SEQ ID NO: 100352 - protein, 274 aa, Unknown
  Obtained from environmental sample
  DOMAIN (1)...(274): tRNA synthetases class II (A)
  misc_feature (1)..(274): Xaa is any amino acid
DRGPQYEGDPGPNGEGDRVMEIWNLVFMQFDRDSKGKLTPLPKPSVDTGMGLERTASILQGVDSNYEIDIFQPIFCAIWELAKVKKSDRALGANRTASQVIADHIRAASFMCFDGVVPSNEGRGYVMRKIVRRALRFGRRLGIEGQFFSGLVPAVVEAMGDQYPELAAEQARTMQTLAREEQCFGQTLSAGLKLLDGCDVSGGTLLGTDLFRLYDTFGFPTDLAEDWCREKGVAADMAGFQTELDEQRARARAAMKTHDLRLGGDLAVLADLPA

SEQ ID NO: 100353 - protein, 72 aa, Unknown
  Obtained from environmental sample
  DOMAIN (1)...(69): DHHA1 domain
  misc_feature (1)..(72): Xaa is any amino acid
VIALPSTLDGKVSLLVSVSPDLQQKVEAGALLKAMLSHVDGRGGGKKDLAQGGGTKPDGIGKAFEALKGMIP

SEQ ID NO: 100354 - protein, 268 aa, Unknown
  Obtained from environmental sample
  DOMAIN (1)...(141): tRNA synthetases class I (I, L, M and V)
  misc_feature (1)..(268): Xaa is any amino acid
ICSKSPPQECPRCGSGKLRQDEDVLDTWFSSALWPFSTLGWPDKTDDLKKYYPTSLLVTGYDIITFWVSRMIVMGLAFQKEIPFHKVVIHGLIRDEQGKKMSKSTGNAVDPVELIKEHGADALRFTLASMVTSGGQDLKLSVNKVVAGRNFMNKIWNVARFVLMKLEDNKFSAEKSLADEWILSRYQQAIQKTNAALNNFYFGDMALGLYDFVWSEFCDWYIEMSKLGLHRETFLTVFNGILRLLHPLTPFITEEIWAKLGQKGKIIT

SEQ ID NO: 100355 - protein, 253 aa, Unknown
  Obtained from environmental sample
  DOMAIN (2)...(242): 3-beta hydroxysteroid dehydrogenase/isomerase family
  misc_feature (1)..(253): Xaa is any amino acid
LTGHTGFKGTWLCRILLYAGVDVTGYALEPDTVPSLFVQTDTKKDIHSINGDVRDRDALVQAIKKAKPDLVFHLAAQPIVRLSYREPAATYETNVMGTVNILEAVRLIPSLRSFVNVTTDKVYENKDWYWGYRENENLCGFDPYSNSKSCSELVTYSYRNSFFAGENAPAVSTARSGNVIGGGDYAEDRIIPDCIRAINEQKEIVVRNPHSVRPYQHVLECLSGYLLLAEKQYGDQSIEGAYNFGPDNESCVE

SEQ ID NO: 100356 - protein, 253 aa, Unknown
  Obtained from environmental sample
  misc_feature (1)..(253): Xaa is any amino acid
MATLVILPQGEQIVDAIVGNGDLFNIDTQMAKNGNMLMISPKPEVQSGDTNLIVLGKSGNKYLFYLRSEPPNSSEITYSQVDVIADGFSAGQSSSTPVSGGMNSIFAKPRQGSGIVGADGEDYGWIKTMKIDPSEFRFDLDIFVPNPDDYVIAPERVWRDRIFTYIDFGDKVIAMTQRPVVSLLIEGGESPVGFRTDGEHGRLLIVEAVGDMVLRSGQRLVCITKRAKPFLISDTQSVMALAESNVMQRQMYS

SEQ ID NO: 100357 - protein, 283 aa, Unknown
  Obtained from environmental sample
  misc_feature (1)..(283): Xaa is any amino acid
VEYVKNTINSAPSTGWQDSTTFSILTPNTTYFIFARSKENTTHNAGTVSTGLEVKTNVDTNGGSGSWTAVTTSTLGSDDIRSITWGNDKFVAVGNDKMSYSSDGITWTAVTNTQFTSSNSNLTSQTPISCIAWGDNKFFAGGNNNRMAYSSNGITWTGVNNNPDSISAGIKAIAYGNNKFVALKNTKTITYSSNGTSWSVVSDSKFGSSTTIAIAWGNNKFVTVGTNGKMTYSLDGITWSEVENSTFGSTTIRGITWGNKQFVAVGESSKIAYFSDGITWTAV

SEQ ID NO: 100358 - protein, 143 aa, Unknown
  Obtained from environmental sample
  misc_feature (1)..(143): Xaa is any amino acid
MSKNDYEHEILVKKFEALIRKAEEGNIFSMRLLAKVYTESEYFPKDTLAAESWLRKAAELGDDEAKFQLAKLLSKGNGITKNLEESFNIYHELMLDCDVDAMMEVGFALKNGIGVAQDEELGSFYLRQAFDIELDLMEEEQKK

SEQ ID NO: 100359 - protein, 100 aa, Unknown
  Obtained from environmental sample
  misc_feature (1)..(100): Xaa is any amino acid
MSADYASFEILESFMKDVFVKVGVPEEDAAICAEILIESDKRGIDSHGVGRFKPIYIDRIKDGIQNPVTNFEIVKDHLATAVVDGHDGMGHVIGKKCMQM

SEQ ID NO: 100360 - protein, 270 aa, Unknown
  Obtained from environmental sample
  DOMAIN (181)...(270): Alpha-L-arabinofuranosidase C-terminus
  misc_feature (1)..(270): Xaa is any amino acid
ILRLREIGNSEVMYAVNMGTGTPQDAGYIVEYANFPKGTYYSDLRVKNGHANPHNIKLWCIGNEMDGPWQICHLDAHDYGKKALETAKIMKWVDPGIELAVCGSATSLQPTFPEWDRVVLEYAYDKVDYISLHRYYENKGNDLDFLASYHEMNDFIKSVAATADYVKALKRSKKTMMLSFDEWNIWYQSKIQLTPWEFAPHILEDNYSLLDALAFGGLLCTLINNADRVKIGCLAQMVNVIAPIFTEKGGKAIRQTIFYPFAMAAHNCIG

SEQ ID NO: 100361 - protein, 249 aa, Unknown
  Obtained from environmental sample
  misc_feature (1)..(249): Xaa is any amino acid
DKAKTVKRDHPNYIGLYQMLKQQVDDLERCELSLINQGRELTPQLLDSYLGGAKDSFLTFSYAYIDERLAQKKIDVRTHSSYKLDIKRLEQLTGGDVLFSDVNEALVKRMDTYFAANGYKQTTVGRFHMTMKMFVKLAAKKGHLDPRRNPYEGYSVNLGQSARANIEPSELALLEQLDRARLSERQEQALDRFLYSCYTGLRIGDNILLSKEHVKKTADGLVVEMVTEKGKGQRIVHHLAYLFDGKPQQ

SEQ ID NO: 100362 - protein, 163 aa, Unknown
  Obtained from environmental sample
  misc_feature (1)..(163): Xaa is any amino acid
LSLRKGLIIFILLAFGANVLILAKSVDQGTIYSLLHADKRFLLAALGLLCAAWSCDAGRFYALVRAAHETIPFKWGLVLTWLHYFGCAVTPMQSGGGPFQVYVLYKKGIPVGKGIAITMIRTMLTVLILTLLVPAVLLIDPEIMKENRFLQGVIVYVFAVILC

SEQ ID NO: 100363 - protein, 261 aa, Unknown
  Obtained from environmental sample
  DOMAIN (61)...(88): Phospholipase D Active site motif
  misc_feature (1)..(261): Xaa is any amino acid
MLNPIIDLLERKAKQGLDIRFLYDGLGCFMTLPPNFKETLEKKGIKCVVFNPFKPILSSLQNNRDHRKIIIVDGKTAFTGGMNLADEYINAYERFGHWKDAAIMLQGEAAWGLTLIFFQMWNLEKNWQDNIISFYPWKIADGSTDGYKIEGCPIKSRGFVQPYADSPIDDENVGEHVYIQIINNAKKYVYINTPYLVIDDSLLSVLALSAKSGVDVRIITPHRWDKWIVAVVSRSYYRQLIQAGVKIYEYSAGFYHSQTFV

SEQ ID NO: 100364 - protein, 243 aa, Unknown
  Obtained from environmental sample
  DOMAIN (14)...(211): ATPase family associated with various cellular activities (AAA)
  misc_feature (1)..(243): Xaa is any amino acid
NRAVRILARRTKNNPILVGEPGVGKTAIVEGLAQLFVSEAVPDALCGKRILCLDMGLVVAGTKYRGEFEERIKKILREVSQAGNIILFIDEIHSIIGAGGAEGTLDAANMLKPGLSRGEIRCIGATTLAEYRKHFEKDAALERRFQSVIVEEPSFDDTVNILFGIQKKYEEHHQVRYAQEAIPLAAKLAQRYITDKFMPDKAIDIIDEAAAFRKLENREQPPEINGIEDEIAKLCEEKTAYVS

SEQ ID NO: 100365 - protein, 239 aa, Unknown
  Obtained from environmental sample
  misc_feature (1)..(239): Xaa is any amino acid
ARVSGTWECHGKHPVIFLSFKDVEADSFDGAFSLLKERIAEEFERHAYAAEKISCDYDKNLFQKLSDRTGSVGDYSKSLKFLCKCLEDCHGRKVVVLIDEYDVPLRVSLACGYYKEAVDFICSLFGIAFKNNPHLEFSVITGCLRFSKESLFAGLRHFDVASVLGNDYSEYFGFTQDEMDAILQYYGFSDKRQVVMDCYKGYMFGNTEVYNPWSCIHAVSSWNKDINEPPRLYWVDSGG

SEQ ID NO: 100366 - protein, 223 aa, Unknown
  Obtained from environmental sample
  misc_feature (1)..(223): Xaa is any amino acid
NRNDEIGDMAKTLDKFAHDMQTVVVGTMKRISKGDVSVNVVPMCEEDEVGNALKQTVESLHKLIISDGGRVLQAAAQKDLSQRLTGVYEGDFATMKNNINTVMQSLDDALRQVSDATEQVTSASHDISGGAQTLAQSSNEQASSLEEISSSLEEMSSMTKQNADNSNKAKVLASEAHLTANEGDAAMKRMAEAIGNIKHSSDNTSKIVKTINDIAFQTNILAL

SEQ ID NO: 100367 - protein, 142 aa, Unknown
  Obtained from environmental sample
  misc_feature (1)..(142): Xaa is any amino acid
EQPPSFQQEALFDYCKKANITVIGYCPIGSPNRPERDKAPGDVADTELPEVVSVAKAHNIHPALVCLKWAVQRGSIPIPFSIHPNNYESNLRAVTDDFLTNSEMDLLKKAERNCRLVKGQVFLWPGAKSWEDLWDLDGRING

SEQ ID NO: 100368 - protein, 79 aa, Unknown
  Obtained from environmental sample
  misc_feature (1)..(79): Xaa is any amino acid
MPKISKITVHPDFRIGDISPRLYGAFLEPIGTMVNGSMYNPKHPSADAKGFRRDYLDALKASGLPAVRLPGGNFLSGWD

SEQ ID NO: 100369 - protein, 71 aa, Unknown
  Obtained from environmental sample
  misc_feature (1)..(71): Xaa is any amino acid
MGNSSKILLVDDSDVHLMIAENILKEKYNVTTAKSGKDALALLSKSGLVPDLILLDVLMPDMDGWEVYNKI

SEQ ID NO: 100370 - protein, 47 aa, Unknown
  Obtained from environmental sample
  misc_feature (1)..(47): Xaa is any amino acid
MSPGSVYRLYIPSKLAYGKDGIQGVIPPYSTLIFEVELIDIIEDSDE

SEQ ID NO: 100371 - protein, 265 aa, Unknown
  Obtained from environmental sample
  misc_feature (1)..(265): Xaa is any amino acid
GTGAGAALFGRYGYNPDSTPIVIQPDSRNALFAPGNRIKDFTVEFWMYPLNMENGEQILSWTSIMSGSRAQRIDCSVSKNKLKWSFVNFFASINGSKQINIDFTSLASIVPKTWSHHLIRFDASTGMIEYIVDGRGESIVYATSTGRENSEVHIPVIGDNGRFLLGGLFSGFIDEFKIHGVCVGRTSIQRYAFGGRIETKPVDLGAISSGVVKINACGGRTSIRGTALQNEFRENGRFKFSDDAEMNFFVRAGENPYSLDKVPWV

SEQ ID NO: 100372 - protein, 261 aa, Unknown
  Obtained from environmental sample
  misc_feature (1)..(261): Xaa is any amino acid
TENVTQEVRESWNKFCDLTDKLAKEGLPRGSMRFEIHSEYEDYFTNETLNSFFNAPDRLAFRTYGLKVLDNVLEKGVFTMGYTDLGGYNPDLAELIVTRGDRVERERVSYSGITTIANAADAIIQAADSEQIPANFRAIAVPLLLPFVRENVFFSIEDSRLRVAQAMERVPSVMKHIEKGKRVIRKGFVITNEDIKDLQALNDAHQKKDPRSIIGLVLLLGLLYVLFLLLQEKLVIGKEFSGNEKSLLFILVFLYLAGAGI

SEQ ID NO: 100373 - protein, 84 aa, Unknown
  Obtained from environmental sample
  misc_feature (1)..(84): Xaa is any amino acid
NVSRDGTMSGYDLEFISSIAHSLTIPVIAAHGAAGAEDLKCALDAGASAAAAGSMYVYYGKHKAVLINAPEEKKLLEMGVYKDD

SEQ ID NO: 100374 - protein, 248 aa, Unknown
  Obtained from environmental sample
  misc_feature (1)..(248): Xaa is any amino acid
TLTLSNHTWDSSVNGTYTKDGGSSGGGNITMTWTAVGDSKFNSGYIYGITWGNNKFVAVGQSGKMATSSDGINWTAVTNSQLSTANHGYIRAVAYGNGKFVAGGINGDTNSGEMAYSSDGTNWTKVTDSKFGSSCSIRGIAWGNNKFVAVGEQGKMAYSSDGINWTAVTDSKFNTTIILAVAYGNEKFLAVGYDGKMAYSSDGISWTAVTDSKFDSRNISSITYGNDKFVAVGDSSKIAYSYDGVNWT

SEQ ID NO: 100375 - protein, 238 aa, Unknown
  Obtained from environmental sample
  DOMAIN (1)...(175): Peptidase family U32
  misc_feature (1)..(238): Xaa is any amino acid
ARAVPEIELEVFVHGAMCVAYSGRCILSSYLTSPAFLAPGEELPGNPDRVRSASYGDCAHTCRWAYSLVEEKREGVVLHITEDEQGTTLLSSRDLSLIDHLAELRDAGVYAVKIEGRMKSLHYTAVTTGIYRAALDALAEGRSPGEEERAFWRAELRALTKRELTTGFLFPDNQARSPSRDAQTMPFLMAAIVLAQETAMGEGFWRCRAVNALRPGAELSAIVASTRMYCCRHTTQCL

SEQ ID NO: 100376 - protein, 128 aa, Unknown
  Obtained from environmental sample
  DOMAIN (2)...(128): tRNA synthetases class I (E and Q), catalytic domain
  misc_feature (1)..(128): Xaa is any amino acid
MEVRVRFAPSPTGYLHIGGLRTALFNYLFARKTGGAFILRIEDTDRTRYVPDSLEDIMASMRWLGITWSEGPDTAGAYGPYTQSERLHIYRQAADDLLASGHAYRCFCTPERLEKMRADRKNAGQDEG

SEQ ID NO: 100377 - protein, 87 aa, Unknown
  Obtained from environmental sample
  misc_feature (1)..(87): Xaa is any amino acid
MTKGKFYTFEGIDGCGKSTQLARIAERLRENGTPFKVTREPGGTAISEKIRELLMSPDNKAMCPETELLLYLAARAQHVREIIKLGY

SEQ ID NO: 100378 - protein, 287 aa, Unknown
  Obtained from environmental sample
  misc_feature (1)..(287): Xaa is any amino acid
GQRADTDEDTLGIEPDENYADFDSEEENPYGEDSAYSYDSYEEYSYSYDDYEEYSYEEDDIYSYDEDTSSHSAQSDNSMTDEEYKEWLAQMEAKKNKFKYGITLESYRYVFMDPAFTRSMWWTAILTVICTLVSLTMTVLCAYPLTYDWIKGKTLINTIIIFTMYFSAGTIPNYILMKDMGLLDNPLVLIIPNCLSVFNMIILRSFFFGIPDSLRESAELDGAHPFTVLVQIYLPLSAPVLATLALFYAVGRWNGFSDALLYIKSAPAWVPIQLKLWQLIQNMTSID

SEQ ID NO: 100379 - protein, 138 aa, Unknown
  Obtained from environmental sample
  DOMAIN (56)...(131): Transcriptional regulatory protein, C terminal
  misc_feature (1)..(138): Xaa is any amino acid
GADEYITKPFSPKVLVARVNALFRRFMGLNEKNQKNILRFGPYALDYDSCILKKNGERIPLSTNEYSCLAWLTEHPGKPIPVETIYTGVWKNKHGDITTVAVYVQRLRKKIEEDPSNPVYIETVHGMGYQFNLKTDQP

SEQ ID NO: 100380 - protein, 276 aa, Unknown
  Obtained from environmental sample
  misc_feature (1)..(276): Xaa is any amino acid
AVKKSKEKNSAETVKTLEAERREKRTAFEAELSREKSLISLRSFYEARNKELVERRKRDLVKERQDAINKARMEKNGEIRSKQEPEILAAKEDRKRENIVGLAAKKAEMKENETVRRYFVYLKLRPDDTPDSVNNDIGRFKPSVFKCDQTAEKVKIDRQYKALNNFFNGYVKNPFLSTYLFSPHELGAAAALPECDYFSQRLNDGQKEAVRKAVASESIFLLQGPPGTGKTEVIAEIAAQFVRRGRRVLISSETHKAIDNVFERLPKIPSIRPLRL

SEQ ID NO: 100381 - protein, 261 aa, Unknown
  Obtained from environmental sample
  DOMAIN (32)...(109): mce related protein
  misc_feature (1)..(261): Xaa is any amino acid
MTDKRLGYIVMFLILLLVGGVYGYLIWLDRNPLNTLVLRFPQVGSLAVEDPVRMEGTQVGQICGFDHDSLGRVLVYVQSHKPIPVRASSRVAVKVKGVMGERFIEIGIGNPGDSLADTRRIIDGDFEMGPSEAIAYMDLLAAKITELKDIMARIRYGKDGKRSFVQAFNDVANTVDTLVYNLLTGFGGMEEGLSAGLDSVAVFVEQTADLTSKASATAPKMIEDLNTLIVKIDAVIPKVEKAIAQANKITDDIDKNKLLWG

SEQ ID NO: 100382 - protein, 248 aa, Unknown
  Obtained from environmental sample
  DOMAIN (103)...(168): His Kinase A (phosphoacceptor) domain
  misc_feature (1)..(248): Xaa is any amino acid
VFIVIISMVIYFNIKAIASPIKKLTDDALKISKGDFGVSFEKVAENDKSEIAVLNRSLAKMVEMLTGTLREVELRVESRTHELSLMTQKAEEAKVRAEEASKVKSQFLANMSHEIRTPMNAIIGMSAMGKTAADKDRKDYCLNKIQDASKHLLGVINDILDISKIEANKFSLSYTEFNFEKMLQNVIQSLSFKVDERGQSLKVYYDRAIPPMLIGDDQRLAQVVMNFLSNAVQFTPEKGAISLRTRLV

SEQ ID NO: 100383 - protein, 102 aa, Unknown
  Obtained from environmental sample
  misc_feature (1)..(102): Xaa is any amino acid
MYTHDTIAAIASPVGTGGVGIVRVSGPEVGRVLARMFRPLSPRFTRFKPWTLHRGHVLDGCGNVLDDALAVFMPGPRTFTGEDVAEFHCHGGMALLGLLWRA

SEQ ID NO: 100384 - protein, 267 aa, Unknown
  Obtained from environmental sample
  DOMAIN (6)...(267): Methyl-accepting chemotaxis protein (MCP) signaling domain
  misc_feature (1)..(267): Xaa is any amino acid
MASGAEQASVNANEVAGAAEQMSANMNTVAAAVEEMSASISQIASNASEARKVAIAATEKSANATDVMSKLGAAAKEIGLVTNVIKKIADKTNLLALNATIEAASAGEAGKGFAVVAGEIKELANQSAQSADDIALRIESIQNGTGDAVHVISDVSDIIVKINQSVEAIAGHVEQQTKAANEIASNVSQANTGSKRVASAIGEVARGANDVSKNAGEAAKGAIHVSRNIANVSKVAKQSAEGSTHVNQSATDLSKIASDLKDTVSKF

SEQ ID NO: 100385 - protein, 184 aa, Unknown
  Obtained from environmental sample
  misc_feature (1)..(184): Xaa is any amino acid
RPGSFREVRGNATAALYSPAGVALLPLEQDPFFLATDFMAGIAPAGSNFFPGRGVLSASLGGVSYAYMSLDLAGLSPAYLLPVVKEINRAEGATTGRFPGVSINISGVPLHSARAISESAWETNLIAGASVLLIFLISYAVFGSATCFLYALLTLGAGIALAFMLTSLIFGEIHVLVPVFGAGL

SEQ ID NO: 100386 - protein, 89 aa, Unknown
  Obtained from environmental sample
  DOMAIN (1)...(86): Uncharacterised BCR, YhbC family COG0779
  misc_feature (1)..(89): Xaa is any amino acid
VLGACKRSGVDLVEIEKNFIGKRKILRVFIDKSGGVDVEDCASTSRYLSEELDKEANSNLIEGAYTIEVSSPGLDFDRNSKKGGKWQKK

SEQ ID NO: 100387 - protein, 260 aa, Unknown
  Obtained from environmental sample
  DOMAIN (34)...(119): 3-Oxoacyl-[acyl-carrier-protein (ACP)] synthase III
  misc_feature (1)..(260): Xaa is any amino acid
DIIILATASADYFGTPSTACVVQEKIGAKKAAAVDITAGCTGFVYGLEIAAGLLSISSERKRALLIGSEVLSKMVDWNERKICVLFGDGAGAVVIEKTAADPQSADRKGVLHSILRADGSGNESLIMRRGGTRNPFKKGETIDLPVFIEMNGQEVYNFAVGAIAETIDDLMKAGNIGIDDIAWIVPHQANARIIQAARRRLHIPAEKIYLNIEEYANTSSASIPIALDEMNRGGKLKKGDLILTVGFGGGLTYGGNIIIW

SEQ ID NO: 100388 - protein, 98 aa, Unknown
  Obtained from environmental sample
  DOMAIN (3)...(86): Nucleotidyltransferase domain
  misc_feature (1)..(98): Xaa is any amino acid
SIHFSAYPGVREAVLYGSRAKGKYRKGSDIDLSLKTDETFTHNDLLSIAGDFDDSDMPYFVDVSIYDWLSNLDLKAHIDRVGKVLYERKGKREESLRL

SEQ ID NO: 100389 - protein, 272 aa, Unknown
  Obtained from environmental sample
  misc_feature (1)..(272): Xaa is any amino acid
KANFAFAILAVIIIDIIGQMNVWRIMGVSAMRGQDIANKVLKGSGYFLAFLVALGGLAFNIGNVGGSSLGLQALFGLDSKWVLLTTGISGIIGACLFMFKNFLGAMDKFVKVLGAIVIIVIFYVMLQTAPPYGEVVVKTFVPDSYGALGLPILTLVGGTIGGYIIFSGGHRIIDAGMTGTENLKNIDKSAVTGIGVCTIVRILLFLAVLGVVVAGGKLDPANPAPSAFRLGAGELGYRFFGIVLWAAGATSIVGAAYTSVSFLKTLFSRVKK

SEQ ID NO: 100390 - protein, 186 aa, Unknown
  Obtained from environmental sample
  DOMAIN (111)...(185): Recombination endonuclease VII
  misc_feature (1)..(186): Xaa is any amino acid
MIKEKSKVSDNIFVYINKDIKVHGAILKKYSVGILETKGKKASEIHFIWFKEPIAVPNGDYKVFDPKKTGDLFLKKVCNVCQRLLNTKTFSKGLSCKDCEKIIDEVNAISKKRKGKKKNKSELEIFSCPVCDKTAVPKLTGKIALDHSHKDLHVRGWVCDGCNAGIGKFKDEIILFENALKFLKID

SEQ ID NO: 100391 - protein, 105 aa, Unknown
  Obtained from environmental sample
  misc_feature (1)..(105): Xaa is any amino acid
VIIDADLQDPPEVIPDMLALMHAEKANNVYAVRKKRKGEPLLRLLAIKVFYRSLNLLSDVKIPVDTGDFRLIDRTVIDQFNKLEERNTYIRGLMSWMGFKSLPFY

SEQ ID NO: 100392 - protein, 189 aa, Unknown
  Obtained from environmental sample
  misc_feature (1)..(189): Xaa is any amino acid
MNNNGFSDRNKPSRRRIPFSWIWFGSTLLLCAVFAFASVPSVLAQVREGGQADSVLKNRRYTETIQQVFNFIQRHYVEEVDSKVIFEGAMTGIFNALGDPYSTFLPESEMKDLNDTTQGSFGGVGLYITKPVGTKPDGRPPYVEVASPIEDTPGWRAGINPGDVIISINGELTDKLTTDEVVGRLRERP

SEQ ID NO: 100393 - protein, 263 aa, Unknown
  Obtained from environmental sample
  misc_feature (1)..(263): Xaa is any amino acid
RSGILRRTFPLAILRTNSTVNQDLKAVSFYLVELCEYVYYFLSAIEEHILSKYKKSGTTVESINFDEFKDILVPLPPLAEQHRIVVAIESAFTIIDEIEHNKADLQAAVTAAKSKILDLAIRGKLVPQDPADEPADLLLERIRAERETLVKSGKIKRGKDESVLKECCDNSYYGKIRLGDVCVLLNTPKIEYGTLPYLEVRYLRRGISPERKQSGRYIERGTPIILVDGENSGEVFFTHENGYMGSTFRELVILKAFDVKFVM

SEQ ID NO: 100394 - protein, 276 aa, Unknown
  Obtained from environmental sample
  misc_feature (1)..(276): Xaa is any amino acid
LLGGGMAKAAGQLVCDAEAREKLERMARSRKGGRRMWLRAEIVLRLVDGRTYAETMDELGVSAVTVARWRGRFAGGGIAGLSDRPRGGRPAEHGEGFREAALDRLGQPPPEGHGQWDGALLARELGCSKHAVWRPLRAEGISLARRRSWCSSTDPEFAAKAADVVGLYLAKDERALVVCIDEKPNIQALERRAGYAVSSDGKLVRGLGSTYRRNGTVNLCAALEVATGRVHARTTGPEQKTKKGFTAFMEDLLRGLPDADEYHVVMDNHSIHKWHD

SEQ ID NO: 100395 - protein, 62 aa, Unknown
  Obtained from environmental sample
  misc_feature (1)..(62): Xaa is any amino acid
MNIGYTGGVYDLFHIGHLNLLKNARGLCDKLIVGVTVDELVAYKYKKGGNTIRGKTGNYQKH

SEQ ID NO: 100396 - protein, 82 aa, Unknown
  Obtained from environmental sample
  misc_feature (1)..(82): Xaa is any amino acid
MSGNADFTVETLGTCSIKSPITMSTTAGDGVANYVTDEQFVRLSVVANIGAQQTLNRADILERAGPREMIYFSPAHVHAGIV

SEQ ID NO: 100397 - protein, 258 aa, Unknown
  Obtained from environmental sample
  DOMAIN (1)...(212): ABC transporter
  misc_feature (1)..(258): Xaa is any amino acid
SGCGKSTFLEILAGLQPPTDGTIRINGKLVLEPLPATRKEQIEYKRRYRFISPLANGVFRDQPKHDIAMIFQDYAVFPWMTSLHNVEFALKLRNSGRKGKEKLKRSEISDKALFYLQKTGLGGFANKYPSQLSGGMRQRLALARALSVEPSIILMDEPFAAVDALTREKLQDELLRLLSERNGQSPLTAILVTHEVHEAVYLSDEVIIFSPSPGSIRNRISVNVKRPRARTDPELIDIQDRIFAMFQYDLNQESEYSI

SEQ ID NO: 100398 - protein, 271 aa, Unknown
  Obtained from environmental sample
  DOMAIN (1)...(271): Beta-eliminating lyase
  misc_feature (1)..(271): Xaa is any amino acid
AIDCNVKEAEDPTLRTPFKGNMDVKKLQELINKHGAKNIGVVIMTITNNSAGGQPVSIANIRETSEVCKKHGIKLCIDAARFAENAYFIKRREEGYANKSIKEIVREVFSYGDLFAFSAKKDAIINMGGLIGVKEDAALFQGCKERTISYEGFISYGGLSGRDLEALAIGLYEGINEDFLEYRIGQVEYLASLLDDAKIIYQAPAGGHGVFVDARSMFPHIPYNEFPAQALAVELYREAGVRSCDIGSYMLGNDPDTGKQLKSTFEFTRLA

SEQ ID NO: 100399 - protein, 151 aa, Unknown
  Obtained from environmental sample
  DOMAIN (32)...(115): PPIC-type PPIASE domain
  misc_feature (1)..(151): Xaa is any amino acid
VDAYPNSEYIAYADGHPELFRSIHLSRISAGSSEREARQILNSIKDGSSSFEDAARAYSQDDYADRGGDLGIRLIYELGQEIAQADLEKIIGLGRGEYSDAIQIGGRWAFFRVEEEARPADVNDDAVMEKIRSYVRYFDRGRMEDWAVAQA

SEQ ID NO: 100400 - protein, 81 aa, Unknown
  Obtained from environmental sample
  DOMAIN (21)...(80): OB-fold nucleic acid binding domain
  misc_feature (1)..(81): Xaa is any amino acid
MNQYRTHTCGELREGHTGQTVTLSGWVETIRDHGGVTFLDLRDQYGVTQIVLHAEFKLSKESVITVTGAEKNGTKKPSIRK

SEQ ID NO: 100401 - protein, 265 aa, Unknown
  Obtained from environmental sample
  DOMAIN (87)...(120): Tetratricopeptide repeat
  misc_feature (1)..(265): Xaa is any amino acid
LPANATTPVAANQSKYTYDSPEFKAGLAAFEKKNWAESAKSWGDVLKKEPGNPGAYYYAGVCRFNLGELDKAVINFNKGFDFPEKGYNSNYYLGRIYEQKGDKAKAISYYNKYLQLTPSADGKAEVKGRVAALIAQTAAAAESISSSEASSSSQIAKSSASYECNSLESCLKMEEKRKQDSVAAYLESLKNKPLTIGPEKVAPTEYGGNFAFASVTEAGSADLQKAFNLIQKKSFQSAIDALQTTRQKFPGTPNSMAAAYNLLSL

SEQ ID NO: 100402 - protein, 124 aa, Unknown
  Obtained from environmental sample
  misc_feature (1)..(124): Xaa is any amino acid
MAGLKYPDDFSAQFVAATEAVDLIRNRQIDGTWIQAGLPTSGVSDISTAGGRLVSMDEELIKNITAKYPWYNRAVIPAGTYPGQTQDVITTSITITVVVDQSVPDDIVYQMTKVMYENIDTLKL

SEQ ID NO: 100403 - protein, 192 aa, Unknown
  Obtained from environmental sample
  DOMAIN (42)...(117): Mur ligase family, catalytic domain
  misc_feature (1)..(192): Xaa is any amino acid
FARFIGDLLNGALPKKAGIIELRIGASAPGSFSASAWPAASVITALKYDSRSIKPGDLYFALPGLHTDGHSFIPQAVENGALAVVYQNECPEFRDGIIYIRVKDSRFAMSPIADAFYNFPSGKMGIIGVTGTEGKSTTVYLIYQLLKLLGRKAAFISTVQHGDGLTEKWNTEHQTTPEAVTVHRLLAEMLMN

SEQ ID NO: 100404 - protein, 279 aa, Unknown
  Obtained from environmental sample
  misc_feature (1)..(279): Xaa is any amino acid
SLPTLTPEETEEFAHLIADYPKDIFEDKVRALLSSPDAQIRASIISILPIVKNHSFMKELRASLKDVDPDVRVAAIKALLGFGEIKLLNQETSMLHDPIERVRLATAEVIARHGNAEAIEILKNVTVDPNETDVVKIGVIDGLGQAVNAEGIELLVSVLEKQDEFQEYAIDALAKRTSKHDLSQIIEIFKNAEPKLREKLVQVFKKQGKEAEPSVLEILKEEVRSLKPYLVKILEETGYIEETKRRLSSRDASVRREAANMLSLMDTLTAFRGLVRPRK

SEQ ID NO: 100405 - protein, 242 aa, Unknown
  Obtained from environmental sample
  DOMAIN (1)...(236): Periplasmic binding proteins and sugar binding domain of the LacI family
  misc_feature (1)..(242): Xaa is any amino acid
MRISNPFFTLIEQTIREEVEKNGDKLISVDPDMDAQKQISQIEELIAQKIDAIFINPVDWEAIKPALVSLDRAKIPVINYDAEVRDMDLVDAYVGSDNKNAGYICGLDLVKRLPNGGPIAILDCPGMRSLRDRIDGFNDAIAGKGFTVVFLRDAKGNSVDGQRYTEELLRSNTRVLAIMGGNDPTALGAFAACRKAGRTNILIYGVDGSPLAKAAIAERGQFAGTGAQSPINIAKTSVEVAY

SEQ ID NO: 100406 - protein, 102 aa, Unknown
  Obtained from environmental sample
  misc_feature (1)..(102): Xaa is any amino acid
MKEENKKEEEKDFSKIMKTAKPFIKWVGGKSQLLEQFEDYLPSELKKGRLEQYVEPFLGSGAMYFSISDKYKIKNAHLSDLNKDLILVYIVVQQKPEYLLYF

SEQ ID NO: 100407 - protein, 297 aa, Unknown
  Obtained from environmental sample
  misc_feature (1)..(297): Xaa is any amino acid
MAGTQISPFMNVAIKNIYGTQISIFNYAYNINGLQASSSLNIARNFNGVQAGVTNIAVTGRGIQAGVFNIVDTLYGVQGSVMNIASKVSTVQGGVMNIAGDAGLVQGGVMNIAGKVEKLQGGVINIGGHVGRQIGLINISAESDHTPIGLINIAGNGIFDGTFYLDETGRGGVALHLGTPYFYTVFDYALEPTNIWPQSWGCGLGTRFGMRGNHFSLDYSYINVYDENPLREKDSHNQLLKIRLGAAYKLLTGIALSSGLTLNALSRYNGEDFYFGPRGGYHWHWTFGDHKVRLWPG

SEQ ID NO: 100408 - protein, 192 aa, Unknown
  Obtained from environmental sample
  misc_feature (1)..(192): Xaa is any amino acid
IVYIGAVDAPVTIQEITDALDDTKAMGMKELHVLGWEWEMGLNDAIQEIAKQKGVTLRLRIIPMDAIDPQASGRGDIKFFELAYFKTNIETKGMKITVKLEDFVIPHTDLIDTEVKESIKKWSDWIDYWAVDFDFRNDTFNNTWTSYRTKQERKLHLTAVHEYKKAGTYKVFIKIIDIFGIDTSQVYEIKVR

SEQ ID NO: 100409 - protein, 201 aa, Unknown
  Obtained from environmental sample
  misc_feature (1)..(201): Xaa is any amino acid
MESLDGYTLMNNRNLDVVFAIKDADGDLQPSDILYRGEDLTSYSVTDQNAIAKLTKKLRYSKQQINLQKQIWDMTDGSSSLDQASEQKATAPVVTPVYGEKKVLCVLAQFSNKSMTKTVTEFENLMNQVGYKANGNAGSVKDFYRANSYGKMDITITVAGPVTCANTSSYYAAQGRWRNWAREVAQLANPSVDFSQFAVNG

SEQ ID NO: 100410 - protein, 162 aa, Unknown
  Obtained from environmental sample
  misc_feature (1)..(162): Xaa is any amino acid
MESLDGYTLMNNDKLDVVFAVKDADGDLQPSNILYKGENLSKYSTAEKRAITKLEKQLRYSKRQIILRKQIWDMTDGSSSPNQVSGQKATSPVVTPVYGDKKVLCILAQFSNRSMIKSVTDFENLMNQEGYTAGGATGSVKDFYRANSYGKMDMTVTVAGPV

SEQ ID NO: 100411 - protein, 189 aa, Unknown
  Obtained from environmental sample
  misc_feature (1)..(189): Xaa is any amino acid
INTGINKSINKDIGTDISINKIALTPEKSTSNKCEWILTMDADGQHSPADIPRFLAESKRKPAVGICIGARDMRLRSMPPARIISNRLTSLILSILVGRRVADSQCGYRLYSAEFVKSVQIEYNRFQAESELIQKAADKHFPISFTGVRTLYLKGGSSHISHLLDTLRWIAAVGRVWFQLTFTHGKRGF

SEQ ID NO: 100412 - protein, 222 aa, Unknown
  Obtained from environmental sample
  misc_feature (1)..(222): Xaa is any amino acid
MKRKINLGYVLIILFVGLFAFLCLYPFLLVISGSFTTQASASLHGFTLMPVKVALESFKDGKNVIFKLILIPKEFTLEAYRVLFSNSGKIINAYRVTILVTIFGTALAVFINSMMAFVLSRQNLFGKKFFNIYVLVTMLFSGGMVPWYIVCTRYLHLQNTYLALILPMVVSAWNIFLIRNYFRTIPDSLYESARIDGAGDFLIYRRIYLPLGTPVLAIVLLF

SEQ ID NO: 100413 - protein, 124 aa, Unknown
  Obtained from environmental sample
  misc_feature (1)..(124): Xaa is any amino acid
MKYLNYCMVLLCITLFNSCIFKKFSDVPDSIDKINYQPFSEKNKLVTLKEESELRLTNNLPIIDGATALYPLYAAFVQAVYPKGEYDPNPTWDSVKYVDILPVVGCSRTSKAFDNLINGEVDII

SEQ ID NO: 100414 - protein, 233 aa, Unknown
  Obtained from environmental sample
  misc_feature (1)..(233): Xaa is any amino acid
NDGIIDIYALPCDDAREVLTGFVFGNGGNFVTINAQGKFENGMTRPEFIEAMQFYQRLMNEGLMKPRPENPAWDWDFTEFFDARTAMIIAPEWRKGQMPEMKDDYGFVFPPKGPRAADYRMANDDMVYVVPAFFSPAEVDVILKAVDLWEVPSSDDWKGGHYWAFRDRRAVDESMAMVKDARYNAFKNYLLIPGYPLSGMLMDEGRWWENGTPAQIIEGWSPRIQAVLDTANR

SEQ ID NO: 100415 - protein, 145 aa, Unknown
  Obtained from environmental sample
  DOMAIN (101)...(137): Sigma-70 factor, region 1.2
  misc_feature (1)..(145): Xaa is any amino acid
DGVFGKVVGDGGHLDLPEEPNLAVKSSALRKMTNAAGEKQDALPDAWPDAWRDPEWGLRDQAEEAVEGDEPAALAGGAEDEPELNYSSMRIFRNEDAHPSDDPIGHYLRDIGRVSLLSAEQEVLLAKKIEQNEKEIEEIVIRSPG

SEQ ID NO: 100416 - protein, 120 aa, Unknown
  Obtained from environmental sample
  DOMAIN (29)...(120): CHC2 zinc finger
  misc_feature (1)..(120): Xaa is any amino acid
GPQEERRCGPSEARKENENRPREIQAYLISTETIERIREALPLVDYIARDIVLKKAGSIHKGLCPFHNERTPSFVVYANENRYHCFGCGKDGDIFTYVEELKHLSFMEAVRMLAETARIP

SEQ ID NO: 100417 - protein, 161 aa, Unknown
  Obtained from environmental sample
  misc_feature (1)..(161): Xaa is any amino acid
MELAGELVTGRFFGGVASLQFASPRIASELEEAEAERGIYWMNAADPASPAGIAVEGIIRSTGRDAPAIRRIASSRLCFRGAELLAVSNRSCQELEIFISPDDSDIVEALEFVKVSRTRKVHKENKITIERINGASAASSAYSEVLAAHGFVKDRGRMVLW

SEQ ID NO: 100418 - protein, 238 aa, Unknown
  Obtained from environmental sample
  DOMAIN (3)...(238): Respiratory-chain NADH dehydrogenase 51 Kd subunit
  misc_feature (1)..(238): Xaa is any amino acid
IRASRPRRRRVFTGLKWEFAQKATNPKRFIICNADEGDPGAFMDRSTLEGDPFSIVEGMIIGAYATGAGQGYCYIRAEYPLAIKRVEKAIDMARARGFLGKNILGSDFSFDLEIRLGAGAFVCGEETALMHSIEGRRGQPRIRPPFPAASGLWGCPTTINNVETWANVPVIFLNGAEWFARLGSEKSKGTKVFALAGKVINTGLVEVPMGTTLREVIFDIGGGIPGGKMFKAVQTGGP

SEQ ID NO: 100419 - protein, 271 aa, Unknown
  Obtained from environmental sample
  misc_feature (1)..(271): Xaa is any amino acid
AIWHITDPLSLEVGARYSDDEYDYAYEGVNVASVPVNPVKPPGSYAFGVPEIPVQQSTSRVDPKAALQYRWTSHLMTYVEYSTGFKGAGSNPQPISAAQTTTFKPEILKSYEVGAKSEWLDRRLTVNADAYYNMVSDLQLIGYAGTSAGGTETINAGEAHIAGAELELLARPVNNLLFNLSADYMQFKYASLGAAAFSAQNPSGLFLNDVAPYSPKYKADAGVQYTVQLGAAGSLQPRVDATYTSRVYFDPQNLTASSMGGYALLNGHLMY

SEQ ID NO: 100420 - protein, 108 aa, Unknown
  Obtained from environmental sample
  DOMAIN (33)...(107): Bacterial flagellin N-terminus
  misc_feature (1)..(108): Xaa is any amino acid
MRVESLSQQGIGSLNKTLTGSLEQTNKKLNSVLEKLATGQRINRASDDAAGLAVAEGLITQTRGFKMAARNTEDGISALNISDGAANETTAILQRQRELAVQSRNPTL

SEQ ID NO: 100421 - protein, 195 aa, Unknown
  Obtained from environmental sample
  DOMAIN (29)...(195): Protein of unknown function (DUF1212)
  misc_feature (1)..(195): Xaa is any amino acid
MLGFMQLPTHESELEPHDLIRQSHIVHRTGRAALAAGHGSYRVKAHMERVGKAVGLDQVKAHVALTEVTTTVVRDSMFRTEVSEVRTVGINADRLMELEHYLGALPEKVSVSEIDDEITRIVNKPHLYSPIQNALAAGLACAAFAFLNGGGPFECLFALIAASVGQYLRRDLIRRGVNQVGVTMLVAAIVCAVYL

SEQ ID NO: 100422 - protein, 93 aa, Unknown
  Obtained from environmental sample
  misc_feature (1)..(93): Xaa is any amino acid
TAFFDVGGVWIELLEPTSPDSTVAKFIENNKGKGGLHHIAYESSDVATELTAAESKGVALLDKAPRKGAGHMNIGFLHPKSTGGALTEFCTPA

SEQ ID NO: 100423 - protein, 120 aa, Unknown
  Obtained from environmental sample
  DOMAIN (11)...(92): Shikimate dehydrogenase substrate binding domain
  misc_feature (1)..(120): Xaa is any amino acid
MINGKTEILGIFACPVEHTKSPAIQNALLKNCGINAVYVPFHAEKNLKEAVEGFRAMGFKGANVSIPFKEQIVPFLDYISPTSKATGSVNTLYWQDGKLCGTSTDGLGALRNLEEAGIGN

SEQ ID NO: 100424 - protein, 258 aa, Unknown
  Obtained from environmental sample
  DOMAIN (185)...(258): Histidine kinase-, DNA gyrase B-, and HSP90-like ATPase
  misc_feature (1)..(258): Xaa is any amino acid
LNVCKVFNPIIGERTALERKDGRQVSISLNSALIIDSDGKTLGGIQSFDDITEKLESEAELIKTRELALLASRAKSEFLANVSHEIRTPMNAIIGMSELALREPLEPRVRDNVLAIKQAGSNLLGIINDILDLSRIESGKLEIVPSDYELASLFCDACNIMRAKMGDGLSFFASIDGSLPCRLRGDETRVRQVALNVLNNAAKYTKEGHVSFEVTGRRDAVGGFELVMAVSDTGIGIKREDMGRLFGKFTRLDGEKNR

SEQ ID NO: 100425 - protein, 103 aa, Unknown
  Obtained from environmental sample
  misc_feature (1)..(103): Xaa is any amino acid
KPFTECRHFPGQNTLPFHEREFVCTAAKQAFDFIFLDPPFPYQYKWELMARIAASPLVSAETLILLHRPRQDYQKEEIDALIKQDSREYGRSIVDFFKVKAAE

SEQ ID NO: 100426 - protein, 192 aa, Unknown
  Obtained from environmental sample
  misc_feature (1)..(192): Xaa is any amino acid
MSFYEVMRTDTVNYYCLFSEAGIADLKTRITRKNLDAFRSDMEDLFTKPLESVTEKTKPVPDIDRHDYVSLATYFWPDKDNPGGPYVSRDGFVNPEGELFDKDKLKRLAYLSYHGALLYLITGEERYLDLVKRHLYNWFVDREKRMNPHLEYGQFIPGVVKGRAEGIIDYGAGFTYALNMLHLLDKRGGAGD

SEQ ID NO: 100427 - protein, 205 aa, Unknown
  Obtained from environmental sample
  DOMAIN (8)...(184): Nucleotidyl transferase
  misc_feature (1)..(205): Xaa is any amino acid
VARHQDFFINYYARYSDVTVDMANNTVEYRNVRAEPWRVTVLYTGERTMTGGRLLRAREFLGGERFLLTYGDGVSDVDIPAVVACHEAAGKLVTITAVKPAERFGTIAVGGDGAVSAFREKPDNGGVWVSGGFFVMEPGVFDYLTRGDETVLEREPFERLADEGRMNAYKHAGFWHPMDTMHDKNMLTEMWTNAGAPWAHCEKRR

SEQ ID NO: 100428 - protein, 253 aa, Unknown
  Obtained from environmental sample
  misc_feature (1)..(253): Xaa is any amino acid
MGRIIDANLDNVNIEIRSLEGATVTPNVRTRKLGALDTIKQDYELTGMKDGLYNIEIVSTDKAGNISRNSRNFALARETFKNIVEIYYPLDNEKVQNNFNLYGYAGGTDPAVKVTVKINGGDKVEAEVDPVSGFYTIPLTVEHLTEGNNTVVVYSDFGGYGTIQSRAQTLVYAPNGPWVTIDSFKFGDFAYERPYVSGRYGYILSQEDQELLAAKDTDKEIKEAIKKKIPSFVEISFDNGKTFLRQVRRGEKC

SEQ ID NO: 100429 - protein, 160 aa, Unknown
  Obtained from environmental sample
  misc_feature (1)..(160): Xaa is any amino acid
MVKSANDALNEVDAVLYLVEPVKKIAQGDETVLERLSRVESPVFLAINKTDKAEKPDLLAVIDMYCARYSFAEIFPISALKADNTDALLQAVAGRLPEGPMYFPGDMITDQPERRIVAELIREKALTFLQEEIPHGLAVEIAEMRKRDGRELVDVSANIY

SEQ ID NO: 100430 - protein, 155 aa, Unknown
  Obtained from environmental sample
  DOMAIN (2)...(155): Protein of unknown function (DUF1016)
  misc_feature (1)..(155): Xaa is any amino acid
MAKLERWSVRVLDDRINSMLYERTSISKKPKETVKHDLELLKNEQKLTPDLVFRDPYFLDFLGLRDKYSEKDLETAIIVELQNFIIEFGSDFAFMDRQKRISVDNEDYYLDLLFYHRRLRSLVAIELKLGNFKASYKGQMELYLRWLDKNMKLDD

SEQ ID NO: 100431 - protein, 217 aa, Unknown
  Obtained from environmental sample
  DOMAIN (65)...(195): Methionine biosynthesis protein MetW
  misc_feature (1)..(217): Xaa is any amino acid
VRCTACGLVQRNPQPLKEEIIARYSSAYGKDYLSYEIENEAQFLKLQQLALRDAGFFKLEKTLMLRANNNEQPSVLDIGCATGALLDFLRGRGWRVAGVEISPAAQYAENVRKLDIKHLPLEENKFPAESFNVILASHLIEHLNNPRSFLDEVNRVLKRNGHVFITTPNISGFQARFFGGQWRSAIFDHLYLFSVSTLKKLLKNTGFKAERLSTWGG

SEQ ID NO: 100432 - protein, 126 aa, Unknown
  Obtained from environmental sample
  DOMAIN (2)...(126): CTP synthase N-terminus
  misc_feature (1)..(126): Xaa is any amino acid
MNKFIFVSGGVCSSLGKGVAASSIGALLESRGLNVRMVKCDPYINVDAGTMSPYQHGEVYVTDDGAETDLDLGNYARFTKGRLSKANSITTGQVYESVIRKEREGQYLGRCVQVIPHITDEIKSRI

SEQ ID NO: 100433 - protein, 265 aa, Unknown
  Obtained from environmental sample
  misc_feature (1)..(265): Xaa is any amino acid
MPYLFATWTSGVTLYGHGPGDIALGEIRTLNSMERDVLIGLKKTIDPPMNVLSSHRKGFSTRPSARNEVTDISREGSRPAQEINFLPGLQAVSAKVQEVAARVDDMLLGRVFADPYLDQLPQGVTATAILAQRQQKAQMMGPAVSSYETRILVPLIMRFKSLLDEACLLPPLPPALARLQKMPRALLSVDFVSPMQTTLRMDSAQSNLAFAERVGMMAKFDPQALDKLNTDQLIDELARDMGASGSIVRSDPEVARIRQARAEEA

SEQ ID NO: 100434 - protein, 150 aa, Unknown
  Obtained from environmental sample
  misc_feature (1)..(150): Xaa is any amino acid
MARTQTVKKPNFDSVWAALQELAASQKDNDRLMKENAKRQKETDRLIKNNAREIGKLGGRFGEMIEYMVVPNLIAKFKALGFVFDKAHQQTSIEDKKNNIFAEIDITLENGDKVMIIEVKSKPKTEDINEHIKRMEKVRAHADIHNDKRK

SEQ ID NO: 100435 - protein, 227 aa, Unknown
  Obtained from environmental sample
  misc_feature (1)..(227): Xaa is any amino acid
MKLLLPFTRSYREIRRLARENAARAKPLSPTLDFVFKTLFSGKNDDLKARSLLYASRLLESQLGRGERFKDTKRVYVIFFLDFVLFPQSAKVPRRYVFMEETEHDRLNELIEVIYYEMPKTADAVREYFEGKETLKTLPTEQKWCIYFKYRVKEGMEPLIEELRREEEGIMRADRALKKIERDREKRARAIFWDNQRLVYNSDIHAAKEKGREEGRDEGRLKANRNS

SEQ ID NO: 100436 - protein, 305 aa, Unknown
  Obtained from environmental sample
  misc_feature (1)..(305): Xaa is any amino acid
MSGLPRLFSGRIFEECPFIPPEWKSRFKLNIKLRGDDSPLTAENNLILNNVHQIYEKPPPVTTANIIQQILGSVPSKDANKSPDTLLDRLKELDNLLVMNDEAHHVHDDDLKWNESLLSLHETVPGGLKLWLDFSATPKTPDNTYFPWIICDYPLVQAVEDRIVKVPLIVHNVNRKEPVKVTQENFIRVYSPWIDAALARFKEHYDAFKPVGKKPILFIMADKNATADILEKHIIKIGNNYGISSKEIMTIHTDNTGEVKKSDLETLREQARNVDSPENKVKVIVSVLMLREGWDVQNVTIVLGL

SEQ ID NO: 100437 - protein, 296 aa, Unknown
  Obtained from environmental sample
  DOMAIN (236)...(269): Tetratricopeptide repeat
  misc_feature (1)..(296): Xaa is any amino acid
IYGKEHPHYTKLLIDLGRVYRSKGNYTCAEECFLEYKAILEKKLGKEHPDYASSLDNLGKLYESIGNFKQAEECFLEYKSILEKKLGKEHPDYVISLIILGELYQDMGDYKRAEEYLLEVKNIREKVLGKKHPDYISLLNILGELYREKRDFKRAIECYTESKAVLAVEFYLTPNDRWKRKPDIERSDYILLITLLNNLGLLYYELKNYTRAEKYYLESKAIWEKELDKEHLDYYATLLNNLGLLYKSMGKYKQAEECLLESKNIKVNLSRKWHREYITTLNILSWVYLYMKEYKQ

SEQ ID NO: 100438 - protein, 124 aa, Unknown
  Obtained from environmental sample
  DOMAIN (4)...(68): Heavy-metal-associated domain
  misc_feature (1)..(124): Xaa is any amino acid
MQTELSIGGMTCAACSARVERALRKLEGVESAVVNLATERATIVYDTKVLRLSAIKEAVTKAGYQALEFSKDSVDEDKLRKEKEIKILKIKFIIAASLGLPLLYIAMAPMIPWVALPFPKSLNP

SEQ ID NO: 100439 - protein, 176 aa, Unknown
  Obtained from environmental sample
  misc_feature (1)..(176): Xaa is any amino acid
MRTQLKKIALTATFGLAMALNFSCSSDNGGNELGPQPLPVSSSSVATGGSGSSSSTTGNGGSSSSGGGGSPSPSEYTGGSCNASDYGRAEIGGKVWMAKNWGCYASGSKCYDNDPANCTKYGRLYDWATAMALPSKCNTILSTSDADCAITTPHQGICPSGWHIPSDAEWNILIKV

SEQ ID NO: 100440 - protein, 274 aa, Unknown
  Obtained from environmental sample
  misc_feature (1)..(274): Xaa is any amino acid
MGVGRGIRALALLAAFAVVAAAQVRNVAVVETEVDAASGASAGITSAEARLVTTELRREAVKNLPSDKYNIMTSETVMSQGSAVLEECADENCVITLGSKIGADYIVRGIISKLRDKFTLAVEVYETDDGNLVASATPVRSENIEELVEKAAASCAEMYEKFVKAQSSRQKLAMYAFEVSADPAEGGSVVRNPDREEYAAGSKVSVLAAPENGYVFTGWSGALVDTANPMTVTIDAVKTLTANFALQQKGGAEPALAAAPPKTRRMRISAGVGG

SEQ ID NO: 100441 - protein, 239 aa, Unknown
  Obtained from environmental sample
  DOMAIN (7)...(83): Fibronectin type III domain
  misc_feature (1)..(239): Xaa is any amino acid
VTTMTAPGEPHGVTATAKSSDSVVVSWSRVSDADEYYVYRGTSAYGTYAQVGKTTSLSYTDTGLSPSTTYYYKVSASNEAGESGLPYSTYASCTTPKYHVMGTFSDIRDGKVYKTIEIGGQTWMAENLNYTVDGSSWCYDGKKSNCDKYGRLYQWAAAMDIDESYNGRPWEEGSDINHKGVCPTGWHLPSRSEWGDLAKAAGGTGDYGEYGTAGKALRATSGWYRNGTNEFGFRPCPAA

SEQ ID NO: 100442 - protein, 308 aa, Unknown
  Obtained from environmental sample
  DOMAIN (1)...(229): DNA gyrase/topoisomerase IV, subunit A
  misc_feature (1)..(308): Xaa is any amino acid
GSKRILITELPFGSNTESLINSVETAAKTGRLKIQGINDFTTDKVEIEVKLARGVYAQETIDALFAFTECQQSISVNLLVIRDGLPAIMTVTEVIQHHAKQLVKILTKELELEKKELTDKLHLRTLERIFIEERIYKGIEKMKTAKGVQEAVISGFKPFMKEIGPRGVSDDDVDHLLRIPIRRISLYDINRAHDEMLQIQTRIKEINAHLKNITAYSINFLKGIIAKIQANEELGHGARKTKVGAFEKIDVKEAVRKDVELKYDKQTGYMGTNVAGLKVAEVSPFDRILAIRKNGMYTVTDLPDKLFI

SEQ ID NO: 100443 - protein, 274 aa, Unknown
  Obtained from environmental sample
  misc_feature (1)..(274): Xaa is any amino acid
MERAFASFTALALSLNIPALKVLETIGFDAAINRSAALLDITDPAKIRSTFPRYFPMGLGIISVSPMQMARAFSVFANQGRNVTPIAIRTVEDRNGRVVFDIERDVRQKQRRLPNNGQVVSPQNAYVMTRMMEFVVTGGTLAYGTNSGTKLTYKDSDGKTFKMPLAGKSGTTQNWSDAWVVGYTPYYTTAMWYGFDKPGNSLGISQTGEMLTSPLWGNYMHDIHAGLPQKNFSRPSGVADAAVCRGSGLLMTDACTQGAVYLPFLAGTVPARYC

SEQ ID NO: 100444 - protein, 190 aa, Unknown
  Obtained from environmental sample
  misc_feature (1)..(190): Xaa is any amino acid
EAARYKEMANNRNQNPLRRSPHFFDTLWRINNRSEADQRVKTIRFLGKSVNVHYLIMENLALVEEQILAAAKADPQVQSWINGINTLEGWTWRDIAQTQSRSFHAYGLAIDLLPKSLGGKATYWLWAAEKKPEWWNISYNERYHPPAAVIKAFETYGFIWGGKWLYFDTMHFEYRPEILILGGITPETRR

SEQ ID NO: 100445 - protein, 231 aa, Unknown
  Obtained from environmental sample
  misc_feature (1)..(231): Xaa is any amino acid
LVRNPFDRFQVSKVPLLPSVVDAIVFWTKNPAPMLTRLGYLKDYMYYFQFTITLYGSDVEPNLPSKKSEILPTFKRLSDTIGPDRVIWRYDPILVNEKYPLDFHIGAFGKMAHELRGYTKRATISFIDVGYRMVKRNMKELKSIPPEMQIELASKLAEIAQGSGFAIDTCAEKIDLQHFGIDRARCIDDRLLERLLGRNLHLGKDKAQRKECGCVSSVDHWRVRHLQKRLP

SEQ ID NO: 100446 - protein, 188 aa, Unknown
  Obtained from environmental sample
  misc_feature (1)..(188): Xaa is any amino acid
MTLDRYLLKHFFPVFLAGLILFAMMVLMIDLFLNLTRYLSNGAAFSAVMKVTLFFVPKSLSYALPVSLLFASAYTLGDLSSKNELTAILGSGIPFWRFCLPLMALGVAVSVFAFFFEDRAVIPTLRQKNQMSRELLSTNTESLSSIVIKAEEGRLIYAVDYYDISTQSLNGITIIELDKERQLLSMIY

SEQ ID NO: 100447 - protein, 141 aa, Unknown
  Obtained from environmental sample
  DOMAIN (86)...(141): Surface presentation of antigens (SPOA) protein
  misc_feature (1)..(141): Xaa is any amino acid
MSDEISQDDLAAQWAAALDGGGKGGKGGGKQDKLAAEWAAALASDEQQSVTEEKRRETLRPQAMDAKFKDMTDISRAPRADPARRELDFILDIPLDVSAELGRTRLLINELLQLGQGSVVELNKLAGEPLEVYVNGKLVAR

SEQ ID NO: 100448 - protein, 79 aa, Unknown
  Obtained from environmental sample
  DOMAIN (1)...(73): Hpt domain
  misc_feature (1)..(79): Xaa is any amino acid
IQMGQQIRAAMDAGDKDTAIRLVHTLKGLAATLGAPELSSVALAVEQILRSSGTLPGGGMDTLEAELGLVLAAIEARLA

SEQ ID NO: 100449 - protein, 206 aa, Unknown
  Obtained from environmental sample
  DOMAIN (8)...(135): Miro-like protein
  misc_feature (1)..(206): Xaa is any amino acid
MTAYRCGRVAIVGPPNAGKSTLINALVGQKVAIVTAKPQTTRNRILGIMTDARAQIIFMDTPGIHSQRGQARGHLGKLMLQAAWQSLHEADSVMLVLDGDLYLRKPELLERDISPLSALRGDGVPPLFIALNKIDLFHDKSRMLPLLENLQESFARAEIFPVSALLQDGVERLRDLIGTRLPEAAAQFPEDQLTTAPMRFMAAELI

SEQ ID NO: 100450 - protein, 290 aa, Unknown
  Obtained from environmental sample
  misc_feature (1)..(290): Xaa is any amino acid
GAENVKLIYRRTITEMPADEAEIEEAQLEGIEFLVLNNPLSVSESGGKVTMKLTKMKLGESDASGRRSPRPVAGSEYNIEVDYVISAIGQTQDLSFINNECNVSTNRDCLVIDKNTSMTGIEGVFAAGDGVTGPKTAIMAIAGGKKAAMAMSQYMLGQTIAVEQEPYHHVKAKDYKDIDPASFVNEKGSSVEKIEKVQMPMLSKEQRDNNFNEVELGFSEEEAKKEASRCLSCGCADADECKLRKYAALYGADQDALSGEQTTHPIDDSHRYIVRDRNKCILCARCVRIC

SEQ ID NO: 100451 - protein, 240 aa, Unknown
  Obtained from environmental sample
  misc_feature (1)..(240): Xaa is any amino acid
MVILLLFLRNIKATVIIGLSIPISMLLTLMSMSIFGFTLNLMTMTGLIMGMGMTLDASIVILENIHSYRERGAKSSVAAILGSREMLRAITASTATTLCVFIPLIIYKNDLKEMGLMFNDLIFTVVITLTVSIVVAVTLVPSLSGSILKLDTRIQKPIKNKILRIIDEKIEAALVFLEKNYRIALDYCLSHRLIIIALVVLILVFSLLQFSGIGMNMYVRMRTDDNVTLNVAMPRGTAMT

SEQ ID NO: 100452 - protein, 198 aa, Unknown
  Obtained from environmental sample
  misc_feature (1)..(198): Xaa is any amino acid
MVHACRAVPVTNIVIALTGSGEFSGEAASPVRHPARAGVVSAAGVALDIGTTTVSAKLVDLDASEDLDIISQLNDQRVFGADVMSRIGAARNGKTGELFALINRQTQRLLETFMERWGLSRIEKLAVSGNTTMLHLFLNVDPSGMGELPFTPAFLEGRKVKGEELSLSAGTVETLPSIAAFIGADITAGLAALDILNI

SEQ ID NO: 100453 - protein, 269 aa, Unknown
  Obtained from environmental sample
  misc_feature (1)..(269): Xaa is any amino acid
LPVRQPLDEKLQPLINATKVAATKVASNPLMLGVSVSIWNHTATLELLRELEKLWEGQRPVIVLGGPEVSHLPQEAEIFRYADYVIRGEGEDAFRVLCEHILAERHEHSGTTTFINAENADISGIKNGYDFYTDEDVTKKLIYVEASRGCPFNCEFCLSSIKSGEDLKVREFPLEPFLAQMDGLVSRGVKTFKFLDRTFNININRACRIMEFFLEKIAQKNEIVVHFEMVPSLFPSALRETLSRFPPGTLRLEIGIQTLNPDIAARITA

SEQ ID NO: 100454 - protein, 112 aa, Unknown
  Obtained from environmental sample
  DOMAIN (1)...(88): ArsC family
  misc_feature (1)..(112): Xaa is any amino acid
TIIHYLETPPTRDELVKLIADMGISVRALLRKNVEPYEELGLAEDKFTDDRLIDFMLQHPILINRPIVVTPLGTRLCRPSEVVLEILPDAQKGAFSKEDGEKVVDEAGKRLK

SEQ ID NO: 100455 - protein, 85 aa, Unknown
  Obtained from environmental sample
  DOMAIN (7)...(84): Bacterial DNA-binding protein
  misc_feature (1)..(85): Xaa is any amino acid
MKGIVNVTKRDLVNDISSRTGLPQIETKKIVECFLDSVARSLIEGNNIEIRGFGRFKIRNRNGYKARNPRTGEPIEIEAGKKPGI

SEQ ID NO: 100456 - protein, 292 aa, Unknown
  Obtained from environmental sample
  DOMAIN (1)...(291): DNA topoisomerase
  misc_feature (1)..(292): Xaa is any amino acid
IDSVDVTSKEKKIKPPKLLNITALQKEAFKRYGFKPEETLNIAQSLYETHKCLSYPRTPSRVMGDNNAALFLEKFALLKDESSLSDFSDPILINMDNKHIFDSSRLEDHHALIPLDKIPDSAGEKERKVYSIVLESFFIVCMNDCVYNEKSLQFHISTYLFSSKIRETIRKGWKEAVREQKNENDEEEEEEVPFFDESACSLSALKILEKLTKPNREFAIDTLLAFMERPKSSADDGLKLSGLGTPATRAEIIKKLFSGQYLREDKKGLFVTERGLFLLKALLEKCPLKKMA

SEQ ID NO: 100457 - protein, 94 aa, Unknown
  Obtained from environmental sample
  misc_feature (1)..(94): Xaa is any amino acid
MDSAIQIAAERLLNLTIDQDVIDAYDRMFMASCDRTSEINCAHSKGMEKGIKKGMEKEKILIAKNMLNKGSSIEFVHEITGLSLEKISALNANL

SEQ ID NO: 100458 - protein, 198 aa, Unknown
  Obtained from environmental sample
  DOMAIN (1)...(196): Uncharacterized protein family UPF0027
  misc_feature (1)..(198): Xaa is any amino acid
EQEIESAIVRLKEEGAGRLPVPEDLAYVEGGLFDDYIHDMKIIQRFASLNRKAMVDIIVTRLGLTKRNEFTTIHNYIDTDEMILRKGAVSAKRGEKLLIPINMRDGSLICIGRGNDDWNQSAPHGAGRIMSRSAAYKNLSLEDYKSEMAGIFTTCISRSTLDEAPMAYKTMDSIVRNIDETAEIISRIKPVYNFKAGE

SEQ ID NO: 100459 - protein, 165 aa, Unknown
  Obtained from environmental sample
  DOMAIN (10)...(165): CTP synthase N-terminus
  misc_feature (1)..(165): Xaa is any amino acid
MSDDCYNGKSKFIFITGGVLSGLGKGVAAASIGALLSRFRVVPVKCDGYLNVDPGTMNPIEHGEVFVLDDGGEVDMDFGHYERFLGINAKSEWNLTMGKVFSTLMEREKQGIYAGSTIQFIPHVTDVIKDHFFRISSKENADILLVEIGGTVGDLENEFYIEAAR

SEQ ID NO: 100460 - protein, 258 aa, Unknown
  Obtained from environmental sample
  DOMAIN (140)...(244): Glycosyl hydrolases family 2, immunoglobulin-like beta-sandwich domain
  misc_feature (1)..(258): Xaa is any amino acid
MPDFCDCTWKNVNLPHDWVISQPFNRGEQGGWTPQNMQGFFEWEGVCWYRKEFLLSGIVGKAVYVYFGGAYRNSKVYVNGKEAGGRASGYSSFEIDITEFVKEGKNLLAVRLDNGCEVPDRWYSGSGLYRNVLLKILPVTHIKTWGVQVDVKQNDVIVTATIVSRDKSAKGNVAAQILKPDGSLAAKSTVPFDMNGKNEIAVKQKLNVKNPSFWSSENPNLYRAVINLETGKEGMSTEVKLGFRTVKIEYKKGMTVNG

SEQ ID NO: 100461 - protein, 284 aa, Unknown
  Obtained from environmental sample
  DOMAIN (40)...(279): Ribosomal RNA adenine dimethylase
  misc_feature (1)..(284): Xaa is any amino acid
NSIMAGLEARDYRRTTGAFRMTIPNFNSAADLREFLDEQALGMRKKFGQNFLINPAIRQALADALEAEEGESVWEVGAGLGAMTSLLLEKGLRVRTFEIDQGFIGLLKEFFSANKNFTLIEGDVLKTWPEQPPARYFLGNLPYNIAATLIADLIIKKRFFSRMVVTVQREVAMRMAAAPGSPEYSSFSVLCASTYDVQPLMIIKNASFYPRPNVDSQAVLLELRDGAADYALPPCFHSLLRSLFSSRRKTIKNNLAAFIASRGKCTVSLQLVLEDIFAKSDLYG

SEQ ID NO: 100462 - protein, 178 aa, Unknown
  Obtained from environmental sample
  DOMAIN (87)...(178): RNA pseudouridylate synthase
  misc_feature (1)..(178): Xaa is any amino acid
MPSFIITVNDTGPAELRLDRYIAENLRLLSRSQIKARKLEALVNGKAVKISRIIKDGDKIELSWNETEPVNLVPENIPLDILFENSRVVVINKPQGMVVHPGAGNRQGTLANALYHRRLELCRVTEGGAQGIGPCPMPGLRTGIVHRLDKDTSGVIIAAWDDEALAFLAEQFKSRKAK

SEQ ID NO: 100463 - protein, 257 aa, Unknown
  Obtained from environmental sample
  misc_feature (1)..(257): Xaa is any amino acid
GITAGCMALKYWPDALKTEAACLAAVVLDESAWGYIPEHLKGSVDAAIKNGGFEGIFANLPEEFSTEKFWHEAVIKHAWALKYVPEKWKTTDLYLAAMRYEYVDTNAAAAYQRTQFRYYLNRVPEELRTEAVCLAAVQQDGWALEHVPETLKTEALCLTAVQNGPYDTALRFVPEALRTEVICLAAVKRNGYALEYVPEALKTEALYLTAVQQDGGALKFVPEAQKTEAVCLAAVKNDRRALEYVPEALRNKVKAAL

SEQ ID NO: 100464 - protein, 214 aa, Unknown
  Obtained from environmental sample
  DOMAIN (1)...(93): KDPG and KHG aldolase
  misc_feature (1)..(214): Xaa is any amino acid
VAPGCANPSDIEQALEFGLEAVKFFPAEQAGGIEYIKAISAPYPNMKFIPTGGINAVNIAKYISFDKTLACGTSWIASADLINAGNFERITALSKEAVLGMLGFSVSHIGINSPNEPEAIKAAELFNRLFGHPLKHGNSSVFTGENIEFLKTSAPGARGHIAIKTNSLSRAIAYLERAGIAFDYGSATKDPKGNITALYLKEEILGFALHLVRG

SEQ ID NO: 100465 - protein, 57 aa, Unknown
  Obtained from environmental sample
  misc_feature (1)..(57): Xaa is any amino acid
MQGTDDIRWLQRFDSYKKALAVLERSVLAAQQRKLNEIEEQGLIQGFEFTFELSWKL

SEQ ID NO: 100466 - protein, 226 aa, Unknown
  Obtained from environmental sample
  misc_feature (1)..(226): Xaa is any amino acid
MRKLHQKQILDLLKTLDKAIDEIKRLLKNNQTPAAINLLADCQDSAVNIGEFIEEMQGEGTKTVGLLVEFSEMLYKASTEINDESTRNKFANQLQDKLRLIKNSVNNELKPDKIEIAFFPYKASMWDSLESIYLAAKDDPACDAYVVPIPYYDRLPGGAFGQMHYEGMEYPSNIPITDWQAYNVEERKPDIIFVHNPYDANNYVTSVHPNFYCERLKDFTDCLVYV

SEQ ID NO: 100467 - protein, 269 aa, Unknown
  Obtained from environmental sample
  misc_feature (1)..(269): Xaa is any amino acid
MANKIAEYDIQKKTIAYITYGNIKCDESFVVALNYGKYIFFPPLRYKAIMRLDTESKEIVFFDDWLEPLRLLTTDEKQPFFGIHLRISENTFMLAACGANAVIEFNMETLKSKIYEVGQKGYQYSGICFDGKDYWLSPRYDGPIVKWNPDVGVIKEFENVLDGCLQNNISFRSIIFCEGYVWLFPERSKQTLRINVETNEVFKVKELKPNFVENEPRMSSVAYTCVQSIGNVIYAYEGKEGTFVEYDCKTQKKREKILKYSSLILEKIF

SEQ ID NO: 100468 - protein, 224 aa, Unknown
  Obtained from environmental sample
  misc_feature (1)..(224): Xaa is any amino acid
MSKDIWLPKGYKLADDAKIQGLLFSGDDWQIFAIGATAAILLARCELARRWCGLGLLETSMLSELRFGAELFYTLSSHQKFLLCPVAGSKSPDSKADAIAFALALKESRRITATTSFHDAIYVEQYSRLLPSWSVTPQMDDELLLGTWLSGGVAVSTNSFRRLHHLTGWMPAGDLADIIKAAGLYVPEDSAFLIKGKPSRNDKQAAAVAESPQSGVRQPETVHG

SEQ ID NO: 100469 - protein, 289 aa, Unknown
  Obtained from environmental sample
  DOMAIN (49)...(127): Bacterial Ig-like domain (group 2)
  misc_feature (1)..(289): Xaa is any amino acid
IWRSSNNAVVTVTGDGNIIGLSAGTATITATTQDGNMTAQCVVTVMVMNVTGVTLNKTTMALVARDQEQLIATIQPANATNKNVGWTSSNNAIATVSNDGLVTGVGGGTALITAATQDGNKTAQCAVTVTTVAVGGVSLDKAMMSVSVGDQEQLTASILPSNATNQTLVWTSSNNAVASVSGVGLVGLVAGKSIGTAEITVTTQDGNKTAKCTVNVAASGFNAVSAANNHSLAIKADGSLWAWGRNNNGQVGDGTKTDRYVPARVGTDKDWADIMASGTHVHGWSRSHA

SEQ ID NO: 100470 - protein, 271 aa, Unknown
  Obtained from environmental sample
  misc_feature (1)..(271): Xaa is any amino acid
LEQKSRFIESVILGIPIPPIFVGQDENGKWEVIDGLQRVSTLLNLMGLLKDENNETIKSFVLSKTKLLPSLEKNTWIKQDNALELPTEIKLLLKRARLDINIILENNTGSTKYELFQRLNTGGSLATNQEIRNCLLIMVNKKFYTWFSALKDDNNFINSVSLSERLFVEQYDLELITRFLVLKNINIEILPKIGDLSSFLDDEIIKLAVNKLFDYEKEEKIFKKIFERLYTALQDETFKRYDTKKQKTVGAFIISVFEIMALGFAFHYDKI

SEQ ID NO: 100471 - protein, 276 aa, Unknown
  Obtained from environmental sample
  DOMAIN (58)...(206): FtsH Extracellular
  misc_feature (1)..(276): Xaa is any amino acid
MSDNSGNNNKGGPQFPFGGPNFPDFKPSGGWKYFLIYSAVILIGITLFNYVFLNKSNSAIDFSEFKARIASGEIKRVELTDAYFTGYTSASKRDSSLSRLARSSYAAVQDKVYRTVSIYDQDFIKLMDEKNVAYGAVPREGGALLSSIISWVLPIAIFIFLWRFVLKRIGNIGGNVLSVGQNRAVIVAEGDIVTRFSDVAGVDEAKEELFEVVDFLKNPQKYKDIGGKIPKGVLLVGPPGTGKTLLARAVAGEAGVSFFRMSGADFVEMFVGVGAA

SEQ ID NO: 100472 - protein, 210 aa, Unknown
  Obtained from environmental sample
  DOMAIN (7)...(209): NAD dependent epimerase/dehydratase family
  misc_feature (1)..(210): Xaa is any amino acid
MNKNAKIYVAGHRGLVGGAIVRKLQTEGYTNLLLRSHTELDLLDQAQVNAFFEKEKPEFVFLAAAKVGGIGANSTYPADFIYQNTIIGFNVVHAAYKNNVKKLVNLGSSCIYPKLAPQPMKEEYLLSDLLEPTNEAYAIAKINVIKLCTFYNKQYGTNYLSVMPTNLYGPGDNYDPNGSHVLPALIRKFHEAKVSGADRVILWGDGSPRR

SEQ ID NO: 100473 - protein, 88 aa, Unknown
  Obtained from environmental sample
  misc_feature (1)..(88): Xaa is any amino acid
VWEGKGVEEKGKNKTDGKVLVEIDPRYFRPAEVDLLIGDPSKAKAKLGWEPKVKLPELVKMMMEYDIELARREVHLKEGGYKTENYYE

SEQ ID NO: 100474 - protein, 241 aa, Unknown
  Obtained from environmental sample
  misc_feature (1)..(241): Xaa is any amino acid
EKTYKSSALQLLKKEHDKYIIYGGYPAVILEEKIEGKKDILTDIRDSFVKKDILESGIKNEIEFYKLFRILAAQTGNLLNVNELSKTLQIKHETAENYLYVLQKCFHIALVRPYSKNIRSELTKMSKVYLLDTGMMNVLTNNFQPLNEKINKGNYWENIYFRRIAELYGMSNINFWRTTSGNEVDFIIHETGKPSHAVEIKYNNEKINETKYKKFREDYPEIGLSFAYYEPFSEDFFRIGI

SEQ ID NO: 100475 - protein, 135 aa, Unknown
  Obtained from environmental sample
  misc_feature (1)..(135): Xaa is any amino acid
VFDFEIARYLYRVAFLYEKIHNSPYKARAYFKAALAVDGYSKNIIRLYYEGKLQSLPSIGVSIENNICEIIRTGQLSLISRLLGDIPDTIFELYEHANIKDKLFKILISHKIFSFSQISNIHEQHVDYLTLSENT

SEQ ID NO: 100476 - protein, 285 aa, Unknown
  Obtained from environmental sample
  DOMAIN (63)...(176): Response regulator receiver domain
  misc_feature (1)..(285): Xaa is any amino acid
MNGEIVVESQPNKGSVFTVRLLQKRLGNAVCGEENVRQLREFDFPSTAIARKTQIVREYMPYGSVLVVDDVKSNLFVARGLLALYGLNIDAVDSGEKAIKKIKDGNIYDIIFMDHLMPVMDGIETTKVIRGMGYDHSIVALTANAIVGQAELFMQNGFNAFISKPIDSHKLNDVLNEFIRDKKPPEVVEAARNKQLTKESNGKEGLKGKNEKNSELENFFLIDAQNVVNNLEKIYANISVLGEKDIESYEINVHSMKSALANIGETKVSNTAYKLENSAKNKNLA

SEQ ID NO: 100477 - protein, 286 aa, Unknown
  Obtained from environmental sample
  DOMAIN (27)...(286): Glycosyl hydrolases family 38 C-terminal domain
  misc_feature (1)..(286): Xaa is any amino acid
KILTKLAQAGDSGKRRLVKAMYTSDNMAVFVFNDLSWERETAVTISEDLAGKAAALQSADGAVYPVQRYIDHDGNMQAVFFPKTPSMGWTRLAVLKDINEEKSPFFWKNNILETPFYTITFDTEGRITSLKDQRQGREMVAPGGVFNALITAEDARDAWDIDADWIKHIRQETRLVSTEITAYGPVCFRLRRTYEIGEASRLVQDMVCYAGDPRIDFDTKVNWHEKWRLLKAEFDTAIDAVQVRCELQYGHILRNTHRGLMQDHPSFEICAHKWISLEEEGTGIAL

SEQ ID NO: 100478 - protein, 92 aa, Unknown
  Obtained from environmental sample
  misc_feature (1)..(92): Xaa is any amino acid
LTLARDWGFKTAERPLSIDELLAAGRDGRLKEAFGTGTACVISPVGRLRYREEEVTVGEGGIGPLTQRLYDEILGLQVGDRPDPYNWVTLLQ

SEQ ID NO: 100479 - protein, 239 aa, Unknown
  Obtained from environmental sample
  DOMAIN (6)...(239): Pyridoxal-phosphate dependent enzyme
  misc_feature (1)..(239): Xaa is any amino acid
MTSCSILDAVGNTPIIELKRVSADLNGVSVFAKAEYFNPSGSVKDRAARAMLLHGISTGQLKKGKTILDSTSGNTGIAYAMFGAALGYKVELFMPSNASAERKKIIKAYGAKIVETDPLEGSDGAYRAVIERAASDPEKFFFPNQYDNFENPRAHYETTGVELYKQCEPTHFVAGTGTSGTFMGTSKRLKEYDPSIHITLMQPNSPFHGLEGMKHMGATIKPKIFDESVADSRVEMEPK

SEQ ID NO: 100480 - protein, 279 aa, Unknown
  Obtained from environmental sample
  DOMAIN (52)...(118): His Kinase A (phosphoacceptor) domain
  misc_feature (1)..(279): Xaa is any amino acid
GGEPFIARVHTINTNFKGTLASLGVIEDATAEQEYKEKLRNIAIQEQEANQLKSRFLATMSHEIRTPMNVITGITEIQLQREDNPPDTKDAFEKIYESGSLLLNIINDILDFSKITEGKMEIVPFQYDIPSLINDTVQLNYLFCDSKPIKFIVSVDPYTPLELVGDALRVKQILNNLLSNAFKYTDEGEIELSVFTEASASSAEEVIIIFRVRDTGQGISHEHIGRLFEEYMRFNSDVNRTITGTGLGLNITKRLLDLMNGEISVESELGSGSLFTVRL

SEQ ID NO: 100481 - protein, 296 aa, Unknown
  Obtained from environmental sample
  misc_feature (1)..(296): Xaa is any amino acid
YIDASGKTRTTSGTVTVINSNGGARTLSAGWYLMRGTFTNEETITVNGIVHLILENNSNVTVNGSSFNAGINVSDGNSLSIYAQSTGSNMGKLTATGGFGGAGIGGGGGEFLSNGNGNSGEINIIGGNITATGGASGAGIGGGDKGSSAKITISGGTITATGNSGAGIGGGNANSDGGTITISGGTVTATCDGSSNWGGAGIGGGGSRGNGGTITISGGTVTATSYSFIDSFAMGIGGGYGSYGGTITISGGTVTTNGRIGGYINISGGTVTANDGIGGNEVTITGGMIDAISGSG

SEQ ID NO: 100482 - protein, 171 aa, Unknown
  Obtained from environmental sample
  misc_feature (1)..(171): Xaa is any amino acid
MIRINKTYADYYDAADTAYPGGKAVDATGVEGVDGTPIKADLVNDIYGFLQALVKKACGEEPFQVTGEPDNAENSDGLNAILKIIQRHICGHTHAGSSKDAQPIASAGIAANAVTSEKILNENVTTDKIANNAVGTTKINDSAVTAAKIAANAVETTKINDSAVTAAKIAA

SEQ ID NO: 100483 - protein, 145 aa, Unknown
  Obtained from environmental sample
  DOMAIN (1)...(73): Mur ligase family, glutamate ligase domain
  misc_feature (1)..(145): Xaa is any amino acid
MDDYGHHPTAIKTTLAGIKSFYPNRRLIVSFMSHTYTRTSALLDKFSKCFNDADILYLHKIYASARENYKGGVNGRTLYEKTAEVRAVAGKGQTFYVDEIDDAFHPLCETLKSGDIFITLGAGNNWPLGVKLFKYFSSKNGEKHG

SEQ ID NO: 100484 - protein, 150 aa, Unknown
  Obtained from environmental sample
  DOMAIN (5)...(150): YicC-like family, N-terminal region
  misc_feature (1)..(150): Xaa is any amino acid
MGKNMVSMTGYAYREKSGQDFSVSVEIKGCNGRYLEISVNLPPWLSTLETKIREKISSNCGRGKADVFIRIREHNTPVSISVNKNAAKAYYNAISEMARELGIKEKPALSTILGMESVLEIEKNRDDERYWREIEPLLNEAVQGFCEERE

SEQ ID NO: 100485 - protein, 119 aa, Unknown
  Obtained from environmental sample
  misc_feature (1)..(119): Xaa is any amino acid
MLNPNYREINAEEQIQRADSVFSFYQTLIQLRKRLDIITLGSFELLLPDDPHFFVYTRRYGQEELLVVCNFSSQERPFVLPERFKEADLLLSNEKTPILGSFGMAVYYQAMRAPRGMKE

SEQ ID NO: 100486 - protein, 91 aa, Unknown
  Obtained from environmental sample
  DOMAIN (12)...(89): HPr Serine kinase N terminus
  misc_feature (1)..(91): Xaa is any amino acid
MDDVRFTVLDLIDIDLKDRNSLNLHCIGGRKGLARKISIPDLNRPMGAIMGFYEDFAYQRVQVFGRGEVAYLRRLKNSGEFGTIRDLFNYP

SEQ ID NO: 100487 - protein, 292 aa, Unknown
  Obtained from environmental sample
  DOMAIN (71)...(149): Fibronectin type III domain
  misc_feature (1)..(292): Xaa is any amino acid
ASGYTLYRSSAYDGDIYIFRTSASSPSYADAGLAAGAYFYQVRAYNGEGDGYISLPWGPVDVVTSGGLPAPAKPQNLRATVQYAAESAVVTLTWNAAANANSYTVYRSLDDELYERIGQTSSTTYSDTGARSGEAYFYRVRGNNGAQEGYLSESCGPVLLRPGKPQISVAVVGKTAVISWAAVRGAVVYFVYRSTDGVQFRLITERGISGVSHSDSEMAAGTCYYRVEASNAAGRGVPSESRQTAVTANAALPVISSHPVGGTYLPNVPANPLLVHASVSDGGSLTYQWYRN

SEQ ID NO: 100488 - protein, 219 aa, Unknown
  Obtained from environmental sample
  misc_feature (1)..(219): Xaa is any amino acid
MSESLRNDGRIWVPKKKEDAEAIRAGKLKPTDLTEENRDYYLERRYPAFGNLVPRDVASRAAKERCDAGFGVGSTGLAVYLDFSAAIKRLGIKTVEERYGNLFQMYEKIVDENPYETPMMIYPAIHYTMGGIWVDYELQTSISGLFAIGEANFSDHGANRLGASALMQGLADGYLVLPYTIQNYLADQIQVPRISVDSPEFNEAEKNITDKISKLMSIQ

SEQ ID NO: 100489 - protein, 294 aa, Unknown
  Obtained from environmental sample
  DOMAIN (175)...(292): Ferrous iron transport protein B
  misc_feature (1)..(294): Xaa is any amino acid
MPERMDIVDLPGIYSLSPYTPEEVISRKFVLESKPDCIINIVDATNLERNLYLTTQLLELDIPVVIALNFMDIVEKSGDKLDKNKLQTAIGVPVIEISALRGKGIHALAEAAYRASKEARSGFSVIEGSSASTLYGRIFSLLQDVKADNASFRAVKIIENDGLEAATFPAIATKCAELKASIDTGIFEGDYEGIVADARYKYIEREYMPALVRLGEVHALTASDKIDRVMTHKAWGIPLFLLIMLAVFHMTFSENFLMLGLFIPQGSFDIPVIGMDAINSPGVMLKEAIQLLTS

SEQ ID NO: 100490 - protein, 292 aa, Unknown
  Obtained from environmental sample
  misc_feature (1)..(292): Xaa is any amino acid
SDSAIKLQQNELVASLKEFRETSDSAIKLQQNELSTSLKNIKDTSNAAVRQQHDELSAAIKDLKDASDSAIKLQQNELETSLKNIKDTSNAAVRQQHDELSAAIKDLKDASDSAIKLQQDELTSTFNEFKEKTNSTIRLHQSEQEAAVREYREKSDAAITGQKDELNSALNRQIETWKKICSDAEHKIVSDNEKRLDEYSKSHAEAFKQLTNLADDAAKLESELRLSMQEAISRVKSDFAVFEKESAASRDAEAAAFNAQTQSLRKEIEETNKELEGLRKQSHDNLTEKLTA

SEQ ID NO: 100491 - protein, 176 aa, Unknown
  Obtained from environmental sample
  DOMAIN (20)...(176): Polyprenyl synthetase
  misc_feature (1)..(176): Xaa is any amino acid
VPVEAWLHSGLKGGGVPLRLRAAMKYSLLAGGKRVRPVLCLTTAEMFGVNLHHVLPFACALEMIHTYSLIHDDLPCMDDDDMRRGRPACHKAFDEATALLAGDALLTDAFWCMSRSAVFLAEDRVLAAMREAAVAAGGRGMAGGQMLDLEGVAASDPAALSALQRVHALKTGAMIR

SEQ ID NO: 100492 - protein, 271 aa, Unknown
  Obtained from environmental sample
  DOMAIN (2)...(242): Peptidase M16C associated
  misc_feature (1)..(271): Xaa is any amino acid
EQGLSDAEKNRITEKSAALEKIQSESDSPEALATIPHLSRGDLSPEPEMIPRSLEDLQGIPALCHDLYTNGITYIDLAFPLDILPPEYYPWLPFFARAAISVGLPGMDYGEVSSLLARTVGGFNAILHTGSAAPGTDSPVIQTLAGEFALAGRDWIIYRIKCLDEKTASALDIIQRLIHEADFSDIRRIRDLVLEMKNDLRSGFAPGGHSYASCRAGRFSSPSAQITETWNGISQLEFAHRLAELDTAEAAAKLQYLREAIASGGFIVNMS

SEQ ID NO: 100493 - protein, 303 aa, Unknown
  Obtained from environmental sample
  DOMAIN (213)...(303): Beta-galactosidase trimerisation domain
  misc_feature (1)..(303): Xaa is any amino acid
SFWGHTYYDWDEIVSPSQLSEEWPVNRTICQIHSIDYRRFNSDSLLDCCLAEMEVLKEITPQIPVTTNMMATFWDLDYFKWGKNLDFISWDNYPSPGTPYTRTAMNHSLMRGCGGGKPYYLMEQTPSVTNWQPYNSLKRPGIMRLWSYQALAHGSDTVMFFQMRRSRGCCEKFHGAIIDHCGHENTRVFREAAVMGAELKKLGDAFLGSRLVSEAAILFDWDNWWATSFSAGPTRDMNYIEEIFRFYDALARQNISTDIIGLETPLDGYKLLFAPVLYMIKPGITEKLTSFVSNGSILVTTYF

SEQ ID NO: 100494 - protein, 215 aa, Unknown
  Obtained from environmental sample
  misc_feature (1)..(215): Xaa is any amino acid
MDNQILRKLFEVTIRSAEILKTTDNDTELFRSIYKRIPEPVIHSNETIREWNEEYEEAEPGHRHFSNLFALWPAGTITPDETPQLAVAARKTLERRLAHSGGHTGWSRAWLINFMARLRDGQTALENLNALFTEFTLPNLFNNGPPFQIDGNFGALSGITQMLIQSRIRYGGENFTVLLDILPAVPENWSKGQLNGVRVKGNLEVDFNWPDKRLN

SEQ ID NO: 100495 - protein, 275 aa, Unknown
  Obtained from environmental sample
  misc_feature (1)..(275): Xaa is any amino acid
MKAFTERDPDGNGRNDTWGFGGGTFDIVNNSEGFGTRFDPFFGAFGVEGTWNLTRAGAGLNVRKPAYFDALTYIKRMVDEKVIDPNWVSYSKDDFRAAWKQGRFGVMREQNAAYAASGNYDPFDNNFPNGEWIVIDPPKGPSGKQSVGVYTQGYRIYCISKKAADAGKGPAIARLLEWMSSDEGYFLLGWGERGVNYVIGADGAPTTNGIPDATKAWDKAPNLSLTQLRNMVFYNGEMELLARYPTWKAPKSGKEMSALKFFLICRVGPGQPISA

SEQ ID NO: 100496 - protein, 242 aa, Unknown
  Obtained from environmental sample
  DOMAIN (88)...(240): Phage integrase family
  misc_feature (1)..(242): Xaa is any amino acid
EHTRRAYRAGLERLDAWAAAQGINPLEMTPAQSDDFIYSLRGRSAASVRLDVAAASSFFTWMHRRHNAIDNPFRGSKARPAKKSVKEVNSPQSAEEIETIIRELPASLAAAAAIMVYRGLRAGALPTLSITGGKFTGYSKGKPIQGKLPPEALAAIKAASLPLRGPFAGVLPNTLEKQIARAIKKLYQAGKVKATYSAHDLRHYYAITEYRKDRDIRRVSKLLGHASIQITQNYLEGLGEVE

SEQ ID NO: 100497 - protein, 276 aa, Unknown
  Obtained from environmental sample
  misc_feature (1)..(276): Xaa is any amino acid
MALDWKVFVNFGGKDEISGAVDNTRKSTEKAGKGIGDNLSETGKKADTLKEKIGGIGDIAKGVALGNLIAKGIESAISGMKNLVTSVNEFAARAAAAGKEASKIGLSAEGFQKLAYAASQSNVPAEKLSGAFNVLNKNLGQFQLGSGNLYKHLKENDKALYDQVRAAKTNTEVFGMLADAISRETDIGKRAALGNAALGKSWAELYSLLAQGAEGIKAAGDAIPDLITDRQVAMANAWNGTWTEIKRSIQGFCDIIRSAVIQYVGPYVLALKDWIA

SEQ ID NO: 100498 - protein, 280 aa, Unknown
  Obtained from environmental sample
  DOMAIN (112)...(276): Mur ligase middle domain
  misc_feature (1)..(280): Xaa is any amino acid
KKGSKVYFIGIKGTGMCALAELMHNSGMAVSGSDREEVFYTDDILRELGIPFYERFDASHIGKGEDTPDMVVYSAAYSSEENPEIAEAERCGISVFKYTDALGAYSANFDSAGVTGVHGKTTTTALAGTLLRGAGLPVQVLVGSAVNGFGGRCTLSLGDKYFVAETCEYRRHFLSFHPKTIILTSVESDHQDCYPRYEDIRDAFIEYGRLLPSDGDFIFCADDPGASEVAAVLKKEKPDINLVPYGFSAQNDYRIESYKAANERVVISLKGFPGELKIRI

SEQ ID NO: 100499 - protein, 274 aa, Unknown
  Obtained from environmental sample
  DOMAIN (211)...(274): OmpA family
  misc_feature (1)..(274): Xaa is any amino acid
GQHIDDSEFSYEFNAKYFEFNLPVAFTLQTTTISPYILVGPVLGSVLGGDIRYKEDSDTTYKTKLNKSNTKTTAFGLYMGAGVKYDLPIDEKFHILLGFEAGYHFGLTDTYAKKELDETANALNAYYYDIEGTRKNRGIELGLTFAIPLANFKKPPEPPPPPPPPPPPPPPPEPEPEPEPEGCYTIEEMKELISTGQDIRGKKICAIKQVNFKFGSAELLADDKVYLDQMVILMKTNDKINIKVNGHTDNVGDNDFNMNLSGGRAKAVQDYLKS

SEQ ID NO: 100500 - protein, 74 aa, Unknown
  Obtained from environmental sample
  misc_feature (1)..(74): Xaa is any amino acid
VPDVSLANQGKRKGLEGFRSGLFYKYAELISERLPRWILVENVPGLSINTRLAKCLSMVSAICLKYIEFQETHK

SEQ ID NO: 100501 - protein, 261 aa, Unknown
  Obtained from environmental sample
  misc_feature (1)..(261): Xaa is any amino acid
MQWQNVRDSLRSGEAAIEFVSFQVYDKIWTNTVQYVALVLKPDSKVPAWVPLCEEEALQNILGRVSNIRNQEGQVRILYNANGIELFNTVWKPLEQELSGVTTVYYSPSGLFHKIAFNALPIDEAYKRLTDKYDLNLVSSTREVAHLSRNTAETARISSAVLYGGLDYNADEETMRMAARFYRRDEGSGTLVAFALPEVTRGGVWVDLPGTRAEAHTIQGYLDSTQIPNTLYQDSMGNEESFKHLDGAQTGLIHFATHGFF

SEQ ID NO: 100502 - protein, 71 aa, Unknown
  Obtained from environmental sample
  misc_feature (1)..(71): Xaa is any amino acid
VKADTLIRTEGMNVLVKNLGLLEAERFVMLIQKETFDYTKWQDTLFEDMTLEEIYSNASGMRHESKIYKIN

SEQ ID NO: 100503 - protein, 77 aa, Unknown
  Obtained from environmental sample
  misc_feature (1)..(77): Xaa is any amino acid
MSTSLTDVEKKYAYDELENILNDVKNGKISDFRMIIRGQQRVTHSNNINVSGRAKELSEKGYYFLKYHPNGSKPRDV

SEQ ID NO: 100504 - protein, 288 aa, Unknown
  Obtained from environmental sample
  DOMAIN (101)...(288): Lyase
  misc_feature (1)..(288): Xaa is any amino acid
GGEGSEVLVTLRQGDMAGEASLLHANEHTASAQTMTPATIVEIERDALRDALAKNGHAAVAVLTKVATVLNRRLLYTGSRQSGQRQFYDSGAVRSESDLLGAMNVPEDALFGVQTLRALENFPITGIQLSHFPALVRALAMVKQASARANSKLKLLDPMVARAIDQACQEIMDGHWQGHFPVDMVQGGAGTSTNMNANEVIANRALEIMGKKRGDYAACHPNDHVNLSQSTNDVYPTSIRLASMFMLRILLGALEKLKGALHDKGREFAHVIKMGRTQLQDAVPMTLG

SEQ ID NO: 100505 - protein, 173 aa, Unknown
  Obtained from environmental sample
  misc_feature (1)..(173): Xaa is any amino acid
VTLTFDRIGEISTAYRVTGHGPVKVLLIHALTGGTDAADRDGVKGWWGPVFAPGAPLAEEAATVWTPNLFGSCYGTTSHCQFDPCPAIDTRLQAEVIAAWIRSQGLQFDIVIGPSLGGMVALELAHALPGAFRAIGIIGCAARSDAWLWGTNEIQRAILQRPELPDDVAMGLA

SEQ ID NO: 100506 - protein, 168 aa, Unknown
  Obtained from environmental sample
  misc_feature (1)..(168): Xaa is any amino acid
KVVGQDFYKNPGLHRTLTGDGLATAWAALWGGPPNTTYGENIGVMAITRVYSVWVIGGAAVIAVFLSFFNKFSAIIKTIPSPVLGGISMLLFGIIASSGLRTIVDNGVDYKDKRNLTITSVILVIGIGGGRLAFNITNDLHFELAGVAFATVVGIILNLVFPASKKGQ

SEQ ID NO: 100507 - protein, 78 aa, Unknown
  Obtained from environmental sample
  misc_feature (1)..(78): Xaa is any amino acid
SSPVYRCLKRRKSKVQKQLNRKDRLENMKGRIFLKGTVPSTVIIIDDVITTGSTIEVCSSVLKDAGVQKAYSLCLFYD

SEQ ID NO: 100508 - protein, 233 aa, Unknown
  Obtained from environmental sample
  DOMAIN (45)...(136): MutS family domain IV
  misc_feature (1)..(233): Xaa is any amino acid
MHFENDENWDIASSGALLEIQNLLDRGLCDEPSILLNEGNLIKSGYSEELDGLKLLKDKGRQFLEEYLEEERETTGIINLKIKYNRLIGYFFEVTNTHLSSVPKHFIRRQGIAGGERYTTDRLAALESDINGASDKLIDLEKKLFIEIREQAKKVLPYLACAAGRIAELDAAQSLAKAASITSWTRPVLNESKNLEIIEGRHPVVEAHLGRGEYIPNDIILHTEKKDGISFIM

SEQ ID NO: 100509 - protein, 60 aa, Unknown
  Obtained from environmental sample
  misc_feature (1)..(60): Xaa is any amino acid
ILPSSLFSISQNGNDYTISGSGFGHGIGMCQFGVIARAKAGQKYDEILKAYYTGVSVEGL

SEQ ID NO: 100510 - protein, 101 aa, Unknown
  Obtained from environmental sample
  misc_feature (1)..(101): Xaa is any amino acid
MANAEILKKISEKNVKIGIIGLGYVGLPLAVTFARNGVSVLGFEKSVQKKEAVNEAQNYVSDVENTDLIKVVYETKMFSATIDFSRIKECDARNRFACLRR

SEQ ID NO: 100511 - protein, 143 aa, Unknown
  Obtained from environmental sample
  DOMAIN (1)...(143): UDP-N-acetylglucosamine 2-epimerase
  misc_feature (1)..(143): Xaa is any amino acid
TDDPNRLNAIFTAINELSGFHFIFPVHPRTIKIIEKENIKLSEHIKIIEPVGYLEMLALESACTAILTDSGGVQKEAYFFKKPCITMRDSTEWVELVNAGWNTLTGADTGKIINAVQNIHIPDKYPSLYGDGNCAQKICDILK

SEQ ID NO: 100512 - protein, 137 aa, Unknown
  Obtained from environmental sample
  misc_feature (1)..(137): Xaa is any amino acid
LAGRQDTDEDGEDYDDEADTETDGDESVDSEHPYAITEESFSEDFLNYDKLSITYYAEDDVLVDDSEEIVDDVEALVGYGNLSMTDLTGSDVVYVRNERIATDFEISVNPGSYQEIVLGVELEPRQRGNPLRGRKGA

SEQ ID NO: 100513 - protein, 264 aa, Unknown
  Obtained from environmental sample
  misc_feature (1)..(264): Xaa is any amino acid
ASANNAFSTEVFKGNPLIAIQHDGDLSRIEDNTKLNSIASHEKMYINEKHKPGYMARVNAFLFVGTNTPVKITDAKAGTIRRLIDARPSGKKVPNRRYHTLMSMIDFELGAIAHHCLQVYKDMGANYYSSYRPLDMMLQTDVFFNFVESYYHIFKEQDEVSLTQAYEMYKAYCDETLIDFKLPRHKFREELKSYFRVFKDFSRIEGKTARNCYSGFLSEKFTQAVPEHKEKPSALVLNGTVSLLDSLLADCPAQYAAVNEAPEK

SEQ ID NO: 100514 - protein, 253 aa, Unknown
  Obtained from environmental sample
  DOMAIN (19)...(97): PDZ domain (Also known as DHR or GLGF)
  misc_feature (1)..(253): Xaa is any amino acid
MTQILDPHTSYFEAKEYEDLRTQTEGKFGGLGIIISVRDKVLTVMTPISGTPAFRAGLQSGDQIIRIDGVSTRGYTSDKALTKLRGEPGTEVRLLIRRKGEAQDQEYLIRRDIIQIKSVPFYGVLEGNIGYLTLQQFSQEAGAEVEKAVRDLLKKNIKGLVFDLRHNPGGLLPQAIEVSEKFLPKKSLVVSTRGRVRNQNKEFHSGTNPVFPLDMPLVVLVDRASASASEIVSGAIQDWDRGIILGDTSFRQG

SEQ ID NO: 100515 - protein, 79 aa, Unknown
  Obtained from environmental sample
  misc_feature (1)..(79): Xaa is any amino acid
MSENLTLNMDSEVIEFANDFSRKINKPISKIIEDYFIELKEKNSNDLPQDLQELYGIFEGVNIPDKNKLRRMFHEKHIN

SEQ ID NO: 100516 - protein, 272 aa, Unknown
  Obtained from environmental sample
  misc_feature (1)..(272): Xaa is any amino acid
REQRSNLWYVRSSKDIAERGLFAGLSGYETQVFLDFQEKEDTPDAMTGSWETRWAVLNNELGGRGVKSVDETLLDIFLKEIYSPVREMLSKNRFETLAKIFSEKPKKAIASAPQSPAPVPSPDELVESFREPINQFAAATEKYLDGANGKFKPWENSGKKSTGKTKRKANTNKDVFGDWSLLLGNLLALSKNQTGKENKFARSLKKKIAERPALLLMALGYNTLTLLRSTVNDNSGKEAAALALHWQLDRLLAECWESAGIPSAEARRAAEI

SEQ ID NO: 100517 - protein, 214 aa, Unknown
  Obtained from environmental sample
  misc_feature (1)..(214): Xaa is any amino acid
MPDDPNNPAQGGKWLQETGEEPEINPRDLTLSYRKSLSEREIIKNRLAFSVNVDTRLFYNLQKYTESNFQFTTSLTLKINNFLDLSLSATSENAVVFRYLKNIPGMEEYTKMYIDGPQNNVFTDLADSFNFFDDSKRQRSGFKMKRFNLTAVHHLGDWNATLDIAMSPYLDPASNPPKYDINAEITFLVQWSAISEIKTDLKYEKRYEKWTQNK

SEQ ID NO: 100518 - protein, 177 aa, Unknown
  Obtained from environmental sample
  misc_feature (1)..(177): Xaa is any amino acid
MILKKIAVFFLLFAVLCCMAGIYGFFHDQISYTVSPEYFTHLKFIQFHISEPLQNRIGAGLVGIMATWWMGLVIGIIVIPIGLIIPTWKNYLFVMLQSFVCICLTSLLIGIIALLYGLIYFDLNNPPYLYDYVPDGVTDKINFCAVGNMHNFSYIGGIAGIISGIVFIVLNRKKRYT

SEQ ID NO: 100519 - protein, 257 aa, Unknown
  Obtained from environmental sample
  misc_feature (1)..(257): Xaa is any amino acid
MKSGVFANEDKHGFSPQRKVFFFSLLFFFVILAGGSLAFLFSMRQIVRNDTLELLSRIIETRNIQFTTAFDSQINLAVNMAESPLIRAHLRNPGSAELARLAHREFSASRKAFSGNNIFWISDIDKRYYFNDEYSYTLNTSDPENSWYASTLNQRDRYSFNVNFDIGIKRTLCWINVPVYDDNKTPVGIVGTGIDLTDYINILFTDLDEDVTLILFNKSGEITGAKDISLMEKKASIGEVWESGQQVLFEAQSLQDS

SEQ ID NO: 100520 - protein, 125 aa, Unknown
  Obtained from environmental sample
  misc_feature (1)..(125): Xaa is any amino acid
MKLTPNIPQYWEMLYEQGKDDWDLGKATPALLEFFEHPNCPKDGDVLVPGAGRGWDAEAWAKRGHNVIAIDFCSSAFDILEKLADKINNLTALNTDIFLLNPSDKKVSGKKFDIIYDYCSFNSIH

SEQ ID NO: 100521 - protein, 179 aa, Unknown
  Obtained from environmental sample
  misc_feature (1)..(179): Xaa is any amino acid
MRSEYSKQIETGELIDPRDGKQYKTVKIGEQVWMAENLNWEGAGCQYNDSPIFGNAFGRLYKWDEAMKSAPPGWHLPTDAEWQQLVDFAGGNDVASNKLRAKDGWQGNGTDDFGFSALPGGYRGRYGDFLTIGVSGDWWSATEKDSEGAYRRGMSSGDAKVYRYDDYGDYSFSVRLVKD

SEQ ID NO: 100522 - protein, 146 aa, Unknown
  Obtained from environmental sample
  misc_feature (1)..(146): Xaa is any amino acid
KRFAVVAGEVNRLADDIAVLTRQIREQVEEIQSSSSSLIVYSEEGSDRIAEGYKLIKDLEDVFKEIKAGAEITSNQAQTITISTQQQLKSSEQIGFVISDVSNEVKLFVSAAEAAAKSVKNLTESTRELEKFLTEEEIIGQGEHGA

SEQ ID NO: 100523 - protein, 93 aa, Unknown
  Obtained from environmental sample
  misc_feature (1)..(93): Xaa is any amino acid
MGQDEKMTKRVLNVGGYSKAIPLPPQYAGFEHLLLGFDEQSSPDILCDARELGSLEASQFDAIYCSHTLEHFYPHDVPKLLSGFLHVLNDDGF

SEQ ID NO: 100524 - protein, 222 aa, Unknown
  Obtained from environmental sample
  DOMAIN (5)...(207): CutC family
  misc_feature (1)..(222): Xaa is any amino acid
MKNGLSFEICLDSADSCAKAQEGGADRVELCSALMEGGLTPSYGMIVEARKALLATKLFVIIRPRGGDFCYSDTEFQAMMHDTKIARELGADGIVVGILKPDGSVDVERTSKLVEQAKPLPVTFHRAFDMARDPFEAMEAIISMGCQRILTSGQEASSFEGAELIAELIRRANGRIIIVPGGGVRERNIKKIRDITGAKEFHFSAFEALDSQMVFRNTRVFM

SEQ ID NO: 100525 - protein, 65 aa, Unknown
  Obtained from environmental sample
  misc_feature (1)..(65): Xaa is any amino acid
GEGISRMGELIELGSNLELIQKSGSWYSYKDSRLGQGIENVKKLLADNPGLAEEIEGLVRAKLGI

SEQ ID NO: 100526 - protein, 220 aa, Unknown
  Obtained from environmental sample
  DOMAIN (33)...(152): Domain of unknown function (DUF477)
  misc_feature (1)..(220): Xaa is any amino acid
MKKNQLFISLLAAAFLFLAAPVFAQNRVFDNAGLLSADEKSGLEGLLAQVASSFNFDLVIVTEKDIGGAEPMVYADDFFDYNGFIDRDGCLFLQVTGTRDWHFSTSGKGIKILNSSAFNKLKSDVVKFLKEDNPSGAYEAFVLDWVEFLVLEAQGKSYNFLRAYSIQIFIGAWVVSLLIALFALYLMKVKMNNVRPKTEADSFIVPGSLVFTKQNDTFLF

SEQ ID NO: 100527 - protein, 124 aa, Unknown
  Obtained from environmental sample
  DOMAIN (2)...(120): Ketopantoate hydroxymethyltransferase
  misc_feature (1)..(124): Xaa is any amino acid
MGYNPQRHNRPQLFGKDTGQASELLDGAIALCDAGAKLVVLEMIPNSLSRKISAKIRVPTIGIGSGNACDGQVLVVNDLLGMSRRLFKHVHRFANQREKMFEAFKDYIDAVKSREFPGDEHSWK

SEQ ID NO: 100528 - protein, 268 aa, Unknown
  Obtained from environmental sample
  DOMAIN (158)...(268): Respiratory-chain NADH dehydrogenase 51 Kd subunit
  misc_feature (1)..(268): Xaa is any amino acid
MERTLLVCCGTGCAANKGRAVFEALNREIEIMEKKAGEVGARISVKTAVKATGCHGLCEDGPLVRILPEAGTESPKMKNGEPPVVDIAYYHVKPADAGEIVSALAAGEIVERLLYKDEAGKPVKPQKENPFYAPQLKIALRNVGLMDPLDIDDYCRKGGFEALKMALAMKADAIISEVEKSGLRGRGGAGFPTGAKWRQCAGFQETPKYVICNGDEGDPGAFMDEALLEGDPYSVIEGLVIAARAVGAVEGFMYIRDEYEYALKSVSK

SEQ ID NO: 100529 - protein, 177 aa, Unknown
  Obtained from environmental sample
  DOMAIN (1)...(160): N-(5'phosphoribosyl)anthranilate (PRA) isomerase
  misc_feature (1)..(177): Xaa is any amino acid
GFVFAKSHRQINSETAALFKKHLSPQITAVGVFVNAEIPSITKLYNSGIINIAQLHGNESEDYINTLKKTCDVPVIKAVNIESAKPANADYLLFDNGKGGTGKSFDWNLIPKCDKEFFLAGGINLNNIREAVKLNPYGIDLSSGVENEKGEKDREKILEACRIVRITEKGAKLTPFS

SEQ ID NO: 100530 - protein, 85 aa, Unknown
  Obtained from environmental sample
  misc_feature (1)..(85): Xaa is any amino acid
LSCANPYREIFVPLAALAGAGSGLTSSIGLTSGAGAGVGAGGAGSATGAGVGSATGTVSACAGAGSCANTTEAVASKAAKDNFAK

SEQ ID NO: 100531 - protein, 272 aa, Unknown
  Obtained from environmental sample
  DOMAIN (17)...(89): Surface antigen variable number repeat
  misc_feature (1)..(272): Xaa is any amino acid
GCFIDFGFGKAAGAEAKILDTVRVEGLLVANPDAVSDAMLLRPGSEFTPADVQESVRRLYKLGHFRKIDFFIDEETDSSVSLKLEVEEFPIVDKIEFFGNKKIKKKELEEKKLLRFYTPLSDAQLHKSKQTILDMYAEKGYLLAEVDAQVIATSVPGNAIIKYDIKEGPRVRVKSIVFHGNHDVKTRWLSRRFKTKENRWWRSGDFNYDLYRSHLDTLIMQYNDRGLLDAAIEHDTVWYSEDKRDIFIDITVNEGRKYFAGDVAFSGNSIIE

SEQ ID NO: 100532 - protein, 211 aa, Unknown
  Obtained from environmental sample
  DOMAIN (3)...(211): Dihydrodipicolinate synthetase family
  misc_feature (1)..(211): Xaa is any amino acid
MAEFRGAFTALITPMKDSGEVDYEGFRRIIEFQIREGIDGIVPLGTTGETPTLDEDEEQRLIEIAVETAKGRVPVIIGTGSNDTKHMVLYTERAKRLGVDAALVVTPYYNKPNDDGLFRHFEAAAAVGIPVIVYNIASRTGRNIPTPLMEKISHIPGIVGVKEASGDINQMGDVIREVAIPRRAEGKTFQVLSGDDGLTLPLMALGGDGVI

SEQ ID NO: 100533 - protein, 264 aa, Unknown
  Obtained from environmental sample
  misc_feature (1)..(264): Xaa is any amino acid
LDNPARYPIFDRVAIRREQFERELANGELKIEPPQEAQPEVETQNAEPYKAGDTLWLDNREFVVDVISDDYKQPDNIDRRFATFGYSVSLTDITGGYPIGRSMYSAEIDNILDRDERNAAFLPLGEPAAQTEIPDDAQHPRSDKDAKIKAISEIFGLDESLLRKLTELQLDERTKNEFGRFDRLVASVDFAKAKTYFGEKEGGAITDFSVNVKIYNLLENFVLKGEFGESIESPIQEASDATAAPDFDAVAQTVLTRVMADPDY

SEQ ID NO: 100534 - protein, 249 aa, Unknown
  Obtained from environmental sample
  misc_feature (1)..(249): Xaa is any amino acid
AFFDAAVGNVPFGSYQVADARYKNGFPIHDYFFQKTLDKVRPGGVVAFITSKFTLDKQNPEARKYIAQRAELLGAVRLPNNAFLKNAGTETTMDIIFLQKRDRPLDIEPDWVHLGMTDDGIPVNRYFLDNPEMILGTMGLDEHMNNKYGRNDYTACLPTEGADLGEQLKTALSYIQGEYTIDELDDLDGVDNHAIPADYSVKNFSYSLVDDTVYFRENSLMYPVDLPATTLDRIKGMIGLRDCVQELIA

SEQ ID NO: 100535 - protein, 244 aa, Unknown
  Obtained from environmental sample
  DOMAIN (115)...(225): Glycosyl hydrolases family 2, immunoglobulin-like beta-sandwich domain
  misc_feature (1)..(244): Xaa is any amino acid
VDTYAEVWLNGTLVGETANAYRSYDFPVRLELLVAGGKNTLLVRVKSHERMIASKIDETEKHLNNGRSTEGTLGKSLIRRYQRSFFAGSSLLNLGTGVLGIGIVREVSLILYTGAYLTDCCFKTIAITESKAQCKLLLSVENAKEGTKVMIRVGSPARKLGVPGNGVYSGGFAVDSGDNEIPLTIYDPELWQPRGYGEPNLYTLTVTVKQNDEVTDEVTQQIGIRTSELVTRDEQGRKTFYFKI

SEQ ID NO: 100536 - protein, 104 aa, Unknown
  Obtained from environmental sample
  misc_feature (1)..(104): Xaa is any amino acid
GIDFPDFGRFSNLKELKKDLSRIAAVEIRTDKAIVTIIGDAGRSSEILSRSFKICKLLGVQVQMVSQGASKVNISFIVDEKEAAGVIKGLHADFFEEFKANSRL

SEQ ID NO: 100537 - protein, 133 aa, Unknown
  Obtained from environmental sample
  misc_feature (1)..(133): Xaa is any amino acid
VNEAFRFKDLYREINERTEEVVYVCASVRGQLIADDMLFFCPFMEYEGEYKPLIIKTEKAGEDKWLIHLEAKTPVRMVELESNQKLLYSDDYFPMIPGKSKTIEASLLEKTSGGPVRLTAGIFGTDENQIFTL

SEQ ID NO: 100538 - protein, 269 aa, Unknown
  Obtained from environmental sample
  DOMAIN (7)...(259): O-methyltransferase
  misc_feature (1)..(269): Xaa is any amino acid
MNLIKLLSESGEARFVLGKTGWFLLEDEMTKVNFNFVNDVCYKGAFELKRSIENGKPLGLEVFDSEGKTIYEILSALPEKVKESWFAFDHFYSDIVFEEAIPIVFSHNPKKIIDIGGNTAKWAICCCRHDPNVEVTIVDLPGQTHVAEQKAAQAGFSGRIKTQACNVLDSKSIIPSGADIIWMSQFLDCFSLDEVTMIMKKARNAAGANTNVYILEPFWDKQRFEAAAFSLQATSLYFTCMANGNSKMYRYGELAQAVEKAGFDIVDAR

SEQ ID NO: 100539 - protein, 217 aa, Unknown
  Obtained from environmental sample
  DOMAIN (41)...(197): Putative RNA methylase family UPF0020
  misc_feature (1)..(217): Xaa is any amino acid
LEKDRFTVYARGDLFLIEEGTNRGKTRILDQELTLDASLFFQSNGAMLEKLIADLLTIAGEADRSLPMADLFCGVGTFAVFLGKLFPQLALVEENKAAIALARENLARDNIATRGDFFAQRSEDWAKHNNPRGFGFIIADPPRQGLSQSLALRLATEGPPMLAYVSCDPATLARDSKILVAGKYNLKALHFYDFYPQTAHIESLALFVRYGSPRSGE

SEQ ID NO: 100540 - protein, 276 aa, Unknown
  Obtained from environmental sample
  misc_feature (1)..(276): Xaa is any amino acid
GSGSWCYESDDSKCAQYGRLYDWNAAMAACPKGWRLPTNDDWTVLVTAAGSSGVSDKLKSKSGWGEQGEGSAGNGTDDYGFSALPGGYRDSRDGTFSYAGDGGGGYWWTATENGSGNAYHRSMDYINGFSANENYEDKSRGFSVRCLMGATTTEKSETKAMMPDKKYIGTWRDAYNPPNDLTILEIDSTIKFELGVHRITTTIGMAKIENNKIIFVTDCHWNGTIVFNENGILLTVDKSGPELASGTEFNFTVRVDEKKLQRSVKYLWQGESVNYI

SEQ ID NO: 100541 - protein, 283 aa, Unknown
  Obtained from environmental sample
  misc_feature (1)..(283): Xaa is any amino acid
KSKNGWNKNGNGTDDFGFSALPGGSNNFDKTGDYGYWWTATETEEGAAAHLRYMDYNNDMYGSDHDGNSKGLGLSVRCLMGAPQPEKSGAGQVSKDAEQLTDDRDGQKYRIAKIGAQTWMAQNLNYQIGSSWCSGNDNSNCEKYGRLYGWNTAMVACPAGWHLPSRQEWNDLVAAAGGDAAGKNLKSKSGWNQNGNGTDDYGFSALPGGNRRHDGGFSNAGYNGDWWTATDNSFSGGAYSRNMAYDNDNVNEDYNAPGLGFSVRCLMGAPQPEKSEPESDSKN

SEQ ID NO: 100542 - protein, 283 aa, Unknown
  Obtained from environmental sample
  DOMAIN (168)...(248): Bacterial pre-peptidase C-terminal domain
  misc_feature (1)..(283): Xaa is any amino acid
IVALLASGGSQDGGRSSSVAPDALEPDSFESPVPYEIGADANAPTVNRTLHSGDEDFFLLIPAGDGSLTMETTGSMDTYMEFYNAETQEKLGQNDDGGSGSNARIRHNVQAGKRYIAKVRGYDRSTGSYGFRAWMTIRTSSGGFENPLAYEIGSDENTPAMNRTLDNDSEDYFLLLPANDGQLIVETTGNTDTFMEFYNAETRQKLAEDDDGGRGGNARIRYDVKAGQRYIAKVSGYEGEAGSYGFRAYIRVQVRLAPDEYEPNDDAASAKQIEIGTPQAHTF

SEQ ID NO: 100543 - protein, 219 aa, Unknown
  Obtained from environmental sample
  misc_feature (1)..(219): Xaa is any amino acid
VAAVSGWNEATGLNAGTLTINATNQTPAAGDYNIGNLTQTAESVAAVTITPKSGKSAGAVTIYYNGSTILPTATGTYVVTFDVTAATGFNAVSGLYAGMLTINNPTPTAADYEIGNLTQMAGNVTDITITPKEGKSSGVITVYYNGSTALPTEVGTYPVTFDVAAASGWNAATGLSAGDLIIGNPDSQTPAADDYDISGTGTFTYDGSDRTVTVTANEG

SEQ ID NO: 100544 - protein, 264 aa, Unknown
  Obtained from environmental sample
  misc_feature (1)..(264): Xaa is any amino acid
TQTVGSVTAVSITPKAGKSNGARTIYYNGSTTLPTTTGTYTVTFDVAAISDFPTATGLSAGTLTINVATLWARTVSAGNDYSFSKFNAVAIDASGNVYAAGYQDGTSTFTYGAGVSAQGSSPKNNVVLVKYNSSGTAQWARSVSVGSRSSEFNAVAVDSSGNVYAAGCQDGTGTYTYGPGVSAQASYDYGGGNVVLVKYNSSGVAQWAKTVSAGSDGSIFYAVAVDASGNVYAAGSQYGSGSYTYGPGVSIQGTSNSSNNVVLV

SEQ ID NO: 100545 - protein, 174 aa, Unknown
  Obtained from environmental sample
  misc_feature (1)..(174): Xaa is any amino acid
MKKTPVITLDTCIFESFGLNTDNMLKQMAALPKRDFILSEIVVMELKSHYEVAYGATSRSLANLQRTFSRFSQDQNVMEQIHNLGDTLRHVKTDGHNNLDNFIARTNTKIIPFENITIRYVVDSYFNTDAPFRTGKKKAEFPDAIALYSLDKWAADNKRRILAVSADNDWAAFA

SEQ ID NO: 100546 - protein, 132 aa, Unknown
  Obtained from environmental sample
  DOMAIN (13)...(103): Helicase conserved C-terminal domain
  misc_feature (1)..(132): Xaa is any amino acid
MGAGIEKIEEEVLRKFPSARTALVSSDTIQAAGALESLIKKMEDGEIDIVIGTQILAKGHHFPNLTLVGVIDSDMGLYGTDFRAAEKTFQQLFQVAGRAGRGTEPGRVLLQTYQPDHPAIKALVSGNRDEFV

SEQ ID NO: 100547 - protein, 261 aa, Unknown
  Obtained from environmental sample
  misc_feature (1)..(261): Xaa is any amino acid
MENPQAEPPVMEGRMIFFATWLGRKKASLCILAGICSISLCVIISSGGNAVDNTGSSFVVKLTHYGLDAKEVERSITIPLEDALSAIAGVRTVQSSSENSHSRVFVSFKRGGRGRYEAVRDAAQRVYETLPSSAQRPEILSSDNSRIPVWSAAVFAADTTGEKIGVVAANNSSSVADTARILERIIKPRLESLEGAGEVLVSGTGLKEIVIVLDQEKLANLGLDPSQVAATLGMNDGLFSGGTITRQDREIIVTGTAAMRR

SEQ ID NO: 100548 - protein, 285 aa, Unknown
  Obtained from environmental sample
  DOMAIN (3)...(263): Glycosyl hydrolases family 31
  misc_feature (1)..(285): Xaa is any amino acid
KWAWTALKRISASVSLPTWFIIIRLTPAGMHNYYTLLYNRAVFELLTEERGKTEAVLFARSATAGGQSFPVHWSGDCFSVYTAMSECLRGGLSLALCGFGFWSHDIGGFEATSTADVYKRWVAFGLLSTHSRLHGSGSYRVPWLYDEEACDVLRFFVRLKHSLMPYLFAEACKAHATGVPVMRPMVLAYEGDPACAFLDKQYMLGPSLLAAPVFDENGETEVYLPQGTFTHFLSHEQIEGGRYVKRAYDYFGLPLWAAENSIIPVGQGDAAVYDYSDGITLHMYG

SEQ ID NO: 100549 - protein, 86 aa, Unknown
  Obtained from environmental sample
  misc_feature (1)..(86): Xaa is any amino acid
ADNPRSEEPEAIIGDVLKGMPSDFSYTVMADRREAIKIALSEAKEGDCVVIAGKGHENYQEAKGVKSDFDDRAEAIKCASMITKHR

SEQ ID NO: 100550 - protein, 202 aa, Unknown
  Obtained from environmental sample
  DOMAIN (1)...(172): ABC transporter
  misc_feature (1)..(202): Xaa is any amino acid
VRLIIGLYLPDGGDIFYGEANTKTVSASSLFGITSAVFQKYQRYQMTLRENIGISDVGSISNDTMLDNLSVQAGIDKNDNSFTNGYDTMLSREFDGADLSGGQWQRVAIARSFFRAHQFIVLDEPTAAIDPIEETKIYNRFAEISKDKTAIIVTHRLGSVKLADRILVMKQGRLVEQGTHMELITVGGEYARLYKSQEQWYT

SEQ ID NO: 100551 - protein, 89 aa, Unknown
  Obtained from environmental sample
  misc_feature (1)..(89): Xaa is any amino acid
MLTMRPINEDGAWGGKQKKEYILDSDGNKIYDPQKRQYKCRSIPSTDWNNRNKADEWRKSWEDMANAELERLGFDTRISRLSYEEQGIE

SEQ ID NO: 100552 - protein, 144 aa, Unknown
  Obtained from environmental sample
  misc_feature (1)..(144): Xaa is any amino acid
MTLVLWGAGLVMGIAAIGSGFGIGIAGQATIGAWKKCYIGNKPAPMMLLAFAGAPLTQTFYGFILMGQMKDAAAVNPANTWLYIGYGIASGFAIGFSAIFQGAAGAAAADAQAETGKGFAQYIAVVGIAETVALFAMVLTMISL

SEQ ID NO: 100553 - protein, 265 aa, Unknown
  Obtained from environmental sample
  DOMAIN (1)...(139): Molybdopterin oxidoreductase
  misc_feature (1)..(265): Xaa is any amino acid
MQGSLPGGCDAVDKIPVARIVEALENPGGAYQHNGMNRHFPDIRFIWWAGGANFTHHQDTNRLIRAWQKPELVVISECFWTAAAKHADIVLPATTSFERNDLTMTGDYSNQHLVPMKQVVPPRYEARNDFDVFAELSERWEKGGYARFTEGKSELQWLETFYNVARQRGASQQVELPPFAEFWQANQLIEMPENPDSERFIRFADFCRDPLAHPLKTASGKIEIFSQRIADYGYPDCPGHPMWLEPDEWQGNAEPEQLQVLSAHP

SEQ ID NO: 100554 - protein, 241 aa, Unknown
  Obtained from environmental sample
  misc_feature (1)..(241): Xaa is any amino acid
YLAELPAFLDNPDVIDFIGRMAVSHDLDADKLKEQFSKIAPNIRALTLFRPVWPPPEPRQTPPKGTSVQSWKHYSAPFLNNNRIAGGVKFWRENAAVLTKASNQFGVPSEIIVAIIGVETLYGRHKGGFHVMEALASLAFHDPIRGDFFKEELENFLLLARENGFDPLKTQGSYAGAIGIPQFMPRSWRRFAVDYDGNGKIDLDNSVADSIGSVANYMKEYGWQKGEPVAHRATLSDTPDP

SEQ ID NO: 100555 - protein, 177 aa, Unknown
  Obtained from environmental sample
  DOMAIN (35)...(177): Flagellar hook capping protein
  misc_feature (1)..(177): Xaa is any amino acid
MAVNSVSQSVSSLLAQTAPYSVTSSVGGDDENGYGFGSATYTGNTTGGIWEETNKMGKDQFLHLLTIQLKYQDPLSPMDNTAFVSQLAQFRALETGENTESAIRELGRAFDENLAAQIVSSQSIANSSAMSLIGHEARMRQTSVTWDGKADTKVPIRVHLGNSDKVTVEIKDADDKV

SEQ ID NO: 100556 - protein, 167 aa, Unknown
  Obtained from environmental sample
  misc_feature (1)..(167): Xaa is any amino acid
DHLFTDVHITKSVLRWRTALIIKEIEDDIAALDSFALAETSLAEKMAEKEAIEEQLAQTRISIQRIKKGYGPEPAQNKQQLEAKAQTLRNKLLAIDDEITPLAIASTELANPRWGLLTRAGNEKSLLAEQVERYADIYTSRVPNLGRLTPFAFLRSPRGSAPHDSRP

SEQ ID NO: 100557 - protein, 82 aa, Unknown
  Obtained from environmental sample
  misc_feature (1)..(82): Xaa is any amino acid
MKRKIIYTEAPVDVSEAITKGEIINDFLPPPEKLLRKEPKVKITITLNSGSIDFFKKHAKKNNVKYQTMINEVLDKYVQKYS

SEQ ID NO: 100558 - protein, 57 aa, Unknown
  Obtained from environmental sample
  DOMAIN (1)...(56): Protein of unknown function (DUF497)
  misc_feature (1)..(57): Xaa is any amino acid
MTFEWDENKNQENIEKHKVSFEVAQEAFFDKKRLIVKDKRHSKKRKGFSALGMMAMV

SEQ ID NO: 100559 - protein, 274 aa, Unknown
  Obtained from environmental sample
  DOMAIN (38)...(181): GAF domain
  misc_feature (1)..(274): Xaa is any amino acid
AESERNTQKALKALERREKMSDTLNKVSVMFLSQREDTFEETMTAGVREIADLFDLDRLSIWRNLKRPDAMHASQIYRWDRNAGGTTVPTAGLEDVAYTKLAPRWETLFAKGEIINSPINLLPEAAMLRSFGVVSAFIAPIFFNNDLWGFALLEDRHKERFFEKDCAEMMLSAVLLCANTVMRADMEREIINANEFTRAVIDASPLGFNIFDENARIIECNDVILKIFGTTKEYYLEHFYEFSPEYQNDGAKSEDKAVEVVRRALNGENLVLEW

SEQ ID NO: 100560 - protein, 199 aa, Unknown
  Obtained from environmental sample
  DOMAIN (1)...(196): Cys/Met metabolism PLP-dependent enzyme
  misc_feature (1)..(199): Xaa is any amino acid
IGRERQIPRPFQPNQSYHGVVFTDAVGKLAYIIKARTTLLRDTGAALSPFNAFLFLQGLETLSFRIERHIENTKAVIKWLEKHPSVERVNHPSLPGHKDHKLYDKYFPKGAGSIFTFEIKGNAEKAKRFTEELKLFSLLANVADVKSLVIHPATTTHSQMSEKELLDSGIKPNTVRLSIGAEHIDDIIDDLKQGFEAVK

SEQ ID NO: 100561 - protein, 254 aa, Unknown
  Obtained from environmental sample
  DOMAIN (98)...(211): Histidine kinase-, DNA gyrase B-, and HSP90-like ATPase
  misc_feature (1)..(254): Xaa is any amino acid
MNTIMGITEIQLQNETLAQNMKKAFIDIYNSSDLLLDVINNILDVYKIEANKIEIAFVEYDVASLINDIVQLNIMRMKNKSVEFEFHVDENLPIILFGDVIHIKQILNNLLSNAFKYTEEGKVTLSVSSEHSEKEHFDTILIFKVSDTGHGMTEEQKNKIFDEYSHFSYLIEGTGLGMNITQYLIKAMKGEVVVSSELGKGTEFIVRLPQKSTNSGVLGKELVESLQNFRYISYSQMRNARIEREPMPYGNVLI

SEQ ID NO: 100562 - protein, 245 aa, Unknown
  Obtained from environmental sample
  DOMAIN (125)...(242): HD domain
  misc_feature (1)..(245): Xaa is any amino acid
MPINEKSIAGYCALTGKTVDIPDMYDIPADAPYSFNSSFDKRTGYKTISTLTFPLITADGRLLGVIQVINKMDKDGNVIVFSNEDVFLVNHFAANATVALQQAYITRAMILRMIKMAELRDPKETGTHVNRVAGYAVEIYDRWAHNHNISAVERETFRDILKIGSMLHDVGKVAISDMILKKPARFTPEEFEVMQHHTLYGASLFDDIHSNIDRMAKDIALTHHENWNGTGYPGWIDPVTRAPIK

SEQ ID NO: 100563 - protein, 258 aa, Unknown
  Obtained from environmental sample
  DOMAIN (58)...(167): NlpC/P60 family
  misc_feature (1)..(258): Xaa is any amino acid
VRVIFLLLLIFASVNVFAAPLENGYTLAPKTTDSPEEKAKAYFNARQRVIEAAKKYEGTPYRYGGITARGLDCSGLLYLVFKETLDITLPRSASGLYSWTEKIPLDKVQPGDLLFFKTDKSGKITHVALYLGERRFIHSASSGPKTGVIYSSLDEKYWADSFAGAGRAFPEIILINKFDNNSIIGNSSPGGKGNKTGSGKTASSRRGGKEARILAGVAFAPIWTGFLLEGNIFRGFASQLSLNADVYPLGLRMIFGLE

SEQ ID NO: 100564 - protein, 160 aa, Unknown
  Obtained from environmental sample
  DOMAIN (22)...(100): OB-fold nucleic acid binding domain
  misc_feature (1)..(160): Xaa is any amino acid
MEHSERQKIRNILVSTAYGSEVLVKGWVRTKRGNKNVAFLALNDGSIIHNLQIVVDVANFDENLLKQITTGSCVAVVGKLVESKGQEQSVEVHATEITLYGTADPDSYPLQKKGHTLEFLREIAHLRPRTNTFGAVLRIRHAMAFAIHKYFNDNGFFYLH

SEQ ID NO: 100565 - protein, 84 aa, Unknown
  Obtained from environmental sample
  misc_feature (1)..(84): Xaa is any amino acid
MDNNPINSQIDDYSASNITVLEGLEAVRLRPAMYIGDVGVRGLHHLVYEVVDNSIDEALAGHCSDIDVVINEDGSVTVVDNGRG

SEQ ID NO: 100566 - protein, 296 aa, Unknown
  Obtained from environmental sample
  DOMAIN (1)...(195): DNA methylase
  misc_feature (1)..(296): Xaa is any amino acid
KMIYIDPPYNTGNDFIFDDDFSESTGEFLIHDGQYDEDGNRMVRNHDSNGRFHTDWLNMIYPRLRIARDLLMDGGIIFISIDDSEVENLKKICNEIFGEANFIAQLVWEGNGKNDSRFISEAHEYVFIYTKSMQYLKDNNIYWRAKKEGINEIVDMARKCVDETDDYSLASQQLRSWFSSLDKNHPSWKHRHYNKIDNRGVYFPGDISAESGRGREPYNVNHPITGKPCKIPARGFPTHKTMLEWIQGGYIDFGEDETSVPKRKRYIFETDTYVMSSVIYKDSRAAFKNPGRSSWF

SEQ ID NO: 100567 - protein, 218 aa, Unknown
  Obtained from environmental sample
  misc_feature (1)..(218): Xaa is any amino acid
MKGQLKELLTNYGPISVLWYDGQWESTWTHEMGLDLYNYTRSLQPPIIVNNRVDKGGGSMQMTVDSSYAGDYGTPEQEVPPMGLPGVDWETCMTMNDHWGYNKADQNWKSSTELIRTLIDVASKGGNLLLNVGPMASGEFPQQSIDRLADIGRWMKVYGESIYGTRANPFPSLDFGRCTQKTVNKKDTLLYFHVFDWPKDGALEIEGLNNKVKRAYLL

SEQ ID NO: 100568 - protein, 177 aa, Unknown
  Obtained from environmental sample
  DOMAIN (2)...(177): MutS domain V
  misc_feature (1)..(177): Xaa is any amino acid
MLDESGTLEIYEARHPVVEAHLSRGEYIPNDVILNAGETGGISFALITGPNMAGKSTYLRSAALIALMAQMGSFVPAREARVGICDRIYCRVGASDNVSRGESTFLVEMNEAAYILNTSTVKSMVIMDEVGRGTGTNDGLSIAWAISEELLNLGCRTLFATHYHELSLLSHPRMANR

SEQ ID NO: 100569 - protein, 210 aa, Unknown
  Obtained from environmental sample
  misc_feature (1)..(210): Xaa is any amino acid
FFCTNVSAQTDLGEDRPPEPALEAENPVQTPDSIETSDPVEDPNKAAQQSLAFGRPDAGTAVPAPAVSVFSIFRVLLTLAVIAAAIYGLVYFLKFRRASRAKVEQDPFLKVLASAPLVTSRSVHVVSVGPQAWLVGSAENGVNLISEISDKDTINAMLLEDSKRIATPTEGAAGPLLDFKAILGKLGITAKPENSGPDQIRKRSERLKGL

SEQ ID NO: 100570 - protein, 266 aa, Unknown
  Obtained from environmental sample
  DOMAIN (34)...(232): von Willebrand factor type A domain
  misc_feature (1)..(266): Xaa is any amino acid
KCTFFCLFLTFAIFALVRPKFGVKMEMVERKGVDIMIALDISHSMLAQDLTPNRLERAKLEIRKFINLLKGDRVGLIIFAGESFVQCPLTLDHAAAAVMLQSVSADWVQVQGTALAEVIKQAVRAMGGATKRNKVLVILSDGEDHEGGVTDAAKTAAQEGVIIYTIGIGSEAGVPIPVSKGGGSVVYKKDKNGNLVMTRLNSVTLEKIAIESGGKYFHSGTDLDLTRIYNEISKMEKSDFGMTKAVVHEEQYQIFLLIAIIFILIE

SEQ ID NO: 100571 - protein, 274 aa, Unknown
  Obtained from environmental sample
  misc_feature (1)..(274): Xaa is any amino acid
YYQELNSAASVKTDVAPSLPGTYSVTFNVRGSAGWKAADGLPAGTLTINNPSAFSDISDLERYLSLTPANSIDDPYIIKLNITNEDEFEELKRLLLSLPDKYVFLDLSGSTIETIPENAFNDRDLSDTNNPVFLQCYSLTGIIIPNSVIWIGGSNDSNNNNDKGAFQGCVNLTSVTIGNSVEGIGNDSFRACEKLTDITIPKSVTSIGDRAFYYCPSLTKVTFEGTLSQNGFSSFSFDGDLRAKFYADNNQNGTPGTYTTSSPVSASSSWSKQP

SEQ ID NO: 100572 - protein, 130 aa, Unknown
  Obtained from environmental sample
  DOMAIN (3)...(72): ATP synthase subunit C
  misc_feature (1)..(130): Xaa is any amino acid
MNLGLIGAGLVMGISAVGSGMGIAIAGQSVIGAWKKCYIANRPAPMTLLAFGGAPLTQTFYGFILGLLFMKPAALANPELGSLYLGMGLASGLAIAGSAIAQGKAGASGADATGETGKGFVNYMMIVGIC

SEQ ID NO: 100573 - protein, 120 aa, Unknown
  Obtained from environmental sample
  misc_feature (1)..(120): Xaa is any amino acid
NYEGSIGKSVVESLKNFISMVLGIANVFSDIMSYIRLWAVGLAGGAISSTVDQMAGPMLGHLFFFIFGIILLVFGHGLNLVLNMLSVLVHGVRLNTLEFSGHVGLTWAGTPYRPFAEKKE

SEQ ID NO: 100574 - protein, 284 aa, Unknown
  Obtained from environmental sample
  DOMAIN (1)...(224): Glycosyl hydrolase family 53
  misc_feature (1)..(284): Xaa is any amino acid
MRFLLDFHYSDTWADPGKQHKPVSWEGLNFTQLTAKVRSYTKETLERFKEAGALPDMVQVGNEVVNGMIHPDGSGNSANFAALVNAGINGVKDVDTSIKIMMHTINERNPNGWVSTLKANLNKAEAGAANKIDVIGLSYYPRWHGGIDSLRRSLTAIANNHGYKVAVAEYADKHREVNDVVFALPADKRLGTFAWEPEEFEGDNSLPLFDWKNGRRETNARIALYPVMAKDYGITDGVTTGIIEPGRELASTADLSVKRGGASSNISNLLNSNAQAGAMQVEKL

SEQ ID NO: 100575 - protein, 266 aa, Unknown
  Obtained from environmental sample
  misc_feature (1)..(266): Xaa is any amino acid
MKRFRFLAAAFLVVTLAWALVLTTCDLEGAEVVIVDAEIPEISDPPPENYSATSTAGISGIPVEVATPMDGGKLSFQWFKVPEVYDDTTVNGIPIEGKPAAADITTEDGVNKVSLKLTSAELAAITGDTKFGNVFYVYLEITNTNPGVTGSDKAVIRAPMTTVTVSNPADTAQFPIIKQNPLDDFGIAGAVTINVIAGLPEGSTGTLTYQWYSNTSASNKGGTRLNNSTTVGSTVSGATAAELVLDLKMGTHYFYVEVSNGSKKRT

SEQ ID NO: 100576 - protein, 65 aa, Unknown
  Obtained from environmental sample
  DOMAIN (25)...(48): 4Fe-4S binding domain
  misc_feature (1)..(65): Xaa is any amino acid
DRVYDLKEHAKGAYKEMMEGKSWIKSADASKCAACGVCEEKCPQKLPIIKQLQETHRTLGTQALA

SEQ ID NO: 100577 - protein, 138 aa, Unknown
  Obtained from environmental sample
  DOMAIN (5)...(134): short chain dehydrogenase
  misc_feature (1)..(138): Xaa is any amino acid
MSTSPIALVTGAGKGIGKAVALGLAKDGFDIRLNYRSDHEAAKAVRAEVETLGRGCVLLPFDVSDKQAVEHALDPLLEQETPFVLVNNAGFARDGIFGLMSDEQWQDVLDVHLNGFFHVTRKLVPHMQRARRGRIVNI

SEQ ID NO: 100578 - protein, 90 aa, Unknown
  Obtained from environmental sample
  misc_feature (1)..(90): Xaa is any amino acid
MEESVYNDRKIYSLSDVAQSLKSVIEQKYVRDFYVKAEISKLNYYPHSGHCYPDLVEKSGARITAQLRATIWSSDYFRIQKKLKRNRQSL

SEQ ID NO: 100579 - protein, 65 aa, Unknown
  Obtained from environmental sample
  misc_feature (1)..(65): Xaa is any amino acid
MLALMQGKTSFVIAHRLSTIRNADKIIVINDGKVVESGTHDELMALENGFYARLYGAQYATGLAL

SEQ ID NO: 100580 - protein, 190 aa, Unknown
  Obtained from environmental sample
  misc_feature (1)..(190): Xaa is any amino acid
MNGFFMGIDDDNEIENEIKNEIEENLKQGIQVASEETQKLRNQAETNAKAVFSLDIATLTDRKKVLTPIENFGMDSMRKSAEKSALLKSYVASFSQTGEEGGEVSQSLINLQREVKKIDPGSVLLNKRGFFNKLTNPVRAYFERYTEAETVIAGIIQTLDKGKNTLQNDNTALYIERQALSDLTRKLLKE

SEQ ID NO: 100581 - protein, 262 aa, Unknown
  Obtained from environmental sample
  misc_feature (1)..(262): Xaa is any amino acid
ETDGSLWAWGANEKGQLGDGTATNRGNAVRMGTDSDWAAASAGGGHTVALKKNGSLWAWGSDGVAINSKSPVRGGADSDWSAVSAGSDYTMVLKKNGSLWAWGTNYSGKLGDGTTTNRKFPVRVGSESNWAAVSAGVGHTAALKTDGSLWTWGHMYSGLSFNSPVRVDTGGNREGTNPRDLRKNLGSLGSDNDWTAVSAGAEFTVALKKDGSLWGCSSDLNVLPGNSGKMNLALRIGTQTDWTGVSTGSGHSVAIRRDGSLW

SEQ ID NO: 100582 - protein, 305 aa, Unknown
  Obtained from environmental sample
  misc_feature (1)..(305): Xaa is any amino acid
ACTHSTERQNEFFYGQGFATGVVQINGGMGETTITTVASTEPNTQLSIPLGGKSPVQKASFINFVTPTDMAIGKQKQEYTAHANLKADLDFRVTPDAEVMLVLNQNTGDVIKAAGSGNIKLEVQPANNVFRVFGAYNLLRGEYTVSIQNLINLKFKINHGSVINFNGDIAEATADIQASYKQLRVPLAGLFSDTTATSRYKRPVPIDCKVHMTGRLTAPDLKFSIDAPTVDAETRDRMQAQLNTDDNVVTQFMSLVLIGQFVQADYFNSMLPNQSGITLSDFLSSQLTSLLSQVVGINVNVNYTP

SEQ ID NO: 100583 - protein, 186 aa, Unknown
  Obtained from environmental sample
  DOMAIN (59)...(182): ATPase family associated with various cellular activities (AAA)
  misc_feature (1)..(186): Xaa is any amino acid
LGQAPVGQVPSGQIPPQHNPLGQAPLELLKAARQEMAKRIVGQDEMIDGLLTALIAGGHILLEGVPGLAKTRAVKTMAEITGLVFKRIQFTPDLLPADLTGTLVWEQATSSFSVRRGPVFANVILADEINRAPAKVQSALLEAMEEQQVTIGEKSYSLPSPFFVLATQNPIEHEGTYALPEAELDR

SEQ ID NO: 100584 - protein, 308 aa, Unknown
  Obtained from environmental sample
  misc_feature (1)..(308): Xaa is any amino acid
TPKKDKDADNSGLSQIELTTENDNAEQGAGFDDEPQPDKPSSGEDALTQDGITDGSETAKNPAEEKTEEKPVVVEAVEEVKEPPKPEEKKPSAPPAAKPVQPPPAVTKTEPPPAEAKAKEEPADEKKDDQSENAEPPPPPPRRQPVLTPPPAVTAVQDDAPIPNRQALVAPKEEEIIYSRIVNAFVGQLVEIPFRGTGWVYMGEIMSKRGLAYNSRRFDIEGQSIIFTAEEAGTYGLKFFKHDVIRDYILNDYVQVIVSESPNKNSAPGWLNPPGDRGRVTAVPRWPSVLEEETLLRGGPRTPASGAQ

SEQ ID NO: 100585 - protein, 270 aa, Unknown
  Obtained from environmental sample
  DOMAIN (128)...(239): Pyridoxal-dependent decarboxylase, C-terminal sheet domain
  misc_feature (1)..(270): Xaa is any amino acid
GSRKNEYGFTRAQIFEGYSLLKAKGVKRFGLHTMVASNELSLDYHLETGRLLFELAVEIKAKCGVALEFVNLGGGLGIPYKPEEEAVSWEALATGLKKLYDEIIVKAGLGGLAIHTEYGRPITGPYGWLVSRAVHKKEIYRNYIGLDTCMADLMRPALYGAYHHITVAGKENAPHDKTYDIVGSLCENNDKFARQRKLPEIAVAAEGVGDLVIIHDTGAHGRAMGFNYNGKLRCGELLLRPDGSIKQIRRAETVEDYFATLDLIALKAFT

SEQ ID NO: 100586 - protein, 128 aa, Unknown
  Obtained from environmental sample
  misc_feature (1)..(128): Xaa is any amino acid
TLGIFAFLTNDSTIKTSLDALTEYSTRDYIEKDFDEMKNNLDMKRIRVQTDTRMKSRLFIQFIAEIFMREIRVYIRDSDSCKKLTRKQVFSHIKTIYKVKFKGRYRDVYPELSRQQRDILDALKVTLK

SEQ ID NO: 100587 - protein, 292 aa, Unknown
  Obtained from environmental sample
  DOMAIN (2)...(66): Bacterial Ig-like domain (group 3)
  misc_feature (1)..(292): Xaa is any amino acid
TTKTEYFIDEPLDLDGIVVTAIYSDNSEETVVIDKSNISGFDSSTPRTITLTVTYNGKTAAFDVTVDNVTLRSIEITAEPAKTEYLLYEDIDLDGIEVTAVLSDGTTELLDKSELEIEGFDPEQLGEQIITVSIAGKTAVFTVIIIPQSFTVTFNSNGGNNDSNPNTKTVTQPAAVVDSLPTPPTRTGYDFTVWDDAHGNIFTTESLVTGSITVYAQWVKKTYTVTFNSNGGSAVTNQSVKYEEKASKPAIDPTVPAGSEKYVTFGGWYTDNTTFKNKWDFAANTVTGNVTL

SEQ ID NO: 100588 - protein, 159 aa, Unknown
  Obtained from environmental sample
  DOMAIN (7)...(159): Pyridoxal-phosphate dependent enzyme
  misc_feature (1)..(159): Xaa is any amino acid
MKIANNVTELIGNTPMVRICKINPYEAEIVAKLEMFNPLSSVKDRIGLAMIEDAEKRGVLKAGDVLIEPTSGNTGIGLAYVCAVKGYRLILTMPETMSIERRKILTALGAEIVLTKAYDGMEGAVNKAKELAATIPNSFIPQQFDNPANPEIHRRTTAQ

SEQ ID NO: 100589 - protein, 280 aa, Unknown
  Obtained from environmental sample
  DOMAIN (1)...(199): NAD-dependent DNA ligase adenylation domain
  misc_feature (1)..(280): Xaa is any amino acid
MDGAACSLVYEGGRLVRAATRGDGVVGDDVTANVRTIKSIPLAVPYKEPFEVRGEVFMTFGDFSALNDSLVEAGLRPMQNPRNTVSGTLKLLDPAETARRKLSFAAYFLISSDPDRAKSLRDNAAFLAKLGFPVVDRSDLLSGVDEIMSFCGEWESKRHELPFPVDGVVIKVDSFEQQNRLGSTSKSPRWVVAYKYAPERAATLLEGIDWSVGRTGVVTPVAKLRPVLLAGTTVKSASLHNYDEIKRLGLRVGDTVEVEKGGEIIPKIIRVCADERFAGS

SEQ ID NO: 100590 - protein, 291 aa, Unknown
  Obtained from environmental sample
  DOMAIN (1)...(291): TraG/TraD family
  misc_feature (1)..(291): Xaa is any amino acid
VSNDTLRFNILDEISLESAYRDASMIADILTSPADGKVDGSSRHWVDTAKDLLTGVILHIKCSNLRDKSLYGCLDFLSQADKGEDKGTALLDGMINSVHCEGKIHEIIANVARRNKSRPDDERGSVFSTAVTALQVFEDPMVRNCSSTSDFCLNDFKVFDNPLSLYITVPFPDLDRLSPFIRIIVTFILRKFSQDEVQFGEQKLKHPILFLIDEFPTLGTFTTLETMMGILAGYGITFYLICQSPSQIYKLYGEHTAIFDHCKFMMTYAMSDPKGAEMFSKMTGVESVTFT

SEQ ID NO: 100591 - protein, 231 aa, Unknown
  Obtained from environmental sample
  misc_feature (1)..(231): Xaa is any amino acid
FYLKKPPVINREAIRVFLDALSWPLYFFDFETFNEAIPPFDGLRPYMQVPFQYSLHIQEKPGAAPEHREFLAKEGTDPREELAVRLCADIPQNVCVLAYNMGFEKGCIKEIARWLEKREKNDIAAHLMNIHYNFKDLMKPFQRRDYYSFELDGSFSIKKVLPALCPDDPDLDYKKLDSVHNGVEAQNAYSDLAGKSPDERERIRTALLAYCRLDTLAMVKILEKLMNIHNK

SEQ ID NO: 100592 - protein, 280 aa, Unknown
  Obtained from environmental sample
  misc_feature (1)..(280): Xaa is any amino acid
VILYEAGYSREGIIGVTQPRRIAAVSVSEFIARQMETPLGGLVGYKMRFEDRTSLQTKIKILTDGMLLQELKLDPWLSKYGVIVIDEAHERSLNIDFTLGLLKRVLESRRDFKVIISSATINAQVFCDYFGGCPVVKIDAQRFPVTLIYDAPMVGQEEYSPRSFTEFHGRKDKKQIEAPANGSVDGADTAAEALLMKIEKIVTRFIAEKREGDILVFLSGEKAIKDCMNRLSLCRAGNKLHLIPLYGRLGKEEQERVFDPAPKGKTKVVLSTNIAETSVT

SEQ ID NO: 100593 - protein, 268 aa, Unknown
  Obtained from environmental sample
  misc_feature (1)..(268): Xaa is any amino acid
MNPHDPIIKALADTELELYEEHFENKVVFWVSDVDKVFYTTGSAPYIINPDDPASYWYNLTLYETEKFNFNINYNPDLDQINLWVNVPVFAEAHDNKHPIGMLGIGINLTDFSNFVASSYREFDENITPYMFNKYNEITSAVDYNLVENKVHLEELLGETGKELIRVARGLSDGESRSFIYNKKIYLVNSIPSMEWYLAVSYPLPGFLALNKAMNTVFFSMLFLIFLMFIVINFHVAHSENAMAKQNLQLFEAHRKAEFASQAKSDFL

SEQ ID NO: 100594 - protein, 136 aa, Unknown
  Obtained from environmental sample
  misc_feature (1)..(136): Xaa is any amino acid
MNIGDYSVKRPVTIVILYALALGIAVTLVLNLAVDLYPSTARPVLSIFTRFPGSGPADVEKNVTERLERALSTSVGLVNMTSNSQFESSFVNLEFAYGTDMDKAANNAQLLVNRLANSLPDDVQTPTVRRCDMSAM

SEQ ID NO: 100595 - protein, 189 aa, Unknown
  Obtained from environmental sample
  DOMAIN (28)...(189): Radical SAM superfamily
  misc_feature (1)..(189): Xaa is any amino acid
MHNGFSHFFYNQFKKNEAKIHELTYFFWECTQRCNLQCRHCGSDCAGYSEKPDMPFDDFFRAILPVKDVYEPDKITVVITGGEPLLHRDLFRCGKTLKEHGFHWGIVTNGYTYTPEIHARLLEAGMEALTISLDGFEDTHNWLRSNDKSFKNAVRALGLITAVNRLAYDVVTCVNRKNIRELPEFREFL

SEQ ID NO: 100596 - protein, 107 aa, Unknown
  Obtained from environmental sample
  DOMAIN (1)...(107): Endoribonuclease L-PSP
  misc_feature (1)..(107): Xaa is any amino acid
SQAFVSGNLVFTSGQIPLSAQDGQVTGSSITEQTEQVIKNLEAVLKAAGSSLAKALKTTCFLADMGDFAAFNEVYAKYFTGKPARSTVAVKQLPKSVLVEIEAVAEI

SEQ ID NO: 100597 - protein, 299 aa, Unknown
  Obtained from environmental sample
  misc_feature (1)..(299): Xaa is any amino acid
TLKLQMDKNSVPVTLNVSSRNRVNAVDVSLDMGGNWQSLLTAAELSALRAPVNSNFSKTLDLALVEDGSINILIRAAGESGIDSIANFSVLKDTAAPQARTIMPIAEAGVNGTIRMAFAVEEMGSIQSITYRRGAQAAPAAAPGRPAAAAPATTASREIYNDNNWDKDYAPRFFEVLMDSLVMPLDKSMVFTFTDKAGNTSEVNTWDFVIDQEMDIPIVQIVLPLENEVITNDFIVSGVMFDDDGVKKYQWRIDNNPWQTEDAEYGFSIPVALSTLTDNEHTISVFAEDIYGVRSQPVN

SEQ ID NO: 100598 - protein, 312 aa, Unknown
  Obtained from environmental sample
  misc_feature (1)..(312): Xaa is any amino acid
VDSFKFAEFAYERPYLYGRTGYVLSEEDKELLADKNTDKAVKARIQAKTPDFTEISFDNGRSFIMTSKSAAKNINYRYRLEDGEMAEGYHYIVIRTTMKNGEYALTRMLVQVDKTKPEIRLISPEAGSRYNQSIAYSATATDDIELVSLTYHLRKGDKANYEVPGFLQGLYLEGIIPPFLRQIAVSYDFKDWVPTMPFAGGATYTDFGLGLSFFDDNVKVQGQYGFMTQDLYEALGGVGAVRYGGHVVGLKIIASVYSLPLGSVWGPDFDWLYASIAVGANFSVFDIAQEGYTQSGTPTWLSALIMQIEFPK

SEQ ID NO: 100599 - protein, 281 aa, Unknown
  Obtained from environmental sample
  misc_feature (1)..(281): Xaa is any amino acid
LSTLAVGTLVKDPSTLYNGAPILWRKLDTNHPGYPSNSVTLMTDRIISIKGFDGKEAGNANSGRANSGNNRYRTSNLRQWLNSAGAANSWFTPQNLTDGTTNTNNADAPPNAANMQNGYNPYDTEQGFLNFLSAAFQASILPTTLTVAKNMTTDGGGSENVTDNIFLASNTEVGLTNENSIEEGSLFAYFSSNTTRKAYPTQGAVDQSAAGGYTNSGLSATSEWGWLLRTPYASISYNVRIVNVAGTLSFISANIEDRGVRPLCNLKSDIWASDTPDADGA

SEQ ID NO: 100600 - protein, 83 aa, Unknown
  Obtained from environmental sample
  misc_feature (1)..(83): Xaa is any amino acid
LEIPAQILHDADLSILGSKNYSVYMKSIRAEYKEFSDKAYAIGRSKVLKELLKKQPLFMLPYFQNLFEADARRNMQNELVFWD

SEQ ID NO: 100601 - protein, 300 aa, Unknown
  Obtained from environmental sample
  misc_feature (1)..(300): Xaa is any amino acid
MVRRVFIEKKEGFTMEALRLKEELAGFLGEKFPELKQLKSLRILRRYDADDLEEEQFKQLTVAVFSEPQTDRVFYGAEFSIDQKKSRFFGIEYLPGQYNQRADSAEQCAALVIGVKPRIRTADIYVFECGRSLLSDAALEGIKKYLINPVDSREASPDLPRTLDDDLHEPADVAVLSGFIQMDCTGLQKMGTLYGLSMSIDDLLFCQNWFSGEKRDPTLAELRVLDTYWSDHCRHSTFNTVLEEIAISGENDDLKKALALYEETRREVYGAAVENRKRTLMDMATLGVKALKKRGLCSDL

SEQ ID NO: 100602 - protein, 292 aa, Unknown
  Obtained from environmental sample
  misc_feature (1)..(292): Xaa is any amino acid
KEAGIIIKDMLDNGIGSINGGLLGFQDGGITTGKPWTLDFTGSVGTRGDFRALFEETAALGVDLSFVQDYSTINRLQMNLPRNQAYHINRWGIKARDNWDSFLPVQEISFARPQRSADWFTQQVKKAAAVGAASVTADGITNRLISHWGRTDPITASQAIDLYENTFANSPLPINMKAPNQYLWKYAGRFLETPVFPTQYILETDTVPFLQLILHGTMEMYAPYSNFSFYTQRDILRMIDYNVYPSFVLTHEPAHLLSSTNSLDYFSTEYDVYRDIIRNIYTEVSAVLSPVK

SEQ ID NO: 100603 - protein, 180 aa, Unknown
  Obtained from environmental sample
  misc_feature (1)..(180): Xaa is any amino acid
MPGIVHAGCFAHARRRFFEAAKASKEAKSAQEGIKHIRRLYDIENELRETITNNNDLFLSERKARAGPVLEKFKAWLEKRKCEVPPSLLLGKAINYSLAQWDKLVKYLESPYLTPDNNACENAIRPFVLGRKSWLFSQSPDGAKSSCGMYTLIETAKRNGLVPREYLTALFAKAPLASSP

SEQ ID NO: 100604 - protein, 100 aa, Unknown
  Obtained from environmental sample
  misc_feature (1)..(100): Xaa is any amino acid
MPYSFENAIADKLAEKHKQGLLRSLCLPSGVDFSSNDYLGLANHFEIAKAAADAYIKYGAGSKGSRLLGGNHKIFEETEKWLANWKGTEAALIFNKDIAQ

SEQ ID NO: 100605 - protein, 148 aa, Unknown
  Obtained from environmental sample
  DOMAIN (6)...(148): Archaeal ATPase
  misc_feature (1)..(148): Xaa is any amino acid
MKNIPRILEREIIKGLKPQKAALIFGARRTGKTVIMKRIIERWRGKVLSLNGEDYDAQNLLGNRSIANYRRLLNGINLLAIDEAQNIPDIGSKIKLILDEIHPVCVLASGSSSFDLQNKTGEPLVGRSKTFRLAPFSQKEISIMETSL

SEQ ID NO: 100606 - protein, 85 aa, Unknown
  Obtained from environmental sample
  DOMAIN (1)...(40): Pentapeptide repeats (8 copies)
  misc_feature (1)..(85): Xaa is any amino acid
ADLSSADWSYANLSGANLENANLRGAYMLHTDLSSADLRGAFLRNIINLLEAKLQGTIFLKSDLSEADLQKAIAKGAIIKETMED

SEQ ID NO: 100607 - protein, 100 aa, Unknown
  Obtained from environmental sample
  misc_feature (1)..(100): Xaa is any amino acid
MSESVMSMIKTVGISKTFHGGNGRGPLDVLKNVSLTVEQSEVVCIIGPSGAGKSTYLRTLNRLETIDEGQIYIEDNLLFDCHQGVNKVKMHNDEKNKILL

SEQ ID NO: 100608 - protein, 292 aa, Unknown
  Obtained from environmental sample
  misc_feature (1)..(292): Xaa is any amino acid
VKADKLIDEKKHDEAILVLTDYIRRNPERFDNAQKRLRRIYQERENFDKTADELINSLLNDPENQEKIYSLSSKLKSMENESSPLLSSFVSRTHEIAEFNVLRNRLSNIIETGRAQLDRGECEAALQTYAGGMDLMRDEFFNEGYDITVENNVRRETERVNSVIAAFRAVSTGLSAPSAELARAITSGNLNAAAEIIGRLTPAMDRFIAQKQELYAAVNVFDGTLEKIRILNPETADRNHLSFLSILINGRQGESIQEGMLGAFETYWKNSINPVISAITQNALTSNSTGLA

SEQ ID NO: 100609 - protein, 92 aa, Unknown
  Obtained from environmental sample
  misc_feature (1)..(92): Xaa is any amino acid
MFLRKFVVKPLHFFGVVGLLLCLAATGVFGYFGFEWISTGMLRVRPLLVLAGFAFVSGIQFISLGLLGEMLNSKLQNKNYPIAERIPPHALS

SEQ ID NO: 100610 - protein, 283 aa, Unknown
  Obtained from environmental sample
  misc_feature (1)..(283): Xaa is any amino acid
KPDPLMANIPQDIENLRTSNQDEYIRQIVKIINSNSKNDFEKVKMAHDLTALVLSYDAESYWAKTIPDQSYQNTLKTGLSVCAGYANVLKKFCDELNIPCIVVSGYGRGVGTSPTAADKPNESNHAWNMVTINGANYLIDSTWDSGNMDVENKVSIKQYRTDYLFIKPKHLIYSHFPENVNHQLLVSPLSAAQFGVLPPLKPKFFYIVDNPSVDLRKRMHVSNKMIFEYTVKEGYYLDYTIKEIKNGTETELKNRDFIQMKGFRHTAHFSFPSAGQYKINIFY

SEQ ID NO: 100611 - protein, 303 aa, Unknown
  Obtained from environmental sample
  DOMAIN (7)...(235): BadF/BadG/BcrA/BcrD ATPase family
  misc_feature (1)..(303): Xaa is any amino acid
RYERHNACQSEKVYAFLQEIFTVFPNNQFRIAFCGSGGRIIADMIHAPFIQEVVANSIAVRTFYPQARVAIELGGQDAKIVFFFHDNATNRLIAGDMRMNGSCAGGTGAFIDEVASLLRTPVEKFDALAAKGTQVYDISGRCGVFAKTDIQPLLNQGGLLENIALSTFHAIAKQTIGGLAQGLEIKPPVVFEGGPLTFNPALIDVFAQRLGLSGSDIIVPPKAELFIAYGAALSIDEMFANYDKNFSPQAALTSLSMYREIVTGNTSMQNLNFFNTEAEREDFIARHKIQSINSDLINKKKGE

SEQ ID NO: 100612 - protein, 108 aa, Unknown
  Obtained from environmental sample
  misc_feature (1)..(108): Xaa is any amino acid
MLLTFSEVAKMIEAGESLHIAGSEALLRKLPKGNWAGGSTEYFMSRSGCKTADDVLSVLSFHDVEISIATYDEKNIHTVALDAFDNGFSIVIIPFDSAAHKIFAEKAD

SEQ ID NO: 100613 - protein, 210 aa, Unknown
  Obtained from environmental sample
  DOMAIN (2)...(204): haloacid dehalogenase-like hydrolase
  misc_feature (1)..(210): Xaa is any amino acid
IYNGTFIVNAYTKEKLFSLYFTEEEKTMIINILDKYPIYPLVYGFINDEERVSWIKGKENDGIKGYINSRKGDKRLRPIKTKEELYNGKLFYFTCIGKKEELTDIYNYFKDTNEFTCTFQQELYREEYWCEIMPKKATKGNAILGLKEKLKCDKIITFGDSVNDIPMFKISDKSYAVKNAVDELKKYATGIIMSNEEDGVAHWLEENYGR

SEQ ID NO: 100614 - protein, 198 aa, Unknown
  Obtained from environmental sample
  misc_feature (1)..(198): Xaa is any amino acid
MNAKEPDISVQPQDAEVSAGTRHSLSITATSIDGGILSYQWYSNTSDSNSDGTPIPGATEAIYSFTVDSEIWYYYVVVTNTNNEVTGIKTATVVSDVITLTVNAQTPNITVQPGTTTIGHHLEHILSVTVNVTDGGTLSYQWYSNTGNSTDGGTLIPGGIDSTYKLTIDEVGIYYYYVVLTNTNDKVNGAQTISITSD

SEQ ID NO: 100615 - protein, 289 aa, Unknown
  Obtained from environmental sample
  misc_feature (1)..(289): Xaa is any amino acid
MTVTPIDASGTPEQTMSFTSGTGSLTLNSGYYRVTLNLFNNSSSSSNTSMRSVERRELLHIYQNMESPFTYTFTVDHFTYLIVTSDADSGLGTLRYAIDVARANNTIIIDPEVKTIALRSGLSIDKNLTIEGNGVTITRSSSWTSGYDNRLLRVNYSEVNINRVWFKNGITTDNGAAVYSYYGNVTLESCIFSGNQSNNGGAIYNYSGIMDIKGCTFLGNRSDNYGGAVYIDGGTLTLTGNLFYGNTASSYPLIYRNYGSISSTGYNVVDVVLGESSSLSGWYPNDGDK

SEQ ID NO: 100616 - protein, 285 aa, Unknown
  Obtained from environmental sample
  DOMAIN (1)...(70): S1 RNA binding domain
  misc_feature (1)..(285): Xaa is any amino acid
KNQVGKGIVKNITEFGAFIDLGGVDGLLHITDMSYKRINDPKEIVQLGQEVEVVILDFNDKKERISLGIKQLHPHPWKDVAERYPEGTKVKGKIVSVTDYGAFVELESGLEGLIHVSEMSWSAHLQHPNKLFTVGQEIEAVVLKVEAENERISLGTKQLETDPWESIESELLPGAKVTGEVRSIATFGAFVEIKEGVDGLIHVSDMSWTKKIEHPGEMIKKGDKVECVVLAVDSERRRISLSMKHLEDDPWDSVENDFQVGAEVKGKIIRLIERGAAVESYTVVL

SEQ ID NO: 100617 - protein, 163 aa, Unknown
  Obtained from environmental sample
  misc_feature (1)..(163): Xaa is any amino acid
AEQKPEDTDSFSQKLKAGFRDFGGLFIPAATGLVKNGLAREMKSQSQGKISAYRNALEKVIERYPGLSTRDFLSMAKGNKQKADSFLAQKAAETMDENMDGALSSVDVKVLVADRIDSLDMLRVEKIVLDVMAGQLKWINIFGAILGALIGLMEVLISYFTRY

SEQ ID NO: 100618 - protein, 65 aa, Unknown
  Obtained from environmental sample
  misc_feature (1)..(65): Xaa is any amino acid
MYNSNIKYAPTLDASSNATEAYLRTTGWSQYLSTWYFYFRKIHFPQDPEIHGRWEWAGIYFGEKI

SEQ ID NO: 100619 - protein, 277 aa, Unknown
  Obtained from environmental sample
  DOMAIN (98)...(156): GHMP kinases N terminal domain
  misc_feature (1)..(277): Xaa is any amino acid
MLKNAQNLTVLAPAKVNLHLAVYGRRPDGFHDIESVFLAVDFADTLHFELAGPENNAEIVMESAGTEGGVPPIPLENNIIFRALSLFRAKTGFSKGLKIKAEKRIPIGGGLGGGSSNAASTLLALNKLAGNALNRDLLLEMGAFLGSDVPFFLHETAAALVTGRGEKIEVLSPPGLFITMVNPGFSSDTAAAYALLDKKRKSGKAAPQKSTVNEMDFPSFFNDFLPVFEEPESSVYNEIISRLKNLGAQYANLSGSGSTCFGVFGDRAKAMKAAEIC

SEQ ID NO: 100620 - protein, 180 aa, Unknown
  Obtained from environmental sample
  DOMAIN (1)...(106): RNA pseudouridylate synthase
  misc_feature (1)..(180): Xaa is any amino acid
DKETSGLVVFAKDSETHRSLSMSFERRDVKKLYIAIVHGRPSWKETSCDLPLIPNGNKKHMTIIDKYRGKKSLTHFICLTISGNYSVLQALPETGRIHQIRVHLAALGHPIVCDELYGKMSPIKLSSFKRGYRGDPIEERPLLNRLGLHAKELTLPDRQVLIAPLQKDMASLIKQLEKYS

SEQ ID NO: 100621 - protein, 89 aa, Unknown
  Obtained from environmental sample
  misc_feature (1)..(89): Xaa is any amino acid
VKPIALRIVWELYDSLKNLKANIPIVGLGGIACANDALEFLMAGSRAIQVGTATFSNPHAMIEIIDGIHKYMADNKISKLSDISIREKY

SEQ ID NO: 100622 - protein, 252 aa, Unknown
  Obtained from environmental sample
  DOMAIN (43)...(119): Ribosomal Proteins L2, RNA binding domain
  misc_feature (1)..(252): Xaa is any amino acid
MGIKTYKPITAGMRQWTSLDFSELTRGVKPEKSLTSGRGEKAGRDSHGRISVRHKGGGHKRRYREIDFRRDKIGVPGKVATIEYDPNRSANIALIKYKDGEKRYIVAPKGLVVGASIISGPNAPIETGNALPLENIPLGFTVYNIELTLGKGGQMARSAGAGALIAAKEGDYVTLKLPSGEMRMVFKKCYATIGTVGNEDHMNTTLGKAGRKRWLGVRPTVRGMSMNPVDHPHGGGEGKSKGIHPVTPWGQP

SEQ ID NO: 100623 - protein, 293 aa, Unknown
  Obtained from environmental sample
  misc_feature (1)..(293): Xaa is any amino acid
FAIGINHISESTFAYIQRQQDRWFSASHPKSTILEEEKNKAISDYESLKEIVHVFLGCEIDRDVDDQATVFGFKLEQSSLSDGQKVILQYCIAIHAQGASLNDHILIMDEPENYLHPSILFELINKIKEYNNKGQIWIATHSVPLLACFDPQDIWYMEDGLISQKGKVPEKVLCSLLGNEEQIEKLRDFINLPAQQAVIRYAFEALFPPPVKDTDFSDPQTIQIHSAIADFIKPNGKIKILDYGSGKGRLLNCTEESKKTFQDQVDYYAFDKSPKSNESQKNKEGCVYSIGQL

SEQ ID NO: 100624 - protein, 199 aa, Unknown
  Obtained from environmental sample
  misc_feature (1)..(199): Xaa is any amino acid
MSETNFRRMLDITKSLAINKEFRITHLTFSGGEPLLVLPKYLSILEEYVNVPGTEYSIITNGTLITEELAKFMAKYKISARVSLDHPIHSKPLKNGKNAAEATLEGIKLFDKYDVHFGINSVFDDTWTEKDIDELLDFLVSIKNGSFERTMHITSSHSLSDMSKVPTLLNLYDYCIRGVINRNILKTEFFWLSLRYIIM

SEQ ID NO: 100625 - protein, 273 aa, Unknown
  Obtained from environmental sample
  DOMAIN (1)...(273): Aminotransferase class-V
  misc_feature (1)..(273): Xaa is any amino acid
MTAAVFCLFAPGERVLIAEAGVFGARWRDIAASRGLDVVSLSAEWGQAVDPAAVKKILDESPDIRGVLVQISETSTGVLHPVEEIAGFTRQRNVLLVADGVSAVGISPCPMDAWGMDCLITGSQKGLMCPPGMAFIALSQRAWDKAAAVPDGCFYFNLFKERENLEKDQTHFTPPVSLLLGLQAGLDRILSHGLDLVYRKQWALTMMARTGIKALGLRPFAPARYTWGLTGVELPVGVDGAEILRHMARDHGVIMAGGQGRLKGRIVRIGHMG

SEQ ID NO: 100626 - protein, 277 aa, Unknown
  Obtained from environmental sample
  DOMAIN (1)...(241): Ammonium Transporter Family
  misc_feature (1)..(277): Xaa is any amino acid
MVGGVASLVGAAIVGPRIGKYSEKGESRAIPGHSLTLGALGVFILWFCWFGFNGASTVSMTGENIVSASKIFVTTNLAAATAAVFTMFITWIRYKKPDVSMTLNGALAGLVAITAGCDAVSPFGAFIIGIVAAFVVVFGIEFIDKVLKVDDPVGAIGVHGLAGAAGTILTGIFALDGGLAYGGGWHMVGIQALGVVAVAAWVAITMGIIFTIIKKTIGLRVKPAEEIAGMDITEHNIESSYADFMVATSIEADKDAVVPANVAVPVVNNSKPGAKMT

SEQ ID NO: 100627 - protein, 265 aa, Unknown
  Obtained from environmental sample
  misc_feature (1)..(265): Xaa is any amino acid
MFPDHRNYIEYDTQEEIWDSLKKGEADAIFASRRRLVIYTNYREEAGFKLNLLLDHEFNSSFGFNKNAAVLKSIVDKAIRLININNISNQWMNRTYDYRVKSVTAQRSWFIGMSIMIFFMLSLVSILFIRSRNTGRQLESMVKQRTLDLAFETSKLKAIINSIPDSLFCKDKDFRYVQCNKSFEELIGHREADIMGMTNKEGTWFSDNESEMINRTELTVMNEDRTMTYEQRITSPSTGKMCFFELLKPDYTGRASYGVDHHYAR

SEQ ID NO: 100628 - protein, 76 aa, Unknown
  Obtained from environmental sample
  misc_feature (1)..(76): Xaa is any amino acid
MKLDPILTKAVRFARKKKYDQAIKTLETEVNRYYGSFTYYYLLGLSYLHSRVFGMALTYLRQASEQKTRDPSTLLG

SEQ ID NO: 100629 - protein, 79 aa, Unknown
  Obtained from environmental sample
  misc_feature (1)..(79): Xaa is any amino acid
MDVIQRLVDQGNTVIMIEHNLDVLLQSDHIIDLGPEGGEKGGQVIATGAPEQIAISGASYTGAFLSEMLNRNAGRKNRR

SEQ ID NO: 100630 - protein, 294 aa, Unknown
  Obtained from environmental sample
  DOMAIN (1)...(260): Aminotransferase class-III
  misc_feature (1)..(294): Xaa is any amino acid
AGEKLTEITGFDRAFFGNSGAEANECALKLVRKVFVEKGEKRHKVITALGSFHGRTLAMVAATGQPKYQSPYAPLLPGFAHVEFGDIGALEKELDAQTAAVMLEPVQGENGAVVPPKGYLTQVRELCDRHGALLVLDEVQSGMGRTGKILCADHEGVRADITTLAKALGNGFPIGAAIAKEEIAQAFKPGDHGTTFGGNALACAVACAVLDVMIDEDLPARAQKVGAAFLAELGGLAKKHENLCVQAHGMGLLLGLKLKAQVDGKRIVKEMMHKGFIINLAGNNTLRFAPPLVV

SEQ ID NO: 100631 - protein, 61 aa, Unknown
  Obtained from environmental sample
  DOMAIN (1)...(52): Aspartate/ornithine carbamoyltransferase, Asp/Orn binding domain
  misc_feature (1)..(61): Xaa is any amino acid
MKQAAPDAIFLHCLPAHRGEEVTDEVMEAPYSKVFDEAENRLHAQKAVMAELMGGVRLGDV

SEQ ID NO: 100632 - protein, 307 aa, Unknown
  Obtained from environmental sample
  misc_feature (1)..(307): Xaa is any amino acid
SQTAPVDDAGYYAFKLNSEYLNVGNNAITVTSNFGGPTLVSSRAYNIVYRDGGPWVTIDSFKFAEFSYDRAYLSGRTGYVLSDADKELLTDKKLDKEIKSAILAKTPDFTEISFDNGRSFIKTNKALAKGVDYRFRLEDSEMPEGYHYIVIKTTMKNGETVVTRMIVQIDKTFPEIRLISPEAGSRYNEKIAYSASATDDIELVSLSYHLRKGDKAMYAVPGFLQGLYLEGVIPPFVRQLAPDVVPTIFAGGATYTDFGLGLSFFDDNVQIQGQYGMMTQDFYEALGGTGTIRYGGNVVGFKNIANI

SEQ ID NO: 100633 - protein, 156 aa, Unknown
  Obtained from environmental sample
  DOMAIN (7)...(155): Dihydroorotate dehydrogenase
  misc_feature (1)..(156): Xaa is any amino acid
LKTSEPDLSVVIAGVKFRNPVIAASGTFGYGREYEGLLDITGLGGICTKGLSLDPRPGNQGTRIYETPSGMMNSIGIENPGIRFFIEKELPRLKKLGPVIIANLSGSSVQEYVQGANILGDSDVDMIELNISCPNVKSGGMTFGLDPETAGSLTRQ

SEQ ID NO: 100634 - protein, 141 aa, Unknown
  Obtained from environmental sample
  misc_feature (1)..(141): Xaa is any amino acid
MAEPWDTSREKAQELRLEQWGTLEEVKAMSAPLRQASNRRDAMDYLKEIARNSTFTSRSGLPARLSNRSLGKIVSHASVVSSFCPEAHYLAAANIDKLYANAIEPWEFELNPNKDNTGLKARRYLYAPMEYRGKITIVKIT

SEQ ID NO: 100635 - protein, 76 aa, Unknown
  Obtained from environmental sample
  DOMAIN (8)...(61): Helix-turn-helix
  misc_feature (1)..(76): Xaa is any amino acid
MGISYKPLFVTLANKGLKKTDLMQLAGISAGTLARFAKGEKVSLDVMEKICAALGCQIGDIVEYVPDAPKPKKGKK

SEQ ID NO: 100636 - protein, 115 aa, Unknown
  Obtained from environmental sample
  misc_feature (1)..(115): Xaa is any amino acid
MNSSAPDLAARLREIRGKIEGACGKAGRSPESVRLIAVTKNHPAETVQRLIDLGVRDIGENRVQEIEEKVPRLVGEFTTHLIGHLQTNKAQKVWPLAGWIQSVDREQLVRRLEGL

SEQ ID NO: 100637 - protein, 213 aa, Unknown
  Obtained from environmental sample
  DOMAIN (3)...(174): Thiamine pyrophosphate enzyme, N-terminal TPP binding domain
  misc_feature (1)..(213): Xaa is any amino acid
MQYTGAQILIESLIEQGVDTIFGYPGGAVLNIYDELYKHSGKIRHILVSHEQHAAHAADGYARSTGKTGVCLATSGPGATNLITGIATAYMDSVPLVAITGNVPTGILGKDSFQEVDITGISMPIVKHNWIVKKVEDLAEVIREAFEVAASGRQGPVLIDIPKDITALTTEWSPPSKRKKDEIKDKTLSERGKRLDERTTRVSFTSEEMKKPR

SEQ ID NO: 100638 - protein, 81 aa, Unknown
  Obtained from environmental sample
  misc_feature (1)..(81): Xaa is any amino acid
DIGIINEGDIIAIDIDGLSINVKISEEEIARRRKSWQPVSKTHTGYLARYAAQVGSAAQGAVFTKTDAELSEESYNFNWGD

SEQ ID NO: 100639 - protein, 127 aa, Unknown
  Obtained from environmental sample
  misc_feature (1)..(127): Xaa is any amino acid
MKKETKATVNVRVKPQRAPRRQPRIKSKLPEVLPPRYDIVFKQVFANRPDLLKPLLKSMIGLPEGDYGRIVVVDPHIYPEHKGEKLGVLDIKVVLRSKKVIDVEMQQKKVAHLRERVVFYCSGMIRE

SEQ ID NO: 100640 - protein, 278 aa, Unknown
  Obtained from environmental sample
  misc_feature (1)..(278): Xaa is any amino acid
MIRWLKTLMKGECIHGRLDIMAEDEAAFLGLLGIRSILFVPIFTYNKFWGMVVLEDHTNYRYFAEDCLDLLCAAARLCANAFIRMEMTHHIDDAFAKLERREQLVDTLNKMAIVFLSQSEGNFEDTMTVGVGKIADVIHLDRFSIWRNYPMPDAMHVSQIYRWDREAGGTTVPLKGLTDVTYAQFAPRWEKLLASGETINSPAKLLPEAAILQSFGCVTAFVTPLFINNVFWGGALFEDRHSERFFEEDCIEVMRSAAFLCANTFIRAEMERKIIDAN

SEQ ID NO: 100641 - protein, 107 aa, Unknown
  Obtained from environmental sample
  misc_feature (1)..(107): Xaa is any amino acid
AAILSRVVSHPNEGLFTLDTGSKAIATDPADRGVIADLPEAKPVFQSEEHWVWTLEGKDPPPIGKILYILPTHVCPTSALYPGVVVVKKGERSDYWEVGARNRKISV

SEQ ID NO: 100642 - protein, 160 aa, Unknown
  Obtained from environmental sample
  misc_feature (1)..(160): Xaa is any amino acid
LYCVDEMNIVIQTLREHIADRNVRFVFPSQIASDLWARKTCTLGIARSVAKDRFLAWDDFKKEAIQEKETRRKPATAVMRDLFADALTKRNTEESFLKSLIPPEYSGNGKVFAPFIARLLPSLKYWETLWIKLMQKFPNRQRDAEDDDYETVKKEYEAFL

SEQ ID NO: 100643 - protein, 211 aa, Unknown
  Obtained from environmental sample
  misc_feature (1)..(211): Xaa is any amino acid
VSDAGRIQELLESAVFDGDGCLTVTPTRDLNVYYKCSLSWLYDRVLGAEEFSLEAVLLDDTSLGILYHKILEKIFVKIKNEDRVFVSGRLDIYKKWTLEITSEVIKEHPAFKGPLAVPLVFPQAAGMSKKIERLLELEANNFSGYEVSELELRVSHKAGDLFIKGVIDRISVSPDGTPVIIDYKTNSLPDQTSAENLTEVPLSEFQMPLYI

SEQ ID NO: 100644 - protein, 193 aa, Unknown
  Obtained from environmental sample
  misc_feature (1)..(193): Xaa is any amino acid
MRICDKIDMIPAIHGAEMFAREARRVCSDGKYDCIAVDIPELFQDDLAEAVDELPLISALIAYTPNIYGGGRAYGSVGIDVDIDNDNDDDDLPFCYYIPIDPCDAMIEGVRQARQRRVPFRCVGSYTLRPPIPMAAMPDEYSVNKIGFDAYTLLCRTAVKDMFNGKGMSAVNNNNGDDNSQSPRESFLAHYSE

SEQ ID NO: 100645 - protein, 191 aa, Unknown
  Obtained from environmental sample
  DOMAIN (13)...(191): Integral membrane protein DUF112
  misc_feature (1)..(191): Xaa is any amino acid
VELELYSIFSLSHILNNLAGTAIGIIFGALPGLTATMGVALFLPFTFGMDPIGAFALLLGIYCGGIYGGSITAILIRTPGTPAAAATVLDGYPLAQQGQAFGALSAATIASFLGGIFSCVVLILLAPQLARVALEFGPPEYFAVGLFGLSIVASLSSDNLLKGMLAAMFGLMLATIGMDPITGLTRYTFGR

SEQ ID NO: 100646 - protein, 281 aa, Unknown
  Obtained from environmental sample
  DOMAIN (2)...(253): Putative esterase
  misc_feature (1)..(281): Xaa is any amino acid
MALIEFNFESQYLGNNHTVGIILPDKPRQLSPKQFYGSGKKYPVLWLLHGTYGDYSDWIRKSNIELYACENDIIVVMPSALNSDYANWSNFATGYHMWDYFTEELMPLIHNWFPASDKREDNYIAGLSMGGGGTLKLALAHPDKFAGAAVLSSSARNYDYLKPYVNMTGAEFSKKAMAGELNLQSPAVVNILAQSGLPQGQANAISSGLAQRQVNAISKYPTVGDYLSSYENAWDRFEEVVKAGKLPKMYCAIGTKDFLYDMYCKFKEFAVKTHAHITFEE

SEQ ID NO: 100647 - protein, 286 aa, Unknown
  Obtained from environmental sample
  DOMAIN (107)...(279): DEAD/DEAH box helicase
  misc_feature (1)..(286): Xaa is any amino acid
ANGSAGGIVPGACVTGLAGTAPVSIVAVKWFNDTAIEVTFKGANGQPANELLYRNDEGRLAIKEAGLPWSFDADAKLLRLVSEAYRIHLAHVFDPYLAVHASAIDPLPHQISAVYKEMLDRLPLRFVLADDPGAGKTIMTGLLMKELLARGDLRRCMIVAPGSLVEQWQDELFRKFGLNFAILTNDQIESAATGNVFMEARHCIVRLDKMARNEDLQVKLKATDWDLIVCDEAHKMSATVNGKKVHYTKRFLLGRLLSSIARHFLLLTATPHNGKEEDFAQFMSLV

SEQ ID NO: 100648 - protein, 272 aa, Unknown
  Obtained from environmental sample
  misc_feature (1)..(272): Xaa is any amino acid
MKIVKLQAENFKRIQAVEIAPNGNVVVIAGANEQGKSSVLDAIMAAISGGRGMKDISEPVRQGADRAEVNLDLGDLRIRRVWQDGKTRIEVTNAEGQKYSSPQTMLDALTGSLTFDPLEFARMPPRDQRATLLRLVNLPFDIDDNDRERAALVQKETAAKQDVKRLEASVNGLPSVPLGTPSEEVSATEIYSELTRMREQGAANNKKRQDLDKVRYQCAQSEAEVREVDGHIAELRQRLAAMEALQEGRKAHLAEMKAGAELLEAEVAALVT

SEQ ID NO: 100649 - protein, 223 aa, Unknown
  Obtained from environmental sample
  misc_feature (1)..(223): Xaa is any amino acid
MRKRYPPVITHNTGGKGPGRDKAPFPQINARHGELFPEGLYVAVSRPEELYIVQSSRPVRVMLALSEKNAKRLSAEDKPPLPFKPAETILTLSPWFPQKTAEYETGLSAEAIGKLIEKGYTQYVLNNMGHFSLFKGYEKIKLIAGPWLYTFNSWSLSFVSSIGNGVDGVITPLENNRQNLERTLGVKGRNSENKNRKKRQSTGALHSKFFITVFAWPPLFNIK

SEQ ID NO: 100650 - protein, 263 aa, Unknown
  Obtained from environmental sample
  DOMAIN (1)...(115): Pyruvate kinase, barrel domain
  misc_feature (1)..(263): Xaa is any amino acid
MEIARLADGAMVARGDLGQQLPIEQIPLAQKHIINVCRRAGKPVITATQMLESMIVNPRPTRAELTDVANAIFDGTDAVMLSGETSAGAYPIESVKTMDKIAYAVEQSNEFHKRMKNFHNECHSEVHNPKENLGIIMSRSGVEIAAAVKAKAIVTPTRSGNTARILSVFRPDEPILAVTSDGRAERFMQLYWGVNTCITSKVDDSESMIQNTMKVVSETGVAGISDKVVLIAGLPLESPNMINNVRVVIIGTVLARSSAGGYA

SEQ ID NO: 100651 - protein, 281 aa, Unknown
  Obtained from environmental sample
  misc_feature (1)..(281): Xaa is any amino acid
MDNRRKEEAEIIYLDTVQPVPVKWLAYPYLPLGKISLLIGDPGVGKSTVAMSMTAALSNGKPLFGADAEREPIQGKTVYLSAEDNKADTIKPRLMAAGADCSQVAVIKNIGHDISVDGYILEDALVKTKARLVVFDPLAAYIGKDADMCRAADMRRIMGSLAALAEKYECAILSISHLNKSTGTKSLYRGLGSIDIAASARSVMLIERSEDDPSVRLISHIKSSLAPEGHTMAFQIEESSAVSFLEKYEEEVSGNGHEEQEDGKRELATNGFSVCCPAVRC

SEQ ID NO: 100652 - protein, 299 aa, Unknown
  Obtained from environmental sample
  misc_feature (1)..(299): Xaa is any amino acid
SAVGMFSGFAIAIILGKEPGLYLYSIIMAAGIVCGVTSGMLIGKVPEPPTEKSAVKTSLVGLIREALHEPKTKLFLIILLLVVLVSGVSRTFLVVYAREVFIQEDGMVLLYSVFGGLGQLLANMLIKFLVDRIGAKPIFIICVLLGFVMMIPIVFFPLSSVNSLTMVILFLSFLFFMLNFGFLGSEGIAQTYFMGLVPTEKMLDMGMLYFFVFGVAGAGGSFLAGLMLDILSALGLPPFYSFKILYAALIVLAAIAVFKMQKLTPLGALSFTGAVKVMFSYRDLQAISLLDRLDKTADS

SEQ ID NO: 100653 - protein, 126 aa, Unknown
  Obtained from environmental sample
  misc_feature (1)..(126): Xaa is any amino acid
MRDDMTKKVTGHWADECARKIVREKGEKDQYTCASGITPSGTVHIGNFREIISVELVVRALRDMGKKVRFIYSWDDYDVFRKVPKNMPKQTELQKYLRFPITMVPDPWERDSSYARHHEVDVENSL

SEQ ID NO: 100654 - protein, 179 aa, Unknown
  Obtained from environmental sample
  DOMAIN (2)...(140): RecF/RecN/SMC N terminal domain
  misc_feature (1)..(179): Xaa is any amino acid
MFISSLRTTFFRNLADTTVFTGAKNVFLVGENGQGKTNFLEALYFCAYASSFRGARDSELANNGRNEFSAAVKTEETSGGEVLVKFDKGKKTVFIDNKRIEDRKDLLLVAPCIVFCHEDMNFVSGSPEQRRWFFDQALSLYDPVYLDDLRRFRRVLKSRNTVLRDFARHRLSGSPEQVL

SEQ ID NO: 100655 - protein, 179 aa, Unknown
  Obtained from environmental sample
  DOMAIN (19)...(179): Xylose isomerase-like TIM barrel
  misc_feature (1)..(179): Xaa is any amino acid
MGLEAFPACFSVDAVEKLADNVLSRGFSAVQFAMERVFLAVKPTHLNQGMAWKLRNAFESRGIQIAVLSCYKNLIHPDKEEQKRELNCFRRYLEFCRELGGNYVATETGSRNIDYSFHPDNHSPQVLDELVDNVRQMVTWAEDFGVRVAIEGVLKYPARSPAVITKILDCIDNSHLHVI

SEQ ID NO: 100656 - protein, 300 aa, Unknown
  Obtained from environmental sample
  misc_feature (1)..(300): Xaa is any amino acid
VALNPFAPDGTLALDGFSISGREGINADIEITAVSSKINLFCETLGIGGGAASSGSVVSIADFNASLELSGDKTDFSVYAEKAGGVKTDRARKSEYFSVNGSAGAGAGNLDANILLDSFPVGDLAGLVAPFVKDPPWPDMLINLIGDTAITADLFLSFDAGKLSYNAPNFSFSGNPGGFSGLASIKGTGGSFDLSNGQIRRGEDLLLLSARADFAEGKDIGFSVNTVYHDLEYYIKGSVRDGKTVNIQGAYGLNVNITASGNNAYSGAIHIEGFPVPFLGKPALLFLRRISAMIPRRPGQ

SEQ ID NO: 100657 - protein, 244 aa, Unknown
  Obtained from environmental sample
  misc_feature (1)..(244): Xaa is any amino acid
VELPRNNWHFFRILVCLAFRELGLPVNEKAEEESYSIIESCYRDEGWYADGPAGAFDLYNPWAFHFYGLIYARIAGNRNPARAARYVERAKLFAPRFAQWFRDDGSSIPYGRSLTYRFSALSFFSACAFAGVEALPWGVMKRIVLQGMRHWFSRPILDKGGILSIGYGYPNLIMADRYNSPGSPYWALKMFLVLALNENHPFWQAEETPLSNQPQVTADKIPGLIISRNADDVQFLCSGRIAPF

SEQ ID NO: 100658 - protein, 284 aa, Unknown
  Obtained from environmental sample
  DOMAIN (2)...(284): Glycosyl hydrolase family 57
  misc_feature (1)..(284): Xaa is any amino acid
MMEENWLYEAMTETYIPLLAYFDNLLSDDIRFRMTLVLTPTLCAMLSDDLLRNRYAAHIGRLIELADKEVRRTRHNATMNRTARMYLERFLLCQYIFEDKYGRDLVAGFRKLQDAGVLEIMTCAATHGYLPNMQSNANAVRAQVDVAVRSYHGFFGRRPRGIWLPECGYYRGLETVLHNCGLRYLFTETHGLLDADPRPPSGVHAPVRCKEAPVAAFARDAECSRSVWSADEGYPGDPHYRDFHKDIGHDLDMRYIAPYVDPAGIRIHTGIKYYRVTDKRNPDK

SEQ ID NO: 100659 - protein, 95 aa, Unknown
  Obtained from environmental sample
  misc_feature (1)..(95): Xaa is any amino acid
IEGVDIVAEGAITLNQVYNILDEPIELLFEDSVVERLCLMLHEADVIHMMIGNASNTAHNDLIFKQTGVHVRNSIIQQIAEKLNSKGKLVVKRYY

SEQ ID NO: 100660 - protein, 285 aa, Unknown
  Obtained from environmental sample
  misc_feature (1)..(285): Xaa is any amino acid
DQVCLGVIGLYNFPNLSLKAKAYCTNIPPQGPFSGFGLAQGSFAMERHISLIADMVNQDPSELRENNIDTQIIPPQLKQKNNTNGKNLIKSTIKMSDYNHKWASYELLRKSRKGKKQEKGENPRGIGIAVGFQGNGLLYTGEDNGIYSVEVTLTKEGLLEIKTCITSMEDYAKIWGKIAMETLSIESDMVRIIISNAPDCGPSCSSRNITVVTKLVEKCCQAIRKQRFHDPLPITVRRSIKPQYGTLMGGRFTAPQGKNIDINSFSKLGLACAVVEVSIDLIECI

SEQ ID NO: 100661 - protein, 160 aa, Unknown
  Obtained from environmental sample
  misc_feature (1)..(160): Xaa is any amino acid
MQEGTDNLFKPDPVTDEQYKKQLASFIEHKSSKSTLIDMGILPPIYSEFGIPDKQIKTNGKTVLKALGLQGINRHHVSLETIENLLSLAYDPEAVFKSLPTSLNPNAYVAVLDAKASNQKQIIAILSPSRDGQGFTFIPSVYERNRFEQFIEKTYSKNRI

SEQ ID NO: 100662 - protein, 283 aa, Unknown
  Obtained from environmental sample
  DOMAIN (29)...(268): Alpha amylase, catalytic domain
  misc_feature (1)..(283): Xaa is any amino acid
YSNNPGSSGSGSGSGSNNTRTGNEGTWYEIFTGSFYDRVTPNGAGNYIIGADGIGDIQGIIYKLDYLNDSHTHTPGVECTKSLHVDGIWLTPIMPAPSYHKYDTTDYRNVDPNFGTIDDVKELVRECHKRGIKLIVDLAVNHTSPRHPWFLDALREFKSGNLSTYSKYYNFHTSKNRDPNRWNEFRDISDHWYRPDQMLSQAELPADLKGGDIQTPSGEYIFCYGAFGPWMPDLNWDNKALRKDFEDNVLKFWLEPQEKGGIGIDGFRLDATKHIYETGEWTG

SEQ ID NO: 100663 - protein, 234 aa, Unknown
  Obtained from environmental sample
  DOMAIN (4)...(60): CheR methyltransferase, all-alpha domain
  misc_feature (1)..(234): Xaa is any amino acid
MKITLTEFKLLRDYLEERSGICLNEDKAYLLENRLASVIESYKCKDFSEFYYILKGAKHEDLDNKLIDIMTTNETLWFRDAHPYAILREKILPSFVQAVKDGKKDKIKIWSAASSTGQEPYSIAITVRDFCMGHNIIKKEMVQITATDISDSCIEKAKAGVYDSIAMSRGITQEQLNRYFMKETANSYSINHEIKSMVKFQKFNLQDNPIILEPHFDLVFMRYVAIYFSDEFKK

SEQ ID NO: 100664 - protein, 149 aa, Unknown
  Obtained from environmental sample
  DOMAIN (12)...(35): Prokaryotic N-terminal methylation motif
  misc_feature (1)..(149): Xaa is any amino acid
MEDFMSIQKLKKGFTLIELMVVIVIIGILAAIAIPKLFGMSAKAKAQEVGPAVGTWSKLQLAYKMETGKWGDAKEISYKVPGADTDPKSGTTSNFSYSITDPTPKAEDGKPAVEQTSSGVWKATSKFKADECDEGKYWAAEFQKTVSVT

SEQ ID NO: 100665 - protein, 228 aa, Unknown
  Obtained from environmental sample
  misc_feature (1)..(228): Xaa is any amino acid
DSFWWRGHSYYDLWWRGTWEKEGGGCTLNHAVHHIDMLLWMLGPPKKVSAVISNAAHDNAEVEDISVAVLHYGGGLCAEGAIAQVTSSVIHHGEEQQLIFQGEKARISMPWKAAANIARPNGFPAKEQNETLIAQLNGYYESLPELAHTLHTGQIDDVLTAVETGSKPLAGGEDGRRAIELITAIYKAGTEERAVKLPIQTGDPFYSVKGIMERVPRFYKKSASVEKL

SEQ ID NO: 100666 - protein, 296 aa, Unknown
  Obtained from environmental sample
  DOMAIN (1)...(113): DEAD/DEAH box helicase
  misc_feature (1)..(296): Xaa is any amino acid
DEIAGGDEGLNLKIATYDGDTPDSLRVSARDTGRIIISNPDMLHTGILPNHPKWIKFFSNLKYIVIDEAHAYRGVMGSHVANVFRRLRRVCAFYGASPRFILCSATIGNPAELAASLIGQDVELIDKNGAPGGEKRIILYNPPLVDAVQGIRRSVVTESRRWMVALLKAGIKTILFAHSRVKTEVAASYVNEDLANIYTDNSGIRVEAYRGGFLPNERREIERGLREGTIQGVVSTNALELGIDIGGLDASVVAGFPGSFNSFWQQSGRAGRRGGSSVSVFIASVSPLDQFIMNDP

SEQ ID NO: 100667 - protein, 301 aa, Unknown
  Obtained from environmental sample
  DOMAIN (1)...(222): Nucleotidyl transferase
  misc_feature (1)..(301): Xaa is any amino acid
VRQIYIVTQFNSASLHLHIGQTYIFDTFTKGFIEILAAEQTFERESWYEGTADAVRKNLPHFRTQNPSYYIILSGDQLYRMDLQDLLKKHIDSGASISIACTGVTRENASGLGILKADKSNQITEFLEKPGPTRDISDFKAPPEIRVDKSKDDSYLASMGIYVFNAKAMEDCLANNLTDFGKEVIPSAINRLKVNAYLFDGYWEDIGTIKNFYETNLELTDVRPRFDFYDEQKPIYTHMRNLPPSKMNFSNMNQSIAAEGCIITNANVTNSIVGIRTIIETGSSLNGVVCMGADFYESEAQ

SEQ ID NO: 100668 - protein, 295 aa, Unknown
  Obtained from environmental sample
  DOMAIN (115)...(295): Outer membrane efflux protein
  misc_feature (1)..(295): Xaa is any amino acid
SLKYEDAHRQVSIQITKKFYSLIAEKNNLLLLEEVLNLAQRQFERNEVSFRNGLVRELAVIQSRLAVENARYNLSAAKTAYANNMGDFLAALGITADDNITLLGEVIITKINANADNLISGYLPERPDIVSAKREIERLENAQKQSFFQSRAPSLNLSMDWNTSKFNPFTDSFSASARLSIPIDPWIPGSSKEQTVRRADDSIEKTKLDLSITEDSAKTQIRSLCSQLVNSWNSIEIARLGLEAAEVGYQLTEQGFRSGTVESLVLEDARNNLASARQRLLQTELSYFNMILDLS

SEQ ID NO: 100669 - protein, 219 aa, Unknown
  Obtained from environmental sample
  misc_feature (1)..(219): Xaa is any amino acid
LRNYYDKRDVIGYLRFVGPDFQANSGVYITSKPKESDVKESRIQTITQNNLKEMSIYISVRHCILTTWINHNDQFLYPNKKWEIDDEFQNDCLAYMLFYDKNNISSKHGINHWIPFIEWDVGAHDKFDSHFMTDFIAGKMDLIVAEPGLFYNAGAGTGGGTGRVPYKEKKALKFSKAAKNVFKAGLELWKYYHTQPKCNVNASLYDIREYFQGRNAQGK

SEQ ID NO: 100670 - protein, 299 aa, Unknown
  Obtained from environmental sample
  misc_feature (1)..(299): Xaa is any amino acid
PLYVYGTGQEFENNRIVLSKGNSSVSYRSKGKQRAFDPSNFTIPQAQNYYFALSNWQDLSYTRWYQNASSLRNEDDVTGYLSEALRQNNYNAALNSIPRDFTGSTQHTYKSAAFLGGMTSAYRTFVSEENKMLNAIKTLMNENSLDILKEEHIIDYLLTRGDTVLAYDIIRLIQETKSEKLTIDYCPGLLEAYSDIKRWNTSIDNPVEPLIEQILILVSENLSKDTVSSLVYASGSKERDLYFSVRLGNTLINWAEDAKNADWADIGRSLVLSALTNAGPGAGNLYANLKLSEYYPRAL

SEQ ID NO: 100671 - protein, 170 aa, Unknown
  Obtained from environmental sample
  misc_feature (1)..(170): Xaa is any amino acid
HFAGHKKSIYFKIVNQGTAGIEYTFKDTSRLNLNVINTLSIPVTIKADDFIDASTAPDTDTDDTDDTDDNTDDTDDADDTDDDTDDTEDTDDYADDDADDTDNTDTNNDEDKFILTILTIEGNNSKKAFIYTSTPKFTIVPDTSAPPDTSYLNITIEWKLKDDTINVIIK

SEQ ID NO: 100672 - protein, 207 aa, Unknown
  Obtained from environmental sample
  misc_feature (1)..(207): Xaa is any amino acid
WAIRFFNIVEDVSNEQMQQLWGKILAGEVKQPKSFSVRVMELLKNITKEEAELFEKCANLIIYDGYRKFILDDDEISKKNNLTYDEQLLLAEMGLLQADSNTSITVERSKFDDVTEVFLYGKYAIKVTLNANSSSAMIPIKVLTKAGNDLLKLVSPCITIDHIKTFCLYMEKINFTVEYSLLKGHHDNSISRTLPWTTFNKNDFGKS

SEQ ID NO: 100673 - protein, 276 aa, Unknown
  Obtained from environmental sample
  DOMAIN (128)...(232): Oxidoreductase family, C-terminal alpha/beta domain
  misc_feature (1)..(276): Xaa is any amino acid
MFYEAIASTFRDRATMTAFCDISQTRMNYANRLLAGHGAAPAKTYHYTDFEKMLDENKPDTVIVTSVDRTHHDYIIRSMEKGCDVITEKPMTIDEKKAQAIIDCQKRTGRNIRVTFNYRYAPHHTKVRSLIMDGIIGEVFSIHFEWLLNTRHGADYFRRWHRNKLNSGGLLVHKSTHHFDLVNFWINSRPETVFSMGDLNFYGMKNAERRGMKNFYYRCHGSEAAKDDPFAIDIENNETLKALYLDAEADSGYIRDRSVFSEDISIEDTMGVMVRY

SEQ ID NO: 100674 - protein, 71 aa, Unknown
  Obtained from environmental sample
  DOMAIN (21)...(54): Tetratricopeptide repeat
  misc_feature (1)..(71): Xaa is any amino acid
GKFRHADIALSTAVHWMPSNAAWWTRLAYARENAGDYIQAVEAYEKAISLNSQLTDARRGLERVRQTLGNR

SEQ ID NO: 100675 - protein, 167 aa, Unknown
  Obtained from environmental sample
  DOMAIN (22)...(123): Uncharacterized protein family UPF0004
  misc_feature (1)..(167): Xaa is any amino acid
MVDAHLDNNAPSSAPLRLCVRKFSIFTLGCKLNQLESEAIADSFKKAGFRLVPWDLCALEPRIIIVNTCTVTSKADQKARRMIRKLLRDNPESCVIVTGCYAQLDTEEIKTLENKTGYAESAGYACCAGGTGRRLFVLGGGQGTTSSATAASSATAASSATAASSAT

SEQ ID NO: 100676 - protein, 139 aa, Unknown
  Obtained from environmental sample
  DOMAIN (15)...(48): Tetratricopeptide repeat
  misc_feature (1)..(139): Xaa is any amino acid
MAEEKQQAGEIRDATFFLNEAADKCWEAKNYPKAVEYYKKSIKLNETIPNWNGIAGINCNLGLIYFDMGEYENSYEYLKKTYTYRKENKDHHSVINALINMSVTLNKMKNYDESIKVMEEAVRESHEINDYNKMRSCYG

SEQ ID NO: 100677 - protein, 223 aa, Unknown
  Obtained from environmental sample
  misc_feature (1)..(223): Xaa is any amino acid
MNKKIFIACVCLGFVGSIAAQKPEEHKKTSYTDSTGRFIVQVDMPLYIYVATSPDDNAPHHRLARNDIKENKPIYLDGPGKHYIRHADNINHRAEMFDIYADGQAPKTTVSLTGASTFVNNGVTYFGKNLTVKFSATDDMAGLKQIYYSTDNVNFAPYRSIDASKEGNYNLSFYSVDNVGNVETVKQKNFVIDLSPPVSNHNIVGIVKDLISKDAKISITASD

SEQ ID NO: 100678 - protein, 305 aa, Unknown
  Obtained from environmental sample
  misc_feature (1)..(305): Xaa is any amino acid
ELNHKIANINTVRGKSPKIQANAPYSKPFKKPLFLPYMDKLIIKGAREHNLKNIDLELPRDKLIVISGLSGSGKSSLAFDTIFAEGQRRYVESLSAYARQFLGRMDKPDLDYIEGLSPAISIEQKTTHRNPRSTVGTVTEIYDYYRLLYARIGVPHCPVCGKEIREQPVDSIIETILQFKEGAKLQLLAPVIRGKKGEHQKIVEDARKAGFARARIDGVPVNLDESIKLDKQKKHTIEIIVDRLVIGKDIRSRLAESVETALQTADGLLLALVNEDGKNTEHFFSQKNSCPDCGVSIPELQPRLF

SEQ ID NO: 100679 - protein, 295 aa, Unknown
  Obtained from environmental sample
  misc_feature (1)..(295): Xaa is any amino acid
AFNRGISAAAAIELLQRLSGNRIDENAAFTLLDWEKRHKEVSLNKGLVLSLSPEREYLAETKPLSKYISAKLAPGIYMIPENMEEKVYAALQKVGITIFARPDSAGASNGAGQAYDDNILSRSASNDGALNSGALSSAADSRIFFPRIKGINTGALQAEKSSQFKTEKEDDGISISTSDPSASTLIEEFHSIINKMRLGAEQRDELKARINRRLVLCESQLKDAVVRYEKLEARGLDYAGKILIAKQAIARQLPVEVSWPGRQKQESVIGIPKALEKKDDENILVMESADAARFR

SEQ ID NO: 100680 - protein, 284 aa, Unknown
  Obtained from environmental sample
  DOMAIN (1)...(113): GTPase of unknown function
  misc_feature (1)..(284): Xaa is any amino acid
MFSTRNPNVGIVDVPDARLTRLSEIFKPDRTIPATVEFVDVAGLVKGASKGEGLGNQFLAHIREVGVIAQVVRCFDDPDIFHVNDRVDPESDMETINIELALADLDTLAKRRERAEKAIRVQAKAEQKAAEVVLAVLDKIGPALENGSPVRSVPLNDDEKAAIYDCHFISAKPQLYVCNVDEDGMKAAAGGAPGAYVQAVQKRAAAESSEAVCICGKFEAELADIKDPQEKLAFLNELGLKESGLSALIHSAYRMLGLRTFFTSGKDECRAWTIHAGDTAPKAA

SEQ ID NO: 100681 - protein, 271 aa, Unknown
  Obtained from environmental sample
  misc_feature (1)..(271): Xaa is any amino acid
MDGTPLSPALTYGTDYTIDNFLYGDANVGTGKTIGGTIKLLETDATKNWTISGTNASLSLKNGSISIAAPSAALMTATYGSSKAFESGENVALDNGSAKTVSVNWKTGVTNAGTISVFYGESKTAPKAQGSYPVTVTTTGGTNVSATEAAIALGTLTIREGNPPVIDSLKPAADTSYYSGKSVRLSVFASNPEGVKGGTISYQWYSVVGSDTVKINNKTTKDLDVSEKTPGTYQYAVLVGYSNNEQSKVSVLSSNITVTVYPEPVSIKNAV

SEQ ID NO: 100682 - protein, 292 aa, Unknown
  Obtained from environmental sample
  DOMAIN (91)...(247): Protein of unknown function DUF115
  misc_feature (1)..(292): Xaa is any amino acid
SRNNLAFVLEENGISRALSHFEKRERLKVEILRNRPLTGIDEQWYVSAENKIRAWAMKDDVNSATLQKFGKRWVRNILRNARAIRDLPGISRFAGLAGPAGDGAPPLPVFMAAAGPGLDEVVSLLPEIRKRCVIVAVDTSLRFLSRNGVEPDFALIIDPQFWNSRHLDRCLAENTRLIIESAVYPPVLRLACKRMYLCGSLFPLGKFIEERVDPKGSLATGGSVATSAWDFSRLLGARQIWIAGLDLAFPGNKTHYRGAQFEEKALAESWRLWPSESWLARAMRDGIPCNGP

SEQ ID NO: 100683 - protein, 177 aa, Unknown
  Obtained from environmental sample
  misc_feature (1)..(177): Xaa is any amino acid
MAQNLNYNATNSVCYNNLSSNCTTYGRLYNWATAMNLSVTCNSSTCATQVQSKHQGICPSGWHIPSDADWDALTTAVGGSSTAGGYLKATNGWSSCGNGSSYSYQCEDKFGFAALPGGDGSSYGFFDGVGYYGRWWSASEIDANFAYGRSIYYYDERVIWNSSNKFDFLFSVRCLKD

SEQ ID NO: 100684 - protein, 285 aa, Unknown
  Obtained from environmental sample
  misc_feature (1)..(285): Xaa is any amino acid
VSKEEARQAVAELVAALYPANMQQTIMNSFSMAPNADDPAYWENIRQGLAVQQTSAAARGEIKTEGDWRAEPGVAADGGVVITEYKGKDTAVQIPSQIDGKPVTGIGERVFLRKGITSVTIPDGVTSIGAKAFADNQLSSVTIPDSVSSIGEEAFIRSQLSSVTIGNGVTSIGKSAFALNQLSEIKIPPAVTSVGAEAFRKNQLTGLSIGGGVTSIGEGAFAGNQLAEITIPNSVKTIGRDAFADNQLKKVIIMQSDIANVAIAGSSPFGKAEVLTERAYKFERD

SEQ ID NO: 100685 - protein, 100 aa, Unknown
  Obtained from environmental sample
  misc_feature (1)..(100): Xaa is any amino acid
MHTHTKFCDGKDDIETLCRAAYEKSLFAIGFSSHAPVDKQLGFVTNWNMKSSLTEEYVSQVLVAKERWRGKLNVFLGLEVDYIRGKRSALDDDIIKLNLD

SEQ ID NO: 100686 - protein, 258 aa, Unknown
  Obtained from environmental sample
  DOMAIN (1)...(245): Beta-eliminating lyase
  misc_feature (1)..(258): Xaa is any amino acid
MTITNNSAGGQPVSIANIRETSEVCKKHGIKLCIDAARFAENAYFIKRREEGYANKSIKEIVREVFSYGDLFAFSAKKDAIINIGGLIGVKEDAALFQGCKERTISFEGFISYGGLSGRDLEALAIGLYEGINEDFLEYRIGQVEYLASLLDDAKIIYQAPAGGHGVFVDARSMFPHIPYNEFPAQALAVELYREAGVRSCDIGSYMLGNDPDTGKQLKSTFEFTRLAVPRRVYTQAHFDLIAEALVEIKKRADKVKG

SEQ ID NO: 100687 - protein, 161 aa, Unknown
  Obtained from environmental sample
  misc_feature (1)..(161): Xaa is any amino acid
NTTQTGIFIRKDWLDKLDLGLPKTTQQFYEAMVAFKTKDPGGVGNRVVPMTAMRQTYDNWGILMDLFIDPNISLKDEWVNTVIDQRFLLLGYKEGVRFLNKMYNEGLLDKDFPLYASDDESINKLKAGIAASYGANFDQLYRDSPRVYPKLDPQNHRSHSR

SEQ ID NO: 100688 - protein, 276 aa, Unknown
  Obtained from environmental sample
  misc_feature (1)..(276): Xaa is any amino acid
DAFANNQLTSVTIPDSVTSIGEGAFSDNKLTSVTIPNSVTSIGDDAFANNRLTSVTIPDSVTSIGEGAFYENRLTSVTIGNGVTFIGEEAFAKNEITRITLPENAIGKFAGLGTEDDFKFDGKGTITGYKGRETWFVIPAQIRGKPVTSIGAKAFREKKLTSVVIPNSVKSIGDNAFRENRLTDVTIPNSVKSIGDNAFRENRLTDVTIPNSVKSIGECAFYSNRLTSVTIPNSVTSIGEWAFANNQLTSVTIPNSVTSIGEWAFRSNKLTSVTIP

SEQ ID NO: 100689 - protein, 279 aa, Unknown
  Obtained from environmental sample
  DOMAIN (1)...(279): Glycosyl hydrolase family 92
  misc_feature (1)..(279): Xaa is any amino acid
IHGQVVFGPMFTDNGFWDTFRGAFPLLTLLQPNLNGQMMQGIVNAYKESGWVPEWQSPGHRNCMIGTNSASILADAWIKGIRGWDAEKAWEGLVKAAHNPGPVSSVGRLGTEHYDKLGYVPCDVGINESAARSLEYAYNDFCLWQFAKALGKPMEVQNKYRDRALNYSNLLDASIGFMRGKMANGNWQSPFRPDSWGGVFTEGCSWHWTWCVFHDAAGLSGLFGGDEKMANKLDEVFTALPTFESSYYRGVIHEIAEMVVADMGQYAHGNQPIQHMLYL

SEQ ID NO: 100690 - protein, 262 aa, Unknown
  Obtained from environmental sample
  misc_feature (1)..(262): Xaa is any amino acid
CASIVKRAENGDNFGVVLIPEGLIEFIPEIKKLIEELNDILAGEEKAFSEVTNYIDQLYFLSSRLTEPSYMLMESLPPEISGQFLMDRDPHGNVQVSRIETEKLLVGMVEKKLSTMKQQKLYNGKFSALTHFFGYEGRCAFPSNFDADYCYSLGFSAFVLIASGLTGYISSVKNLIAPADQWSAGGIPLTMMMDLEHRHGTQKPVIKKALVELDGKPFKTFTSKRDLWAEKTCFIVPGAIQYWGPQEVCDQPTITLKLEHEK

SEQ ID NO: 100691 - protein, 225 aa, Unknown
  Obtained from environmental sample
  misc_feature (1)..(225): Xaa is any amino acid
LGECVIAVTARSCSFPERELKEAVSFCKSENIRHVICDSEELDIEGFAQNPVNRCYLCKNELFTKIWAVARENGIENVAEGSNLDDNGDYRPGLTAVAEQSVKSPLRYAELTKDEIRFLSKNMGLPTWNKQSFACLSSRFPYGESITPEKLGMVDKAEQLLLDMGLRQVRVRHHDSLARIETDEDGFLILIDRKNREKVHTQLKQYGFTYIALDLLGYRTGSMNE

SEQ ID NO: 100692 - protein, 258 aa, Unknown
  Obtained from environmental sample
  DOMAIN (1)...(107): Tubulin/FtsZ family, GTPase domain
  misc_feature (1)..(258): Xaa is any amino acid
VFLTAGMGGGTGTGATPVIASIAREMGILTIAVVTKPFGFEGARRITNAEIGITNLSRFVDSTIVVPNERLIESTRDSTTWDEAFQIADEVLRQCILGLTDLIVTPMKMNLDFADVESVLRNSGIAHIGVGRARGADRLLQAVRQAVSSPLLETCITGATQILMSIKGGSDLNLKEVSNCGNIVRKVVDPSCNIIFGADTAESFGEEVQVMIVATGFKGQDGRAGAALDKRQQELLNMRHAAPTGPMTGVRGMTDIRE

SEQ ID NO: 100693 - protein, 146 aa, Unknown
  Obtained from environmental sample
  DOMAIN (4)...(120): CobQ/CobB/MinD/ParA nucleotide binding domain
  misc_feature (1)..(146): Xaa is any amino acid
MRIIPVASGKGGVGKSLVAANLGVALAQAGQRVVVADLDLGASNLHLVLGHLSPQMGIGTFLNNLNLKLTDVIVETDIRGLRFIPGDTEIPGTANLKTPQLKALVTQLLALDEDTDVLILDLGAGSHQSVLNFFLLSGQGIVVSAP

SEQ ID NO: 100694 - protein, 238 aa, Unknown
  Obtained from environmental sample
  misc_feature (1)..(238): Xaa is any amino acid
GGTIGPGAGGAGSGALHQSSDVGTTGNYYVWGSSGGTGGGIGGGSGGYYLSVNGGNGVSILFSNSSLSGGSNAASYSPSDFSVSGYIPFLYTSSGINQDSGYAIKTLTTNPILYVRTSFTFSNSGIGGATDMVSSPNYWLDTTNAGAPGASAPSLNSVSRSGSIAPLTAPDVFYGTYSSGWNNNNPTAVNSTLTLTIGSPIQGNPGSDGGNNRNSSKGGGAEGAGSITIYKIYEYPAK

SEQ ID NO: 100695 - protein, 276 aa, Unknown
  Obtained from environmental sample
  misc_feature (1)..(276): Xaa is any amino acid
LKEKRDYAEDWEVSLNGQKRYFKAASHSLSGESGNALISMYDMTHLAERDEIAAMKDSMKIGLFFIDSNFVIQDHYSRFLEEMLSQTNLFGKLFTDIIADSVTPSELEAIKDYFIMIIDRTYDQEILEDINPLNELRYVNVETGERKVFQCAFTTVERGHGEVFILVTVYDITVRVELQQRLAEEESRRQEEMQSVFELINVEQDVFSDFSEDMEHEFGTIDKTLKSDMSSHDVLVKVYQSVHAIQSNAVILGLNVFGNKLHALESKSRNTRNGAV

SEQ ID NO: 100696 - protein, 252 aa, Unknown
  Obtained from environmental sample
  DOMAIN (34)...(251): Cellulase (glycosyl hydrolase family 5)
  misc_feature (1)..(252): Xaa is any amino acid
MKKTGSIIFIVLILVSWNVFSQASAPFTKGVHFGGWFESVNSTQEILFKRFVEQNFVDVKSLGVDVIRLPVDFNVFTSGAPDYIIDPLLFRLLDKAVDWAEKYQIYIILDNHPANQPAVKNDYRNFLIPVWTQMAEHYKNRSEYVIYEILNEPNRIAANAWGKMQGDVIDAIRKIDKNHWIVVSGVEWSSIQTLSSIPKYTDNKLLYTFHFYDPHIFTHQGATWGEPLLVHLAGVPFPYDKNTDAGNPQRGK

SEQ ID NO: 100697 - protein, 89 aa, Unknown
  Obtained from environmental sample
  misc_feature (1)..(89): Xaa is any amino acid
TSNVFAILGLRSLYFLLAKMMDRFRHLKVGLAIILTFVGVKMCLAHWAKAWFGIADGALIVFSLAFISAVLAGSIIFSLASTRHLEGKP

SEQ ID NO: 100698 - protein, 269 aa, Unknown
  Obtained from environmental sample
  DOMAIN (1)...(269): DNA gyrase/topoisomerase IV, subunit A
  misc_feature (1)..(269): Xaa is any amino acid
IVGECMKYHPHGDASIGPALVVLANKELFIDKQGNFGNIYTGDEASAPRYIECRATALSKDIFYNPKLTEWTDSYDGRNREPLLFPAKIPVVLIMGAEGIAVGMSTKILPHNAVEVLEAEIACLSGKKFELYPDFPTGGLMDVSEYRDGNGKVLVRAKLDTSDPKRILITELPFGSNTESLINSVEAAAKTGRLKIQGINDFTTDKVEIEVKLARGVYAQETIDALFAFTECQQSISVNLLVIRDGLPAIMTVTEVIQHHAKQLVKILT

SEQ ID NO: 100699 - protein, 149 aa, Unknown
  Obtained from environmental sample
  misc_feature (1)..(149): Xaa is any amino acid
MAEEHTDEHDEDFGEGSPSLNRFKIAVSNDLMEVRMYPLIGVTDGGLTTLEDVLDACHRENIQVEINEKLVEKQLLVSSPVEIAIGKGIKPEDGKDGYIEYKIDMSAKPQFIPKDDNTVDYKSAMQITLVNAGDVLADVIAPTEGSDGM

SEQ ID NO: 100700 - protein, 282 aa, Unknown
  Obtained from environmental sample
  DOMAIN (100)...(282): N-6 DNA Methylase
  misc_feature (1)..(282): Xaa is any amino acid
AEIKAEHGNIPEFVFEDDSFYLSENVYYINETARWSYIVTNASKNDIAVILDKAMADIEDKNPSLKGALPQNFYATLGTRKEQIKGLIDEINKIDESHFKDKDLIGRVYEYFLQVFAIDAGQGEKGEFYTPAGIVQLIAELIEPYDGIVYDPCCGSGGMFVQSIKFVERHNGNRLKISVVGQESNPDTWRLAKMNLAIRGIAHNLGDRAVSTFTDDRHKDIKVQYIMANPPFNLKNWRGADELTNDYRFHGYDTPPVSNANYAWILHMVSKLDVTNGKAGFC

SEQ ID NO: 100701 - protein, 286 aa, Unknown
  Obtained from environmental sample
  misc_feature (1)..(286): Xaa is any amino acid
IDYAKETITLCIELFSAPEPISFETINKLTRTVRKGLISTGRAEAWGLNWPAQSLSTPSPFFATSNNNPVAVELVNAAGKSVGRQSANLQLGGWFMPDGGALSGTTAPYLRPPVKIEFSGVDVKDIDGLTIRVVSVNNIPAERAASQMGLRILPQDEYEHIPSITDNGLQIANLQLYDIQFEQGKNLLKGYSGSTYAAIPYGVTHIDGDSGLKEKGLTSVKIPSSVTIIGGDYTFFKNFLTSVTIPDSVTYIGYSVFFNNRLTSVFLGNSVTYIGANAFYTNSLTS

SEQ ID NO: 100702 - protein, 269 aa, Unknown
  Obtained from environmental sample
  DOMAIN (5)...(262): Uncharacterized ACR, COG1427
  misc_feature (1)..(269): Xaa is any amino acid
MPDTPFRLSIIDYLNAAPLNYGFKHGLGFEHFHLKFQVPSVCSDQLRAGEVDAGLISSIEYLRTPGLRIVPGLCIASPERVRSVILLCRVPPEAIKTLALDTSSRTSVVLAQILLRERYGAAPSVTPMPPDIDAMLAGHDAALMIGDKAMRVGREGLMVLDLAEEWHTWTGLPFVFALWAVRADAPELALPGGVAPFFHQSFELGKKNIESIIDEAWRAIGWTKLELRDYLTKNLSHTLGEAERESLSLFFEKGRSDGIRARQRATAVP

SEQ ID NO: 100703 - protein, 259 aa, Unknown
  Obtained from environmental sample
  misc_feature (1)..(259): Xaa is any amino acid
GDLSLKHKDGGAGTYKRQAGDTWEKQGGSTAPGQPTLGKLTFTESKEGNKDGYQVKQGSDKISGDVVIPATFAGKPVISIAGYAFSKNANITSVTIPENVATIYARSFLDCNGLTSITIPASVTKIDYDAFRDCAKLNSVTFRGKVTDIQNSSFPGDLASKHKDGGAGIYTRQAGNTWKKQSDITAPGQPTLDKLTFAESKEGNLNGYQVKQGSDKISGDVVIPATFAGKPVISIAGYAFSKNANITSVIIPEYVSTIY

SEQ ID NO: 100704 - protein, 273 aa, Unknown
  Obtained from environmental sample
  DOMAIN (3)...(271): tRNA synthetases class I (R)
  misc_feature (1)..(273): Xaa is any amino acid
RERIPNLASCGADARKVCIINDRGIHICKSMLAYIEHGQGKTPLSENIKSDRFVGDWYVCFSRELKEEVDGLVKNGVKKEEAEAQAPLMKKAQELLRKWEAGDVETIELWKKMNSWAIEGMKKTYERTGVSFDKYYFESETYTLGKDEVLKGLEKGIFFRQEDGSVAVDLSAENLDKKILLRSDGTSIYITQDFGTAINRHKDWPFDQMIYVVGSEQQYHFKVLFILLDKLGFEWAKNLYHLSYGMVNLPEGKMKSREGTVVDADDLIDSLRD

SEQ ID NO: 100705 - protein, 78 aa, Unknown
  Obtained from environmental sample
  misc_feature (1)..(78): Xaa is any amino acid
MDDVVIVGGCRTAIGTMDGSLKNIHESDLCAAVIKGVLKRTKIKPEWIDEVIVGIVGQIAESGFIARMCSLKAGLPLE

SEQ ID NO: 100706 - protein, 280 aa, Unknown
  Obtained from environmental sample
  misc_feature (1)..(280): Xaa is any amino acid
MSKGRWQKVNFDILKTYAELLQKDTSLQELAEMLGRMRQAEREYEEEVFAEMVIKPAWKAEHAAKSELVGIHESDDISSMLPAEAALLADEATEPLFYKKFAEKKLQTFEYQAKVLSWEKVKEDKNRQKEKEEKKGPFIICVDTSGSMHGTPETVAKTICFALLRMAVRENRKCYLISFSTAIETLNLTDLKNNLDKLIEFLSMSFHGGTDATPAMREALKMLETEDYKKADVIMVSDFVVPVFDEQTKNQIAAAKENKTKFHSLVIGDSGNKNTIEELT

SEQ ID NO: 100707 - protein, 281 aa, Unknown
  Obtained from environmental sample
  DOMAIN (31)...(64): Tetratricopeptide repeat
  misc_feature (1)..(281): Xaa is any amino acid
DRLSSLYLKLERYPEALGQAEEALKLEGGNVQALRTKGAILRSMGNDSEAQACFEKILSVDPGDYSFLLDLADIHFHRKEYKEAEERIHSYLAKKPNDREAKMLLGRMFAEMGNRAHAIQIFEELSKADPTDTAALTAVAELHKEAGSVEKALRTADTLVNLQGKRATAEDLSDLNASLKLYEGAVYAYSSSVRELWDRNLKLINEEDEKASTENDLEDDLSLLMGTPIIQGIDEESETLFTEGDDFLSSEDDLFLGDDPFGEIPESYDFNEQPKYKDPLD

SEQ ID NO: 100708 - protein, 72 aa, Unknown
  Obtained from environmental sample
  misc_feature (1)..(72): Xaa is any amino acid
LRAILKKSEDGLIKSEDGLIKSEDGLIKSEDGLIKSEDSLTKSEDSLIKSEDGLIKSEDGLFKSEDGLIKSE

SEQ ID NO: 100709 - protein, 195 aa, Unknown
  Obtained from environmental sample
  misc_feature (1)..(195): Xaa is any amino acid
APAAGSGLQPMSSVAPGPAAPAYGSEDIVGQLDELFGGLAEESAPMPMDMQGPMGMPPPMPMQGPPMPMQGQPMPMQGPPMSMPGQMGMPPQMPPSMPMQGPPMPAAPPQAYAAGPAAGQPSGDDVAGQLDALFGGADQEIPGGPESMPLSAADEGQGGQLSGDDVAGQLDAMFGGAEPDMTDEAAMPASLDEQP

SEQ ID NO: 100710 - protein, 226 aa, Unknown
  Obtained from environmental sample
  misc_feature (1)..(226): Xaa is any amino acid
MHDNQTQTLEFPYGKDFLRFSVSGERLKGTLVSRLHHYKAEKSQEALVRDALAQPLGTPPLRELAKGKRKVVLIASDHTRPVPSKVIVPPMLEEIRRGNPLADITILIATGCHRETTAEELEGKFGPEIIKGIIPQGKPCTRRLRRLPRQSRGVLYLSVPHSFGHVRASTAATSLRSSIKNEKIVIHDCDSPDMANLGKLPSGGDLILNRAAAEADLLVSEGFIEP

SEQ ID NO: 100711 - protein, 257 aa, Unknown
  Obtained from environmental sample
  misc_feature (1)..(257): Xaa is any amino acid
LLENFTYNEIKKLFSQHTEETGLQITDEALEYVWKQSQGQPWIVNSLFMHAAMRISETDNYNTVTQEHIEQAFKQMILARETHLDTLAVRIQEPLIRKVMESIITGTPDPKLTASEGFRICMDLGLVKKERSTPKVSNPIYKEVLARQLTYSTQEAIPEPEWQWEKPDGSLDMDALLKEFQKFWRKNSEVWEQKSDYTEAFPHLLLMAFLQRVLNGGGHIEREYAAGRGRMDLAVEYKNQIFIIEIKLIHNYDTPTD

SEQ ID NO: 100712 - protein, 227 aa, Unknown
  Obtained from environmental sample
  DOMAIN (9)...(227): Methyl-accepting chemotaxis protein (MCP) signaling domain
  misc_feature (1)..(227): Xaa is any amino acid
MENNRNISAQSAEKTSEVAHLASQTQDLSRRGAELREINENMMLDVRNQNAKIIEIIRNLAEMLSRIDESVKLIDTIADHTKLIAFNAALEASSSGEAGSRFSVVASEIRRFADNVVESASEIKEKISELQEASQSLLTEANNGSRKIDIGYNRIVEQKEVFENIVDASKNVAIRTQQISSLSKQQEYAATQVFSALKEISAGVNQFVHATVITSETVNKLNNMSQE

SEQ ID NO: 100713 - protein, 222 aa, Unknown
  Obtained from environmental sample
  misc_feature (1)..(222): Xaa is any amino acid
MDVVRECVENLKGSILVDSVQGEGSTFTIIVPLSIAALMGFPIECNGMKFIIPANFVEAIMLLNRDEIITVVDKPEIKYNDRIIKLYYLSQILQIKTDAVGASDILFVVIIRSYEEIAAIAVNNIDSMRSVILKTTPAFMENMNVFSGIVLNENYEMVSVLHIPTVIKMAKRIKTLDIKKHAIEFEKLKKSILVVDDSLPIREIESEILSSEGYIVDTAADG

SEQ ID NO: 100714 - protein, 283 aa, Unknown
  Obtained from environmental sample
  misc_feature (1)..(283): Xaa is any amino acid
AEGLLRLKEYGARAAIFDIEYLDWGPKGVDTIYLNRGLAADFSRSFSDINSAASDIFSALKTNRIARGDLDEYFLQFSDLIRNEQSDLFRRAQNIARDNDLYLIQASDLFGRSWVSLNLREEPLISEEQAGRRPIAEENFSYPVKAKANAVKGNYVDILPALPGFALTAEGAGFTNVEIDTDGTRRRIDLAQNIHDHWYLQLAFSPLVHFLGNPEIELDNRKLLMKNAKMPGGVVKDISIPLDGHGKMLLDWPKEDYAGSYSHISFSEFSLLEDIEAELDYYG

SEQ ID NO: 100715 - protein, 275 aa, Unknown
  Obtained from environmental sample
  DOMAIN (6)...(270): CO dehydrogenase/acetyl-CoA synthase delta subunit
  misc_feature (1)..(275): Xaa is any amino acid
DAAIKEVSIGAGEKALTLGGEQVFPFYSFDGEIKNPPCVGVEISDQGPNRNIPGIAAFYAGAETVVDAAAKASQMPGARFVCLVLEGADPNGQNKSVEECVSLCKAVAEKVSLPLVIAGCGSFEKDKELLPKVAEALEGKNALLLSAKEENYKSIAVAAIQAYGQKIGAESSVDINLAKQLNVLISQLGIPAGNSVMNAGTAAAGYGFEYVASTIERIKGAALAQNDTMLQLPIITPLGADVWGVKETVVSEEDFPEWGPLEQRGIHMEVSTAVA

SEQ ID NO: 100716 - protein, 247 aa, Unknown
  Obtained from environmental sample
  misc_feature (1)..(247): Xaa is any amino acid
MSLLYAGTCARGVEIATMAGWDTDCNAGNVGTILGVAGGIEGIPEHYRKPINDGVVLSGISGSLNILDIPSYANKLAMIHCRLEKQPVTESFETGEIDFDFTLPGSTHNIRLSNSFACRIRQCEGKGVDGYGALEILFDRMVRGDQCRIFYKPFYRREDFDDERYMPVFSPTVYPGQTVMIRFRIEQLSGESVMVSPYVRNTCTKECVPLGGEIYKDQNWHDLTFTIPSDDVRISGSMIDEVGLILD

SEQ ID NO: 100717 - protein, 279 aa, Unknown
  Obtained from environmental sample
  DOMAIN (2)...(91): Oxidoreductase family, NAD-binding Rossmann fold
  misc_feature (1)..(279): Xaa is any amino acid
CKRCGKESAAQAAAELGISAWYTDWHELLANNAVDAVIVVTPTKFHCEIVVEAAKAKKHILCEKPMAMNREECLLMNEAALANNVNLQIGFMRRFDANFRRAKELVDSEAIGQVVTVKSLTHGPSTPHEWMYDIEKSNGPLAEVNSHDIDTLRWFTGSDAESLYAIAGNFRCENARTKYPDFYDTVLMNIRMKNGMLGNIDGAQGVQYGYNARVDIVGTDGHIEIGGLAENTTLLYTKDKQFRGDTVKSWTALFFEAYVNEDISFIKSIRDGKQPEITG

SEQ ID NO: 100718 - protein, 74 aa, Unknown
  Obtained from environmental sample
  misc_feature (1)..(74): Xaa is any amino acid
MVTLATNHIHYKQLSIHGSTRGNVNQYRAVAKMAAAGTLDLEKLISRRYQITEFPHALEYAKKAEGLKTIITFP

SEQ ID NO: 100719 - protein, 267 aa, Unknown
  Obtained from environmental sample
  misc_feature (1)..(267): Xaa is any amino acid
GFDSSRINGVNRCYDLVTVVFQLANFDYPGLLKKFDSNFTEGPFSGDPKFFPVKTGLIARDLGEFLAVTHNISPDNDWKALLKLLKSCAGKDLISEDQFAQILIGLRDVVNSKVLELMVQYGSKNPVWTCKPHVPDEHIAENWLEARTSKAQECIDRINESEKNKQIAVLLKEIFDNTEELDRLENYSVAKSDIYRRKELSYFVYAKGLNYLSAFLTDYMEKEIRELCDILLIRGQWTNNTFSKEMSEALHELMDTSEAIARLDGPL

SEQ ID NO: 100720 - protein, 231 aa, Unknown
  Obtained from environmental sample
  misc_feature (1)..(231): Xaa is any amino acid
VGVPTTATAGVPLNLGGHYEPEDASKDDEMWYELVDAGTTGATLDGSLLNTTAAGTAKVRIFCPGALAPGVDFTKTFPITVTNTFVPVTNITGVPTQAPADGSYLSLDNLCTIEPGNASDKTISWSMVNAGGTGATITPYGSFMATASGTATVRATIANGTAIGTAYTQNFNIVVGSAKTVSAGSQVGTLNAGSAGAVTFPVTTVNISAGSYTATVANLPTGVTVSGNVTI

SEQ ID NO: 100721 - protein, 148 aa, Unknown
  Obtained from environmental sample
  misc_feature (1)..(148): Xaa is any amino acid
LLAGSILGFIIGFLLPSESQNVVSVLQWLENFSLGIGRYAVVPVLVFSLTIAVFELRQDDQFWSFVVKNFLFIIGASAFVITLGILVTLFFSPGRVPIETAEQLELISLNAAENISDLFPPNMLSVLAGDGIYLFPVCVFAFFLGMGL

SEQ ID NO: 100722 - protein, 98 aa, Unknown
  Obtained from environmental sample
  misc_feature (1)..(98): Xaa is any amino acid
MAHNGTPTRDIAASVEALFARSKKNMPHGLGHGIGLEEHEYPAIRNRNDNEWVLEPGMIFTIEPGLYEPLHGGCRLENDILMTETGPEVLTEARIIRL

SEQ ID NO: 100723 - protein, 245 aa, Unknown
  Obtained from environmental sample
  DOMAIN (8)...(214): Isochorismatase family
  misc_feature (1)..(245): Xaa is any amino acid
MNNTEMTYDITNTLLLIIDVQNDFCPDGALAVQNGDEVIAPLNRLSAAFASRGGRIAATQDWHPAGHISFASSHSDKKPGDIIDLDTVQGQVLWPDHCVQGTKGAAFHDKLDLDPVNLIIRKGFCKGLDSYSAFFENDRCTATGLEGGIKQMNIQTVIMGGLATDYCVFYSAMDCRRLGFKTIIVSDAVRGVDYPPGSVEKAAACMRDAGIIFSDSENCYRRYADGYCLRCISFRPVHRFLFPDH

SEQ ID NO: 100724 - protein, 93 aa, Unknown
  Obtained from environmental sample
  misc_feature (1)..(93): Xaa is any amino acid
VYKPDIPLFVLALVFVFLGVLLVYGASTTTAQRYYDNPNAFLIRQGSAAGIGVACMVGLIFIPYTRVQALTLPIVISCLTLLILVLFPGVGHL

SEQ ID NO: 100725 - protein, 133 aa, Unknown
  Obtained from environmental sample
  misc_feature (1)..(133): Xaa is any amino acid
MIPKKWNVERKVIYMTILLLTVFFLLPFVLFGTNTIITIHDNLDSYIPWNKMFRDNSLLYKFDTPTKGFGEMSTLYYGFINFSFTTLLYYLFDDFIAYTISIYIYTIFGFFSMYLLLKKIGNMDTVLILFISV

SEQ ID NO: 100726 - protein, 103 aa, Unknown
  Obtained from environmental sample
  DOMAIN (7)...(101): MreB/Mbl protein
  misc_feature (1)..(103): Xaa is any amino acid
MGMLSLGTVLGIDLGTANTLVYAKGRGLLINDPSVVAIDKTTNEVLEIGAEAKKMLGRTPGKITAVRPMRDGVIADIDLVEEMLRYFIRRVQQNRLFGRTRAV

SEQ ID NO: 100727 - protein, 131 aa, Unknown
  Obtained from environmental sample
  misc_feature (1)..(131): Xaa is any amino acid
WFWLGYNDYFDFTFVKPGAITESLFTVVAAFVTGGIGIIYVSNKVGHKGILHKAALTTTQEISAGYIGVPTEQIQLVGQTGVAATVLRPSGKIKIGREIYDAVSEEGFIEKDSPIKITRYEHGQVYVVILE

SEQ ID NO: 100728 - protein, 81 aa, Unknown
  Obtained from environmental sample
  misc_feature (1)..(81): Xaa is any amino acid
MKTIMKICTVCLLLASSTTLFARQKTFIREYTYRASDADSKISARQNAFTCVSNSLLKEVGTYIRTEEGLVTKGSVQEYTE

SEQ ID NO: 100729 - protein, 280 aa, Unknown
  Obtained from environmental sample
  DOMAIN (1)...(208): Putative glycosyl hydrolase of unknown function (DUF1680)
  misc_feature (1)..(280): Xaa is any amino acid
DTGDASYFDTVERALYNTIRSGISLEGDCYFYVNPLEVWPEACIENSSRSHIKPVRQKWFDVACCPTNVARTLTSLGQYLYFLDGDEIFINLFIQNKVSFEFSGKPATLSVTTDYPRTGLVKITVEETGAPLGLNIRIPSFAEDFTVTLNNKTAAGGRKNGYFRITGVHGGDVITLSFTLTPRIVYANPNVRQNCGKAAIVRGPEIYCFEEADNAANLAALSLDTHAPLEECWREDLLGGLMLIKARGKRLIAPDAPESFSEKFIPCFEAVTLTALPYGY

SEQ ID NO: 100730 - protein, 192 aa, Unknown
  Obtained from environmental sample
  misc_feature (1)..(192): Xaa is any amino acid
MGERAIVHLNVIGFRATVAEAKDKSLCGKPYVIAGAAGGRSLVLDCSSQAVKEGITPGLPLMAAERRVKDLIILPPDPAAYEKMNGELDRVAAVYAPVWENDQAGNLYLDITGTSRLFGPPADCSSRILRDIFDQVKIDPAAAVASNKLVSKVATRTIRPTGLIQIKPGTESEFLAHQDIRLLPGMGPNLLH

SEQ ID NO: 100731 - protein, 288 aa, Unknown
  Obtained from environmental sample
  misc_feature (1)..(288): Xaa is any amino acid
VHTFLEAAKERQIRPIIGAALSAGESTKASVYCFVENRNGFGNLCELLTERNKNKAHFDPLPFLREQSAGLVLASDNEEALQFLAGNVNRLYAAITTSSLKVIRSSRKLNIPLAFLDNSLFLEPDDFRVHRVLRAIGLLKTVGNLAPDDTSNKKSILRPAEDSEIRRLFASWPEAAKGTQEIASICTFDALFDGWIFPSYETGGASIADELRRRVYEGNAECYGELGDREVDRIEYELNIIEEKSFSSYFLVIDDIVKIAKAAFGSQQTCGRGSGAASIVSYGLGITN

SEQ ID NO: 100732 - protein, 259 aa, Unknown
  Obtained from environmental sample
  misc_feature (1)..(259): Xaa is any amino acid
INTGRVQGVQLSGIFNFANADMDGVQTASLFNVAKGTVRGVQLAGAYNYVSGKFIGLQVSGLMNYIKGDAWGIQLAPINIRGEGGGVGVMVGLVNYSASGNVIPIGLVNKVKGGMNHFWIYTDDMLFLNAGYRSGSKIFYTHSNIGIGGGLMGKGGDNLVVNRAGFGFEYPIRKFFVDIDISTGNIFKVDEIQDFWKFFFGSYTGIYQLRLIGGYKMYERLGVFVGISYDFLIQRKDSDPAPEDFAGATLSKTDGKYTH

SEQ ID NO: 100733 - protein, 169 aa, Unknown
  Obtained from environmental sample
  DOMAIN (93)...(152): Collagen triple helix repeat (20 copies)
  misc_feature (1)..(169): Xaa is any amino acid
PTGATGPAGATGPTGATGPAGATGPTGATGPAGATGPTGATGSAGATGPTGATGPAGATGPTGATGPAGATGPTGATGPAGATGSTGATGPAGATGPTGATGPAGATGPTGATGPAGATGPTGATGPAGATGPTGATGSAGATGPTGATGPAGATGPTGATGPAGATGP

SEQ ID NO: 100734 - protein, 57 aa, Unknown
  Obtained from environmental sample
  misc_feature (1)..(57): Xaa is any amino acid
MKRTALLKRLKTYGCVFVKHGKKHDVYKNPRTGIEERVPRHSDINENLAKHIIANLL

SEQ ID NO: 100735 - protein, 256 aa, Unknown
  Obtained from environmental sample
  DOMAIN (1)...(256): Carbon starvation protein CstA
  misc_feature (1)..(256): Xaa is any amino acid
WIIIGGIFIGAVQDFAAMYASVKNKGRTIGYVIEQYIGASGKKLFLIFVWLFSILVIAAFADIVAETFNGFSVNKGKISENAAVASTSILFMIAAVGLGFFIRRKPNNVLQTTIAIILLAACVALGLSFPIYMPQHFWLYFVFGYVFVACITPVWALLQPRDYLNSFLLIAMMICAFAGVIVNNPRMNIAAFSGFEVNGNYLFPILFVTVACGAVSGFHALIASGTASKQIDSERDMLPVSFGAMLLECLLAVLAL

SEQ ID NO: 100736 - protein, 292 aa, Unknown
  Obtained from environmental sample
  misc_feature (1)..(292): Xaa is any amino acid
NPNQTNYTSGTAVTVTATAVSGYVFTGWSGDASGTTNPVTITMDGNMTLTANFQPTYTLTTNVSPTGGGSVSRNPNQTNYTSGTTVIVTATAASGYAFMRWSGDTSGTTNPVTITMDSNMTITANFHLGFTFTDNRDGKTYRAVTIGNQTWMAENLNYNTMNGSGSWCYSDDNSNCAKYGRLYNWNTIMAGAASSTSNVRGICPNGWHLPSNQEWATLVDYAGGYSVAGKKLMSTSGWYNSGNGTDNYEFSALPGGYRNTIGNFNGAGDDGSISLWWTATENGSGNAYHQGR

SEQ ID NO: 100737 - protein, 278 aa, Unknown
  Obtained from environmental sample
  misc_feature (1)..(278): Xaa is any amino acid
CFGDIAYNSCAGRSYNPLVEGCDPNAAVGTRCQDGTTVPKGTPCGGYTLTTSVTPTRGGNITRTPPETEKTNFAAGDQIVLIAIPEEEYAFIGWAGAATSAKNEMAEITMNGSSSNKPIVAMFKPKDTPDAATYTLTATAFPEYGGNVTRSPNAEAYNPGESVNLTVNALPGYTFDGWFGDATSEKATVSVLMNGSKTVVAMFKPIIYKIKANTNPATGGAVFVNGTAAASNTSIDVGTEIVVWASPANGYSFTGWSGAAETTGTSNPATIKVTNSGV

SEQ ID NO: 100738 - protein, 168 aa, Unknown
  Obtained from environmental sample
  misc_feature (1)..(168): Xaa is any amino acid
MKPKGKLPKDAPDTPSGRSKQKAVRLIPEDELSEADLPVALAPQAGQSSGGVAESRRYPLAEVKILYTSAAGCCSFPTCRKHLILEAEHSGENKQQIGEIAHIVAHSPTGPRADVAYPRDKLNTYANWILLCPTCHTTVDVQQKKYTADALLKMKQEHEQWVNEQLGK

SEQ ID NO: 100739 - protein, 208 aa, Unknown
  Obtained from environmental sample
  misc_feature (1)..(208): Xaa is any amino acid
TPTRDINIPHSLGPLYYRNSFEKRDGWKNVKKNEKGDGVNVSQAEQAQDKEIPGVREKVPDLALDPCLKNPGRLTNKGSGVTLTTNAIVKTAGKSGEWVFRLAGNGNGKGYYKIGDVKIKANTALQLKYSLKPLNDAGRNVFVDILFSDGSLLSESNNNVIAQRGSVNNWTDVTITTIPSGKEITGVVVGYSGNGNFDAHVDNIEIRE

SEQ ID NO: 100740 - protein, 275 aa, Unknown
  Obtained from environmental sample
  DOMAIN (164)...(275): RNA polymerase Rpb1, domain 4
  misc_feature (1)..(275): Xaa is any amino acid
PSQDIVLGIYYLTKDKPGALGEGRVFFGPEEVRRAYDAGVLDLQARISVRMPNQDGSAGRVETTCGRVLLGETIPEQLGFETVNRVMKKGELKQLISKCFRVCGIKDTVLLADRLKDLGYEFATRAGISLCISNMIIPERKDTIISEAQTEINEVERQYKDGLITEGEKYNKVVDIWTRASDEVAAEMMREIQTTTLDPNSNKSEIPTPKSDWSRPAPIADWSRTKVEGERENAWLTEWRSQVSDQDPAGFNPIYMMADSGARGSKEQMRQLAGM

SEQ ID NO: 100741 - protein, 271 aa, Unknown
  Obtained from environmental sample
  misc_feature (1)..(271): Xaa is any amino acid
DNNLPREKHELIYGAHLKLKSLKGEVAGLLPAEGILSDEELPRYAEEMKSGAAQLLKAMKDKDALARLRGELAPVHRRLAAWGAARGFMNSEGQLTEEGEAAPQMAELAAIWPAVSEAVGQAGQVLDEYDLKSEQDARRLAADYQLAVDRPGEFVEWDPFTVPILTEVSGYVSFEDMEEGKTMIERVDQVTGKSSKVIIESKQADVRPRIKVLDAAGKPHLTSKGIPAVYPLPVNAILMVEERARVHAGEALAKIPRETTKTKDITGGLPR

SEQ ID NO: 100742 - protein, 275 aa, Unknown
  Obtained from environmental sample
  DOMAIN (1)...(196): Pyridoxal-dependent decarboxylase, pyridoxal binding domain
  misc_feature (1)..(275): Xaa is any amino acid
GYKDEDFIELALLAQKMGKKIFLVVEKLNELTLIIKISKRLKVKPNIGIRIKLASSGSGHWEESGGYSSKFGLNSSELIEALEYIKKSGLVECLKLIHFHLGSQITNIRHIKSGLREIAQFYSEINALGFRIDFVDVGGGLGVDYDGTNSTHSSSVNYSVQEYANDVVYAIADTCDKLLLPHPNIIAETGRALTAHHSLLVFDVLEQTALAYFEDVKREINSEDPDVLKDLHSIYKGLVQKNLAESWHDAVQIHDDVLNNFRMGTLNWKTEPLRS

SEQ ID NO: 100743 - protein, 270 aa, Unknown
  Obtained from environmental sample
  DOMAIN (100)...(261): GGDEF domain
  misc_feature (1)..(270): Xaa is any amino acid
IHVRKPRDDGGFDDLARYAPGDIIGDFDFARNAQYDANAEAAEDSVLAMFPATGLTMDDIVKEEPFIVSRIFLNSIIMITGRVKSSHKLLLENLSWVNELHRRAYEDPGTGLWKQALITDEINRILEEPMALIMLKPDRFKILVDSRGHEAGDKAMVRIARILKSFIDKIERGWAMRFKSNETGLLINNCPPQLALKVIEELHHAIAAMEPVPAEGEIPPFPFTGTIAWSIWPEDGSSWETLFQGTYNLLLETCKTGGGGQIAHYTCKEQ

SEQ ID NO: 100744 - protein, 88 aa, Unknown
  Obtained from environmental sample
  DOMAIN (2)...(88): Protein of unknown function, DUF583
  misc_feature (1)..(88): Xaa is any amino acid
LKTFSLRGKVSGEINASGLLVIDENAVVNANIHALRVLIRGQVKGDVTAVEKVEVTISGKLSGNVTAPEIYMETGCIFNGRCTMVGRV

SEQ ID NO: 100745 - protein, 254 aa, Unknown
  Obtained from environmental sample
  misc_feature (1)..(254): Xaa is any amino acid
MAKRLGTKARGKEPAPARSSAAEYLTFAAVAGEGPQSVEMRYEDENIWLTQKMMATLYDASLATINEHISNIYKDGEWTEEATIRKFRIVATEGTRQVERAVKHYNLQMAIAVGFRVNSQRAVQFRRWANKIAKDYTIKGWAIDKERLINGGSVLTTEYFEQLLDQIREIRASERRFYQKITDIYATALDYDRDAKTTRDFFATVQNKLHWAIHGHTAAEVIVERANASKPFMGLTSWANFPDGKIQKYDVSIA

SEQ ID NO: 100746 - protein, 259 aa, Unknown
  Obtained from environmental sample
  misc_feature (1)..(259): Xaa is any amino acid
ALEVFKAAAAKKNSPLYYFPEIAAIENLKVHKNGTDFSLALKLPPDFSMQLTELSIPIPGAVQAENAGLAAAVLKIAFPRLGAETIQAGFKQVKIPARFEKISGSAGGAAGGGAVGGDNIIIDGAHTPESVIRCVDTFCGLYGSDGILLFGCAADKNAAAMADALLPHFSQIIITSPGTFKISDPEKVYSAFSARISTGLAADTDSAVTGSLPQEKIILIKDSSDAIRQAFKASREKRLPLLCTGSFYLAHEIKVYNGE

SEQ ID NO: 100747 - protein, 229 aa, Unknown
  Obtained from environmental sample
  DOMAIN (40)...(229): Acetokinase family
  misc_feature (1)..(229): Xaa is any amino acid
VAQDWIAEDISLTVKANILRLIKQGGWQRTPTDTFFRRFRVLSINPGSTSTKIAVYEGDAELFTQEIQHTPEELAPFDGKPITAQFQFRKDTILRFLAAHNISVDNLDAVSGRGGLLHPMPHGTFHVNDRMIQDLKAGVNGEHASNLGGLIAKDLVGDSGKPAFIVDPVVVDEAEERVKITGLKEIRRKVISHALNQIATAHRYAEEQETYYEKLNLIVCHMGGGISIG

SEQ ID NO: 100748 - protein, 217 aa, Unknown
  Obtained from environmental sample
  DOMAIN (46)...(202): Phage integrase family
  misc_feature (1)..(217): Xaa is any amino acid
EAAVRFALRKAARDHLIPRNPAEGVRAITIPEADKAYLTVQEIQLLADTPLGGKLGGMVKQAFLFACFTGIRISDLRTLEWGDINIESKQISKRQEKTERKVFIPLHSVAWGIINDGAIHNYKELVFPRLTQSKTDTGQYIVAWAKKAGIEKNVGWHTARHTFAVLSLESGAEIYTVSKLLGHTNLKNTQVYAKATDKMKREAVDALPVIEIAKGKI

SEQ ID NO: 100749 - protein, 210 aa, Unknown
  Obtained from environmental sample
  DOMAIN (11)...(107): DnaB-like helicase N terminal domain
  misc_feature (1)..(210): Xaa is any amino acid
MNTQELNTQEIKKQELARMEMSFLGCLLYGAEQGQIETRLQADDFENKVYGRIFEAILKQWNAKERITPTILTLSDELAPDISPETLAGINVISDANISYYENKIFEASKTRNFIKALQRAKEEVDAKTETDTVIKNLIPALAGVTVARNEAAIRSAADLLNAQFPEIRWIIKGLIGEGLTMINGAPKIGKSWFVLNLAIAAASGTYFMG

SEQ ID NO: 100750 - protein, 276 aa, Unknown
  Obtained from environmental sample
  misc_feature (1)..(276): Xaa is any amino acid
KGTLPTLKKIDKPKPAPQAKPAPPKEPVATEQKQIASTEPPPTQPAQKPEHPKHLPEKKSAEKPTHQKTEPAQIETHKEETQTEQPESQSIASEPKKTVAFTADVSKVVDPAVLARIQKSKQEKATQRNNRGDKNKGNKNQQNNNNNRNTGPKQTSATGYSGNLRMQPRQTENKAQAGLQTRRPGFGTTLQDVLSANAPAHKDFLDNRTRGGKGGHGDSRKRGKKGKDSQREREIQKENIEKAQKRVSDVLVSLSKTPVKKVYNKDKIQAEGAEAS

SEQ ID NO: 100751 - protein, 221 aa, Unknown
  Obtained from environmental sample
  misc_feature (1)..(221): Xaa is any amino acid
MPASNNAKNNALASAIREVFSYISRFKGQLFILKIEDSLLDNPAFPVLVRDIAQLHFVGIKVLIVPGTRSSIDRQLKAYKLKTEFHNGIRLTTQEALPLVEQASLGAAQRILSYLTASGINGIQGNWVRASSLGVADGIDYMRTGKIERIERSIIERLLQDGFIPILPPIGWNKLGHAYNISSTELATELGRYLPVGKLFFIGEEGGIELPGQGLISAWTS

SEQ ID NO: 100752 - protein, 215 aa, Unknown
  Obtained from environmental sample
  DOMAIN (110)...(173): 4'-phosphopantetheinyl transferase superfamily
  misc_feature (1)..(215): Xaa is any amino acid
MIKRKYIVETELKIIYNIFSMSYYINLSILSNEQKDIHRAERQKILSAEARRILSVCEGRPITEDDIAREADGRPFFSNREGKEGDTDFSISHSGALTAVSLVKGKNLRTGCDVELVRPRTMAKKTAEEFFSVHERDYIEAGGHFDETRFYEIWTLKECYLKLHGLSVFDMANAPSFISGEGEYKFDTVGVSSVSFNLYELTGSGNEHYVLAAAM

SEQ ID NO: 100753 - protein, 126 aa, Unknown
  Obtained from environmental sample
  DOMAIN (1)...(84): Beta-ketoacyl synthase, C-terminal domain
  misc_feature (1)..(126): Xaa is any amino acid
MRAALPDAELDSGQIGYINLHGTGTELNDKAEGLAMKEVFGSHPPISSTKPITGHTLGAAGALEAAICWMVLTEQRGLPVHCWDGVKDEEIPVFPVKADGQKAPSVCMSNSFAFGGCNVSLILKRR

SEQ ID NO: 100754 - protein, 290 aa, Unknown
  Obtained from environmental sample
  misc_feature (1)..(290): Xaa is any amino acid
SVWRSGPRGRPSAPDNGIEFIWPIEMITHNKSKNSFGYIMPLIDTGRFFSLNQIIFGKVKHPNLQILSRISYLLTLALDTIHVAGLAYCDINQGNLMVDPEKGDVVICDNDNVVVNNARVPVKGVWEFMAPEVALDKSRPNAESDKYSIAVMLYYLWMWEHPMEGKKTMDIYSWDIPAKKKFYASEPVFVFDPNNTDNSAIGVEELQTSVQRWERLCPPRVKEMFTTVFTKGINDSSRRIRLLDWQRVFLELSANAFLCPHCNVVNIWDGQQSPMVCYKCGKEVPIRLYL

SEQ ID NO: 100755 - protein, 239 aa, Unknown
  Obtained from environmental sample
  DOMAIN (1)...(239): Phosphoglucose isomerase
  misc_feature (1)..(239): Xaa is any amino acid
VLVSKSGITLETLTNELFVKNKLKKAGLDPAKHMVAVTSETSPLAGNPTYLDSFYFDDFIGGRYSSSSAVGGVILSLAFGSDVFGDFLVGAAAADKAALTNDIRKNATLLDALIGVWERNFLGYPYTAILPYSQALSRFPAHLQQLDMESNGKRVNRDGKQIAYSTGPVVFGEPGTNGQHSFYQLLHQGTDVVPLQFIGFRESQRKDDGVIEGSTSQAKLKANLAAQITAFANGKSDSD

SEQ ID NO: 100756 - protein, 215 aa, Unknown
  Obtained from environmental sample
  DOMAIN (4)...(199): KDPG and KHG aldolase
  misc_feature (1)..(215): Xaa is any amino acid
MYAVLEELGKIGIVPVIKIDDAEKAVPLARALAAGGIPCTELTFRTSQAEEAIRRISKEAPEILVGAGTVLTTEQVDKAINAGAKFVVSPGLNPKVVSYCIKKGIPVAPGCANPSDIEQALEFGLEVVKFFPAEQAGGLEYIKAISAPYPNLKFMPTGGITSANIGKYISFDKTLACGSSWMASADLINAGDFEKITALSKEAVLGMLGFSVSHI

SEQ ID NO: 100757 - protein, 290 aa, Unknown
  Obtained from environmental sample
  DOMAIN (152)...(290): Carbohydrate binding domain
  misc_feature (1)..(290): Xaa is any amino acid
VFITEFGTCEADGNGRVDTVASNTWFNFLDQAQIGWANWSVNDKGEAASALTNSPSQNGGWSESNYTASGRYIRNKLRFYANSAYTLNVSGATPTRFPNYTTYTHGTPVTLVVRPPSGQGVVWGGDVSGTGDTMVVSMTGNKSITVAFSTAGNLIQNGTFLTTSISPWVVYKNGLLDQVPNPAMVAENGEGKITMTIAGTAVDHAYVHQTGVSLKNGRRYKLTFSARSASPRSVTAKVVASNADCMTPYEAQVTSTKQAFTTTFDMTKPDNANVSVRFCFGGTATTWYIS

SEQ ID NO: 100758 - protein, 258 aa, Unknown
  Obtained from environmental sample
  DOMAIN (18)...(210): Radical SAM superfamily
  misc_feature (1)..(258): Xaa is any amino acid
MHCAWCHNPESIRGEAQLYFNENTCVRCGICVRKCPAHAHAAENDSHTISFRTCKACGLCVDACAYAALKIIGREITLEDVMREIMSDMVFYNNSGGGVTFSGGEPTLQHDFLLALLKACNREKIHTCLDTNGAVDGSVLEQLMPVTALFFLDYKVTGDEAHQELTGQPLGLILETLERLERGNARVILRCPVIPGINDNEEHREGISAIQRKYRCVESVDILPYHELGVHKRKALGQEFRELERMREMARYDETSAL

SEQ ID NO: 100759 - protein, 262 aa, Unknown
  Obtained from environmental sample
  misc_feature (1)..(262): Xaa is any amino acid
KDIEFPLPENYLPENDPYADNWARLSERERKELPSWMRAYYAMTANLDDNIGRLMDAVKRLGIYDNSIIVFTSDHGELFGAHGRRAKNIFYDEAVRVPFLMRWKGVLDEGGVSDVCFNTVDIMPTLLSLMDLGIPKEVEGFNFKDALCGKAGTAEPEGALMMGTGATAIFEDGHEWRAFRTKRYTYAQYLSDTSELLFDNIEDPLQMKNLISDPAYAVTRQELQRAMLDKMREIKDSFEPCSWYEKNWIKDRLILKTAASGK

SEQ ID NO: 100760 - protein, 225 aa, Unknown
  Obtained from environmental sample
  misc_feature (1)..(225): Xaa is any amino acid
MAVEFVVSAQEDGGRWNAKRIKVDYFPRELILGYKPPDAPAVKKPFRFEVAAIDTEGLPAAPRRLNVSISQVLPQYYNSYRYGRHFRHKTEELKLKTETQASLARGRASLEFTPETAGEYQIEIAEPDSGQSISMRVQVHGLETAESSPPKGVVELTFDREAYRPGDTAAVKVRSPFPGRLWLTVETDSILHSTVLDMETAEAQVVIPVAESIKTNAVVTATVVR

SEQ ID NO: 100761 - protein, 283 aa, Unknown
  Obtained from environmental sample
  misc_feature (1)..(283): Xaa is any amino acid
YPWKPYFAIKVTEAVKFEEIEKYIELEPPLEFTVYPSGDNGNVIQVFAAFTSTPTRVTLRKGLPSLQGMLTKDVSYQVSLPDDLGRKLMFTGRGRYLSPEKPLLVKLAGRNVDAVRLQAWRIHENNLPTLINVQDYGASTRARLAMQFNKNILNRTTPVQAAFGEVFERLVDLKEVLDEEPHGAYLLKISPVKKNESREGAAGEADAEDDEYYSYSDYSYRTERYLPVMISDLGLAAHVSPGRMTLWANSLSRAKPVEGGTVKLYDEANQVVAQGQTDRDGLF

SEQ ID NO: 100762 - protein, 231 aa, Unknown
  Obtained from environmental sample
  DOMAIN (14)...(191): ABC transporter
  misc_feature (1)..(231): Xaa is any amino acid
IRVFDNINISISKEDFVCIIGQSGCGKTTLLRMMAGFEKVTSGEIICNNTKIIKPQMKYAYVFQEYNQLLPWKTVKQNIAYPLQILNFDKLGIENKVKEFLNLVGLSEYADYYPHALSGGMKQRVAIARALAMNPEILFIDEPFSALDTQNREKLNKNLLNIWNKLKMTIVFVTHNLEEAILLSNKIIVIGGKPGKIINIIQNNVEGQRLPGDKGYTELWSLLYDSIKLTN

SEQ ID NO: 100763 - protein, 282 aa, Unknown
  Obtained from environmental sample
  misc_feature (1)..(282): Xaa is any amino acid
LSVQVHVWFKEQRRLLAKVAPTDINYMLAADLNEQQAECYLPAVNCRDCGETAWASVIDEHGKAKLTSLEAFYNMYFDASEKVRLMYPYSQDRVPDGMARAFLCPKCLQLDTPEGRGSTHNCSSCGTDQIPVIFPKMQGRKQSEGRGFICPHCESQTGLAIVGIRSATAISASVSQLFASNFNDDKKTLAFSDNVQDAAHRAGFFNSRTWRPSLRGAIQHFVLAGGDGLALQEFSDRFVAHLRGELSAEQFVSRFTAPNMTWMRAFERMKQNNRFGSGQDEK

SEQ ID NO: 100764 - protein, 103 aa, Unknown
  Obtained from environmental sample
  DOMAIN (1)...(94): HEPN domain
  misc_feature (1)..(103): Xaa is any amino acid
EIVCFHCQQAAEKALKAILAHHDEEIPRTHDLFSVLELCEAHCPGIVEEFGDQADWLSGFAVAARYPNEVETTGEDMNQALKDAGIILSYVKSLWQAPQETKP

SEQ ID NO: 100765 - protein, 163 aa, Unknown
  Obtained from environmental sample
  misc_feature (1)..(163): Xaa is any amino acid
MLPSILAKQLQAGLADYIRATFPMTTPGFRESLTNLLATKDAVFHAPFVATRLPFRVAEEATTGFKSIHPAHKPYVHQQRAFQRLTGDDGRSTLIATGTGSGKTECFLYPILEYCYNHRGERGVKALIIYPMNALASDHAKRIAQLIHSSPELRGNVTAGMYI

SEQ ID NO: 100766 - protein, 271 aa, Unknown
  Obtained from environmental sample
  DOMAIN (1)...(132): MatE
  misc_feature (1)..(271): Xaa is any amino acid
TNHLFFVYIVMINVICQAGGIYIAQFRGADNSDGMKHAFRFKVIFAVALAMLAFMASRSFTSPLIAMMTTANSSQKEIVSVGSRYLKLISWTFLPTAISSSIGTSFRETARPKIPLVISIFATIVNTVGNWILIYGNLGAPRLEVEGAAIATIIARLFELCVFVIYAAWDRAPFFAVRIFDIHKRLIKEILFKSSMIFASEISWISSETIMIAMYNRRGGAEVVAGMAAGWTIANLFFILFGGIWTASAILVGGTLGSGRLTKRAAAQNGS

SEQ ID NO: 100767 - protein, 119 aa, Unknown
  Obtained from environmental sample
  misc_feature (1)..(119): Xaa is any amino acid
MDYKKVFGKLEDENVFIKTTAQRSMDSVQKAALNRKGNMLCNSGDIEGARRIFMATGYSDGLSRIGDHYKSQNRFLEALHMYWIAPDRVKAEPLVMQLASIMQNSGIRISNTLGYRHDR

SEQ ID NO: 100768 - protein, 215 aa, Unknown
  Obtained from environmental sample
  misc_feature (1)..(215): Xaa is any amino acid
MKETNENRQTEIEKYRIEIEKYRAEAEKYRAETEKYRVEAEKLRAEAEKYRVEAETYRAGYEKRQIEYEERQIEYKKRQDEYLAAYKKRQDEYQAAYEKRQARLDAMMAEMSKNINGISDSNGLFAEEFFFNTLSEKKEFAGIHFDEVEDDFKGTQKQPNGKRVKDQFDIVMTNAASVAVVEVKYRARKDDVETLAGRKLENFRILFPEYNGFKI

SEQ ID NO: 100769 - protein, 87 aa, Unknown
  Obtained from environmental sample
  misc_feature (1)..(87): Xaa is any amino acid
GLTIPNSVKTIGEEAFAGNQLTSVTIGNSVTFIGDAAFAENQLTNVTIGSNVNLGKDVIDLVFTGNYNGGGKRAGTYVLTRGAWVRQ

SEQ ID NO: 100770 - protein, 271 aa, Unknown
  Obtained from environmental sample
  misc_feature (1)..(271): Xaa is any amino acid
ETVVGSVYNRIVAALGNLANRDSDMPFPTAMSKCAITWSSSNTKLVENSGKVRRPPNTNRNQAEPVSIAISIAKGKAAKIGTINMTVLRMPNDKDIVANDMAALDIESSRLIADIVLPVVGAMGSKITWASSSPKILSHTGAVSRPPNGVGNQNVALTATLKSGKYSQKKIFNVTVAQQSNALELIGAQDIRFVSPVNHIPDLPYYVDGIYASGKTGPRVRVLWTTSSKVAIPPSNEMTNPPTDADNYSKPGTHTVLGRVMGTNYVAKAHV

SEQ ID NO: 100771 - protein, 120 aa, Unknown
  Obtained from environmental sample
  misc_feature (1)..(120): Xaa is any amino acid
MAFLFGKKKIKDVANNISETVQNLPDEELFKSVEYDPTSAERSGYSNYSYWRSTFRMFFKNRAAFALIILMVFLIMFSVIQVYLPNQKDPVEIFNNPETGIQYRNVPPGELFFFGSNNIG

SEQ ID NO: 100772 - protein, 261 aa, Unknown
  Obtained from environmental sample
  misc_feature (1)..(261): Xaa is any amino acid
GGFRLETWRPQNQQVFVKNTSYYLANEIHISKMTYTYNAEAAIIAPEMFRRETINYADIPTSILDEWLADPNLSKLIRPSTPGWYSFFYAFNFDPKFPDEYEPENWKIAVNNKNFRKAVFHALDRIAAVSTSDPHNPQSNLIKTVTPPTFCVVNGREYTQVGDLARIQNQLPTYDAALAQRYRDTARAELTNAGAKFPIKVLMPYNSGGTEWTQRVQVVKQNLERVLGTDFIQIMIYAGQPTGFLGDNRRNGRFALLECNW

SEQ ID NO: 100773 - protein, 86 aa, Unknown
  Obtained from environmental sample
  misc_feature (1)..(86): Xaa is any amino acid
MIPFRIHPVFRLFKGGFTRDDQIRLRECCDELNAKGLRFMLSNSATDFIKKQYAAYHITVVQAKRAVNSDSLKRGEVDELVVRNYE

SEQ ID NO: 100774 - protein, 67 aa, Unknown
  Obtained from environmental sample
  DOMAIN (1)...(64): ATP-dependent Clp protease adaptor protein ClpS
  misc_feature (1)..(67): Xaa is any amino acid
MDFVVMVLVVIFHKGLEDANRIMLDVHNKGKGIVGRYTWDIAVTKVELVHAMARENEFPLKCIVEPA

SEQ ID NO: 100775 - protein, 115 aa, Unknown
  Obtained from environmental sample
  misc_feature (1)..(115): Xaa is any amino acid
MAAQESGVGELSEEDEKTASGADEKILEGVRLYREKNWEKALKEFLSKDTSSFNLEEKMELAYYLGLCYTKLKNYEKALVSLEQVVTSEQHILRVYQCRMMLAYIYVITKRVKMA

SEQ ID NO: 100776 - protein, 78 aa, Unknown
  Obtained from environmental sample
  DOMAIN (6)...(51): SpoVT / AbrB like domain
  misc_feature (1)..(78): Xaa is any amino acid
METVVKKWGNSLGIRIPRDIARGLSLQDGSHVHISDTGKEMVITPVTKNRLSEMVGKINEDNLHAEVQTGSPVGREIW

SEQ ID NO: 100777 - protein, 102 aa, Unknown
  Obtained from environmental sample
  DOMAIN (9)...(101): PemK-like protein
  misc_feature (1)..(102): Xaa is any amino acid
MVKKNYIPDRGDMVWLNFNPQSGHEQKGKRPALVISPKSYNDKTGLALFCPITSKIKGYPFEVKINDAQITGAVLADQIKSLDWKTRDIQFIKKESSAIIDE

SEQ ID NO: 100778 - protein, 204 aa, Unknown
  Obtained from environmental sample
  misc_feature (1)..(204): Xaa is any amino acid
ERERERERERERETICAAFVSTNSICQGETLPALWKKLLALGVIIHFAYRPFVWSNEAKGKAAVHCVIVGFGLFERNKKWIFDGENIQSVNHINPYLVAAPDIIVESRSKALCDVPAMVYGNKPADGGHLIIEAEDYDEFIAGDPSSMKYIRRMIGAAEYINNKKRWCLWLVGANPAELKNMPLVMERVEKCRQMRLCSIAEGI

SEQ ID NO: 100779 - protein, 256 aa, Unknown
  Obtained from environmental sample
  misc_feature (1)..(256): Xaa is any amino acid
MLTNMITQHRNHPSVIIWGMGNENDWPNDFPEFDREKIRAFMKELHDLSHNLDNTRKTAIRRCDFCKDIVDVYSPSIWAGWYRGMITDYKKVSLDEMKRVNHFLHVEWGGDSHARRHAEDPYRYLDAIEIGKGADERAGDASLYGGNARASRDGEWSESYICNLIDWHLKEQETMEWLTGTAYWPFKDFSTPVRPDNPVPYMNQKGVVERDLTPKESYYVFQSYWTEKPMIHIYGHSWITRWGKSEELRDIKVYAN

SEQ ID NO: 100780 - protein, 285 aa, Unknown
  Obtained from environmental sample
  DOMAIN (1)...(285): Ammonium Transporter Family
  misc_feature (1)..(285): Xaa is any amino acid
DLIFQTVFCATAATIVSGAMAERTKFSAYCLYSFIISAVIYPISGHWIWNSSGWLAQLDFHDFAGSTAVHMVGGVASLIGAKIVGPRIDKYSKSGEVRAIPGHSLTLGALGVFILWFCWFGFNGGSTVSMTGDNVVSVGTIFVTTNLAAATAAVFTMFITWIRYKKPDVSMTLNGALAGLVAITAGCDVVSPFGAFCIGVIASFVIVFGIEFVDKVLKIDDPVGAIGVHGLSGALGTILTGIFALDGGLAYGGGWSMVGVQALGVVSVAAWVAVTMGIVFTVIKK

SEQ ID NO: 100781 - protein, 222 aa, Unknown
  Obtained from environmental sample
  misc_feature (1)..(222): Xaa is any amino acid
MENYPRVDGSTSTNPLNYIIAAKLLDLEYEWRSVPELNQNSKDVFFKDTTLAPDFRQKIQCSQTHGSIINLIDNKTDLIIVARTMSKDEKQHADSAGVSLIETPIALDGLDFIINRRNPVNSLLVEQIQNIYLGNITNWNEVGGANFEITPFIRNANSGSQEMMNEIVMKNTGMPDWDSWLSEEDVRIGGMIHVYEALIRYPDQGICFTPHYYKEYMVGDFM

SEQ ID NO: 100782 - protein, 280 aa, Unknown
  Obtained from environmental sample
  misc_feature (1)..(280): Xaa is any amino acid
SFETRIRLAGEALIEEKDIDTLTLILENYSLSLTDISKGYWRRDDNGIVIEHDKYPECLKDASTRDSHFSRLVDIFGKIPKGGYTVNGKPFDWCGFTLTRDAVFETMMVLGVYDFDEAKEERLRELFPLAESQNKNAFLGYFISRDISGWKRTFLFDCLSDKITPVRIEVLKFVKKIIVTEPELVKVEGLLALKTGEIRQTVLELIRGTGDALPSATRLIADKNENKRLAALDLLSSMKKSGAIDSSAIAGLFATMPNTTEAETILMNNLLDSGATEYSE

SEQ ID NO: 100783 - protein, 193 aa, Unknown
  Obtained from environmental sample
  DOMAIN (4)...(176): Outer membrane lipoprotein carrier protein LolA
  misc_feature (1)..(193): Xaa is any amino acid
GTYGSVRDYEAHITIRTGNTEMIGNVSHLTPSFLRIDFSKPAEQVIVFNGEQLTIYLPEFRAVLNQSVTQTRRGTSGAGMATANGLVMLRRNYVPSFVTGPNPEALSGDSRERVVKLRLTRRSVSEGFREIILSINPDTKLIRRIEARTVAEGEIRFDFTNIRINQGIPELRFLYDSPASANMYNNFLFRDTD

SEQ ID NO: 100784 - protein, 96 aa, Unknown
  Obtained from environmental sample
  misc_feature (1)..(96): Xaa is any amino acid
MESLGEKLKTARTEKGFSYDQIARDTNIPLRYMEALETENFGNLPGETYVIGFLKIYGAYLELDVQKLISLYKALKIQEQPIPVEQLLKHRPKLPK

SEQ ID NO: 100785 - protein, 267 aa, Unknown
  Obtained from environmental sample
  DOMAIN (29)...(119): Rare lipoprotein A (RlpA)-like double-psi beta-barrel
  misc_feature (1)..(267): Xaa is any amino acid
MKKNSIFLLIALFAFSFPGFAETQDIPMLFYGEASWYGEQFQGKQTASGEIYDMNSLSAAHKSLPFGTRVRVINLENNREVVVRVNDRGPFTAGRVLDLSLAAAKVLGFAEQGTAKVEARVVEIGGEVVAQNTQTLPDTANTQAVPERIAENKGSDLAARAADEGYTENLESVSRSESASRSGSPVRVIFPDDAPAPVRESEKPNFPSSADGRYVIQAGAFLSLDKAEGLLRRYQAMGLPVYLRQLSRDRLHRVWIGPFAARTDAEA

SEQ ID NO: 100786 - protein, 148 aa, Unknown
  Obtained from environmental sample
  DOMAIN (3)...(132): Flagellar protein FliS
  misc_feature (1)..(148): Xaa is any amino acid
MAFQSALSTYKETRIKTASQGQLIIMLYGEAVRQLDLALDLLETSNPGKKEPGRIEKISKAVVKTQEIIAELMVSLDFEQGGSIAKNLFSLYTWFNRELMEANINQDKQRISSVRYLIEELRGAWQEIAATNAAETANREVVGLNIAG

SEQ ID NO: 100787 - protein, 273 aa, Unknown
  Obtained from environmental sample
  misc_feature (1)..(273): Xaa is any amino acid
MSGTPAANVFILQPNWAMAMRARGLLAPLESKVVDIRNPQPIGKGYMPVEFNKAVIDSFTFGGKPYAFSVGTSYYNFQALFFNKRLFREAGLDPNLPYDMQKNGTWTWDAFLDICKKLTRDINNDGKIDTYALPRDLSTEILDAIVSSNGATYVDKDPNTGKFVNATNRTEFLEALQFAIKLNTEGVLKPRPENSNWDWYKSEFVDGKVAMRIDESYIAMGSQTELTRMKDDWGMVLFPKGPRSSTYRVYSRDNLMVIPATYKPAEVEKILWA

SEQ ID NO: 100788 - protein, 139 aa, Unknown
  Obtained from environmental sample
  misc_feature (1)..(139): Xaa is any amino acid
MGTTMKNKKIIIAIDGHSSSGKSSFAKAIAARLGYVYVDTGAMYRAVTLYALRRGLINEQGELSEQEIAARLPNISIEFRYNSSRNASDTYLNGENVEQEIRDINVSQHVSRVSAIAAVRTHLVRLQQQMGVKKGIVMD

SEQ ID NO: 100789 - protein, 70 aa, Unknown
  Obtained from environmental sample
  misc_feature (1)..(70): Xaa is any amino acid
GGQEGMVVLLAEVDAKGAATEVSIQRSSGYGLLDEAAVSAVRRWRFRPARLAGVAVAGQVLVPVEFRLHP

SEQ ID NO: 100790 - protein, 148 aa, Unknown
  Obtained from environmental sample
  DOMAIN (2)...(136): Glycosyl hydrolases family 2, sugar binding domain
  misc_feature (1)..(148): Xaa is any amino acid
MMRFDLGGSWQLKTLDGKNNTLTGEVPGSVLDAWVKAGIVPDPYYGENEKQITSLFNNDFEYSRTFSVSAELLAEDEVALVCLGIDTLGEIFINDKSIAKVNNMHRSWRFNVKDLLKTGENTIRVVLFSPNAFIADAFRKNGQVKYIS

SEQ ID NO: 100791 - protein, 248 aa, Unknown
  Obtained from environmental sample
  DOMAIN (177)...(220): LysM domain
  misc_feature (1)..(248): Xaa is any amino acid
QTIPTTPPVSIQPISTQPVSTTQTPVSTPPVSTQPISTTPPVSTPQAIAAPTAPIDTATAKPTKINPKVKPDPDPTFNADVYDLGMTVAPGGSSVRVRVTVDESIGRFAEWMRVNISDIRTANNIAENEALQLGAFISIPIKSSTNIKRFEVNRLQYHLAIEEDFFANFHVTDFEQRSVKSGMNLWRICREAQIPMWLLKKYNRGVNFYAMQPGNTIWIPKVSAKDGTASAGNELDPAVSEAEEAEGQ

SEQ ID NO: 100792 - protein, 145 aa, Unknown
  Obtained from environmental sample
  misc_feature (1)..(145): Xaa is any amino acid
MAENLNYAAEGSKCGVVGTGDTKGSLSDENTPICNTYGRLYDWATAINACPNGWHLPSDAEWEALMKVTDPSCSGRSCAGAGKKLKAISAISDWNDYEGKSGGGTNDFRFSALPGGSYSYSFSDVGEQARWWSASENDASYAYTW

SEQ ID NO: 100793 - protein, 271 aa, Unknown
  Obtained from environmental sample
  DOMAIN (1)...(192): Sigma-54 interaction domain
  misc_feature (1)..(271): Xaa is any amino acid
SGVGKEIFAEQIHLRSARNRKPFIRVNCAALPEGLLESELFGHVKGAFTSAVSNRQGRFELADGGTIFLDEIGDLPLSLQAKLLRVIQQKTFEKLGSDVSQTVNVRILAATNKDIEALVEKEQFRSDLYYRLNVLPIYIPPLRQRQEDIPELALFFLSKFMKETKKQFEGFSDEALQAMISYSWPGNIRELENSVERACVLGRDKWIQKSDLFLNPSISAAEQENRDRSLKNAVNVFKASFIRNVLEENNWNQTDSARILDIQRTYLSRLI

SEQ ID NO: 100794 - protein, 139 aa, Unknown
  Obtained from environmental sample
  misc_feature (1)..(139): Xaa is any amino acid
RRKRVFLSGDTGYSGHFRAIGEKHGPFDLAFFEIDAWNPGWPKTHLFPDEVIRACRDVRAKALVPVHWGVFDLALHPWDDSIRRLADLADKEGDINLLTPLMGQKLVPGVTQLSRWWENLPFSHNSTAGSAVPNSAPGA

SEQ ID NO: 100795 - protein, 253 aa, Unknown
  Obtained from environmental sample
  DOMAIN (14)...(253): UvrD/REP helicase
  misc_feature (1)..(253): Xaa is any amino acid
MEFSADLPAYLKPLNPDQRRAVLHTGNPLLILAGAGSGKTRVITTKIAWLIREKGVAPQSILAVTFTNKAAREMAERARNIDERAGQAMLRTFHSFGAWFLRRNGHFCGLDSNFTIYDDDDVITFLSTIMNGEQKAEVKHTAYNISRAKDYFLSPEDPSLKLIDSSKKFRDIYAEYEKRLANTGNVDFGDLIKKPVEILRKEPDVCRRFRERFSVIMVDEYQDANVAQFEMLKELAGPGTYVCVVGDDDQSIY

SEQ ID NO: 100796 - protein, 226 aa, Unknown
  Obtained from environmental sample
  misc_feature (1)..(226): Xaa is any amino acid
MQHLLERKGQVLETKPFLAFLQALRPINETLALNSFLPFLIRMGIAAADDEGRYLALTEHGAALAQEYILRDPTWAESHWEGLGHVAPLYAHATLELLTPAMQNPHRLLKLAQVADVEVIDAMVGFRFSAATLIRALDSGIPLEEAMANVRGPDGVELPQPLLNLFADLGERLGEVEVEQGVRLVRTRSEDLASELLVRPELASLGLEPISETVMQVRGGGNAFAL

SEQ ID NO: 100797 - protein, 246 aa, Unknown
  Obtained from environmental sample
  DOMAIN (136)...(222): Transposase IS116/IS110/IS902 family
  misc_feature (1)..(246): Xaa is any amino acid
ELPFIWDAPTKTDKEDAMKLAHLVEERRDEKLPIVPLPSEKEMERRKTISSYGREMNNRTRLINTLHAIFVHQGHTTIVKKNLATAERRRQAIQVLAGHEREEAEWLLKYLELHEQHIKELREKIREEATNDEDMKRLQSIPGIGPIVAYAFTAHVGDGSRFSKGAQVSNYIGFVPRLDYSGTIQRHGHITKRGNGYLRGLLVQAAWTMTLCKKGGALSTRYKYYTLCQEVSKKKTIVSIARKLAE

SEQ ID NO: 100798 - protein, 248 aa, Unknown
  Obtained from environmental sample
  misc_feature (1)..(248): Xaa is any amino acid
MSKFSRDTAAPEIAYDAALVHYEAKQYRTSIDVLRKLLVDFPNHKHTLLIRRRLAQALLMDGQLDDAQKELEWLFVQYTDKKGLGVRDSNAVTTAKEIETAIAAVLYQKAEKAVKAGQFQAGAEAYIALVKRFPRLDFADKALFDAAVAYESANQNTKAAETWMRVPREYAKSPQAVQAVVRAARAYRKDDKRLESAKTYLYIVDNFPQDSAVINAIFAAAQTYDSIPGKDSLTNRRLAAQTYEIAFK

SEQ ID NO: 100799 - protein, 224 aa, Unknown
  Obtained from environmental sample
  DOMAIN (27)...(104): Surface antigen variable number repeat
  misc_feature (1)..(224): Xaa is any amino acid
MFSDVKAYARYGENGDVDLIFEVAEQPALDTLLIEGNDDITEEDLRLKIRVIKGNVYSKSDLERDRQAILNHYRSQGYLLVEVWIKEIPVEGHRNRVIIYVSEGNKVKVDSILISGNDDIPREEFVSRMLTKTDSWWGGGDFKQDVFNSDRDTVINVARHYGFLDAELLEYNATYMPDSTCRFYLGRMVRKSSSLPILYSQLNKNMQDKENPLHYLVGKAMAMS

SEQ ID NO: 100800 - protein, 51 aa, Unknown
  Obtained from environmental sample
  misc_feature (1)..(51): Xaa is any amino acid
MKIAVIGGAGYIGSHVTRELLDFGNEIFVYDNLSSGLRQNLFKEANFTHGD

SEQ ID NO: 100801 - protein, 217 aa, Unknown
  Obtained from environmental sample
  misc_feature (1)..(217): Xaa is any amino acid
SDVTTHNLHSDILISEIFKKSKILPRTDGIVKKAKLRYDIGNPPGKDKSYGDAINWESLLENIPIGEDLFFISSDKDYKSALESTRFNQYLFDEWKDTKNSNLFYYNSLTEYFKSHLKHIELETEAQKNELIEQLSKCDAFRATHNIIAKLSAFSTYSDEQITQLLLAADMNDQVWQIIKDPDIESFYDTLLKDTIDRFSKNAELNWILNRLGYSTE

SEQ ID NO: 100802 - protein, 234 aa, Unknown
  Obtained from environmental sample
  misc_feature (1)..(234): Xaa is any amino acid
MSVSGQMLVKLFTREDAEYCKYENTNAEMTALHIKESMAGRWFRASLGILTHTGPMVIYLMGGLLMLRFSAGTLTVGDITVMVALLDRLYRPVNMLLNMQVDIIRSMAIFTRIFQYYDMPVEIENRPGAISPDTMNGLVEFRNVNFHYNEDKPILKNISFTVEPGHSVAIVGPSGAGKSTVINLIPRLYDVVDGEILLDRRDVREYDLAWLRSNVGLVTQDTYLFNGTVKENLL

SEQ ID NO: 100803 - protein, 117 aa, Unknown
  Obtained from environmental sample
  DOMAIN (45)...(117): Sporulation related domain
  misc_feature (1)..(117): Xaa is any amino acid
EPPKPSAPAEQPKSAVSAELPKPAAPAEPLGPTIAPIPAKPAANKPAAVVLQTGLFSKEANARSQSDALRKAGFTAAISRKLVNGTEYWAVTVPAGENTNKTIQDLKKAGFESYPIK

SEQ ID NO: 100804 - protein, 92 aa, Unknown
  Obtained from environmental sample
  misc_feature (1)..(92): Xaa is any amino acid
VSLALALGLSQMASQKVRVDSFFLDEGFGTLDEEALDMALSTLTGLRREGKLIGVISHMEALKERIATQIEVVPLGGGRSVIRAPGCTRLSE

SEQ ID NO: 100805 - protein, 278 aa, Unknown
  Obtained from environmental sample
  misc_feature (1)..(278): Xaa is any amino acid
LGGGFADRDCPQVGRQTEQRNTLDLLRKVRELDLKQGEKELPLEEAQAEVKNLVEAAAELRAKLDEDQAQFENTQVQLRDVRKYLQDRAFDEKLIEQLAGIRTRFDALNAVLEKKRRLSRECSATEKLKQDAESRLYGQNVLYDAAKAKFVSVESSLRKQKGAMDETLGARPIAAWREELADLMERKARQEKVEGVLRQRLESMNATQALAARIEVLTSSRKEYEEQIVTCKSKIGEIEKEALRLEGQRELIQRIEDLEEARSRLQDGEPCPLCGSMT

SEQ ID NO: 100806 - protein, 240 aa, Unknown
  Obtained from environmental sample
  misc_feature (1)..(240): Xaa is any amino acid
MPAAMADGMVKIAVLVNLTAGDQSRQFLEGCVSEGRSMGFTVDTFISGADKSRCAEITAGIARADYDGLIFAYGETAAAADDFFFDMLNPLAEKNMKIVTFETFPPNNYRLFNGLITTFQNDADLARLSLDVLLSSVHSVAGRPVRVIRIGCNSGIPFLDRRARVFDEYVRRGAMAEAVSINVDGMENPEHAAWEGLAAALPHFPPGSVDAIWSPYDKFAEGCVQALISTDRQDIKLVSI

SEQ ID NO: 100807 - protein, 94 aa, Unknown
  Obtained from environmental sample
  misc_feature (1)..(94): Xaa is any amino acid
VTGLGLPSEMAEYIENSACPYMFLWNPIDLGYLGGYVAAALARGTITGKVGDRLSGGKLGQFSVTQAGDGGTEILLGPPFKFDQSNIGNWKTVY

SEQ ID NO: 100808 - protein, 283 aa, Unknown
  Obtained from environmental sample
  misc_feature (1)..(283): Xaa is any amino acid
MKLSGIWELKRIALRNLARHKVKTILTSAAIMVSVAVFIFLNGWLKGMIIDSRRNIVNYEMGAAKLQTKLYFEKKDEMPSYENFTDWELYHDALYTEGYVSAPRYVFSGTLFSISGSAPIVFYGVDPAFEAETMRYVPFVDFGRFPQNGDFGIALGTFAAEKLKVGIPTRPYRQELEELIISVSQNNAEADFIRSLYDAASGKKAFWDVNKKTTEGNERMILKKDASRSDLDRYWNILDASGCNDVRINAVIDIKAVPETIRADKWEGELFPALRSEDRPLVE

SEQ ID NO: 100809 - protein, 212 aa, Unknown
  Obtained from environmental sample
  DOMAIN (15)...(212): Nitrogenase component 1 type Oxidoreductase
  misc_feature (1)..(212): Xaa is any amino acid
MLDLTPKEVKERSALRINPCKTCQPVGAMYAALGVAKCMPHSHGSQGCCSYHRMVLSRHFKEPAVASSSSFTEGASVFGGKTNITTAVKNIFEMYNPDIIAVHTTCLSETIGDDLTSFIMDVQIPEGKKVVHCNTPSYVGSHINGFFNMMMGFMNYLTGKTGMPTGKTAIFPGWVNPGDIRELKRIAKAMKVNTVFFPDQTGVLDAPMNGKY

SEQ ID NO: 100810 - protein, 266 aa, Unknown
  Obtained from environmental sample
  misc_feature (1)..(266): Xaa is any amino acid
ALGETGSKESVSFLSELIKNTDERAVLRMAALEALGKIGADEGMDAVIEAVSSPDPNVRSSAVAALAPFAGEAAENAILDAFRDSYYRTRMGAAQAAGERRLESAVPYLRYRAENDDVPNVKDEAIKALGAINNEEAMSTLDSLFTERKNSDRVRIMAADMLLKNNADVYGSRVYAEMGDAKLKNQTALYNGFIRVMTTAKSATLETTVLSLINGGGVIEKSLALDLILVNEFRQLADVMRSLLDEKKHSASIARQAQSTLDKLGL

SEQ ID NO: 100811 - protein, 272 aa, Unknown
  Obtained from environmental sample
  DOMAIN (37)...(198): Mannitol dehydrogenase Rossmann domain
  misc_feature (1)..(272): Xaa is any amino acid
MRLNNVSLNDRVFWEKTGIALPCFDRDTMIASTLKTPKWVHFGAGNIFRAFPAALAQSLLEQGIETTGIVVAEGYDGEIIDKCFTAFDNMTLLVTLKSDGSAEKKIIGSVARAVRMDREFSVLKDIFVNPSLQIASFTITEKGYSLTNREGSLFSDIAEDIKTSPTNAKSYLGRIAALCHERYVNSALPLAMVSMDNCSHNGDILFTAVETIAKGWIENGAASAGFLDYVRNKNKLSFPWTMIDKITPRPDDSIRDMLVSCGLEDMQGSEQK

SEQ ID NO: 100812 - protein, 241 aa, Unknown
  Obtained from environmental sample
  DOMAIN (46)...(198): SecA DEAD-like domain
  misc_feature (1)..(241): Xaa is any amino acid
LSEPGIKQLLHKTESFHMAEQNKLMHLIDDDLYFVIEEKLNSVDIKDKGIDLVSNNAEEAKFYVIPDIGAEIAELEKLNLTAEEKAEKKSEIYRNFAIASERIHTLNQLLKAYTMFEKDVEYVILDGKIKIVDEQTGRIMEGRRYSDGLHQALEAKENVKVEAATQTYATITLQNYFRMYRKLAGMTGTAETEAGELWNIYKLDVVTIPTNRPVIRDDREDLVYKTKREKYGAVVDEILNL

SEQ ID NO: 100813 - protein, 78 aa, Unknown
  Obtained from environmental sample
  misc_feature (1)..(78): Xaa is any amino acid
MNKIATLLLLCTTLFAQQKGTLTDTRDGKIYKTTKIGEQVWMAENLNYEAKGSKCYENKPANCGKYGKLYDWKTAMKA

SEQ ID NO: 100814 - protein, 278 aa, Unknown
  Obtained from environmental sample
  DOMAIN (74)...(140): Elongation factor Tu domain 2
  misc_feature (1)..(278): Xaa is any amino acid
EDDWLELVRDDLIRLTRGTFLENSPIIPVSVETGQGLPELKAALAELAASLDFRAADGLFRLPLDRVFSLTGFGTVVTGTLMDGSVKAGEAATVYPDLLPAKIKSLEVHSRPVETAWPGQRVAVNINLKKEKLARGHVLAAADSLQPTMMLDVRLEVLPDSPFPVKNGSWVHLYLGSGEFLAKVVLLEEDELADGASSFAQLRLLSPATARKGDRFVIRFYSPLVTIGGGVVLDPVPLKRRRHKPKIISQLATKEAGSPQERLELAIEERPETFPARR

SEQ ID NO: 100815 - protein, 272 aa, Unknown
  Obtained from environmental sample
  misc_feature (1)..(272): Xaa is any amino acid
TYQFHDIIPGSSIGQVHKKAEEDSAKILTKLAQAGDSGKRRLVKAMYTSNNTAVFVFNDLSWERETAVTISEDLVGKVAALQSADGAVYPVQRYIDHDGNMQAVFFPETPSMGWTRLAVLKDINEEKSPFIWKDNVLESPFYTITFDTEGRIASLIDQRQGREMVAPGGVFNALLTAEDARDAWDIDADWTKYIRQETRLVSTEITAYGPVCFRLRRTYEIGEASRLVQDMVCYAEDPRIDFDTKVSWHEKWRLLKAEFDTAIDAVQVRCEL

SEQ ID NO: 100816 - protein, 243 aa, Unknown
  Obtained from environmental sample
  DOMAIN (12)...(243): Amino acid kinase family
  misc_feature (1)..(243): Xaa is any amino acid
MSVIAELVAKARKIVIKFGSNTLAGSDGRINGEFLLEFAGQASALLEQGKRIVIVSSGAQLAGLSAMDKWERKRDIHYRQALCAVGQVKLMNAWEKAFTPYGIHIAQILLTRDDFADNTRTLNMRNTLFTLVDEGIMPIINENDSVSVEEIKIGDNDTLAAQSAILWSADLLVLFSDIEGLYDKNPRKHEDAKLVEEVRDIAAVRRSVGGTEDSPGEFGTGGIVTKLDAAERVVSYGIPMILA

SEQ ID NO: 100817 - protein, 130 aa, Unknown
  Obtained from environmental sample
  DOMAIN (1)...(116): Protein of unknown function (DUF1016)
  misc_feature (1)..(130): Xaa is any amino acid
DRFRFPARQKRITVDNRDYYIDLLFFHRRLKRLIAIDLKIGEFDAAYKGQMELYLNYLHKYECRRDENAPIGLILCTGKNTEHIELMQLEKSNIRVAEYFTVLPSKAKLKAKLHKAILIAQKRLAVTEDD

SEQ ID NO: 100818 - protein, 85 aa, Unknown
  Obtained from environmental sample
  misc_feature (1)..(85): Xaa is any amino acid
MLDTYKTKGLRKKLAEELKTKGIVSISVLSAIEKVPRHLFIDSSFLEFAYQDKAFPIGDEQTISQPFTVARQSELCKSNRKKKSR

SEQ ID NO: 100819 - protein, 162 aa, Unknown
  Obtained from environmental sample
  misc_feature (1)..(162): Xaa is any amino acid
LQNLVQALQSGGNLLKIGLSGFSGSSRAVIAAATISETGCHHLFVLQDKEQAAYFHNDLEKLLDEYQLDFEHKNVLFFPASAKRPYDVELVDNANVLQRAEVLHRLEMNDRKTIVVTYPEALSEKVITQTTLRENTIKLHVKEAVSMDFVMDMLMEYHFERV

SEQ ID NO: 100820 - protein, 173 aa, Unknown
  Obtained from environmental sample
  DOMAIN (1)...(168): Transketolase, pyridine binding domain
  misc_feature (1)..(173): Xaa is any amino acid
MSLTMRDAFGQKLAELGKTNQKLVVLDADVSSSSKSSYFARAFPDRFFNCGVAEANMAGVTAGLAASGFHPVINSFAIFLALKSTDQIRNDFCYNSLPVVLAGGYAGLSDAFDGASHQSITDIAIMRAMPNMEVIVPADNSQACQALEYAFSRQNPVYIRLNRNNTPDLPEAK

SEQ ID NO: 100821 - protein, 84 aa, Unknown
  Obtained from environmental sample
  misc_feature (1)..(84): Xaa is any amino acid
MDGPILTMAHIPGGTFTMGSPANEPGRWDNEGPQHQVTVSGFYMGKFLVTQAGYQAVMEGNPSRFKGDNLPVEQVSWHDAAAYC

SEQ ID NO: 100822 - protein, 289 aa, Unknown
  Obtained from environmental sample
  DOMAIN (1)...(149): ATPase family associated with various cellular activities (AAA)
  misc_feature (1)..(289): Xaa is any amino acid
VGVGAARVRDLFKQARDRGGGIIFIDELDAIGKSRINNIAGGNDEREQTLNQLLVEMDGFDATSGLIILAATNRPDVLDPALLRPGRFDRQVLVDRPDLIGREAILRIHAKAVRLDPEIDLAAVARSTSGFVGADLANVVNEAALLAVRGGRRIVMQKDFEEAIEKTVAGLQKKTRVIKTEERRIVAYHETGHALVAAFTPGSDPVQKISIIPRGFGALGYTLQMPVEDRYLMTEEELLGKINVLLGGRAAEEIIFNQISTGAANDLTKATDIARKMITDYGMSGRFKN

SEQ ID NO: 100823 - protein, 258 aa, Unknown
  Obtained from environmental sample
  misc_feature (1)..(258): Xaa is any amino acid
DNDSDADWKGVELSLVTGRPVSFIQRLYPPYRLSRPVVPLAIAGFAESRTYESGFDTRAPAAAPSAAMRTQSMASEKALAEMDYYYERESPAAGSVAGGVVDTASGRAAGDQFEFTLKNPVTLDRRQSAMLPLVEGAIKAEKVLVFSGSRASGGATINPAISAELVNTSGMKLPAGPITVYDGGTYAGDALIEFFPENEKRLISYGEDLSVSGNVASSGTRFITAVNISGGVMTITRRQSYEKVYTIRNASGQAKKII

SEQ ID NO: 100824 - protein, 258 aa, Unknown
  Obtained from environmental sample
  misc_feature (1)..(258): Xaa is any amino acid
MPSNPELFHSTMVPAPDGSGKLFEEQLDAPPQPVTCLGKTFTSDDERRAYFTEELRKHLADPKFREIEGFPIGKDEDILALSDPPYYTACPNPWLQDFITEWEKQKDKSQDGAPYHREPFAADVSEGKNDPIYNAHSYHTKVPHKAIMRYILHYTDPGDIVFDGFCGTGMTGVAAQMCGNRTEVESLGYKVKDDGTILQEETDEKGEKYWVAFSKLGARKAVLNDLSPAATFIAYNYNTPVDVAALKKKQNAFGGGEA

SEQ ID NO: 100825 - protein, 100 aa, Unknown
  Obtained from environmental sample
  misc_feature (1)..(100): Xaa is any amino acid
MGKKNITYLAVLAALLTPAIVSCNSKEKLYIYNWTYYTPDSVVEKFESEYNCRVIYDEFASNEDMYAKLRANKGKRGGYDVVFPSKDYVPIMIRQGMLER

SEQ ID NO: 100826 - protein, 273 aa, Unknown
  Obtained from environmental sample
  DOMAIN (3)...(181): ATPase family associated with various cellular activities (AAA)
  misc_feature (1)..(273): Xaa is any amino acid
DYEGLAQRIVTGNVPPTLKDFSIYSLDMGALVAGTKYRGDFEERIKKVVEEILKKEKAILFIDEIHTLVGAGSVSGSALDASNLLKPALTSGKLRCIGSTTHEDYTKIFEKDRALSRRFQKIDINEPSQEDAVKILSGLKIKYEDYHKVHYSDDAVEGAVRLSAQYITERRLPDKAIDVIDEAGSYARIEAYLKEEKEFAELFGKTTGEKVHTVQEGIVEKIEIGLPLIETVVSKIARIPERSVGGNEKDRLRLLEDRIKERIFGQDEAVKAV

SEQ ID NO: 100827 - protein, 226 aa, Unknown
  Obtained from environmental sample
  DOMAIN (49)...(71): MORN repeat
  misc_feature (1)..(226): Xaa is any amino acid
ITYEGDFVDGELHGKGKLKWPDGDECEGDFVKGKRTGKGKFTHANGNVYEGDFADEKRTGKGKFTWKDDDGIVMIYEGDFVDGNFHGKGKYTWGDDGTVYEGDFVENKFHGKGKMTLTNGDVYEGDFVDGTPHGKGKYTRADGEVYEGGYIQGQQTGKGKLIRSDGFVDEGDFVDGCLQGKGKRTATDGSVYEGDFIEGQRTGYGKKTYPDGKVEDGQWKDGKFVG

SEQ ID NO: 100828 - protein, 82 aa, Unknown
  Obtained from environmental sample
  misc_feature (1)..(82): Xaa is any amino acid
MPFPCWLLGKLAVEKKYQGQKLGEKLLMAACDHISRLSNDDAGGFCVIVDAKDQNAKNFYLKYGFIEFKDEPLRLYLPLPTY

SEQ ID NO: 100829 - protein, 149 aa, Unknown
  Obtained from environmental sample
  DOMAIN (13)...(149): NfeD-like
  misc_feature (1)..(149): Xaa is any amino acid
MLFDFGYVSVRWIWVALTIIFSIVEVLTLGLTTVWFAIAALIMVFLSFLPIPLIYQIMIFLAISAVLLIFTRPVALKKFKTGAEKTNVDSLAGKHALVTKKIEEFDKGEIKLNGQIWSARSEDGSVIDEGAKCEVLRIEGVHAIVRVIQ

SEQ ID NO: 100830 - protein, 78 aa, Unknown
  Obtained from environmental sample
  misc_feature (1)..(78): Xaa is any amino acid
IAKRNNVPIIPLALKTDAWGCGRDGVLKDYGKIFPELPVHFRFGKALRVDGNGKEEQEHLCRFIENALAEWREQDALA

SEQ ID NO: 100831 - protein, 261 aa, Unknown
  Obtained from environmental sample
  misc_feature (1)..(261): Xaa is any amino acid
GTDTAAAPKWVLLSTITPEETQWLWPGYLVQGELNNLTGRPDVGKSFLAMQIAAAVSLPDGKLPIVPARSDDPESVLRFGEVPHGKVIYMAGDDSIEKTVCKRLYKMGADLSKIIVWTSHQLPGFDSHEYGEMFDDVKPVLIVFDTFQHFFMGDMNAANKTTDALHCILSLIRQYNTAGCIISHPNKFALNNGGDAIAASGGSLAIQGKYRSSLSVGFAPGFDGKTNHTRAVCHTKGNLVEGGKPASLLYEIGRDGVINWL

SEQ ID NO: 100832 - protein, 170 aa, Unknown
  Obtained from environmental sample
  misc_feature (1)..(170): Xaa is any amino acid
MNKIITLLALLNIAVFAQQKGTFTDPRDKKKYNTVKIGNITWFAQNLDYRGSDGYMGLCYGDKPKQNIKKPENCKKYGRLYDWEEAMTACPDGWHLPSDKEWQTLVNFAGGDEVAGKKLKAKTGWEGKCKWKDEKTDERGRVTVTEFNNCGSDEYGFSALPGGYSCGDEY

SEQ ID NO: 100833 - protein, 242 aa, Unknown
  Obtained from environmental sample
  DOMAIN (42)...(221): ABC transporter
  misc_feature (1)..(242): Xaa is any amino acid
MPSTTEGRIPLIEAKHVYKSFAAADGSTLQVLDDINLTLYSGEIVALLGKSGSGKSTILRCLAGLIAPTSGEVLYRGARLEGANPGVAMVFQSFALMPWLTVQDNVELGLKAQGVPEAERHARALAAIDQIGLDGFESAYPRELSGGMRQRVGFARALVLQPDVLMMDEPFSALDVLTSENLRNEIVSMWAQPDFPTKCICIVTHNVEESVLLADRAIVLGSNPGHILAEVVIDLPRPRDRK

SEQ ID NO: 100834 - protein, 248 aa, Unknown
  Obtained from environmental sample
  misc_feature (1)..(248): Xaa is any amino acid
VTLQLFLGDSGPVSFGAAQMGAIPWQLNVARLLAPAAAVIGALIAILVIFQEQITRAINRGQRGHVLLVGETPTADVIEDALKLEGAHVVRAASGSEDDLNNAGARGAAAVYVCGDDAGDPGANLRIAATVRKIPTSMPSRKVAVALSDPDLAPALLARHLSHPDPSLDLFYLTHLTAVRLATYVMSRPNIRRVWLLGSGDLRDELICELAQEWSVRRKPDDELAIVVCGHGATGAVARSKPRLPARI

SEQ ID NO: 100835 - protein, 286 aa, Unknown
  Obtained from environmental sample
  DOMAIN (199)...(236): RHS Repeat
  misc_feature (1)..(286): Xaa is any amino acid
YSAKETIEKAPLALERRYEYNNRKDLVRITEKDLSTGETRESKYTYDKRHLLTEEKDGSGNTIKYTYREDGELIKKIQGPWYWEYGYEAGGRISTVTRGKTGTNKKYTENYAYQWQGWNEKCAVTITGAGTTAYLLDPWGQVTAVTNAVGDSSERTLNGAGNMLREQASSGGFYEYRYDALGRPYQAGREGGPAVQVRYNLDGSIAEKTDRLGKVTQYAYDGRGLLTKETTALGEQRYFYDNAGRLIRQEIASRNSVTYRSDWNYNDSLRTVTVTAGGTYSETLYL

SEQ ID NO: 100836 - protein, 226 aa, Unknown
  Obtained from environmental sample
  DOMAIN (93)...(220): Domain of unknown function (DUF303)
  misc_feature (1)..(226): Xaa is any amino acid
MILSTLVTMACASDGKSGDNPEFPQADPNFHIYLCFGQSNMEGDPDKGIPPNYKEYRNDRFQVMAAANMPKTGRTTGNWYPAVPPLVRDWTGLSPVDFFGRTLVERIADPNIKIGVVVVAVGGGAINIFDKDNKEAMAYLAKQEQYMKDISAEYGNNPYQRLADLAKEAQKAGVIKGILFHQGESGKAKAPDYVNSGDNVNWGIAVKTVYDNLLADLELKPNSNSF

SEQ ID NO: 100837 - protein, 273 aa, Unknown
  Obtained from environmental sample
  DOMAIN (1)...(264): DNA polymerase family B, exonuclease domain
  misc_feature (1)..(273): Xaa is any amino acid
VFVDDFRPMFFCLRSTPASATAAAAERKTLNMRTLDMQDLDCLYFDTHAAMQQAARSLRAAGRPVYESDVNPLQRYLMERMVSGAMRVSGTREQTGRFASFKNPKLRGCEFIPDLGVMSICIDTDSDAGGGYGGGIREAACAEDGRTCLFIVDSNGNEFSMKSEFDYASATPNHREPAEKAAERSRSGPAPDQAPVDVRHCKDERQLLTDLMKYIAARDPDVLTGADIADHTLRILQERCTKLGLRFEIGREGGSRVYASTRNVRRRGGGNST

SEQ ID NO: 100838 - protein, 261 aa, Unknown
  Obtained from environmental sample
  misc_feature (1)..(261): Xaa is any amino acid
MLDKLFPKKTAPVAPTSQPALSLGGLVSGIKSAASGLASTPLGVAAQNVVGAVRPVGAAVQSIGNALGSAPPVAVNPSTIPTQTDAPTPRSYSVPLPSVPVPSTPTSVGPDTNPYVAPQPLTELGSKAQGNMLAASDVINNQLTGKAYDPYALQTQQALGRAEANQRAKAASQIHSAGFTGTPLGVSAGNAVESDLLRNRFDTNLGIEAARQDMMNTGVGNAMKYGDVVSQQQNDDLARAKSVFDLDRSKWDFEDGEIDTA

SEQ ID NO: 100839 - protein, 98 aa, Unknown
  Obtained from environmental sample
  misc_feature (1)..(98): Xaa is any amino acid
KSLIPHEKSIGEESDEAGNIEEERRLFYVAITRAREKLFITSCKKRRRMQNTVDCELSPFISEIPSELIKYYEMEKEAQVADDEQAQKFIAQMKAMLN

SEQ ID NO: 100840 - protein, 276 aa, Unknown
  Obtained from environmental sample
  DOMAIN (8)...(276): UvrD/REP helicase
  misc_feature (1)..(276): Xaa is any amino acid
KLKIEAELNEPQIKAVRTTEGPVLIIAGAGSGKTRVITYRIAYMLEKGIPQSSILALTFTNKAAREMETRVKELTGKKLQSLTVSTFHAFGLTILKDESGLLGYRRNFSVYDETDKMTLIKECLRECKMHSNKIDIYALGQHFSKIKTELAQWTQGADMLPVYEEYISSLKIYNAVDFDDLLTIPLWLFENHPDILQKYRNKYRYIMVDEFQDTSVIQYRLMKLLAGSENANCCVVGDDDQSIYSWRGANYENILLFEKDFPGRVEIKLEQNYRST

SEQ ID NO: 100841 - protein, 274 aa, Unknown
  Obtained from environmental sample
  DOMAIN (1)...(92): 60Kd inner membrane protein
  misc_feature (1)..(274): Xaa is any amino acid
MGRPFLFIADLGNPDGLLFGLNVLPIVMTVINIVSGIIYAKDLAIKDRIQQYLMAGVFLVLLYDSPAGLVLYWTSNNIYNLVKNIIQNSLRSKRHEERKERIETKDNALNDCRTFILSLLALALLVGFVIPSCVISSGIDEFAYSMNGIFISPLRFVVHTILQAGGFFLWGICLYFLFQGRTRAILTTAAVSLLIMSVMDTFVYWGSYGYLTQKLALSNYYKSGPVQQSIALAVIIALSAAAFFLMSIRRKHITISMLFITVISFAVFGVTNVV

SEQ ID NO: 100842 - protein, 300 aa, Unknown
  Obtained from environmental sample
  misc_feature (1)..(300): Xaa is any amino acid
ADAENIEVTDIIDKYFERYNNGHLPIRLKDYDPIIMKNLFQFSLFKCSPYVMRTGVYNDGGYMNVDNVDKNPIGSYSVELLKNYISLLLYPQMTKFTDDDKSNCVIAVNGITHSRGFLQYPSYQPVANVTNTGNGIFSNNAAYHVTMLGFLLVSKWLDYLKENGVWDNTRIIIVSDHGYYSPNNPIQVNITLPNNNKLQRFNNLLMIKDFGKSNELSIDSTFMTSADVPAIAVKDIIDNPKNPFTSNPLYTDKDSGVIIPTTDWKPMSKQGKYTYDFKNNEWMKVKKNVFKRENWANYSM

SEQ ID NO: 100843 - protein, 211 aa, Unknown
  Obtained from environmental sample
  DOMAIN (26)...(151): Integral membrane protein DUF6
  misc_feature (1)..(211): Xaa is any amino acid
METPKEQPTRRDALKAGTWAAVATYAMWGVFPIYWKQVAQINALHILCHRVLWSAVFLLIVLWLCGKVGHLVPIFRRHFWAVAACALLITANWGTYIWAVNSGQVTESSLGYYINPLLSILLGRVFFGEKMDRWTISAVALAAFGVAVAAVMMGRPLWVAVTLAVTFSVYGALKKKADLDALAGLCLETVLVAPFALAWLLLSQPQAQFSA

SEQ ID NO: 100844 - protein, 295 aa, Unknown
  Obtained from environmental sample
  DOMAIN (5)...(286): Glycosyl hydrolase family 57
  misc_feature (1)..(295): Xaa is any amino acid
RQADSFGDQELRETANEPALNSLVKFYYDRAIEKKAFFTERCECNILKAFDHYQKKGRLEILTTAATYAFLPFYTGYAEAVQAQFEAAISIYKANFGRYSQGFWLPELGWKSELDSWLRAYNFGYTIVDTHALAFAKPSAEKGSFYPAKTPQGIIVFGRDFYSAEDMAKIMRDPVYRFNFRDQGFELPAKRLGPFLGPQGNRNSTGYKYWALGEDGSGGVLYDSEKACRKAESHARFFLDERLSRLRTASGLMDGPVISLCAFEADSFGRYWHEGSGFIETIFREGAKIEGLQFM

SEQ ID NO: 100845 - protein, 268 aa, Unknown
  Obtained from environmental sample
  DOMAIN (62)...(142): tRNA synthetase B5 domain
  misc_feature (1)..(268): Xaa is any amino acid
GSVGDSELFVELTGLEQKAVTLAASIIACDLADFGFTVEPLEIEYKYDTPFGKKCVTPFYFQEPVFCSLRRIEKFLGVKLSAEECIAALSKMGVKAEKAFDAERGEEPGTKGEGIRAFPPEYRNDFLHAADVLEDVVIGRGLNTFKGERPSDFTVGRLTTLTHFSRRAKELMAGLGYQEMIYNYLGSGKNFVEKMRLDSSGIIRISNPMTENYEYVRNSILPSLLESESVSSHAVYPHRIFEIGKTVYGDEKEKYLSTTRQFLSFLLA

SEQ ID NO: 100846 - protein, 233 aa, Unknown
  Obtained from environmental sample
  misc_feature (1)..(233): Xaa is any amino acid
MKNLFKLIGIIALTALIGFSFLACDNGGGSNPDNSGSIAVTFNSVTANGSGAQTTTQLTLAFSQAITGLSAADITLTGISNVTKGTLNSSGANYTLPISGFTAGGSLNVAVAKSGYDVSGSPKTVTVFYNGTSPNNPQNPNNPQNPNNQPAVPLHSKWPFYVGAAVDENAFSSNDGRYPLLGHFNVLVADNCMKPASVMPVEWQNWQSSPAYNASQSYRWTAADKFINYAKVE

SEQ ID NO: 100847 - protein, 286 aa, Unknown
  Obtained from environmental sample
  DOMAIN (168)...(283): Peptidase family M41
  misc_feature (1)..(286): Xaa is any amino acid
MSVSDFVEMFVGVGASRVRDLFETGKKNAPCILFIDEIDAVGRQRGAGLGGGHDEREQTLNQLLVEMDGFAPNEGVMLVAATNRPDVLDKALLRPGRFDRQVVVGLPDLVGREAILRVHLEKRKVPLDKEVNVKDVAKGTPGLAGADLENLVNEAALMAARFGNPTVTQLDFEEARDKLWMGAERKSLLMSEEDKRMVAYHEAGHALINLLCKNADPLHKLTIIPRGRALGVTLSLPENDKVSMSKEAAEDQIAILMAGRLAQILVFNKQTTGASNDMQGQPNSPA

SEQ ID NO: 100848 - protein, 158 aa, Unknown
  Obtained from environmental sample
  misc_feature (1)..(158): Xaa is any amino acid
NIENEENTETIENDYEESNIEEIFFNEVKNGKKKMKLLKIDNQLDLMFIKSLFQSVNIPYYVEFENMSSIRPGMYIGDLGNYNLVYILVDDYYDAIHVVKDYLERKKKHKEYNKYEDARNLAEITFGNWKVPSADNTNGIEIIYKNRPVILSNQEKIP

SEQ ID NO: 100849 - protein, 239 aa, Unknown
  Obtained from environmental sample
  DOMAIN (3)...(186): ExsB
  misc_feature (1)..(239): Xaa is any amino acid
MKKAVVLLSGGLDSATCGVVARESGFELYALSFSYGQRHAFELLAAQRVAAFLGVAEHRIVNIDLSSLGGSALTSGHIDVPKGGLSVGIPVTYVPARNTIFLSYALAWAEALGRLGSDEYCTDIFIGVNCIDYSGYPDCRPEYMEAFRKMANLATVAGVNGHEMTIHTPLIYLNKAEIIKLGAKSGFDYGITHSCYDPEQKTGRACGKCDSCIIRRKGFDEGGNNGSYNLYERTSGMSV

SEQ ID NO: 100850 - protein, 296 aa, Unknown
  Obtained from environmental sample
  misc_feature (1)..(296): Xaa is any amino acid
MARDPYIREMEMIYLEPGDKSIRSKMDEFWNAWQELSIYPADTAPRLSLLERGKTLIDGIHDRYFALKSLQERADEDIRMTVSEINDLSRQIAELNNTIQRIKAQGDDPNDLLDRRDLLVDMLSSKINVTVDKRDPDEFMVHTNGIVLVQGRIGRQFDLALNLETGYSDVVWSDTRNKLEFLNNDHNGSLGALVDLRDYTINTEIQALDNMTMNFVGLVNEVHEKAYGINGETGLKFFNEHPFVTNVNGSYDRNGDGDDDSSYIFRVSGTNILESRAQVGLEGVITLSAFGATGES

SEQ ID NO: 100851 - protein, 178 aa, Unknown
  Obtained from environmental sample
  DOMAIN (8)...(168): Glycosyl transferase family 2
  misc_feature (1)..(178): Xaa is any amino acid
MRGNELVSVVMPAHNHARFIGEAIQSLIDQTYENIEFLVMDDGSSDGTFEALRKTRPACEKRFARVIMERQSNQGTSLTLKRLFSQAEGRFWTSMASDDLLHSDYVRICHDFLAKNYEFGAVNVESDLIDEHSRPIYWNRYSKKISSKEAARYKTFGDFLRHIHSDIDFRSNEFGRYE

SEQ ID NO: 100852 - protein, 208 aa, Unknown
  Obtained from environmental sample
  misc_feature (1)..(208): Xaa is any amino acid
MGNWGKWSETFYHKTSSGRNDDFSFSVITDPQSGTSEQMDGALQMANEFDPDNRFFLCAGDLVEQIGSSPTEIEYYTNVASKYNKRTPIVATQGNHDTYDTSGSYSFVYDEASVFNAFVTFPDNGCQQDKTKSQSYYFYYNKVLFVVLSTVVSEAQHTVQKQWLENILKKDREEGLSNFKIVTTHVGPLGNIIMKISRKLSRSTYGKL

SEQ ID NO: 100853 - protein, 262 aa, Unknown
  Obtained from environmental sample
  misc_feature (1)..(262): Xaa is any amino acid
EALQSYWFCHLGVITELNGWDAYCPGHLDQHLWPFYKKEIEAGTLTRESAKELLGCFFVKFNNHPAPPKVGVTAAESGTYTDFANINLAGLLADGSDGSNEVTLLLLEVIDEMQLLQPSNNIQISRKTPDNVFKAALNVIRKGYGFPSVFNADSVVEEQLRMGKTLEDARAGGCSGCVEVGAFGKEAYILTGYFNLPKVLELALHNGFDNRLGKQLGPMTGSTDSFETIDDVIEAFRQQLHHFIDVKISGNQIIEQLYAKSM

SEQ ID NO: 100854 - protein, 274 aa, Unknown
  Obtained from environmental sample
  misc_feature (1)..(274): Xaa is any amino acid
ATKSDFPLVSYKDALLNCLPDDGGLYVPDQNADIRELLFNMNEKTTFNDMLSSVAPNILEGGINPVSASKIAASAYNYEPELINLDDNYSLLKLYNGPTGIFKDYGIAFLSAILEEFMKGREQSMIVSAARTDTAVSMAHAFNGRNGISLVLLYPSGHIRGLDPSSFVQNGGNIIPIQVKGTFDDCQRLVVETIKDREFSTRYNVTSSNTINPGRLLPQVFYYLYAFIQIKNKFSKDLFFSVPCGNFGNLIAGLYAWKFGMPVNGFIAAMNINN

SEQ ID NO: 100855 - protein, 175 aa, Unknown
  Obtained from environmental sample
  DOMAIN (2)...(175): Polysaccharide pyruvyl transferase
  misc_feature (1)..(175): Xaa is any amino acid
MKLLILGNHTCGNRGDSAILRGLLDAINILNPHAEVDVMSRYPVSSSWLLNRPVMGDPLFLQMKQHNSAAGVVGRVKKVLRRRYQHQVLLSRVTDTGKLRNIAIAQGFTDFVRLLSGYDAIIQVGGSFFVDLYGVPQFEHALCTFMANKPLFMIGHSVGPFQDEQFNQLANYVFG

SEQ ID NO: 100856 - protein, 282 aa, Unknown
  Obtained from environmental sample
  DOMAIN (102)...(278): Glycosyl transferases group 1
  misc_feature (1)..(282): Xaa is any amino acid
AICGQVATPFRADVFIAHFGPAGVTAAKLRELGVIRGKIATIFHGIDISSREVLNHYTPEYQQLFRRGDLMLPISDLWAGRLQKMGCPREKIAVSRMGVDMTRFSPRPVKAPATPLEIISVARLTEKKGLHVAIEACRQLKEQGVAFRYRILGIGPWERRLRTLIEQYQLEDVVEMPGFKPSHEVKAMLDDADVFLLPSVTGADGDMEGIPVALMEAMAVGIPVVSTLHSGIPELVEADKSGWLVPENDARALAQRLAAFSQLDTDELAPVVKRAREKVEHD

SEQ ID NO: 100857 - protein, 293 aa, Unknown
  Obtained from environmental sample
  DOMAIN (83)...(288): SNF2 family N-terminal domain
  misc_feature (1)..(293): Xaa is any amino acid
GTKTDYEKGKQIFDELWETAVILADKDHIVEFENSVIEKIWYEKLYKPYCFFLRVLDEYFSVHYDKDFKTANEINEYFYDLKYQTDAIKLALKTIETHNGVIVSDVVGLGKSIIGSVVAHNMGLQTIIIAPPHLVPQWEDYKIDFKYHAKVFSSGKIESALQYYKDKSSFGKPWLIIIDEAHKYRNEQTADYKNLHDLCRANKIMLLTATPFNNRPSDIYSMVKLFQIPLKSTLKNVDNLGFRFQELIIRYNELRKKQRKKDINEHSLKLEIEAIAVNIRRIISPLVIRRSRL

SEQ ID NO: 100858 - protein, 183 aa, Unknown
  Obtained from environmental sample
  misc_feature (1)..(183): Xaa is any amino acid
SAAAKTVTVVAQDGTINAGTAGTATFAVTTSNIANGQAGTVQWFSNANGTTAATTPTGITASVSNVSNNAATVTMTSAKAVKEGTYYFKLTIDGVTSATVTLTVSSVTSSGELVPVNPLRAWMRNGLLHVEGVTMGETVSIYSATGQLVYQSIATSEEADIPLREEGVYIVRAGENSVKIIRN

SEQ ID NO: 100859 - protein, 192 aa, Unknown
  Obtained from environmental sample
  misc_feature (1)..(192): Xaa is any amino acid
MFLTILLKISGKKEILITENNAQKTIQDFAKTAMNTTPSIFNKNIAGYTTIGGRERRDSDDNTGDSTDMCAVILNRPGLPHRSFFQELEKTGFDNVISIESSSPNYNIEELSQRFPFVRFIIPEKEINLGEQINLAASEIESSLFFVLHSDMKIIAGGTARRMAERLIILQEDAGIYSNAVKRLCTVPVIVN

SEQ ID NO: 100860 - protein, 283 aa, Unknown
  Obtained from environmental sample
  misc_feature (1)..(283): Xaa is any amino acid
AYIHTAAGSIFDGDQSLLSFARRAKNALDSASSVDSSLGEINRRFENLYYEAEDIAGEFRSYRDNLAFDPQRLEEVNERLALLGKLKKKYAKNAEIQGSEEEAILSYRTQAEAEMEALSGAEENREKLKTQITVIEKNIVAKALVLRQKRTDAALILGKLITGILRNLGMQNANFEVSITPKQQDGQVSFGPWGTENVDFLISANKGEPLKDLAKIASGGELSRVMLAIKTALLSESHGETPGVETLVFDEIDTGIGGEVAVKVGEYLAHIGKILQIFCVTHL

SEQ ID NO: 100861 - protein, 159 aa, Unknown
  Obtained from environmental sample
  misc_feature (1)..(159): Xaa is any amino acid
MKVGAKTWMADNINIETGNSWCYDSDTFNCNAYGRLYNWEAAKTACPAGWRLPTLKEWSGFVKAVSDKEAADKKARAKRGGNEDGYATDERRLPAILGGGRYHIGGEYSNIGGYSYWWAGAEKSSQYTAYFRYVNYGHEDIADDFDIREYGFSVRCLRD

SEQ ID NO: 100862 - protein, 269 aa, Unknown
  Obtained from environmental sample
  misc_feature (1)..(269): Xaa is any amino acid
GKLNQTAGSVTAVTITPISGKSTGAVSNIKYAGSATIPQTAGTYTVTFDVAAVTGWNEAIGLSAGTLTVTAGTTPITTYTVIYNANGGTGTTASSEHTIGTAKALTANGFTKANNLFVCWTTNVGGTGTRYYNGQSVTDLTTTATTVTLYAQWEEGNMYYGVTSTAALNALKGTGGSLNVFNTALANPTDNSNVHITTINTSTEKTIEFSGNNIWFVMVPKSLGSITIKDGSGTDVTSAYPSTVVTFYGVDYYMHVSPSAGPQSALNYT

SEQ ID NO: 100863 - protein, 277 aa, Unknown
  Obtained from environmental sample
  misc_feature (1)..(277): Xaa is any amino acid
VADQPLSAEIAALFDTANGFPDTLSDAKKIWGMNNPLMTFAFVADPSPMVYCPKLKNSGETEGHSCDECTLYVYGSNDTLYFDPADNLPWGQKQGQSSFDPVIQGLRVVSTKDLVNWTDHGPINLTAKTSSNPLFASAAEKVAPYATETWAPSAEWKMVNGKPKFFLYWCNSGNNSSVVVSDSPIGPFSNPGLTASMVNKTMEGFGSVEWLFDPGTFIDYDGTAYMVLGGGGEIANTGNQRRVKMNSDMISIIGNGPELILPWHFEATDIWKWQNRY

SEQ ID NO: 100864 - protein, 154 aa, Unknown
  Obtained from environmental sample
  misc_feature (1)..(154): Xaa is any amino acid
MIFCAAGDPGGSRAVLPVALEILRRGAPVRVLKHGFLGQELPRAYRQTLCSAYEAESYLAECGAFIFGSSAVDPLPLSLARQAKGLGKPVVHVLDNWGSYSDRLRTDQGPLLEVDVYAVMDEAAKAGALASGIPEPCLAVTGHPGIGVIGEELR

SEQ ID NO: 100865 - protein, 201 aa, Unknown
  Obtained from environmental sample
  misc_feature (1)..(201): Xaa is any amino acid
LPILPTRSISTGPRNRKQTADTSVQFTVGVGTYEIRIESYEPISGSNVLYATGKASNVLVKAGQTTTVPISMDQAATVTFNLNYASAPAVPTIQAGQGDTISSPTPPTRFTYDLSGWYKEAACTTQWDFASDTVTADTTLYAKWTISMATIPAGSFTMGSTDLYSQPDETQHTVTLTSGFKMGKYQVTQEQYNEVMGSNPS

SEQ ID NO: 100866 - protein, 203 aa, Unknown
  Obtained from environmental sample
  misc_feature (1)..(203): Xaa is any amino acid
MAKLPFSVFRRAGRRFFYVAFKNEKTGKYLPAISTKQETESGAVSTAFQWLKDGIPRHGEAVPLKKYIVTLTEDEKKTLKEIINKGKHSAEKPKRAQALLLAEENYTDEMIADKAGMSRRGLEQLRQRFVEDGFEATLEGKPRGHRPKALGEKDEARLIALVCSPKPEGHSRWSLRLLQETWKTLAYTDTKAVSYQTIRRTLK

SEQ ID NO: 100867 - protein, 104 aa, Unknown
  Obtained from environmental sample
  misc_feature (1)..(104): Xaa is any amino acid
MSKFRPCIDLHNGKVKQIVGSSLSQNESELKTNFISPKPAQWYAKLYKKDGLKGGHIIMLGAGNEEAATEALKAYPNGMQVGGGINSENAKKYLEAGASAVIVT

SEQ ID NO: 100868 - protein, 297 aa, Unknown
  Obtained from environmental sample
  DOMAIN (165)...(244): Fibronectin type III domain
  misc_feature (1)..(297): Xaa is any amino acid
RQITVNWTAVAGAAAYEVYLGTANNSATSVKNGTDVSSALSVTIDNLNNGTTYYVWIKAKNSIGASGFSPVASGKPIGNMGTVSVSSGKSGELTLNWTAVTGADQYNVFYGTGINPPQTASKTVSAPATSTTFSSLVNGTAYNFWIQGKNSTGTGSMSVAANAKPIGGMGTVTVSTGNGQLTLSWQTVTGADEYEVYYGTSSSIPANPALTVETTTAVISGLSNGTTYYVWVKPMNANGAGSASASANGTPIAPPGKVTVSTGNGQITVSWTAVPGASSYDVYYSADTTIPATRSAN

SEQ ID NO: 100869 - protein, 281 aa, Unknown
  Obtained from environmental sample
  DOMAIN (172)...(250): Fibronectin type III domain
  misc_feature (1)..(281): Xaa is any amino acid
MPGDSVPFYFSYAVNLKDISDLTIKYVPKETGKNQKIERIDAGKKNTVTIPKLNETVSSPGELLSDKSYLLIQNNSSFSFQLQSGSTSINPDNSSASRVNSGERALYTITPGPASAYHLLVAADNKPFPPTIANFEAGHVYSFVFESAVSQVKAVAITLENVASSPSGGTPPGTPGAPNVSVSDRLLTLSWVVVNGAEYYEVYYSTNQQPPSAPAKTVPGTAALLTGLTNKTAYYIWIKAVNSAGSSGFSPRVMGIPWPTNEKPAAPSRLTITPGINQLTV

SEQ ID NO: 100870 - protein, 285 aa, Unknown
  Obtained from environmental sample
  misc_feature (1)..(285): Xaa is any amino acid
NAVSSTQVKARLGIFAAMVLCFAYGAWAQGTADSLTPPRIVIDSLPKAVTVMKASIKDTLKVVASVVPESSTIQYQWFSKADWSQNIGEPKGTAVSGATSANFAIPAALDTGTYYYYCFVEVRSKIDPATGLRWTAIISTNTVKVTVTPQPKITVTAQPKDTTRVTKGAIKDTLKAAATVNLGLTLSYQWFSAKMEDKCVIDTVDDVIIRICEVPVLKIDTSATSPNFVIPADLDTGTYSYVCAFTITELGWDYIVYSEIATVIVTEPPKPVVSISTQPASSTLV

SEQ ID NO: 100871 - protein, 99 aa, Unknown
  Obtained from environmental sample
  misc_feature (1)..(99): Xaa is any amino acid
VQERWQIEIFFREIKQNLRIKTFVGNTENAVLIQIYTALTVYLLLAYQKFLSRLGLSIQQLCQLIQVNLLGASSLGELLNPRRRKNENSYNLSLLNLAA

SEQ ID NO: 100872 - protein, 171 aa, Unknown
  Obtained from environmental sample
  DOMAIN (85)...(171): Type III restriction enzyme, res subunit
  misc_feature (1)..(171): Xaa is any amino acid
MQYSEVILSTHAFLKKDELKKPLPKLRAMFTVKSKYEPDKAVKTYRETASHFGVPLHYQDMSKPAETVSDKRVRGTAITIDMADGFELRENQIGLFQNFCTRVQNGASGFLMQASTGHGKTVTCARMLSELGVTTLVIVPRDVLVKQWMDRLLEHTKLTMDDIGLAQQGVC

SEQ ID NO: 100873 - protein, 259 aa, Unknown
  Obtained from environmental sample
  DOMAIN (6)...(254): Protein of unknown function DUF52
  misc_feature (1)..(259): Xaa is any amino acid
SCGKNEPALFYHTWDSLKEREYGQPHSPPPEEIIPPDFFPWAGIVSHHLLAHDYIDSWFSRLSQMRDVRCFYILCPSHWGLSTQPYSLTNGSWVSGFGSVNSDKKKVSMLAKSLKVDLDPKVFDVEHGASTLMPYIKKYFPDALTVVIAYEGEAPVNVPKSALLADSLKNSFDKRGKKENFLLISTDFSHHGNLEETRKKDSVSMMYLRSPAGSSCYNVGCDNAPGIFILDRLGKNNLESFILYHTNSWEISGEWEHDV

SEQ ID NO: 100874 - protein, 282 aa, Unknown
  Obtained from environmental sample
  misc_feature (1)..(282): Xaa is any amino acid
TVAADETAGKVITVKATSTADATKSDTATVTVSAETPTVSTVTVAPATVEVGKGETQVFTATVTGNHGPASTVTWTIVEEGKKAGTTIDEDGLLTVAADETLATLTVKATSTVDPTKSGTATVTIPSLVFFELGEFDNVSDAVPHTWFTDGVDGKTTALEMSTIKAAKYFIAKIHTPLLGGMCGLNIVVNGDGTGWSGKTTNFVDTGWVNIDSLGWWGETDVDYYIVVKLDTLVGWENLITGNQAKFTLNWPAGWTDITSNENAKMIFVEGYLVSGADLIQP

SEQ ID NO: 100875 - protein, 92 aa, Unknown
  Obtained from environmental sample
  misc_feature (1)..(92): Xaa is any amino acid
MSAVITPFGVQADSQAEVMEKLRSDFRRIYGEDIELEPNTPDGQIIGIYAQMATDLSELVKNLFASLFPSTAEGVFLDYNIDLLGVRRKRGL

SEQ ID NO: 100876 - protein, 133 aa, Unknown
  Obtained from environmental sample
  DOMAIN (32)...(129): Domain of unknown function (306)
  misc_feature (1)..(133): Xaa is any amino acid
MKKYITVFLCVALAALTVACGKNPGYTITQQNLLHHRFVLVSSDGKNFSTKERVPFIEFNEGLRVSGAVCNQFTGQGILVGNMLTVEQLASTKMFCVDQELNELEDLLARMLSEGVELRLDGQKLVVRQGNMN

SEQ ID NO: 100877 - protein, 93 aa, Unknown
  Obtained from environmental sample
  misc_feature (1)..(93): Xaa is any amino acid
THNVRLNFIRPGKPMDNGHIESFNGKVRDECLNQNVFLSLADARDSLERWRFDYNQSRPHSSLGWMSPEEYYEHHQPYNPTGTTNLNLVYQTG

SEQ ID NO: 100878 - protein, 70 aa, Unknown
  Obtained from environmental sample
  DOMAIN (1)...(67): Transcriptional regulatory protein, C terminal
  misc_feature (1)..(70): Xaa is any amino acid
FQEFELLYYLMTNAELVLSRDKILDAVWGYSFGGESRTLDMHIRSLRQKLGAAGEQIKTVRNVGYKMGKM

SEQ ID NO: 100879 - protein, 148 aa, Unknown
  Obtained from environmental sample
  misc_feature (1)..(148): Xaa is any amino acid
IKLEFSNLKETFSGSIKLKKSPENKDNVLKPTGDKGAKGRNEKVDLLQNIIDKINIAFDGKFDEGDRVIVEAIYNKIITSDNKQLKRQAKNNSVEMFTSSIFPKTFEETAMDCYNNQTEAFTKLFENKQFFETVMNVLGNALYNSLRQ

SEQ ID NO: 100880 - protein, 290 aa, Unknown
  Obtained from environmental sample
  DOMAIN (1)...(275): Aminotransferase class-III
  misc_feature (1)..(290): Xaa is any amino acid
AAIEQIKNKGFCFSLTQPIQNQLAEKLIELIPSAEMAVFVKTGSDATSTAIRVARGYTDRTKIVRCGYHGWHDWCVEVKGGIPQKLYEDVYEFHYNNLDELEDIMKRHGDDMAAIIVTPVGHPLAEKVQMPKPGFLEGVRALADKYGTVLIFDEIRSGFRVNLGGAQKEFGVTPDISVFGKAMANGYPIGTVVGKKEFMKVLADKVFLSSTFFPNSVEQVASLKTIEILQRDAVLDVVRKKGEMFAKLAEAVVQKSGYDAELSGAPWMPFITFNKDKDGIYKKLRPAFYT

SEQ ID NO: 100881 - protein, 252 aa, Unknown
  Obtained from environmental sample
  misc_feature (1)..(252): Xaa is any amino acid
MQNASLLHIYDMEIDMKRNYVNHNSVQGLLCAVVLLALATGCTECDIPGTEMKIPEKSDSIAIMTWNVQALFDGVDEGTEYDEYRESEGWTQEKYRGRLNVIAGAIGSMGRKPDIIALQEIESAAVITDLAAALFSQGYGWTHFANIPGMSLGIGLLSRYALSDAKSHSVYINGDIAPRPMLEVRINTAANADNASLALFVCHWKSKLGSEDATEYTRRASARIIVRRLRELMESEPDIPAIIMGDLNENYD

SEQ ID NO: 100882 - protein, 267 aa, Unknown
  Obtained from environmental sample
  misc_feature (1)..(267): Xaa is any amino acid
EEAIDLGGETPDQDSGTSDFDLPGMDVPPEVSPSEDFGFDGLDSLPDTGVPNETEFTQTEPDGGLPDMDFDTTEPPSAADSSGGDSSDLLNMGDFGGDFASEQIELENEPQAESGFDTGTAPVATFSDDDFALPGIEDLFEKSKIDIAPKPEPKKSFFKRKKEEEEEESLPEDSDEIRLSQNDLDNLLATLSTYPLNLRIACEELIAEHVILPKQLSKLLRMLIRGANVKEMAEFAGQILGKEIVIPRGYEKSTGAEWEAEKPVLRI

SEQ ID NO: 100883 - protein, 255 aa, Unknown
  Obtained from environmental sample
  DOMAIN (184)...(255): Phosphoribosylglycinamide synthetase, C domain
  misc_feature (1)..(255): Xaa is any amino acid
GLAAGKGVVIAHNLPDTRETLVAFMQQKKMGEAGTSVLLEEFITGKEVSVLAAVSVCGGKGYILPFITARDHKRRFEGAQGPNTGGMGAVAPAHDFSQQAQADFIRSILEPTLNGIKGEGFDYRGFIFFGVMIHNEHCYLLEYNVRLGDPETQAVLPLMDFDIVDLCEAVITGGEFHLSWKHGAVCAPVAVAEGYPGPYRKGDVISINKAALEKAGAKVFISGASRDADSSALLTSGGRVLTVSCFGHNADEAYD

SEQ ID NO: 100884 - protein, 210 aa, Unknown
  Obtained from environmental sample
  misc_feature (1)..(210): Xaa is any amino acid
MKKKVLMSLVLLAFVTASAIFAPRVFAQSPTLDKLAFTAKTSAGKSYNEVKAANNNISGVVVIPETHNNIPVTTIPSSAFQNCTITSVTIPANVERIGQSAFRGCANLTSVTFGRSDTDMTSAGLNLSFPGDLAIVYKANGAGTYTRPANGNWTKQSGAAVTAPAQTAPAQTTQQPANTAPGQATMDKLSFSNGTGGGSRVSAANKTISG

SEQ ID NO: 100885 - protein, 74 aa, Unknown
  Obtained from environmental sample
  misc_feature (1)..(74): Xaa is any amino acid
NVTSIGALAFKSNRLTGVTIPNSVTTIGREAFSWNQLTSVTIGNSVTYIGKEAFCNNQLTTIRFLKQMDYNHKE

SEQ ID NO: 100886 - protein, 205 aa, Unknown
  Obtained from environmental sample
  misc_feature (1)..(205): Xaa is any amino acid
MAKLGIIEISENDRAYLESLVRTRTMQAQIVQRARILILRTEGIPIDTIADRVGVNRKSVMLCISKYQSGGVDNALYDAPGRGRNPEITDDEKTWIINIACQRPYDLGRAEETWTYTGLASYINKNAEAQGYTRLSTVSRSGIRDILERAQIKPHKIRYYCDKRDPAFETKMHDVLVAYKQVEMQFDGQGRILPCEGQKIIPYHM

SEQ ID NO: 100887 - protein, 192 aa, Unknown
  Obtained from environmental sample
  DOMAIN (43)...(66): 4Fe-4S binding domain
  misc_feature (1)..(192): Xaa is any amino acid
MAVNFFYPEYEVVRNDSRCIVCRACERQCANQAHEYIADKGVMACDESKCVNCHRCVSICPTRALKIVKSGNTYKENANWTVRTIDEVYRQADSGGVLLSSMGNPRAYPVYFDKILLNASQVTNPSIDPLREPMETRVTLGAKPQIIERDSKGRIKNNLPPQLNLSVPIMFSAMSYGSISYNAHECLARAAE

SEQ ID NO: 100888 - protein, 77 aa, Unknown
  Obtained from environmental sample
  misc_feature (1)..(77): Xaa is any amino acid
MFSGQLITGPFSIIVGFTGGFMALNDRLKLRSMVVAEKGAKSYISSEEAAIRIIEPDLDRVYAPAGGQPVIIRMEKK

SEQ ID NO: 100889 - protein, 291 aa, Unknown
  Obtained from environmental sample
  misc_feature (1)..(291): Xaa is any amino acid
MFLGEELTGILEALEAGADYKNKKNKTMEIGVSVLPHFPKDTTDRNRTSPFAFTGNKFEFRMPGSSFSIAGPNIVLNTAVAEILGQFSDILEKSKNFKTDLAALIKKTIAEHKRIIFNGNNYSDEWVKEAAKRGLSNLKTTASALPAYIAPKNIKLFTKQHVFSEAEIHSRYEILMEGYCKTLNIEALTMLDITKSEIMPACVAYQSELASLIVAKKACGGGYDASLEDSLLGKIAESSADMLKKSAALEDLLLQGKEEKDITARANFYRKQVFIAMAELRLVVDKLETIV

SEQ ID NO: 100890 - protein, 59 aa, Unknown
  Obtained from environmental sample
  misc_feature (1)..(59): Xaa is any amino acid
VDLVVRALRDLGKNVRFIYSWDEYDVFRKVPLNMPKQDELKNYLRFPITMVPDPWERDS

SEQ ID NO: 100891 - protein, 76 aa, Unknown
  Obtained from environmental sample
  misc_feature (1)..(76): Xaa is any amino acid
MPLWASFSFSICANVGLTMTAAFNVFAKTSVRLQKIPFEITADNNPFYNEANIMVLNKSIRQLEEGKGVEQELIEA

SEQ ID NO: 100892 - protein, 285 aa, Unknown
  Obtained from environmental sample
  DOMAIN (1)...(108): GGDEF domain
  misc_feature (1)..(285): Xaa is any amino acid
ASGGEILLKEIALRLNRCIKSDDILARIGGEEFAVVAVGIHTVSAAVELAYYILESTASPMDMQRNILRPSVSVGITLSDAQHSQSEEVLLRNAETAMYHAKSTGGACYAVFDEDMHQQNITTLRIEEDLKHAMENSEFELFFQPLLSLHSYTIRGFEALNRWRHPTRGLISPIEYIPIAEKMGLILDIGKWALDQACAQLVKWRALGHGDVCIAINFSGRQMDNEDLPLLVKAAVEEQGICPELLEIEITESAAMRNFEKTIHILGRLRDIGVRVSIDDFGTGY

SEQ ID NO: 100893 - protein, 293 aa, Unknown
  Obtained from environmental sample
  DOMAIN (1)...(293): AMP-binding enzyme
  misc_feature (1)..(293): Xaa is any amino acid
DEIEHRVRNAVIDTIVATLADADKLNAVRDAIPGVKNCIVVDGEMENWINFWDAVYRASDDFTPTETRTPIETPMLLYFTSGTNGYPKMVLHNQSYALAHRSTAEIWHDLKPGDTVWTITDTGWAKNAWGSFYGAWYLGATIFVHQYTHFRAERTLRFIAEYGITVFCAPPSAYRLLIHEDLSKYDFSKLRRCTSAGEALSPDIIALWKKKSGLEIYEGYGQTESVLLVGNFPNLPLRPGSMGKPSPLFKLSILDGDLNELPPHAEGIIAVRTEPKHPEGLFTGYLNDAGLNA

SEQ ID NO: 100894 - protein, 271 aa, Unknown
  Obtained from environmental sample
  misc_feature (1)..(271): Xaa is any amino acid
MKTKPWIIPVISFIVYLLAVPALFGHPWPGGGAPVLLAALPTAADQAAANQETHADAAAAANTNTATNEPAHTIISNTIISPVPEKSAPTTAAEAAHDGAHDIVHDVISSEIINFAERVGIVIAIIAGQALLIWLIWKLFRRFAIRTARTATGKIKPLKIKNITLLSTKQIVRAILMLLKVCKYLVTFIQLYLTLPIIFSLFPDTKDIAVTLFGYVLNPLRDAVTAAIDYVPNLITIIIIIVIVRYVLRVMKYFSTIIASGKLGLPGVYPD

SEQ ID NO: 100895 - protein, 269 aa, Unknown
  Obtained from environmental sample
  DOMAIN (76)...(235): ATPase family associated with various cellular activities (AAA)
  misc_feature (1)..(269): Xaa is any amino acid
MIRDLTNTSVNLVRREYVEKNHAQAAVLAEEVILDALLPASQPKPILPGEEEAAPDPLQSVREKMRAKLAKGEFDERVIEISVTQPHGAGEIFIGSGIEEVDVGLQQIISGMLPQKKRTRKVTVREARGILQQQEAEKMLDTESVTAEAIRRVEQNGIIFIDEIDKIAGREGGHGPEVSREGVQRDILPIIEGSTINTRYGPVRTDHILFIAAGAFHVSKPDDLIPELQGRFPIKVQLESLTQEDFKRILTKPKNALIRQYEALLATEG

SEQ ID NO: 100896 - protein, 291 aa, Unknown
  Obtained from environmental sample
  misc_feature (1)..(291): Xaa is any amino acid
EVAELKNYWHKKLGNLKVTTPNEDFNNMINTWNAYQCFITFIWSRAASLIYCGQRNGYGYRDTVQDIQGIIHLDPDMALEKIKFMISAQVNHGGALPLVKYNHNPGHEDKPEDGSYSKSTGHPSYRADDALWLFPTVWKYVAETGNTALLDEIIPYADKGKDTLFNHLKKAIDFSLNHLGIHGLPAGLHADWNDCLRLGAKGVSVFVAFQLYYAFEIMIRFAKFKKDFATEKEMTKQKNRFGKIIEERCWKDDRFVRGITENDVTVGKKDDPEANIWLNPQSWAVISGLRI

SEQ ID NO: 100897 - protein, 263 aa, Unknown
  Obtained from environmental sample
  misc_feature (1)..(263): Xaa is any amino acid
MQAEDAAYKSSPSLYPVNDRTSPTVEPYHPSNIVLNAIGGWAWRVPGQSVEWEIVAPYAGMYRLAFKYSQRDKRGAFSSRALYINEELPFQEAGRLRFGYSADFDLNYLSDPDTGEDYWFYLREGKNLIGLEATLGVFGDIVDDARESLSALTLMYQDIIMVTSASPDKYRDYQITIAIPDFKERLRSQSAALDALLGKIRSISGAYAENTSIIERLRGNIDKIADRPDKVNVYLADFKSSVSALSVFITAAQEQPLLLDFFV

SEQ ID NO: 100898 - protein, 256 aa, Unknown
  Obtained from environmental sample
  misc_feature (1)..(256): Xaa is any amino acid
MEDRIRSNNPRDFKKNRHLYLMMLPFMLLFFVFTVLPVLTSIFLSFTNFNVLQPPRFAGLDNYRRLFLEDSVFTLSMQNTFVIAIIIGPLGYMLAFLMAWLINELPTKIRAVLTVIFYAPSISGNVYIIFRLFFSSDPFGWVNATLLSLGLIDEAVLWLSDPKYMMPIVIGVSLWMSLGFGFLSFIAGLQTIDRTQYEAGQVDGITNRWQELWFITLPNIRPQLMFGAVISITSALGAGEVTSAITGFPSAQYATH

SEQ ID NO: 100899 - protein, 112 aa, Unknown
  Obtained from environmental sample
  misc_feature (1)..(112): Xaa is any amino acid
MVFIMEGFVEILESASSFISNTVSFLRVGAFALSHAVLSFIVFTLSELVKNLAAGPLFSLLILILGNAVIILLEGMIVAIQVIRLQYYEFFSKFFTETGVAFAPFRFRKKAQ

SEQ ID NO: 100900 - protein, 81 aa, Unknown
  Obtained from environmental sample
  misc_feature (1)..(81): Xaa is any amino acid
MEIKRATEFGDNDNIREKLGELYVNAFYDDVLKYFSKNKTKLIKIFACGFLLECFYIAIIDNEIIGMVACMGKGEVCIKLD

SEQ ID NO: 100901 - protein, 284 aa, Unknown
  Obtained from environmental sample
  DOMAIN (73)...(183): DNA mismatch repair protein, C-terminal domain
  misc_feature (1)..(284): Xaa is any amino acid
GALGLSDTIPARKRFLKRAGSEGAACRQIFNEKALAFPGIAFRVSQDGIMKAFLPSVSSLKDRFSQIFLEERESVFLREISAIGKGFSISVVAGGPELSRNDRRLQFVYANNRRIQDYSLLQALEYGLQGWFPNGAHPIGAVFITIDPALADCNIHPAKREVRFADPGAIHHALSSALRDFCRHATLAEKPSGAQAEIEFAPTEPASGQSRGPGQSRKSDQRSVLDAIFAAEEAASYSAPEPETGLEADKSKARYLGRLFDLFILVEKNETLFVIDQHAAHERI

SEQ ID NO: 100902 - protein, 227 aa, Unknown
  Obtained from environmental sample
  DOMAIN (32)...(141): Mur ligase family, glutamate ligase domain
  misc_feature (1)..(227): Xaa is any amino acid
IETNINAAVAVARIWGVREKKIQKRIKTLPVVEGRFEYIHTKKLDKSGVRVVVDFAHTPDGLEKVLDTAKSVLNVPQKVGKLSKKTGNSEVLTGKLITIFGCGGNRDVMKRPIMGKIAVEKSDITIVTSDNPRHEPPMSILYQIEAGIKTVDGVIKFEPTDTVPNEKSYTMIADRRAATHFALGIARAGDMVVICGKGAEQTQEIDGISYPYNDANIVREYYRGKKS

SEQ ID NO: 100903 - protein, 121 aa, Unknown
  Obtained from environmental sample
  misc_feature (1)..(121): Xaa is any amino acid
MGGKRFRIRSVVYPIHRSEPVPASPNLPAVEEQVLAYWADDDTFRASVAKNPAGENGSNEFVFYDGPPFANGLPHYGHLLTGYAKDVIPRYMTMRGKRVERRFGWDTHGLPAELEAMRQLG

SEQ ID NO: 100904 - protein, 260 aa, Unknown
  Obtained from environmental sample
  misc_feature (1)..(260): Xaa is any amino acid
VPVWKSDNPEYPRIDAYGSLAEIEKDFGVKVTDLHRPYIDELTRPNPDDPTGQSTMRRVSDIMDVWVDSGSMPYAQVHYPFENQDWFENHYPGDFIVEYIGQTRGWFYVLHVLATALFDRPAFKTAVSHGIVLGSDGTKMSKSLRNYPDVSEVLDRDGADAMRWYLMSSPILRGGNLIVTEQGIRDSVRQVLLPLWSTYYFFTLYANSCARLGGGNGYQAKAIAPSQVASLPALDRYILAKTDELVTNVTQQLDVYDIPA

SEQ ID NO: 100905 - protein, 297 aa, Unknown
  Obtained from environmental sample
  DOMAIN (2)...(197): Glycosyl hydrolase family 3 N terminal domain
  misc_feature (1)..(297): Xaa is any amino acid
RIADAISDEARAKYNEAIKMGNRGQYWGLTFWTPNINIFRDPRWGRGQETYGEDPYLTSCIGLAFVRGLQGDDTENLKLAACAKHYAVHSGPEKFRHTFDAVISKKDLFETYLPAFKALVEGGVESVMGAYNRTLGEPCCGSPYLLKDILRGKWGFKGHVVSDCWAIRDFHEHHKVTATPEESAALALNSGCDLNCGCTYPMLIASHKKGLVTEEAINTALSRVLRTRFKLGMFDPAGKGKYDKLDRKVINCEKHRQLALKAAEKSIVLLKNDKGLLPLDSKCQKITVVGPGAANAH

SEQ ID NO: 100906 - protein, 72 aa, Unknown
  Obtained from environmental sample
  misc_feature (1)..(72): Xaa is any amino acid
LPQRGVWKALGSGLAEIDLKDIIVINNDKGKPDIKLTGTAQKAFEKSGADRTHISLTHERENAIAMIVLEGA

SEQ ID NO: 100907 - protein, 268 aa, Unknown
  Obtained from environmental sample
  DOMAIN (144)...(232): Glycosyltransferase 36 associated family
  misc_feature (1)..(268): Xaa is any amino acid
TARGVTRFYKDARLRRITRYRYNNVPVDMGGRYFYINDNGHVWNPGWSPVKAALDSYECRHGLGYTIIKGSSQGITAELTFFVPQDFNGEVQKVSIKNSGGTVKKIKLFSFLEWCLWDANDDTTNFQRNFNTGEVEIEGSTIFHKTEYKERRDHFAFYSVNAPLAGFDTDRESFLGPYNGFGEAQAVKNGKANNSVADGWSPIASHYLEIELAPGAQKDFVFVLGYVENPFEEKFAPDLSGNEKIITTGNSRKNIINKKRAYEMIAQC

SEQ ID NO: 100908 - protein, 279 aa, Unknown
  Obtained from environmental sample
  DOMAIN (1)...(279): Protein of unknown function (DUF877)
  misc_feature (1)..(279): Xaa is any amino acid
LALLQNISSVSAASHCLFISSVGSKFFGKSDIGDLPKIDDLENYMERAEYTKWRSFRKTDDSRYVGLVLPRFLLRNPYGENKNSRGFNYTESVLGEEHEKYLWGNAAFAFAANMVRSFQDNGWCVQIRGPESGGKVEDLPIHFFNAGKGAQAKIPTEILIPETREFEFAKQGFIPLSFYKNRDYACFFSANSAQKPDEYDDAQATANSRVNARLPYIFLTARLAHYLKVLQRENIGASKSAGVLEAELNNWIKGLVTEMENPGPELAATHPLSYGQVTV

SEQ ID NO: 100909 - protein, 118 aa, Unknown
  Obtained from environmental sample
  misc_feature (1)..(118): Xaa is any amino acid
VCPYGWHLPSDVEWEVLVAEVGGEKTAGKYLKSADGWSSYKGKPGNGEDKFGFMALPGGLGRSDGYFLDIGIIGYWWSASEFNVNSAYGGGMYFDDDGVGGGSYKKGENLFSVRCLKD

SEQ ID NO: 100910 - protein, 155 aa, Unknown
  Obtained from environmental sample
  misc_feature (1)..(155): Xaa is any amino acid
KTIKIGSQIWMAENLNFKAKEGKCYDDKPENCEKYGRLYEWETALKACPKGWHLPTDKEWQKLIAFAGGEEKAGKQLKEKTGWAALFSGSFFVSDSEEMPSSFMGLGVNGCWWSASAGNEYEDYSTGNRWFIRADGKIEDLPDEYGSSCSVRCVN

SEQ ID NO: 100911 - protein, 187 aa, Unknown
  Obtained from environmental sample
  DOMAIN (2)...(186): tRNA synthetases class II (D, K and N)
  misc_feature (1)..(187): Xaa is any amino acid
KTDNSHLSPPFERVTVAEAFEKWAGFDLFAEAEKEGGLEAQARRLGLDPMLNLPIGTLYDLIFIHTVEPKIKAQKPVALIDYPAFVPCLAKKSENGRTCERWELYFNGIELANCYSEETDPQKVKDFFTDEAAQKEKTALVRHKVDHDYYKTFENFPQCSGVALGMDRLIMALTGRSTIDSVLPFAL

SEQ ID NO: 100912 - protein, 285 aa, Unknown
  Obtained from environmental sample
  misc_feature (1)..(285): Xaa is any amino acid
MVPTNRGSRLEMAAYDGLGGQGLDANPFAGNLVDLCPVGALTSKGFRFRKRSWYLRPVSTISRHGADAKPIWADVDQNRVWRFRVRPVVGSEGNNSNSPTRFISDEERGAFARYALDPAKRLRSPLLGGKAVPVSDIAKALADAAPVAVVVQGAFGCDAVQALAGLASDGSLKFASGNRHIPIQNPAIQKSEDGVINRNGVTAKGYRFGALQELLSKLESGQVKSAVVYHDVWFSDEVENALLGRILHTAAFSLLLEPVPSELARLAKAMLPVTTYLEEDDLIID

SEQ ID NO: 100913 - protein, 59 aa, Unknown
  Obtained from environmental sample
  DOMAIN (2)...(57): Glycine cleavage H-protein
  misc_feature (1)..(59): Xaa is any amino acid
MPTDGEIMRVNGELDAHPEYVNEDPYGKGWFVKVKIKGGLNTDLLDSAAYQALVASESH

SEQ ID NO: 100914 - protein, 247 aa, Unknown
  Obtained from environmental sample
  DOMAIN (1)...(246): Borrelia P83/100 protein
  misc_feature (1)..(247): Xaa is any amino acid
VEFINYEGPYSRIETRAQIRNIGYGLGEIVKGGAARTGASGRYFVIHSVSEQDGSRLDADIFGLGPDVGVDHIRNLRLIIQGYLEAAYGYTERDAALIAEYVTIYNAVYRGDMNYFSSRYKNPVMANLTAEKAGLAIRYDEWPGQTLIVIPLGSGTGLSSIDTSAISDERVIEQLRQDPDMGLDQRRDMVDLKEREADQASQQAAINRDAIRQEEERIAREREAAQQQQQQAQADQRTIEQERQQPG

SEQ ID NO: 100915 - protein, 64 aa, Unknown
  Obtained from environmental sample
  DOMAIN (1)...(64): NADH-ubiquinone/plastoquinone oxidoreductase chain 4L
  misc_feature (1)..(64): Xaa is any amino acid
MLNSVNLALLSFARWRGGDVSGTILYLLIIAVAACEAAVGLALIIGLFRHRGSTDTDGADSLKQ

SEQ ID NO: 100916 - protein, 293 aa, Unknown
  Obtained from environmental sample
  misc_feature (1)..(293): Xaa is any amino acid
DTLVVARWKASDEKATDQIGPLADWLAVLRDVDPLPPSLSFSVNANENLKPQTLSFGGRPVAITLLGVSNPEAPVLSLSGFGALFTVESGVTLTLENIWLEGKRNNSSMIVVNRGGKLIIKNKTVISGNGNENKDYGGGVTVNTGAEFEMTGGQIVRNSSVDPTEALFESPAGGGGVLVRGGTFTMKGGLIGENEGANGGGVLVARGGTFTMDGGEIYKNAGYQGGGVKVAGAVINTQDPNLLPTESTFIMNGGKIHENNGTGAGVAVAFRGVFILNDGEITKNIGSDAGGVY

SEQ ID NO: 100917 - protein, 249 aa, Unknown
  Obtained from environmental sample
  DOMAIN (1)...(123): Aldehyde ferredoxin oxidoreductase, N-terminal domain
  misc_feature (1)..(249): Xaa is any amino acid
MTFKNVLTGGIASSNCGGIFGFMLKRAGYDGLIISGKAPSHSRIEIVDGKISILSAENLWGLDTEKTQEELPAHHGKLVIGPAGENLVRYASAASGERMAGRCGGGAALGSKNIKALSAYGTKFPRLHNPKKFSRFLKKWVVFLRNHPMTGDALPHYGSMGLMNKANASSALPTHNFKYGYSKTADKVSGETLAETALVRNSGCVSCPIRCERRVMKAGREIKGPEYETAGFFGPNMDASNMEDAIDLN

SEQ ID NO: 100918 - protein, 286 aa, Unknown
  Obtained from environmental sample
  DOMAIN (98)...(286): Adenylate and Guanylate cyclase catalytic domain
  misc_feature (1)..(286): Xaa is any amino acid
LYPAGNNQKKIASYITIPLTSGGEKIASVHIANSINEYFTPTVLENINIFLKAATPIIANALSMRELEELQKNTRTAFARYVPADVMDEIISNSSKAASQSENRNITILFSDIRDFTAISEHSDAQEVVEFLNSYFAKMGSEIISEGGHIDKFIGDAIMAIFGAFRSLENPAFNAIRAAIKMLAALENVDTSDIALKQGSLKAGIGINCGECVLGNIGFQNKMDYTVIGDTVNLASRIEGLTKLYHHPLIVSEYVYNTAKDHFLFRKIDNIRVMGKKEPAGIYAIY

SEQ ID NO: 100919 - protein, 267 aa, Unknown
  Obtained from environmental sample
  DOMAIN (20)...(261): Queuine tRNA-ribosyltransferase
  misc_feature (1)..(267): Xaa is any amino acid
AEGIKFRSHIDGSYHFLGPEKVVELQAILGSDIQMQLDVCTSWGVSRKEAENALLTTSLWMERGKKAWELQLSAGYKGQFFPIVQGNFFKDLRAESSKRVVEAEPPGIAIGGLSVGESEGVFFEYLAFTASLLPKNLPRYVMGIGTPEYILFAIENGIDMFDCVFPTRNARNGNVLSHRGSFALKKAENRLDFMPIDEECGCKVCRTYSRAYLRHLFKAREILCSILASYHNLYFINELVVHARKAIREKRFLEFKTDFLSKYNSIE

SEQ ID NO: 100920 - protein, 287 aa, Unknown
  Obtained from environmental sample
  misc_feature (1)..(287): Xaa is any amino acid
TYKSYNPTALKIMGGDAELDVTPTGGLTLEEAIDEFDKAAKAVKAKEEAAGKIDKAAKAEYEASRQKLFYAFIYRAAKILAARYDVYKREKGLVSYDDMLRLMRDAVHSGDGVILKRLRQRLCYGIIDEFQDTSPIQWSIFKKIFLGDSDGAKIYIVGDPKQSIYSFQGADINSYIEALDAITAHNGSVYSLRNNFRSLPEMIDGYNSILCGDTEDWFNPVGGDCDISYSKANAAGPPPRNAPPHPLAHKAVQIVKLNKDSEPINRIDMAEATCAAIKKLAGATVSI

SEQ ID NO: 100921 - protein, 277 aa, Unknown
  Obtained from environmental sample
  misc_feature (1)..(277): Xaa is any amino acid
VSHLYSQNLSLERLIKHLERLYSGEEGARNDKNIHTLATEKSSVKILTMHAAKGLEFPVVFLMNTNTLKTPNGPNTLRWTDANKKRHITPYLSVPDDLREGKGKNQKDRESLICYTESQEREYRRLLYVAMTRPQAMLFAPMRVGEDATADNDITPRLNELLGHDANIEEFDTAIYDNDNRRASGININEAASIQLDDIPTLSLQKFISVETSYSQISRELKAASYNDDLPLSTTDDGSDVIRSDEHHVEDIDTDVDTDAGINTDEIGINVDNAIDT

SEQ ID NO: 100922 - protein, 79 aa, Unknown
  Obtained from environmental sample
  misc_feature (1)..(79): Xaa is any amino acid
SGADFCPEKTDVSFISKTGTVQVCKNGEAVDFSEEKAKLVLSEEEIEILVKLREGNGKASVWGCDLTYDYVKINGDYRS

SEQ ID NO: 100923 - protein, 260 aa, Unknown
  Obtained from environmental sample
  misc_feature (1)..(260): Xaa is any amino acid
MCHSGYSNNLGREYEMLNEMGVVWLHRDFSWSSIEPGEGNFVFGQFDGYVQRANAEGKKIIGMLLYDVDWVHDKFGFPRERRIREEELPYYVNYAGETVKRYNGKNGHGKVDAWLIWNEPDLSDRFWEGTKQEFFALTKETASRLRELDKQEGTKTTLIGGVFSALALNDDGWISGLFQSGAMDNIDFVSFHPYSITPESAANVFKVFKQKVTPFGFADKIFINEMGYPTYSEKGPLPKGRYGTDQWEGNMPEVAVKTFA

SEQ ID NO: 100924 - protein, 265 aa, Unknown
  Obtained from environmental sample
  misc_feature (1)..(265): Xaa is any amino acid
LLRDWCTWDADYNEDIVQNIRRRLVALSSKKTENYTAVLMQGSGSFSVEAALGTVVPQNGKLLIITNGAYGDRMVQMAKVLKLNNLVYSCLETEAPKPETLSKILGENPDITHTALVHCETTTGMLNPLSEIAEVVREHGNILILDAMSSFGGIPFDMADHDIDFLISSSNKCIQGVPGFAFVIAKKEELLKCKDNARSLCLDLYGQWKEMDWSGKWRYTSPTHIVRAFYQALDELEAEGGIAARYKRYCKNQHLLVNGMKELGF

SEQ ID NO: 100925 - protein, 244 aa, Unknown
  Obtained from environmental sample
  misc_feature (1)..(244): Xaa is any amino acid
MFCSNCGTNLPNEAAFCPKCGNAITTTQTAATPAEAIAPPQTPFATEQDFTAEQITFYKKTYLTAGFSFLAWIFIVLGLFHTGIATDLVYGMGKISWLLVLGVFWAASYIGEKLTTAKEKEMQYIGLGIYIAAYAVIFLPLLSIVIEYSYGSWRMAMDNVLIPAFISTLTVFAALTATVFATKTDFSFLRTFVIFGTFFALGAIIIFSVSGMHTGSWFAIAMIILMSVTILYQTDQIKTKFNTS

SEQ ID NO: 100926 - protein, 280 aa, Unknown
  Obtained from environmental sample
  misc_feature (1)..(280): Xaa is any amino acid
DAGTEATVATGTLTSKNVTSAGQLKIKASNNAQIVPGGDTRYTMQSAAVSGTVYEGRINVSVPGRYKVKVGNDVSAPFWIHEDLYGWVRDAAIKFPAVNRCGDSESWFHGACHLKDATQGGWHDCGDHLKEGITQSFLHSMLGLASAALRDRDVDRYGRNHNNTLQTDGVPDVLYEAKHGSQYVINAYNNAKGDVSKMILSVGGFGPDHQWWGQPEMQDRMSYERGGPVRDARNDVGANILGNFAAGLALTAKNYAIFDQKFADTSIAIAKKMYEYAKTH

SEQ ID NO: 100927 - protein, 285 aa, Unknown
  Obtained from environmental sample
  DOMAIN (99)...(284): Methyl-accepting chemotaxis protein (MCP) signaling domain
  misc_feature (1)..(285): Xaa is any amino acid
RIAVNSKDEIGNLALYFNKTLEKIKNLIIIIKKETENLHNIGNDLAGNMTETAAAVNEITANIQSINGRVINQSASVSETHATMEQVVANINKLNGHIENQSGNISQASSAIEQMAANINSVTSTLIKNTDNVKALKGASEIGRAGLQDVASDIKEIERESEGLLEINSVMENIASQTNLLSMNAAIEAAHAGDAGRGFAVVADEIRKLAVNSSEQSKIIGAVLKKIKDSIDTITKSTDNVLDKFEAIDTGINTVARQEENIRSAMEEQNDGSNLLLKNTGSLTR

SEQ ID NO: 100928 - protein, 127 aa, Unknown
  Obtained from environmental sample
  misc_feature (1)..(127): Xaa is any amino acid
MPDLCKAIQDNASFFDLPVPDVKTTAPNSMFTEALANWSALMAPKPLVVLFDEVDVLEGETLISFLRQLRGGFAGRGIGKFPVSVALVGMRDLKDYITAAKGGVAPNPGSPFNIKADSAVLSNLPKQ

SEQ ID NO: 100929 - protein, 285 aa, Unknown
  Obtained from environmental sample
  DOMAIN (13)...(128): Toprim domain
  misc_feature (1)..(285): Xaa is any amino acid
NWRTAKKKTPALSEIFLVEGDSAGGSAKQGRDRRTQAILPLKGKVLNVEKARFDKILGQGELRLLIQALGTSIGPDDFKIENLRYHKIVLMTDADVDGSHIRTLLLTFFYRQATELVLRGNVYIAQPPLYKVKKGKQEQYLKDERSLEEFLFGRALDGWNLVLPDKQKISGSALVTKLKKLGEIKHLYGKLERRGYAKELTDALLADGFLEPRCFKSRESADALAGYLTERGLGTCAVESTEEVSGENGTVPASHALRLLRVHLSRPITLRIDSSVAHCGEFRRL

SEQ ID NO: 100930 - protein, 297 aa, Unknown
  Obtained from environmental sample
  misc_feature (1)..(297): Xaa is any amino acid
FTPSNLNISIRGNETLSLSSNGHLLTIGGQRIIIRDLTLKGRKNGVDGATSDNDASLIYMWGTMELKGTATITGNVLSNVLNGRFEQYGGGVYLSSGTFIMWDNSSITGNSIITQDNLRAWALGGGILSNGTLIMRDNSSITNNTVNATGPSNAQQLFGFGGGVLLGSEKILRIEGGKIYGNTASHKGSELYLYTYMGDFGVGDSAIAQYGTFNGDIWTSNGSLSTTNNNIIVVNGYYYGQVSFTGVTANGSTSSTTTKLTLNFNQDITGLNADGLSADDITLTPGSTGAVKGTLTK

SEQ ID NO: 100931 - protein, 297 aa, Unknown
  Obtained from environmental sample
  misc_feature (1)..(297): Xaa is any amino acid
MLADNHAKIDKKTHILLFIIAFAVAFSSTYNPMNFRRMHVDSSVYITISQGIIRGQLPYKDFVDNKGPLAYLLSVPGLFWGKFTGIWITEIIFLFVTALFAYKTALFFVNRTKALLATAFCFVVLLAFFSVNAGTEEYSLPFLTISLYLFTKYYFSEKHDLKFIEFVVLGFCFACAIMIRLNMFPLWVGFCAVIAVDSIIYRRFVLLGKYAAGFILGIIIIFIPLFLYLNLNGIMEAFFKQVVFGGAAKGFSGGGLKDTAKYFYIVINRNYSFFPLFAGIFLIITKFKQSDFNFYIG

SEQ ID NO: 100932 - protein, 284 aa, Unknown
  Obtained from environmental sample
  DOMAIN (243)...(284): Topoisomerase DNA binding C4 zinc finger
  misc_feature (1)..(284): Xaa is any amino acid
MCVGDDWQSIYRFAGSDANLITQFSKYWGDTQISKIENSYRNSQELLNIASQFIVKNPNQISKILRSQKSCENPICLYYYNKNNFNAVLEKILVYIVKEYGENADVLLLGRTNYDIEPIKKGAFTLKNDTVLYKKYEHLKIQFLTVHKSKGLESDNVIILNMKNDKLGFPNKIADDPILQLFLSNEDNFAFAEERRLFYVALTRTRNKTFLLVPDQNASEFANEIKALCHLEIPDGEHLTINNPKCPRCKTGRLIIRQANDSHRCFVSCSNFSACDFTNNVTSI

SEQ ID NO: 100933 - protein, 289 aa, Unknown
  Obtained from environmental sample
  misc_feature (1)..(289): Xaa is any amino acid
TITKQPATAITLIKGQSDTLTIEASVTMDATLSYQWHYDNAVSSCADESADCEGATTELYGATSQSIVFSADEFDVGAHVFYCVVSATGGAVSVRSNDVTVTVAAAPPVTPGTPVITITKQPAAATVVAQGSINDTLKVAAGVTEDATLSYQWYEKNDVLDDNSIPYETESIAIDGATSASFAIPVDLDTGTYVYYCVVSATNGAVSVRSDDAVVTVAEPTSVASADRFIPSFNLGGVAVVSPVTALTVEFAAGPNPVARQSGGVSFFWSGQAVGNATLYVYDASGKMV

SEQ ID NO: 100934 - protein, 161 aa, Unknown
  Obtained from environmental sample
  misc_feature (1)..(161): Xaa is any amino acid
MPTLIFLFWTGCPAKKNAFPGFTDEFTGKGASLPFTGYQSQDANYQGLLLEYSTEYHQVQSEASGRMAVKLQANGDNVRFTLKQPANAMVLRYCMSDSADGSGLNGSLAVYADGKEMGTISLTSKYAWVYNYAGGWPGNDDPSTGEPCRFFDDSRMLFGET

SEQ ID NO: 100935 - protein, 268 aa, Unknown
  Obtained from environmental sample
  misc_feature (1)..(268): Xaa is any amino acid
MLPGSTVIVISRSISLLNVAGMTYRDQIFNINENDLRFTDNELSGYFRRVGISFQTDSLREIMQDTEGWAFAINLIARSCQKAPGYGGYVRTAMKQNIFRLLEMEIWNGLSEPLKNFLVRLSLIDHLSVDLINQLAGEEEKFAAELEKQSAYVRLDSYINAYLIHPLFLEFLATKQKLLSEEQKRETYAVAGDWCAHNGFKIDAISYYEKAGNYQSIVLILDGLSAQMPRDIAQLAASILDRAPDDTFDKVEFLADMHLRTYFCQGLW

SEQ ID NO: 100936 - protein, 144 aa, Unknown
  Obtained from environmental sample
  DOMAIN (5)...(71): 2Fe-2S iron-sulfur cluster binding domain
  misc_feature (1)..(144): Xaa is any amino acid
MALKVTINGKVYEAEKDEYILDVCRRNRILIPTLCNHESIKGQGCCRLCVVEVNEGGGNRVVVSCVYPLGRDCEVFTESETIKGIRKTILSMLKTRAPEGERLSSLCQMYGVDTGAGRFTAAKTGEGGSAEKRLASSCVLCGLC

SEQ ID NO: 100937 - protein, 289 aa, Unknown
  Obtained from environmental sample
  misc_feature (1)..(289): Xaa is any amino acid
MLGVFLFHAFRGVGMIGNNPVLSELAHGPDRGSYMTQIQIINSAIGMVSSFLIAMVLGTEPPIFLFSILLGAGVVAGVISGYVIRKVPEPPSEKNRQGMNLAAIFKDAFAQDSLRNFMVILFLVILVSGVTRTFVVVYAREVFEHNDGLILLYSVFGGMGYLIAGLSIKFLVDRLGAKPLFLVCVILGLASMIPVVFLPVSAIFNITGAILFLVFLFFMLNFGFLGSEGIAQTYFLALIPQDKILDLGIIYFFVFGAAGACGSFLAGLLLDFFSLLGISPFVSFKNLFI

SEQ ID NO: 100938 - protein, 301 aa, Unknown
  Obtained from environmental sample
  DOMAIN (26)...(189): MatE
  misc_feature (1)..(301): Xaa is any amino acid
MEQKQDAATRLGTESIAKLLFRFSIPAITGMLVNALYNVVDRIFVGQGVNEIALGGLSLVLPLMTIGMAFAMLFGIGAANMISMRLGQGRRQEAENALVHCFFLLIGISIVMMAVGLVFMEPILSLMGAAEGSEALLYAKDYFRIILFGMVFFMTSFGMSHCTRAQGFPTMTMIGMILGAVLNTILDPIFIFLFKWGVEGAAWATIISQFASFVFLFSFISSKKAVVRLNPRVFKHDFSIIKQIMAFGSAQFLLQFLMSTVQLLTNTSVGWYGADALNVANGGDVALSGMNIVGSILMLIL

SEQ ID NO: 100939 - protein, 262 aa, Unknown
  Obtained from environmental sample
  DOMAIN (78)...(145): S1 RNA binding domain
  misc_feature (1)..(262): Xaa is any amino acid
MRVVGEKIVGEDGEEIAFDPLRMLREGSAAAKGLSVGGHVDEELLPVDFGRSNFQSVKQIVLGKIKAAEKEKEYAEFEGKEGIIVNGIVKRVEYGSVYVDLSGKSEAIIRRNETIPRENLHAGDRVRAVILEVRRDNSGPQVLLSRSHPLFLMKLFEAEIPEVYEGVVEVKAVARDPGSRAKVAVMSHESSIDPVGAVVGTKGVRIQAVVNELAGERIDVIEWTENVAALAIDALSPAKVSKILVDEGARKIEAIVEEDPLS

SEQ ID NO: 100940 - protein, 72 aa, Unknown
  Obtained from environmental sample
  misc_feature (1)..(72): Xaa is any amino acid
MDELTALFSVVPVSETTISDALALRWKDFEDAVQYMTAKENGITHIITRNKTDYETCDIHCVSPAEFTEGAP

SEQ ID NO: 100941 - protein, 288 aa, Unknown
  Obtained from environmental sample
  DOMAIN (93)...(282): Phage integrase family
  misc_feature (1)..(288): Xaa is any amino acid
DLTQNDMLEFISRVGEIRIGVARKKAGERKNYSGYKMAGTRTFEIVIKFVRMAFREFGKTHPTWLSPFQGIDAPKSAKGNPRDILNDEEVIDLFKSGKAFVDKMENAVCAAMYWAGLRRSEIFALRPENLDWKTPKINITSAWKNFDSAKGREIGDPKWHKERRIDFPEPLQKAILELWAEQGIHEFVFAWKKGFHPGRHLSMAECDIPGSGWTRNRMKNWLARAEIDLSGRKIVPHSARHSYATMLESANAPIRYIQEALGHSDYRTTEGYLHSVNEVLARIWGRVS

SEQ ID NO: 100942 - protein, 72 aa, Unknown
  Obtained from environmental sample
  misc_feature (1)..(72): Xaa is any amino acid
AGQDKVNPSSVILSGEMMLRYMCWNEAADLVIKGVEGAIAKKTVTYDFARLMDGAECVSCSQFGREIVNNMG

SEQ ID NO: 100943 - protein, 74 aa, Unknown
  Obtained from environmental sample
  misc_feature (1)..(74): Xaa is any amino acid
MDKPTLFAHRDLWVREKDQSASSELPLLTNEEQEIFLSLKNNVWGQQVRLEQERICWEVAWRAITHFPDAFFTT

SEQ ID NO: 100944 - protein, 288 aa, Unknown
  Obtained from environmental sample
  DOMAIN (64)...(287): MutS domain V
  misc_feature (1)..(288): Xaa is any amino acid
ERLAALESEINSASDKIIELEKKLFLEIRDSAKQLLMEAAAAGKRIAEIDVAQSAARAATIRGWVRPILESVNRTVISEGRHPIVEAHLPRGEFIANDLCLDASDDGGQGGVSFALITGPNMAGKSTYLRQAALITIMAQSGSFIPASEGRIGLVDRIYCRFGSQDNLARGESTFLVEMNETAYILHTATNQSLVIMDEVGRGTGTEDGLSIAWAVCEELLNNIKCRTLFATHYHELAGIDHPAMANRSMDVDERNGKVVFLRKIREGSASESYGLHVAAWRAFRREY

SEQ ID NO: 100945 - protein, 160 aa, Unknown
  Obtained from environmental sample
  DOMAIN (95)...(148): Sigma-70, region 4
  misc_feature (1)..(160): Xaa is any amino acid
EKSLFSAGFARKGGRLKQVVGGTQVVDPKSLEGYSRYNAEEIEKILQMGVKSSSLDAPIGEDGDTSLISITPDPSDDASSVFFQKSKKGLIKKLLSEYLTPTELKVIDLFYGFDSGAKNNLQEIAQTTGLTKEKVRQYRESAMAKLRTAKDLKDILTEAS

SEQ ID NO: 100946 - protein, 232 aa, Unknown
  Obtained from environmental sample
  misc_feature (1)..(232): Xaa is any amino acid
MKREEFEFLSTDLQFIKGVGPVLAARFADLLGGRRVVDFMLHIPRAVKNRPPVESVMAAAVGDIITIPLEIRTIKKAGVSKFSKRKIPTQVFGYDKSGGAITLQFFGTSFLDYWLEKLPVGGMRMVSGKLDQTAAGGFVINHPDFIEPIESADKIPAFQAIYPLSAGLTQRIMSNVRDQIFNDSRIANRDLGFVELLRKAHYPEKSEDLAPSNETIQRLAYDELFAGQLAIA

SEQ ID NO: 100947 - protein, 98 aa, Unknown
  Obtained from environmental sample
  DOMAIN (24)...(67): LysM domain
  misc_feature (1)..(98): Xaa is any amino acid
MLTLLLALASILSSRMLAADELIHVVGKGETIYSISRFYRITPEELMKANGISDPSKLQTGKRLTIPSSAFSDITVTANPPAQVLTDYKVLKGDTLFS

SEQ ID NO: 100948 - protein, 255 aa, Unknown
  Obtained from environmental sample
  misc_feature (1)..(255): Xaa is any amino acid
VLAGVAKSDAQEEVALAALAKVERENLLEEIKKDAVCNVARIKAKEMLSSMQVAKTDPVKDQADLLSQKQKALLSHATRLLENKNPLAVDSEMQRLYQEAQNLGKEASTLGSPQNEELNSVFQKHKESVLAEKARLAEEKAKQEAKLKEEEESKKQAPVQAQTQHVQEQTTEMQDLSPESAEEKSAETKEDRLSEEEYHAKLPLLQTIIEKINALDENGDFNEISQSVRQAFYEWKEIVGEKKSQFKNITRNSEP

SEQ ID NO: 100949 - protein, 297 aa, Unknown
  Obtained from environmental sample
  misc_feature (1)..(297): Xaa is any amino acid
ALTSKPDTLNEIEGVLVANRRNAGTAYVFVQGQGNYSGVAKTTFTIAKAPLTVAMGDVTNKVYNGIAAVDTSTQTSLPDSAKGNIQVTFSGMKNSETLANVVDYIITGAKFDSTNASSSAVTASATVSLVSTASNVGRNYILASGAVSKTTGVAIAKRTPQAYNSSSVPAGDTLTFSFTIPTRYFKDAMQAGMNPVALKAPITNPGGTLRTVYSYVANDVYCESTSKCVTVTAEQVAAAGGSTFDTTFAPRNVGNYPVSVRVLEATTGASRNLVAATYAIGVYEILAAAKPSISSPS

SEQ ID NO: 100950 - protein, 300 aa, Unknown
  Obtained from environmental sample
  DOMAIN (3)...(300): Adenylosuccinate synthetase
  misc_feature (1)..(300): Xaa is any amino acid
MSGIVIVGSQWGDEGKGKVVDLLTPDFDMVVRFQGGTNAGHTVIAGGVTYVLSLIPSGIVHPDKHCCIGNGVVLDPAGFCRELDRLTGQGLRIGPENLSISRKAHLIMPYHRALDQAREGSRGEDKIGTTGRGIGPCYEDKAARTGIRLADTENLAGLTAKISHALKEKNTLLTALYGHPPLKVEEILAEIQPATERLRPFLADVSDTIERCWAKGGKVLFEGAQGTHLDIDHGTYPFVTSSNTVAGGAATGSGVAPWRLTRIIGISKAYTTRVGSGPFPTELQNDTGTHLREHGKEFGT

SEQ ID NO: 100951 - protein, 137 aa, Unknown
  Obtained from environmental sample
  misc_feature (1)..(137): Xaa is any amino acid
MRRLVLITAAVAAAIAGAFADGPSFGTFTDSRDGQTYKTVKIGTQTWMAQNLNYQTKRGSWCYENSADSCKKYGRLYDWKTAKKACPAGYHLPSNEDWTTLIDYMGGQVTAGKKLKAKRGWNDNGNGTDDYGFYKIC

SEQ ID NO: 100952 - protein, 102 aa, Unknown
  Obtained from environmental sample
  misc_feature (1)..(102): Xaa is any amino acid
RAAGGEVAAEKLKSKSGWKKNGNGTDSYGFSALPGGYLYDEGTFAHDGYCGYWWTATETGSEHALGREIIYDYSNDIYIDEVLEDKDYKEQGRSVRCIAKTK

SEQ ID NO: 100953 - protein, 224 aa, Unknown
  Obtained from environmental sample
  DOMAIN (5)...(214): TatD related DNase
  misc_feature (1)..(224): Xaa is any amino acid
MPDALFTDAHCHPFDLANHSSAAEDERRQLGVMCATSAATMEEFAYCERLSQQADGAPLLPCFAVHPQMPVVEQSSCNEQLAVLETLADQGRLAAVGETGFDLYNAVFRETEKIQDDLFAAHLEAALRHDLPLVIHVRRAMHKIFAHAVSLKKCRAVIFHSWPGTAGEGEALLRRGINAFFSFGNVIRLNHREAMRCCAVFPAVACLPKRRPFSPSRGEKNHVM

SEQ ID NO: 100954 - protein, 295 aa, Unknown
  Obtained from environmental sample
  misc_feature (1)..(295): Xaa is any amino acid
MDDPVGKGTDRIVSLTLPDTVQAVKGKPLNRADIYTADPNYRNLRTVKGTNLSSIGDFAFFKCASLASAEFPAATAVGKYAFYECTSLADVSLPAATAIGDYAFEWCINLASVSLPAATSIGDWAFIYCNSITGLSLPVATAIGERAFYGCTRLAGVSLPAATAIGDHAFGYCPRLTSVNLPVATAIGNGAFQECTALTGVSLPAATAIGWSAFNICTSLASVDFPAAKDIGAWAFYGCERLTGVNLPVATSIGKETFQKCTSLASVSLPAAKDIGEGALDGCTRLTSVSLPVAT

SEQ ID NO: 100955 - protein, 249 aa, Unknown
  Obtained from environmental sample
  DOMAIN (10)...(249): Fumarate hydratase (Fumerase)
  misc_feature (1)..(249): Xaa is any amino acid
MTRIIDTTELIPIIAGLAKKACYELGDDVIASLREAQCREESPYGRDCLRQLVENAEYAKKEQIACCQDTGTCNVVMEIGQEISWKGMPLSDAVNEGVRRGYEEGYLRKSMVADPFDRVNTNDNTPAMLHTEIVPGDKVYITVMPKGGGCENMGAFCTLLPSDGAQGVIQFVIQNIDKAGGKPCPPLLVGVGIGGSMDKCVWLAKKALLRPIGRRSPNPFYSRMETELLEKINNLGIGPMGMGGRITAL

SEQ ID NO: 100956 - protein, 286 aa, Unknown
  Obtained from environmental sample
  DOMAIN (2)...(166): D-isomer specific 2-hydroxyacid dehydrogenase, NAD binding domain
  misc_feature (1)..(286): Xaa is any amino acid
GFFIAGEADKVPDLVEKEKSKFEGPELRGKTLGVVGLGAIGVMTANDAIALGMDVIGYDPYISVEAAWNLSREVARADTLEGLLGKADYITLHVPLSDTTKGLINAEKIRFMKKGARIVNLARGGLVNEHDIIEALNSEKLAAYVTDFPSAEMLACKKAICVPHLGASTPEAEDNCAIMAVKQLMDFLENGGIRNSVNFPRCRLDMRAPNRLLVANRNIPNMVGQITTILAAANINITDLINHHRDDFAYNIIDTEQKIPPATLEQIKEVNGIIKVRSIERIEKKG

SEQ ID NO: 100957 - protein, 238 aa, Unknown
  Obtained from environmental sample
  DOMAIN (5)...(233): Periplasmic binding protein
  misc_feature (1)..(238): Xaa is any amino acid
MAQMYLISIAPDLLCAITSPYKGTEVEFLPSAPASLPAIGQFYGQATFNPEEVAKINPDVIIDIGETKSSIANDMEQISAMTGVPVIHINADLRGTPETFRTLGRLLGREEKGEELAAFCEKILSRSERIMNQVGTGKKSVLYCMGNNGLNVLARNSYHSEIIDWMTDNLALVDNPSSMGSGNESNMEQLYVWNPEVIFFSPGGVYASVKNDPAWREFRAVRGGAYYEVPYGPYNWLG

SEQ ID NO: 100958 - protein, 246 aa, Unknown
  Obtained from environmental sample
  DOMAIN (26)...(227): Adenylate and Guanylate cyclase catalytic domain
  misc_feature (1)..(246): Xaa is any amino acid
MCTALGMFGRFTNRVIAVRAMRGEIKPGGSPKYATIFFSDIRNFTAISENFTNTFGDEASEHIVRWLNAYFTRMVECVEKTGGVVDKFIGDSLMAHWGTAYTTGSIRKDAYKCISAALMMRKALYKMNKSCKSDDPYNPRIRIGCGINTGMVTAGQIGSDTRMEYTVIGDPVNLASRVESLNKPLCTDILITEDTWLLVRKKFITEEMPPVTVKGKEKPVRIFAVINFARSKTGPSSLDKLRADSC

SEQ ID NO: 100959 - protein, 193 aa, Unknown
  Obtained from environmental sample
  DOMAIN (4)...(62): 2Fe-2S iron-sulfur cluster binding domain
  misc_feature (1)..(193): Xaa is any amino acid
LADFFVNGKPASGRGDKKLLAFLRDDLRLTAVKNGCGSGACGACTVLVDGKAVRSCITPLSKIEGRNVVTVEGLSEREKEIYAFAFAEAGAVQCGFCIPGMVLSAKALLDKRSDPDGEPGEGEIRKAIRANICRCTGYKKIVDAIQIAARLFRENTPVPKPRFTGFFGEHMHRLDAASKTLGTGKYVDDLELP

SEQ ID NO: 100960 - protein, 65 aa, Unknown
  Obtained from environmental sample
  misc_feature (1)..(65): Xaa is any amino acid
EKVFICGGESIYRQAFEFANKIELSVIHAQYDGDTFFPEIDGDCWTVTNKEDFDDFSFITYTKNG

SEQ ID NO: 100961 - protein, 277 aa, Unknown
  Obtained from environmental sample
  DOMAIN (61)...(242): Penicillin-binding Protein dimerisation domain
  misc_feature (1)..(277): Xaa is any amino acid
MFSTSQETENQRHEMNLKSLVFVCVCAMAFTLLIIRLLQLQYFEYENNLKRAEENRIRPVTIKASRGYILDRNGVVLVRNRPSYQVSLRYNNLKTKEMRDSVFNRLLKITYSNGKRLLDSSSLAFSFERGKWQKFRLQRLIEDASPEIVALFEEHSEELPGIEILVESRRDYPFGSHGAHIFGYTSEISEAELELPENEHYVMGDRIGKKGLELSYEKEFRGENGSKFVEVNAMGREMGAVEGMPFIEPVSGNALVTTIDWKLPAVAETAHPDGLKG

SEQ ID NO: 100962 - protein, 267 aa, Unknown
  Obtained from environmental sample
  DOMAIN (1)...(127): Glutamine amidotransferases class-II
  misc_feature (1)..(267): Xaa is any amino acid
GHTRYSTHGGGCLSAAHPFLVHGRFGQLALCHNGNLINPESIRDRLLAAGHTFTGPSDSEVILALINTAKADALESAVEEALQQIRGAYSLLILSEKQLIAVRDPHGLRPLAMAKLGDDSTVFASESCAFDLLGAEYVREVEAGEILVVGNDTQQIRCQAKNCRTRPCVFEHVYFSRPDSFVFSRSVMAARREMGRQLASQRPIDADLVVPVPDSGVFAALGYAEQSGIHFEFGLIRNHYVGRTFIEPTQSIRSFGVKVKLNPVREL

SEQ ID NO: 100963 - protein, 73 aa, Unknown
  Obtained from environmental sample
  misc_feature (1)..(73): Xaa is any amino acid
INVHGGGDVPEAVYEALYDGATKFNWEAQSKIMIVIGDAPPHPKPRGKITKEMAENAAMERNIKIHAMILPSK

SEQ ID NO: 100964 - protein, 290 aa, Unknown
  Obtained from environmental sample
  misc_feature (1)..(290): Xaa is any amino acid
YLEWRPAGANVNDSKKENAIRWGSSLRVKDGEVAVFVYKQKDGTMQDYIEGPFDDTIKTANFPVLASIVGLAFGGGTPFQAEIYFINLAGVIQIKFGVPYFDVSDHRSNLQDFVVPVAVRGTITFKITDYKAFIKLHRLIDFDLEKFKEQIQDAVKKYVKGVVTNVPHDYGINVMQLERKILQINEIVEAYLKPRMQNEFGVFVSSLDIGAIEVDKESEGYQKLKEVTRDIAGVTTKAQAAVNIQNMQDAQAINAEHQKDALRIVREETQHAQRMKTDSDNFAVHQLNQQ

SEQ ID NO: 100965 - protein, 251 aa, Unknown
  Obtained from environmental sample
  misc_feature (1)..(251): Xaa is any amino acid
MWPYAQADVEGGRLSWDEVADLTAEFFISLNKDSDLYPGIQQGDNGQSLMLGGVNRAGVTSVNRLTHIVLEVARVIRFIDPKINLRVTPDTPRDLLLKAVELTKIGLGFPQYSNDEMVIPGLTAMGYDLEDARDYSVAACWEFLIPGKGMDIVNIGAVSFPHAADCAIRKALAEGAGFRRVMELCREDISMQVGRLIESKKKIILPPAPLYSALMTDQLETRGDLSEGAKYNNLGIHGSGSSNAADALAAV

SEQ ID NO: 100966 - protein, 124 aa, Unknown
  Obtained from environmental sample
  DOMAIN (10)...(64): Helix-turn-helix
  misc_feature (1)..(124): Xaa is any amino acid
MEAHTPGDRIAEIRKTYSISKEDLAERSGVSVELISKIEDSGHIPDLAPLIKISRGLGVRLGTLLDDEEQLGPVICRAGQAASAIRFKTGLPEGASEGDHHGVNFNALAADKGGRHMEPFVVTI

SEQ ID NO: 100967 - protein, 280 aa, Unknown
  Obtained from environmental sample
  DOMAIN (61)...(273): Hexokinase
  misc_feature (1)..(280): Xaa is any amino acid
EVIGKAMGAGLKEALIRRNVKPPEKVVLLNDTVATLLSGFSELPAHGGLRRGEDKYGVGIGPVVGFILGTGFNTAYPERCIPKINFDSAEHPQIVVCESGNFAHRYIGFLDSEYDKTTKAPGAYTLEKASSGAYLGPLTFHVISRALRDGLFSFNKADEFLSWPTMHTKDLNAFMHEPLARSGPIGELFGLDERDALTSFVYLTSIVTERGAIFSAAVLAAAIEKTGAGFDPFVPVRVAVEGTTYMIYKGMRSALESHLHVLLNRGQAALLCHSPGGTGV

SEQ ID NO: 100968 - protein, 189 aa, Unknown
  Obtained from environmental sample
  misc_feature (1)..(189): Xaa is any amino acid
VNGFTKIALVAAFGFALCFAQEAVPEKIAVYVFGANEAGINKSLSNKLLATMIQSGEYADINDHNSFYDELAKSGKSEITYISQVAKRYGAGYVCVVSMMEAFGAYSITFHLVKVSDSQTVKTGSIDQFIKSLEDLAVVSYELASQLLHSVASIPPPPPPPPPPPLPTPSLSLPPTSSLPPPMPAAAVL

SEQ ID NO: 100969 - protein, 155 aa, Unknown
  Obtained from environmental sample
  DOMAIN (1)...(155): Fumarase C-terminus
  misc_feature (1)..(155): Xaa is any amino acid
MQSKPPIKLTFPLANKEMLAPLRAGDRIRLSGTVYTARDAAHKRFMTLLEKGRPLPVNLENQALYYCGPTPPTKTSVIGSAGPTTSSRMDIYTPDILRKTGLAAMIGKGDRGPAVIEAIKECGAVYMAAIGGAGALISSCITSSKVICYEELGTE

SEQ ID NO: 100970 - protein, 277 aa, Unknown
  Obtained from environmental sample
  misc_feature (1)..(277): Xaa is any amino acid
QTYQITVSLGFERGKGEKAKQKIKTIKFIPPPGLTEKQGRKAAEAFAAKWEAEQKGNPNLADAQTLNELTAWYLDVIALDKLRVYTLEKRRAALEQHILPALGNKRLRELNPAIFTAHFAQLRRGAGLSALYVNNIRVYVSAVFSSAIKNGIMATNPLKGVDKLRVERKEQPVLSPTQVGTFISRLREVDHIGVRGALLTQLFTGARPSEIRALTWSDINFEKRLIDINKSVDIKGRLGPPKSKSSKRILSIDPLLLSFLIRHKESVENLAEHMGSA

SEQ ID NO: 100971 - protein, 264 aa, Unknown
  Obtained from environmental sample
  misc_feature (1)..(264): Xaa is any amino acid
MKCPICGVEMADGSEVCSECGCEIRTGVGADELLVNVRREYDAWEKSPPNIINKGIGTLTAPVAYFLNPIMKKVAPLLEGVISGANNYIASAVRGFSGKIPEFENMDEIQFFKWFTDADVSAKNWKTAGIAAMATEGGAMGAGGIFLILADIPASFGVIMAFANKIALSYGLPIRTEEAQIAILKAVSAGSANNIKEKTAAAFTLRATGKTLQEKTWQQIYKLSVDNIISTEKLIVVAREILKKLGITITEKKASHILPAIGAA

SEQ ID NO: 100972 - protein, 285 aa, Unknown
  Obtained from environmental sample
  DOMAIN (141)...(285): Methyl-accepting chemotaxis protein (MCP) signaling domain
  misc_feature (1)..(285): Xaa is any amino acid
ARSGLERGDEFGTLSKSIDSLASRLQTIMKDLYMDSESLAGSSEELSTISKLLASSADEVASKAIVVASATEEVSVNISTIANTAKESSAGASKVAEAIEQMAGNINSMASTAEQSSASVNKVVNSVENVASNINTIASEASQASMNSDEVADTAEKMSANMNIIASAIKEMSASISKISGDAYDTRSIAGDATVMSSEATETMNKLGVAAKEIGAVTDVIKRISEKTNLLALNATIEASSAGEAGKGFTVVANEIKELANQSAKNAGDISLRIEDIQTSTSEAM

SEQ ID NO: 100973 - protein, 137 aa, Unknown
  Obtained from environmental sample
  misc_feature (1)..(137): Xaa is any amino acid
MADNPAPNYIDLLSQALLARKDWLEKAELTKLKEELRIFQISYSVLYNMFLKKKLINEDPYKQESKISDLEIPDTGPFNEAKKREQISLRLASYDSQLDFLVNFYQFGVDFLNVERIRRIVGLVRYIDWMNLRPDSQ

SEQ ID NO: 100974 - protein, 287 aa, Unknown
  Obtained from environmental sample
  DOMAIN (21)...(194): Glycosyl transferase family 2
  misc_feature (1)..(287): Xaa is any amino acid
AIEELHYRRLRMEKRICPLTNITVPVFNRYEETLATLAALRTRTQAPFILTVVDNGSEADLRKELLHLHEDKLIDRLFLLDRNYGVSCACNLGWTSVDAPFFMKVDNDIMPIADKWLESIYSAWGTQRYKSITGPVWNCAVPRNRIDTPHGTMWSMPVSMSGEGFIVGKKVHERIGCFSEDYGLYGEEDADYCLRCHHAGIRKYSYEASGLLERLDADGRKYVAYGKAKVAAHNKNVGGKPGEGIFPLNLFLYEQGLRALNVPLRYEVKSISGPHVEMRECAGYRRF

SEQ ID NO: 100975 - protein, 268 aa, Unknown
  Obtained from environmental sample
  DOMAIN (44)...(268): tRNA synthetases class I (R)
  misc_feature (1)..(268): Xaa is any amino acid
GNPRDLAQRLAQALLGAGPDIASAEVAGPGFLNVRFSPAFWQSRIADVARQGARYGASQVGQGKKTQVEYVSANPTGPLHVGHGRGAALGDSLARILRFAGYDVQTEYYINDAGRQMRLLGLSILLRAREHAGLPVEWPEDYYRGSYIADLAAQLVQRNPGLLALPEDEAVLACQAYGTDEILSGIKTDLQAFRVEHQAWFSERSLVESGAVERAFERLRENGFTFERDGALWFATTRLGDDKDRVLRKSDGSLTYFASDIAYHHDKY

SEQ ID NO: 100976 - protein, 289 aa, Unknown
  Obtained from environmental sample
  DOMAIN (53)...(284): Reverse transcriptase (RNA-dependent DNA polymerase)
  misc_feature (1)..(289): Xaa is any amino acid
MPRINEQTLSWEHRKQERNKARGVDGVTKDEYGEKLEANIADLLKRMKAFQYKPYPVKRTYIPKANGGMRPLGIPSYEDKLVQGAMAGILTEIYEERFCDSSYGFRPSRSAHDAVRYVNNTIMSNKVNNVLEADIKGFFDNVNHDWLMKFLEHDIADKNFLRYIGRFLNGGVMDGMKRYESDKGTPQGGLISPVLANVYLHYVLDLWVEKELKKKLKGEVYYVRYADDFVLMFQYEREARKVLELLKTRLGKFGLEVAEDKTRILPMGRFDGTKEKFDFLGFTFFNTKT

SEQ ID NO: 100977 - protein, 87 aa, Unknown
  Obtained from environmental sample
  misc_feature (1)..(87): Xaa is any amino acid
MIEAKKSMDFLNNLNEILEYCRNYREPIIVSNNGEGKFAVMTEETYEELIGKSKNELYNSLQMGLDQINNGDFITGKEFFEFLDNLE

SEQ ID NO: 100978 - protein, 76 aa, Unknown
  Obtained from environmental sample
  misc_feature (1)..(76): Xaa is any amino acid
EYDFVDQMFLKEVEIKTWISKIGTKSFTVHHEAWQEGRLCVKGNAVIVHYDFKIKKSTPIPDDKRKVLEQHLKDAE

SEQ ID NO: 100979 - protein, 280 aa, Unknown
  Obtained from environmental sample
  misc_feature (1)..(280): Xaa is any amino acid
VPDTLKTQEICLAAAQQDSSALKYVPDALKTQEICLAAVQQDGRALEYLPEALRTQEICLAAVRQDSNALRYVPEALRTQEICLAALRQDGTAFIHVPYKLWQDAAFFLAAVQQNSGALKHVPEALRTPEFCFAAVQQNGSALEDVPEALRTPEFCLTAVQQDGRALEFVPEALRTPVLCLAAVQQNGNALEHVPEALQTQEICLAAVQQDGRALRYVPEALRTQEICLAAVQQDGSALEHVPEALQTQEICLAAVQQSCGALEHVPEALRTQEICLAAV

SEQ ID NO: 100980 - protein, 291 aa, Unknown
  Obtained from environmental sample
  DOMAIN (15)...(190): NACHT domain
  misc_feature (1)..(291): Xaa is any amino acid
DDALIDRFVKSANGRNIAICGEAGIGKSALLAHWIQNRGKRENEKIIYHFIAQGGDEGDYRKITRRLIEEICDLYGLQSAPPFEQQEEEERQKAELKNLLTAVKDRGRLVIIIDGLDKLREIDEDLYRLYWLPSFPDNVRFICTTRQKKESNGKYIYAGNSKYAIPGICDDRDTEIGTLDVERRKTLIAEYLGSFGKKLTPSQIERIANDKENENPLTLLTLLDELRMFGKYEELDGEIDRYLAAGSIPDLFTLVLERLEKNYNYGKGNFVKEALSLLCVSLYGLSEAEIC

SEQ ID NO: 100981 - protein, 272 aa, Unknown
  Obtained from environmental sample
  misc_feature (1)..(272): Xaa is any amino acid
MFSGAPAAFNGGQTDTASGDKIWHFDFSSVKTPGRYYILDKTNNLRSFSFSIANDVYNNVLKAAIKMLYYQRAGTDKPSQYAGQSWADGLNFQQDKQTRDFFKKNDASTERDLSGGWFDAGDYNKYTKWTTDYVENLLLAYEENPEAFADDYGIPESSNGVPDILDEVKWGIAWLLKMQNTDGSVLSVQGLSDGSPPSSVTKASYYGPANAVASYGTAKAFAIASRIFGKRGETEYASNLKNAAIKAWTWAEAHKDSIFHNNCGESWKQSDC

SEQ ID NO: 100982 - protein, 65 aa, Unknown
  Obtained from environmental sample
  misc_feature (1)..(65): Xaa is any amino acid
KVPPRRKGSEPGDDAAFVNHLKQYLMLGVPGAGFGKPGWLRFAYCIDETIIRASASAFKKAMESW

SEQ ID NO: 100983 - protein, 190 aa, Unknown
  Obtained from environmental sample
  DOMAIN (5)...(190): Hsp70 protein
  misc_feature (1)..(190): Xaa is any amino acid
MGNKVIGIDLGTTNSCVAVMEGGKPTVITSSEGGRTVPSVVGFAKDGERLVGQIAKRQAVTNPEKTVYSIKRFMGRLHNEVGEEEKLVPYHVVDGTNGAAAVKIDDKTYTPPEISAMILQKLKNDAEAHLGEKVDKAVITVPAYFNDQQRQATKDAGKIAGLEVLRIINEPTAAALAYGLDKNKKDSKIA

SEQ ID NO: 100984 - protein, 93 aa, Unknown
  Obtained from environmental sample
  DOMAIN (1)...(93): GrpE
  misc_feature (1)..(93): Xaa is any amino acid
VLDSFERSQKTLTNADEEVKNGCELIHKQLKDVLQKFGVQRMETAGKIFDPRLHEALLQKESEQPAQTILEEYAAGYLLHDKVLRHAQVVVAK

SEQ ID NO: 100985 - protein, 113 aa, Unknown
  Obtained from environmental sample
  misc_feature (1)..(113): Xaa is any amino acid
MSDSGASTARSGGPVLEARGLTRVFQSGGEELRILDGLDLTVERGRSQAIVGASGIGKSTLLYALGGLDRPTGGQVIFEGRSVYDRGEDELAAWRNRSIGFVFQFHHLLGDFT

SEQ ID NO: 100986 - protein, 276 aa, Unknown
  Obtained from environmental sample
  DOMAIN (135)...(227): Pyridine nucleotide-disulphide oxidoreductase
  misc_feature (1)..(276): Xaa is any amino acid
AAVYAARANLSPRLIEGFQSGGIPGGQLMITGVVENFPGFPAGIDGPELMSNMRRQAEKFGTRLVTDDVDAVDLSQRPFAVSTVNGDKFTAAALIIATGAAASRLPLDSEKRLWGRGVSACAVCDGALPVFRGKELAVIGGGDTAVEEAVHLTQFASKVCLIHRRDELRAGAIMRERAASHPKIEILWNKVVDEFLGENRLSGLKLRDTVTGAMSELTVAGAFEAIGHKPNVGFLNGQLELDEQDYIVITPGTSKTSVDGVFAAGDVCDPHYRQAI

SEQ ID NO: 100987 - protein, 294 aa, Unknown
  Obtained from environmental sample
  misc_feature (1)..(294): Xaa is any amino acid
ESSQKYDNDKRFEKVKRYFSTLEERKSLLFYYANYSNPLSEEDSNRYVLIGIARLKEKGKYHFFENVSENYKQRYANGLVWQYPLTSNYPDEGVRIPYHLYMDNPDILKNIAIYPDNTKNFKYATWPLSDDDALSIIEKFIYVMNYLKEIGDKSENWDERLRWLNSLTSELWKARGPYPGLIKVLNYLEFTEAMEYLRKNPDKQNDLLLNLNNFFNDKSSSINDIVLEEKRITSLKRKFKLLDDDVQNMLLSVFPLFDISETQIKNIIDENRANFGIASTIKAIIENPIYPLRT

SEQ ID NO: 100988 - protein, 288 aa, Unknown
  Obtained from environmental sample
  DOMAIN (147)...(284): GGDEF domain
  misc_feature (1)..(288): Xaa is any amino acid
KIRAEDFDLDAISKLKNKSLTHACKMGYYPDYGGWLAYSYMSVKNSKGDVVAFVGADKEMSEIKNSMKKIETKLLFTSFLFLVVVVLLITYLIKKIFISPISKIIEAADNFHLLNVSFKNINLTHIKEYDALIKSFRNMENKINHAITKSFTDELTKLNNRYFFTLSLENILRPVHEEKKIAFLIIDLDSFKQINDTYGHEKGDFVLRNTGIILKQVFGNLPGVVARLGGDEFAVCLDNIGDKQIVEDKCQILKVELSQIMYAENKTGICASIGVIITKFSKNPPVYA

SEQ ID NO: 100989 - protein, 260 aa, Unknown
  Obtained from environmental sample
  misc_feature (1)..(260): Xaa is any amino acid
MNNIRLAHQANLLKYEDARRQVSIQITKRFFSLLAEKNNLLVLEEVLNLAQRQFERNEVAFRNGLVRELAVIQSRLSVENARYNLSAANTAYVNNMGDFFAALGISSDDQVTLSGEVKIIKINANSDALISGHLPGRPDIVSAKREIERLENAQKQSVFQSRAPSLNLSMDWSTSKFNPFTDSFSATARLSIPIDPWIPGASREQSIRKADDSIEKAKLDLSIAEDSAKTQIRSLCSQLANSWTSIEIARLGLDAAQISY

SEQ ID NO: 100990 - protein, 283 aa, Unknown
  Obtained from environmental sample
  DOMAIN (1)...(283): Methylmalonyl-CoA mutase
  misc_feature (1)..(283): Xaa is any amino acid
GDVGKAGVAVDSILDMEILFSGIPLDQMSVSMTMNGAVLPIMAFYILAAEEQGVDKSVLTGTIQNDILKEFMVRNTYIYPPQASMRIIGDIFAYTSKYMPKFNSISISGYHIQEAGATADIELGYTLADGLEYLRTGVKAGLDIDTFAPRLSFFWGIGKNYFMEVAKMRAARMLWAKIVKSFNPKNPKSMALRTHCQTSGWSLTEQDPFNNVERTCIEAMAAALGHTQSLHTNALDEAIALPTDFSARIARNTQLYIQDETKVCKVIDPWGGSYYVEALTDAL

SEQ ID NO: 100991 - protein, 246 aa, Unknown
  Obtained from environmental sample
  DOMAIN (8)...(246): Pyridoxal-phosphate dependent enzyme
  misc_feature (1)..(246): Xaa is any amino acid
MAKYAKKLTELIGKTPLLQLTDFSAERKLEARLIAKLEYFNPLSSVKDRIALAMVEDAEKNGKLDKDTVIIEPTSGNTGIGLAFVAASRGYKLILTMPDTMSVERRNLLKALNAELVLTPGKDGMKGAIKKAEELSVAFEKSFIPQQFNNPANVRVHRETTAVEIWNDLDGGIDVFVAGVGTGGTITGVGEVLKEKKSNIKIVAVEPFDSPVLSGGAPGPHKIQGIGAGFVPNVLNTKVIDEVFKV

SEQ ID NO: 100992 - protein, 227 aa, Unknown
  Obtained from environmental sample
  misc_feature (1)..(227): Xaa is any amino acid
MNRFTFKMFGLGRTLLLTAVLIVGAVCVSYGDNPSELVGKWELQMEPGVVFWEFFENGTGLMAGPRGQSLSMTWKVIDNKRLVVTAGGRETPPIDYKLQGSELTINMGEVTILENAERKKKEAEQKFEKISGYFTDSRDGQKYRSVKIGGRTWMAQNLNYRTDNSWCYNGDNYSCKKYGRLYDQDAAKTACPAGWHLPSPMDWNSLVAAAGGNTVGKALKSTYGWFE

SEQ ID NO: 100993 - protein, 197 aa, Unknown
  Obtained from environmental sample
  misc_feature (1)..(197): Xaa is any amino acid
TWFSLYNNYKSSFILFFESIYLLKKLNLENKFLNIIHSLESYHRKNQNYSNSYMGKEEYLSTIYKDLTKHIPTELEEDFKEALKSKLKYGYEYSLRRRVKELFHLNNDFIGGFIINSDILQKEIIETRNYLTHYDEKTNFVRDGNYLFDLCEKIKVVFIILLLFELNFSIADIKILIEEQELNRRLYNVSGKHYEFK

SEQ ID NO: 100994 - protein, 85 aa, Unknown
  Obtained from environmental sample
  misc_feature (1)..(85): Xaa is any amino acid
MKKKKWDVFISHASEDKDDIAEKIVKLLEDFGIKVWYDKDILSVGDSLSKSIDIGLNNSRYGIIILSENFIKKGWTEYEFRALLN

SEQ ID NO: 100995 - protein, 212 aa, Unknown
  Obtained from environmental sample
  misc_feature (1)..(212): Xaa is any amino acid
LNTACNEKKLVLIIDETDKTSNNLVFLRFIGMLRDKYLLRGKSGATFQSVILCGVYDIKNLKVKLVQKGLYQLKDGEKRINSPWNIAVNFNVDMSFSPPEIATMLLEYEKDHKTGMDIDLISKELRAYTNGYPFLVSRLCQIIDEDLGKDWTAYGVQKAVKELLNERNTLFDDLSYNIESNRDLFNLLHNIIVDGKKVTYNNLNSTMNLALT

SEQ ID NO: 100996 - protein, 301 aa, Unknown
  Obtained from environmental sample
  DOMAIN (89)...(199): TonB-dependent Receptor Plug Domain
  misc_feature (1)..(301): Xaa is any amino acid
VAGALVRISGPNLLVPREATSDANGRYAFRLVLPGQVRVQFSRQGFIGGYQAITVTSGSTQTANFVLRAMGVASEEVEVTAGADNPIIDKTETKVTSTFTARDLFNLPNVVGSGMYAAMYLAPGVTGGLPGSGNYRADYARIRGGTTGQTLYSINGIQVRDPEAGRGQQDEFIIDDLIQDVQVVQNPINAKYGFTSSGSVNITTKTGTNRFQGTFRVGLSNGSWDSLNGVPVINRWSELEYSATSAGNFNSTYVYTVPADEMRRTYSATISGPIWKDKITFTYGGKFEPQSLSSGNYQNML

SEQ ID NO: 100997 - protein, 137 aa, Unknown
  Obtained from environmental sample
  DOMAIN (1)...(124): NusB family
  misc_feature (1)..(137): Xaa is any amino acid
LRTLYAHEVDSSSSWEDMLSSIAENDQLGSKVIKYAKTLVDAALKNREAIDSLIARKAVNWELRRMAAVDRNVLRLATAELIYFREQVPFKVVIDEAVELAKTYGTDDSGKFVNGILDSIRRELYRKEGAGGGEEKA

SEQ ID NO: 100998 - protein, 284 aa, Unknown
  Obtained from environmental sample
  DOMAIN (2)...(284): FHIPEP family
  misc_feature (1)..(284): Xaa is any amino acid
MAIVVTRAAAPGDLGEQVSIQFSRNARAYRTAAVAIFGMAWLPGFPKYVLFPMSALLGFCAFKMYQAQSKQANINETMQKAGDAAKKTRDDKGDIPQMEPPDQLSLELGFGLIPLVDKDKGAELLERMQGMRRQIALDMGIVIPKIRIIDNIQLGSSEYCFKIRGVDVGKSVIRMGNYLCINPDPGTAKEELSGEKTTDPAFGLPAIWISEDKRDKAERAGYTVVDPPSIIATHLTEIIKHHAAELLGRQETQVIVDGLKKDYPAVVDEVLMGRDGKGLTMRDI

SEQ ID NO: 100999 - protein, 175 aa, Unknown
  Obtained from environmental sample
  misc_feature (1)..(175): Xaa is any amino acid
MENWFATLSGTDRFFLICATVGALGVLLRLMTQVLGFAGGDIGDGDAGSAPGGADSHHFDGFKIISVHGLAAFFLMFGLVGFAVSRESRAPIVVAVLAGVVAGAVSVWIIAKLFMMAGKLQSVGNLDLTKATGCRGAVYMQIPSGASGRVVLNIDGRQREMDAMNVNGEAMPTGV

SEQ ID NO: 101000 - protein, 109 aa, Unknown
  Obtained from environmental sample
  misc_feature (1)..(109): Xaa is any amino acid
MSTRRILFLAPAQSVTGIYPQLRDAGYEVGIAENLKGASVFIRQSGPGIVFSRPTLPGYRVEDLLAVGADDPAFPPVIVITEKGNAEDASRYLTLGAHDYWLEPLIFEK

SEQ ID NO: 101001 - protein, 295 aa, Unknown
  Obtained from environmental sample
  DOMAIN (205)...(295): PPIC-type PPIASE domain
  misc_feature (1)..(295): Xaa is any amino acid
GNFPAVTSEQLRSLNIQQQAEQMLIAGALLRQEAKRAGFSVSPLELRKVIEKNPAFLNEKGEFDPKAYLRVLELQRSTPGAYEGRVRQELLVQKLYNAITAPVVVSEAEARMIFQFSQEQRQISYLLFPADDYLGKVTPGEDEVRAEYESNRAAFTLPAASDVDYVPVTAKSLAKPDSVSDEESAAWYERNQTAAMQPERMHLRHILLRLPEDAPENDVKKARQELEAMAARLKKGADFAALAKQRSQDPGSAPGGGDLGWVQRGQTVSEFEDAALALKPGQVSAPVRTEFGLHL

SEQ ID NO: 101002 - protein, 145 aa, Unknown
  Obtained from environmental sample
  DOMAIN (89)...(145): GHMP kinases N terminal domain
  misc_feature (1)..(145): Xaa is any amino acid
MLIFPNAKINLGLFVTEKRSDGFHNIETILFPVPLCDALEIVEAHTMDETQHATSLQVHGIAIDGNINDNLVYKAYQLLKTDFELPNIRMDLLKRIPFGAGLGGGSADATFMLKLLNQKFSLHLSSERLENYARQIGSDCACFVK

SEQ ID NO: 101003 - protein, 291 aa, Unknown
  Obtained from environmental sample
  misc_feature (1)..(291): Xaa is any amino acid
SRNLGEHDKTGAEVFHVLNDDIENLFAFAFATTPQDNTGVSHILEHSVLCGSERYPLKDAFLVLAQGSLQTYLNAWTFPDKTVYPASSVNERDYFNLMSVYGDAVFRPLLAEWTFLQEGHRYEYGKDGEGLSVTGVVYNEMKGAYSSLDSYAHLWTVKAVLPDTPYSFESGGAPEHIPELTWEGLKDFHRRRYSPANCRVFLAGNIPTEKQLAFLNDNFFSLIEGGTASARIGKQKRWTAPKELNVPCPAGSDGENKSTVFLSWLLCDAADTNENIALIALTEILLGHDGS

SEQ ID NO: 101004 - protein, 205 aa, Unknown
  Obtained from environmental sample
  misc_feature (1)..(205): Xaa is any amino acid
MNTKNNIRILPRRARSYTEENINFESKLRVTPCTLWLIFLILFIGCHAEKGREVIDRSGKTIKIKTQINRVISTSPSNTEIITDLGQAYKLVAIDKHSANVTGIPEGLPLLDFFYPDAEVIINLEPDIIIASGHNPTGTGEDPFKLLRETGISVVYITMSASIDEIYNDIAFIADILQVQKDGERLISTMKAKIDEISQTAAQMT

SEQ ID NO: 101005 - protein, 280 aa, Unknown
  Obtained from environmental sample
  DOMAIN (225)...(273): Regulator of chromosome condensation (RCC1)
  misc_feature (1)..(280): Xaa is any amino acid
VACSFEIKADGSLWAWGRNYSGELGIGDTNSRNTPTRVGTDANWAAVSVCLYHTLAIKTDGSLWAWGSNTSGQLGLGDSGSGSGTNRNTPTRVGTDTNWAAVSAGTAHSLALKTDGSLWAWGSNYKGQLGLGTSDDNPHPTPTRVGTDSWKAVAADGMSALPSYGHSLAIKADGSLWAWGDNSLGCLGLGAFDGSAHPTPARVGTDSNWAAVSAGTCTSLALKTDGSLWAWGYNYYGQLGLGSGGTATDRHTPTRVGTDSWKVVSASYHTLAIRTDGSLW

SEQ ID NO: 101006 - protein, 295 aa, Unknown
  Obtained from environmental sample
  DOMAIN (1)...(293): Aldehyde dehydrogenase family
  misc_feature (1)..(295): Xaa is any amino acid
IAEAPVCTREEAEAAVASCRAAFPEWAAKPVAVRTQVIFKFRELVNAHFEELSVLLATEMGKNLDEARGDVFKVIEACELAVGAPLELQGHSLMEATRSHDIVQYREPVGVFLGIAPYNFPAMIPFGWFIPSCIVSGNCMVLKAATMVPQTGMRLLELLIEAGLPKGVVTLITCSREELTALLEHKDIDGISFVGSESVGKKIYAAAALAGKRVQCLVEAKNHALILEDAPLEWTARRVINSAFGCAGQRCMALPAVAVQESVADEFVNIMKKLAQELVVGAAYDPATQLGPVVS

SEQ ID NO: 101007 - protein, 233 aa, Unknown
  Obtained from environmental sample
  DOMAIN (12)...(193): KR domain
  misc_feature (1)..(233): Xaa is any amino acid
MDLHLSGKIVGITGGATGIGRACSLQYLQEGCKLAVCGRTQSKLDTFAAECAALGYADVFCHAADVADPVALEGFVNATVQRFGRLDIWYNNAGVGVLKPFLDLSLEEWDRVMDVNVRAAFVGSKLAARQMIRQGGGVIVNAASFTSVIPVAGHGPYSVSKWAINGFTRVLAAELASHNIRVFSFIPGMIETDINRSRVAVNREYYAKQAAMNRVGEPDDLAPTLVMLTSDRA

SEQ ID NO: 101008 - protein, 213 aa, Unknown
  Obtained from environmental sample
  DOMAIN (5)...(213): Histidine biosynthesis protein
  misc_feature (1)..(213): Xaa is any amino acid
MQAKRIIPCLDVDDGRVVKGIKFKGIKDAGDPVELARRYNEEGADELVFLDIGASYKSRATLLEVVRQVAAEVFIPLCVGGGIRTVDNMREAMNAGADKVSVCTSALQRPELLGEMAKAYGSQCVVLSIDAARVEPGRWHAFSHGGRTDTGIDAVEWAVRAVELGTGEILLNSIDADGTGAGYDLELTGTILNAVPVPVIASGGAGSLEQIAG

SEQ ID NO: 101009 - protein, 248 aa, Unknown
  Obtained from environmental sample
  DOMAIN (165)...(198): Tetratricopeptide repeat
  misc_feature (1)..(248): Xaa is any amino acid
LKRFSLLIALFLSLLLWAAGFVYAQEETAESVLIRVSEYLAVSKYNEAIALFDAIPLPEKEGSDIMLLKASVLSSAGKYAEARAIAEAVAAKEPANTEPLFVLAAIEAVSGRQRQQQAALEKIIKIQPDNAEALIALGNISLQSRAIRPAATYFDSVLKKDPRNADALIGLSRAYRMNTEWDNAEYLLNEVVKLYPDMVEARTERGRFYWGRGYLLQALNDYDAAVKLAGDDYWIAIDRGSLLLEMNR

SEQ ID NO: 101010 - protein, 282 aa, Unknown
  Obtained from environmental sample
  misc_feature (1)..(282): Xaa is any amino acid
RREGELFLFDGGEGTQVSIRRLNLRWKKISVIFISHTHADHVTGIPGILMLSSQVDRDDPLYIIGPPRIAEYIDASRRVLDMYINYEIIVKEILEPGVVYEGEGFHVRAFPLRHTKPCYGYTLEEDKRPGEFHPDLAAALGVARGPLWSKLQDGESVKAEDGTEVRPEQVLGPSRSGRKFSFVTDTLGFEAIAPEVANSDLFVCEGMFEAELLETAVEKRHMTAEQAAHIALAAKVKKLALIHYSPRYNEQNLKQLLKEALAIFPDTVLSRDRMVFPIEYVD

SEQ ID NO: 101011 - protein, 287 aa, Unknown
  Obtained from environmental sample
  DOMAIN (30)...(145): Histidine kinase-, DNA gyrase B-, and HSP90-like ATPase
  misc_feature (1)..(287): Xaa is any amino acid
HGKYNASQGGEKTLDFLVNVDSSIPAQLYGDDTRLRQILTNLLSNAVKYTHKGHVSLNVGKAYNGEDSIRLSLSVSDTGIGIKPEDREKLFSEFSRVDSVANVGIEGTGLGLVITRALCRAMGGDTTVTSEYGKGSVFNAVVIQKFGRREPIAYVYNRESKKVLFYDWRTPYTKSISDSFEDLKVSYKLSSDYQEFTKDLANGDYNYAFISSKYALDCIDIPANREQPLELSIMVEPGEISVYREVSSILMPVYSITLANVLNNDTGERLYHDKKLSIQFTAPSANI

SEQ ID NO: 101012 - protein, 61 aa, Unknown
  Obtained from environmental sample
  misc_feature (1)..(61): Xaa is any amino acid
TVVVQVNGKIRDKFSAVHNTASDELEKTAKALPGIQKWINSKTIAKVIVVQNKLVNIVLKN

SEQ ID NO: 101013 - protein, 214 aa, Unknown
  Obtained from environmental sample
  misc_feature (1)..(214): Xaa is any amino acid
MNSVPDMIKIRDQLLFKDYPFSQLLPQKNITIGIPRVLDFWRTLPFWKVFWATLGFKTKVSRKSSKRLYEKGLQYVASDTVCFPAKLIHGHIQDLIESKVDRIFMPQFNRLPPDNLEKFSTFTCPVLKSYPLSVKYSDNPEDKHGIPFDSPVFHWFSEKDQDYQLCRFMRETFNIPQNICRAAISQGEKALAEFNRELVENGKKIIEETEKKGG

SEQ ID NO: 101014 - protein, 266 aa, Unknown
  Obtained from environmental sample
  DOMAIN (40)...(265): NADH-Ubiquinone/plastoquinone (complex I), various chains
  misc_feature (1)..(266): Xaa is any amino acid
VVFATSYNIGYMRSLKEHAQTRYYFCFGVAIFGAVGVAMSANVFTLYLFYEIISVFTYPLVAHHEDEEGFAGAKKYMVYLMGTSKLFLLPAMALTYVLAGGLDFSLGEISRGFFINPDGSYKTVLAAQNPWLIQLTYGLYIAGLAKAALMPFHNWLPSAMVAPTPVSALLHAVAVVKAGVFSVSRIILSLFGAQTMHDFGLSQPTAYLAALTIVAASCIALTKDDIKARLAYSTVSQLSYVILGVALIGVTAGETFSPNLLAAQGG

SEQ ID NO: 101015 - protein, 290 aa, Unknown
  Obtained from environmental sample
  DOMAIN (48)...(221): Peptidase family S41
  misc_feature (1)..(290): Xaa is any amino acid
MTPYDMFVAINDSLGNGRYTEYLDDRPGGGVLFPPDTEFEDPWPLTDSTVYFYLPEFSDTALMVFQRSLRTLSRYQNIIIDVRYNGGGLLSVTDAILGELLPTGTPYIKTRYREYNRNTYAGETLEDMYSTTKKRPELLNKRIAVLMNGYSASASEILAAGLKDGANAHLIGSASYGKGIGQVIISRNDRKRLSITFLEIRGLTDRTGYYHKIGIEPDPVPDELAATPDKTARAAYAHWLDMPLEVLDLIVQSMKPEAQDMLKKEYTELFYAVKLLEPTFAPETDGDDGD

SEQ ID NO: 101016 - protein, 262 aa, Unknown
  Obtained from environmental sample
  misc_feature (1)..(262): Xaa is any amino acid
VPGEMVTKVFGVSTAVPVTAVVEPSRDIWNKGNIIIHGTSFDRNGIDEIKISMDNGISYQRADVIDNQDRPSLWTISLNTRVYMDGQYSIIIRATDGYGVQSFTSTTINIDNTAPMIDLSAPKNGAPIGRTLEVNGQIYDNLKVKLISILLTDTNNPDTFLVVEPPVEDVILQSLDVASYRDGDYTLTVTAEDMSGNQTVVIRNIKFIKAKAASEVAIINPLAGVIHGGSAVVSGRITGAVIPETVDLMLNRVKLTEVSVNK

SEQ ID NO: 101017 - protein, 84 aa, Unknown
  Obtained from environmental sample
  misc_feature (1)..(84): Xaa is any amino acid
MKIGIFDSGLGGLIMTKALVKALPQYDYAYLGDTANLPYGARSGELVKSLALRGVEWLFREQDCALVIIACNTASIAALKFLQA

SEQ ID NO: 101018 - protein, 194 aa, Unknown
  Obtained from environmental sample
  DOMAIN (121)...(193): S1 RNA binding domain
  misc_feature (1)..(194): Xaa is any amino acid
SKDGITALQMDIKITSITFDIMKKALEQAKEGRLHILGKMADAIKAPRKNLSQYAPTIKTIEIPPKKIREVIGSGGTVIREIQEKTGTKIDIEDSGKVNVSGTSAEAIEAALAIIHDIVDDPEVGKVFTGKVVRIMDMGAIVEFGRHDGMVHISEISKNRVAKVEDALKIGDEVKVLLMESREGKNKLSMKRAK

SEQ ID NO: 101019 - protein, 151 aa, Unknown
  Obtained from environmental sample
  misc_feature (1)..(151): Xaa is any amino acid
MEYTTFGKTGRKVSKIGFGGATAGIRNYVHSFDPEKEEDRRGVIEGIEEALKLGITYFDTAESYGSGASEGIFGEGLEGIPPGDIFLATKVTPSRENKIRPPADIRESLENSLKRLRRSYVDLIQVHGSYYSEEQAREILKKGSVVDELEK

SEQ ID NO: 101020 - protein, 277 aa, Unknown
  Obtained from environmental sample
  misc_feature (1)..(277): Xaa is any amino acid
MGGIAAEDNILLIEPTMGEINRQLDNLGRISAQASRNAQRTELVFYYSGHSDEDGILLNRERYGYRELRDRINTVQADMSIVILDSCSSGAITRAKGGVKTQPFLFDSSVSAEGYAFLTSSSADETSQESDAIESSYFTHSLLAGLRGAADSVGDGRVTLNELYRYAYTETLAKTETSMYGAQHPSYDIQISGSGDVVLTDIKAISAGLLITEDVTGRISIRDSSDFLVAELTKVTNKPLELGLEPGLYRIILQQGDKFYRAEIILSENTRTRLGMD

SEQ ID NO: 101021 - protein, 104 aa, Unknown
  Obtained from environmental sample
  misc_feature (1)..(104): Xaa is any amino acid
RTRISHIPAGRYGCKLYYSPTFKKNLYLLAGVPGRSGVLIHAGNWAGDIAMNYRSNSQGCILLGRARGTAVGQLAVLNSDAAMRAFHERVGGDPFTLVITGGAS

SEQ ID NO: 101022 - protein, 170 aa, Unknown
  Obtained from environmental sample
  misc_feature (1)..(170): Xaa is any amino acid
MPTIIVPTFAGEMPKLEDRLLQPQNAVRAVNCDLRRGSLRALRGPLHVWAIEGEAQHTIFKHDVDGWLTWPGIVNVCKSAVLDVDGESPIGQLLITGDRPYPTMYLAGGETHRLGIPRPASAPIINGSSGAVFLNTRVVGWAAADLSGAPARYGDNDGVPVEDGENADVE

SEQ ID NO: 101023 - protein, 263 aa, Unknown
  Obtained from environmental sample
  misc_feature (1)..(263): Xaa is any amino acid
MADMFDYISWRGDLEFDQLPFNPVDNIVFSQLSYLPMENIVPGPNERGCVTIEELSAKYAAMQQDNSGGLSNDITVINAISVINAIGSAPRYKDCKLFAYTNNIDLEQEKQFAAFCAIIGKRRLSRKMLVVYRGTDMTLVGWKESFNMSLITSIPSQKEAVSYLEKTSRRLPYPLIIAGHSKGGNLAVYAAAFCSALTRRRITVIYSNDAPGFHKEVIQSRGYQAICPRIKSFIPQSSLIGMLFEHGETPMVIKRRRKRPHAA

SEQ ID NO: 101024 - protein, 130 aa, Unknown
  Obtained from environmental sample
  misc_feature (1)..(130): Xaa is any amino acid
MNQDQVKQKLLSVEDAPMEFSLVFSGKKSRKVNGLYKPDSREIIIHNRNFEQGADGDNLLLYTAIHEYAHHLHACAQGGTLPTRAHTSEFWAIFHALLEKAETKKVYRDVFAGSPELSALTETIQKKSSA

SEQ ID NO: 101025 - protein, 155 aa, Unknown
  Obtained from environmental sample
  DOMAIN (1)...(149): Protein of unknown function (DUF558)
  misc_feature (1)..(155): Xaa is any amino acid
GDLSSLGVEAIDLFGTELGEKSYRDTKLLNDGGARAALIEGASQSRDTIIPALSAFDSVEDWLRQCPWEKTCSPTLPLLIAADNIRPEGALSRMAPTKRPVVLAVGSERGWSDHERDMFEAAGFSRLSLGSRALRTETACVAAAVLALEKIGELG

SEQ ID NO: 101026 - protein, 93 aa, Unknown
  Obtained from environmental sample
  misc_feature (1)..(93): Xaa is any amino acid
LQGFNMVRCIQGAKTLSLPMQMLGTDLQAHKVVYNNNPILKWCLTNTGIQTDRNGNIVPVKNQSPRQRIDGAAALLDCYVGLYEHYNEFTGAI

SEQ ID NO: 101027 - protein, 221 aa, Unknown
  Obtained from environmental sample
  DOMAIN (1)...(220): Isochorismatase family
  misc_feature (1)..(221): Xaa is any amino acid
MDITKTLLLEIDVQNDFCPAYAQNKGGALAVPEGDAVVKPLNALAVAVADAGGFVAATQDWHPAGHVSFASSHSGKKNGDVINIAGQAQGLWPDHCVQGGWGADFHAGLDLKQVHLIVRKGFRKGLDSYSAFFENDRKTATGLEGWIRGLGIHTVIIGGLATDYCVFFSAMDSKKLGFDTIIINDAVRGVGLPAGSVEKAVAQMREAGISFAPSDELSVSL

SEQ ID NO: 101028 - protein, 104 aa, Unknown
  Obtained from environmental sample
  misc_feature (1)..(104): Xaa is any amino acid
LIAVAVTVVVAVIDTVPASAAICLTPGQLFTESAVPGDAGSYSYLWQQSNDNSSWTAAYGVNNQESYTTPVLSTPMYYRRVATSDVASATSTAALVMVNSAITI

SEQ ID NO: 101029 - protein, 218 aa, Unknown
  Obtained from environmental sample
  misc_feature (1)..(218): Xaa is any amino acid
MLKYVLVENQLTDRPDDYSAQTYPTGSLDKEALITRIIRRGSTLTRTDVLAVFNSFEEVTVEALHEGYTINLPLFNTSFSISGVFEGPKDTFDGNRHKLNINLTKGVLLREAEKKVAFEKTNVPAPLPQIQEVKDSVSGTVNEKLTSKGVVEVRGYNLRIDGDDPSCGLWFIAEDGIATKATVIVENKPSRILAMIPTLSVGTYHVKVVTQFSTGGVL

SEQ ID NO: 101030 - protein, 288 aa, Unknown
  Obtained from environmental sample
  misc_feature (1)..(288): Xaa is any amino acid
SSHWVKDTTYSPTLKLTDFTLPKGYAWAASTDSTAHLSAGNGQTFAAVFTDTSGNYRPVSGTITVNVAKATGLTEVDSTVISISSDNTALNTFNLSGIVLKPTDHGELSYALGEIIDGEGSEEKILQRVPSITSDTLLNYQGGGKTSGTATQVIKITSQNYEDITVAVTFKATPEAVYNVKVNSGTGSGSYKAGDAVSITATTADPGKVFDKWTTADSITFIPGDTAASATFAMPKKDVTVTAVYRDTVYKILFIADSAVVSPSFGMTVSGTGRLDSLPTPIRTGYKF

SEQ ID NO: 101031 - protein, 245 aa, Unknown
  Obtained from environmental sample
  DOMAIN (6)...(109): GTPase of unknown function
  misc_feature (1)..(245): Xaa is any amino acid
VADARLGALAAIVKPKEIIPALVSFTDIAGLVAGASKGEGLGNQFLANIRECAAILHLVRCFDDANVIHVDGGVDPARDVAVINTELILADLQSLEKRIERLDKQARTDKKLAPQLDLAKRLFAHLDTGAPASSFKDAASEEYANLNQEMRFLSGKPVIYGANVDEASLAEDNVYVRALRALAESTGSSAGLAGNSGLVVKICAKIEEELIDMSAAERIEYLESLGVQESGLDQIVHAGYAALGL

SEQ ID NO: 101032 - protein, 227 aa, Unknown
  Obtained from environmental sample
  DOMAIN (41)...(227): Amidase
  misc_feature (1)..(227): Xaa is any amino acid
VFASNLKKHWILSIGRDMAFFDKPISEIVRDVHAGNVSARSLCARALESARGAGGELNAFITLCGESALKRADELDALPAAAKKSMPLCGIPIAVKDNICTKGIKTTCASRMLESFVPPYDATVVEALSAAGAVVIGKTNLDEFAMGSSNETSYFGPVRNPRDPQKIPGGSSGGSAAAVGAGAVPAALGTDTGGSIRQPSSHCATVGLKPTYGRVSRYGAVAFASSL

SEQ ID NO: 101033 - protein, 235 aa, Unknown
  Obtained from environmental sample
  DOMAIN (126)...(233): NlpC/P60 family
  misc_feature (1)..(235): Xaa is any amino acid
MAGCTPSVRYAHDPSAGKPDNRSYGGGSGRQKAAYGGVEDSLQSGWVESDGGAERHQSDWLAAALSSADQGQPKGGRREGASKAAKAAEKGEAKGAEKGEAKGAEKRASASARTKNLEQAVNTYLGIPYKHGGTTRSGFDCSGFVAAVYKEVYGIPLKRSTVDMWKEGSRVSLAAARPGDLVFFKGRAVLGPIGHVGIYMGQTRFVHASSKLGVVYANLNDTYYAKRLVGFRRMD

SEQ ID NO: 101034 - protein, 175 aa, Unknown
  Obtained from environmental sample
  misc_feature (1)..(175): Xaa is any amino acid
MQLKIEGIGKIQNSTIEMQGITVIAGKNNTGKSTYGKVLYCMFNAFFNKKEAIRNDRINNIHSLICNAFPNELGHNMNSVIKKIANEMENADKESFSEDEIKEIVHGFISEPSLFMEEKKEENEIINNLVKNIKRSIDVDDDIVQKVIISRYFRSEFEGQINHVNRPSTAGVSSL

SEQ ID NO: 101035 - protein, 260 aa, Unknown
  Obtained from environmental sample
  misc_feature (1)..(260): Xaa is any amino acid
LNGFISAFLLFPTTNFANVRQFNVQDDNGLRNVIVSTDPPYYDNIGYADLSDFFYVWLRQTLKAIYPDLFRTMLVPKAEELVATSYRFEGGKAEACKFFENGMLQAFKQINVYVCNDIPTTVYYAYKQSEDDSNDITSSTGWETMLAAIIQAGFSITGTWPMRTELSNRIISMNSNALASSIVLVCRKRSTDAPICTRRDFINALKRELKPALQKLQASNIAPVDLAQSAIGPGMGVYSRFSKVLEADGTPMSVRSALQI

SEQ ID NO: 101036 - protein, 302 aa, Unknown
  Obtained from environmental sample
  misc_feature (1)..(302): Xaa is any amino acid
ELDAVQRLLPHIKAKDINAVIKNYFGSGDMQVFIFAPDTELASLPDESRIRQMAAESQKMKIAPPASGAVEENLLSAIPERGAVVSESVDKETDALIWQLNNGARVILKSTKNKNDEIILQAMALGGTSSAALEDDVSASLAVEMTQVSGLGPWPRPELTRKLAGKQVSLSYSVSGYYRSFRGSSTSGDLKTLFEMLYLNFTDPRIDPVAVQAMMDRYKTSLALRGENPRTAFSDEITRTIYSGHPRFKPLELADLPKADIDTALAFIRKGLNPADYTFIFTGNLNTETMKDCIETYLAVIP

SEQ ID NO: 101037 - protein, 232 aa, Unknown
  Obtained from environmental sample
  DOMAIN (155)...(232): Diaminopimelate epimerase
  misc_feature (1)..(232): Xaa is any amino acid
MKFTKMHGAGNDYIYINGFSENVGAVTEDFIKRVSDRHFGIGSDGVVLILPSENSDFRMQMFNADGSEAEMCGNASRCVGKYVYDKGLTNKKTISLETKAGIKILQLNIENGVVKTVCVDMGEPILEAAEIPVVAEKSPVINQALEIDGKTHFITCVSMGNPHAVLFQKDIDNFDIEKTGPKFENNAIFPRRTNTEFAEIISPKLLKMRVWERGSGETLACRTGACATLVAA

SEQ ID NO: 101038 - protein, 265 aa, Unknown
  Obtained from environmental sample
  misc_feature (1)..(265): Xaa is any amino acid
LFSEIAKRVENYKTANPTADVIRMGIGDVTRPLPQAVVSALKTAADEQLASATFRGYGPEQGYDFLREAIVKNDYQTLGIQLDKDEVFVSDGAKSDTGNIGDILSKDNIVAVTDPVYPVYVDTNVMAGRGGNLLADGKWSNIQYLPCLPETDFEPQLPKGKIDVLYLCCPNNPTGTTLTKTQLKKWVNYALENDVLIMYDAAYKAFITESDVPHSIYEIEGAKECAIEFCSFSKTAGFTGTRCGYTVVPKELKALSENGEKVQLN

SEQ ID NO: 101039 - protein, 170 aa, Unknown
  Obtained from environmental sample
  DOMAIN (6)...(166): Elongation factor Tu GTP binding domain
  misc_feature (1)..(170): Xaa is any amino acid
MSNPLEAQRTYAIVGTGGCGKTSLAEMILFQAGVINRLGAIEDGTTSLDYEPEEIRRRGTIQPGFATYLWNKNRHFMMDIAGDGNFIGDMACLLQGVDAAVFTIDAVDGVRPLTKKLWTMTRDAALPALVFINKLDRDRADFDMAFNGLAAMLGIKPVLLYSPIREGEES

SEQ ID NO: 101040 - protein, 166 aa, Unknown
  Obtained from environmental sample
  DOMAIN (25)...(166): Domain of unknown function (DUF323)
  misc_feature (1)..(166): Xaa is any amino acid
VFAVCCMLSAASAVSAAGNTYTNGIGMEFVLIPAGSFLADQDFVRVPAGFTVPEHDGEAVRSRPGRKVIISRAFYLGKYEVTQEQWVAVMGSNPSKFKGPAHPVEHVSWEDVQEFITRLNVKEGHTRYRLPTEMEWEYAARGGSAGQYFFMANPKKAEDAEGPLDA

SEQ ID NO: 101041 - protein, 147 aa, Unknown
  Obtained from environmental sample
  misc_feature (1)..(147): Xaa is any amino acid
FDKRIIRATGDNPFVFTDAAAAINAEGSAINADYSGYAGLPYGAGVESICADALLRAGKEASSPFDREHVCPYLYAHPELFNLHRPLAPLRWQGPNIRLTVDTQEDYERAKELYAALKIEQLNRYGYVIIKTYNSLNNFNETNRARR

SEQ ID NO: 101042 - protein, 147 aa, Unknown
  Obtained from environmental sample
  misc_feature (1)..(147): Xaa is any amino acid
MEGKGIIIVVPAFKPRRGGGHLVRCMKLTADLRAAGKQAVIFVSSQTDPNLFFQSMNFNSQWRITEDDLLQTVPGTVEFVIIDRFQTPLDELLRWKNIAPVIGIDEGGVYRDNFDFLIDILSPKNFLTPPAHITSVSLLKFPDPLPV

SEQ ID NO: 101043 - protein, 126 aa, Unknown
  Obtained from environmental sample
  misc_feature (1)..(126): Xaa is any amino acid
MWYVIEHFADSQKAFTEILKVLKPGGILALSTPSFSGVSGRSSLHNYLEKNPADHFTIWSPKMCKKALSLAGFKVKKIVVSGHHPERFKFWGKLAGSKISPFYWVILLRSKIFRLGDTFEVYAVKK

SEQ ID NO: 101044 - protein, 108 aa, Unknown
  Obtained from environmental sample
  misc_feature (1)..(108): Xaa is any amino acid
MALLLGVAPFLSVLFGQVDVGTENQQTMGFSSESILDFLKYELSQFMLTHGKEQTLTFVVIAIGLLYILKNVFAYLALYTFVPIKNGVIRDVRKDLYNPILILPLSFF

SEQ ID NO: 101045 - protein, 110 aa, Unknown
  Obtained from environmental sample
  misc_feature (1)..(110): Xaa is any amino acid
MKERIKKFLFVCLILALFVSCPPDSEEPEPESAFNQTVSEYFTGNNISVGINIGNTMDANSETGWGNPRVNQALFNGIKESGFNIVRIPVTWKTHMGAAPNYKLEEKWLE

SEQ ID NO: 101046 - protein, 300 aa, Unknown
  Obtained from environmental sample
  misc_feature (1)..(300): Xaa is any amino acid
RDLIDRLLKAQNGKSYISGKEIDLRIEQIEVDHIIALDRNGSDDESNWAVVIASENSSKGKKDLQLMKYIYDFRIHRDKYIKSKRDFTFGDALSEYYPKRFTFIYEENNNYIKIKYKNTNNETVELDYPIIIDPLNKDVKSFVGMVPLEIINHDASVNPRSIVDLELMIEEFYNNNPQLFPSLAILERSDDHNFTIMAFDGQHKAAAQLYLHSQYLFLRVFINVEKAKIKKTNLRAHTVVAQIHFPKLIEDKVGHDLFAIEFEPFISENNKSQTSEQLFIKQDDIKDEYKGLFNNFYKYN

SEQ ID NO: 101047 - protein, 283 aa, Unknown
  Obtained from environmental sample
  DOMAIN (157)...(173): KWG Leptospira
  misc_feature (1)..(283): Xaa is any amino acid
FAKVGLGGKWGFVDETGKEIVPLKYDNVGYFRDGVAAVSLGNKWSIIDMRTGKEIVPPKYDYIGKYDNIDWTSFMGDFAKFELEGKWGFVDKTGKEIVPPKYDYINWTSFMGDFAMVMLENKWGIIDMRTWKEIVPPKYDRIDDFRDGLTKVWLRGKQGFIDKTGKEVVPPKYDGVGDFREGWAMVSLGNKFGFIDKTGKEVVPPKYDRIGDFRDGLAAVMLGRKWGFINKTGKEVVPPKYDKVGDFSEGLAAGRLGEKWGVINKTRREVVPPKYDEVGGSTR

SEQ ID NO: 101048 - protein, 300 aa, Unknown
  Obtained from environmental sample
  misc_feature (1)..(300): Xaa is any amino acid
LPNVLFYAVCDVFPNVENADEIQHTIAEQFYKADSVLNGNYDYSYFDYKAMEGKRNNIPYQQDAAGGHGYVLYAAYQKFGDERYLQGAKSAIQALDNQTESRFYEILLPMGCYAAARLNAEHGTNYDLAKMLDWVFDGCKNPKARYQWGVVVGKWGDYDVSGLQGNIGGYAFFMNSMKMAIPLVPMVKYAPQYARAIGKWMLNNVNAARLFYPDQIDEQHQFLAAEKDYTNGIIAYEGLAYSDIYNTPQFKGIHPIALGDGPNWNKNNPKESMFSLYSTSPVGILGAMTDTTDVSGILRI

SEQ ID NO: 101049 - protein, 273 aa, Unknown
  Obtained from environmental sample
  misc_feature (1)..(273): Xaa is any amino acid
MQASSSFNRRISNSGDGLASKASGGVSEGGSVVRYALFMNPARKIYNADGTFADLPSDYYGNSVYNVFFGDSYNPVGLAKMTDMTDRINALIASGNINVKLPKGISIRGVVGTDYSDARTRRFNNTWGSTNRIGAINSLNEGSNKVNTVTANATLNQDIAVRKHSINWMLGTELINTHGQSIGGSDGDLGGIHYLGNGKMDDRASSGEWDSRLVSFFGAFNYNYDRRYYISALVREDGSSRFSAGNRWGTFYSVSASWNMENEAFMQSQKAIN

SEQ ID NO: 101050 - protein, 235 aa, Unknown
  Obtained from environmental sample
  misc_feature (1)..(235): Xaa is any amino acid
MTVSAAFRLFLLIVIIIAFFMLIPIIKNIKLNVKTAETEQRQEQPEITAPSSEGKNSNSKEQAANSKEREKREQGTEGKKPQTEKPAVSVQPSKAPEQKEPEKKPQAEKPAPPAQPSTSPAQSSAPAAQPPAPVSPPPVKPAETSGSIYLIQESNNMLVKVNRNLNVNTPLTDSINALLAGPSPAEIMRGIESFVPEGSRLLSARVDGNTAYLDFNQEFRYNTRGSEGCAAQKNK

SEQ ID NO: 101051 - protein, 221 aa, Unknown
  Obtained from environmental sample
  misc_feature (1)..(221): Xaa is any amino acid
MGKTDIKNKPLPVGKSFFDKLIEEDCYYVDKTLFIKDLIDMRAEAVLCTRPRRFGKTLNQTMLKCFFEDTTPIGGKDTRTLFRGLKIEEAGEQYMEHQGKYPVIYLSFKDTKFSNFDEASKMLMECIAQEFERHAYVSEKVLNDYDRDLFKKLSARAGSVCDYYTSLKFLSACLENYHGKKAVILIDEYDVPLENSWVCGFYDNMINFIRPLLSSALKDNQ

SEQ ID NO: 101052 - protein, 288 aa, Unknown
  Obtained from environmental sample
  DOMAIN (88)...(288): SRP54-type protein, GTPase domain
  misc_feature (1)..(288): Xaa is any amino acid
MKFTEKIKNFFAGRSSVSQEFFDDLADLLVEGDIGAQEAYDTVELLRQICKKDKISLPEEARERLALLLEKTLVDGIAADRLPPPLGPQTVILLLGVNGVGKTTTAAKIASIYKGQGQRPVLAAADTFRAAAIDQLKIHGERLGLRVVAHQQGGDPAAVVFDAIEACGLAINGGGGVVIADTAGRMHTKSALVEELRKIDRIVESKASGARYVKYLVLDATTGRNALAQAEIFSEAVSPRAAILTKYDSTAKGGVVFSLASVLHMPVAYLCTGEQYGDIRAFDPHDFA

SEQ ID NO: 101053 - protein, 128 aa, Unknown
  Obtained from environmental sample
  misc_feature (1)..(128): Xaa is any amino acid
MVFRRCKYMLRKSAYAPEDAAQDVFVNLLTCKEKAGDMAKIKNVEGLLWTIATNVCLNKLKAKKWKPGEDLTVNEEEMYPAVGDDYKRVDSNLLLEAILEEESEEVRSYVYMHYNDGMGYVEIAKTVG

SEQ ID NO: 101054 - protein, 299 aa, Unknown
  Obtained from environmental sample
  misc_feature (1)..(299): Xaa is any amino acid
SWRFHDDYAHSIQQTTDGGYIVAGYSASNDGDVSGNHGGADYWIVKLNANGDNQWQRSLGGSGEERTLSFQHIQQTTDGGYIVAGHSESNNGDVSGNHGGFDYWIVKLNANGAIQWERSLGGSGDDAAYSIQQTTDGGYIIAGGSESNNGDVSGNHGGWDYWIIKLNANGDIAWQRSFGGSSDDEAYFIRQTTDGGYIIAGRSTSNDGDVSGNHGSGDYWIVKLKHHDKPEYNTLSQISQFYNANGAFSVSSPQTITIYQGDGKSVNVTLYGSDTLYDVAAKINNAIASGLWAALYVHS

SEQ ID NO: 101055 - protein, 293 aa, Unknown
  Obtained from environmental sample
  DOMAIN (132)...(293): E1-E2 ATPase
  misc_feature (1)..(293): Xaa is any amino acid
MIDEDRLRKEREIKILWTKFIVAAVLGFPLLYIAMAPMITWINLPFPYGLSPMNFPLVYALLQLTLVIPIITAGNRFYTIGFKNLLRRSPNMDSLIAVGTTAAVVYSVYNLLQIAGGNFHAVESLYFETAGVIIALILLGKSLEAVSKGRTSEAIKKLMGLVPKTAIIIFNGEEKEIPIDEVVLGDIILVKPGAKIPVDGIVTEGQSAVDESMLTGESMPVDKKPGDPVYGATINSNGVIRFKAEKVGNETALAQIIKLVEDAQGSKAPIAQMADIVSGYFVPVVCAIALSPV

SEQ ID NO: 101056 - protein, 282 aa, Unknown
  Obtained from environmental sample
  DOMAIN (26)...(281): Aldehyde oxidase and xanthine dehydrogenase, molybdopterin binding domain
  misc_feature (1)..(282): Xaa is any amino acid
VSASRALRAIKVEYEEYPPILSPQEAMKEGASVLHEECPKNILKHTTMEDGDFEAAIKEEGLLCFEGVFDTPIVQHCHIETATSWAYMESGRIVIVASTQIPHIIRRITAQALGIPWGNVRVIKPYIGGGFGNKQDSLYEPLNAFMCTQVGGRLVKLELSREEVFSSTRVRHSEKIYLKTWVRPNGRLVARSYTAYSNQGAYGSHGHGIAAKGTNVFRQLYRDEKARKVDIYTVYTNTAAAGAMRGYGTPQAVFAVESHIEDIARSLNMDPLEFRFLNVMPV

SEQ ID NO: 101057 - protein, 279 aa, Unknown
  Obtained from environmental sample
  DOMAIN (98)...(127): The GLUG motif
  misc_feature (1)..(279): Xaa is any amino acid
GIVGYQDGGGNQVIENCSAEGDVSANSSSSYAYAGGIVGNQGGGGNQVIENCSAEGDVSATGSSAYAGGIVGNQSGSGRQVIENCSAEGDVSANSGSSSASAGGIVGNQGGGGNQVIENCSAEGDVSANSSSSYAYAGGIVGNQGGGGNQVIENCSAEGDVSANSGSSYTYAGGIAGNQNGGGTVGIKIMNCHFIGNLISPPSSSQSYAGGILGYWFISSIDNGYRCNFTDCYVAATFNGFNLKGNLLGYSDNDPQYLVITGCYYDITLANFDDDSGYG

SEQ ID NO: 101058 - protein, 258 aa, Unknown
  Obtained from environmental sample
  misc_feature (1)..(258): Xaa is any amino acid
MVFGGTNRELLQLNEETLWSGYKTDWNNRDAAALLPEIRELIRQERYSRADLLCKKMMGPFTQAYLPLGDLELIFSHTGEARQYRRELDLEEGRCCVSYQIGSVDYTREVFCSYPDQVLVIRLKASQPGAISFEARLSSPLQSESLAAGNELILRGHAPEKDAPSYYETEEPVRYSKPEETRALSFAGRLRVCAQGTEAQVNKKGEALLVQNADDVVLYFDATTSYYLGELSNAERRATIDAQLRKHLDIISASGYET

SEQ ID NO: 101059 - protein, 263 aa, Unknown
  Obtained from environmental sample
  misc_feature (1)..(263): Xaa is any amino acid
MKRAMPENKGRRKPYHLSFVIFYLLFFICSAAWARGKIETVTAEGTETWRHNFDIKGRRKGTYNFIVNAEDHAGNESVSGPFNIKIDPKSGLPAVKVIFPENGSVIRQNINVLGTAKGYFDIETVSVRLDGGETFEAEGKEYWSRMIEFNGTTDSKGKSRGITDGKHALYIRATDINGNGGPELRIDFIYDTSPPKVDILSHKIGDTISSNVNIKGRASDANGIRSVELSEDGKNYTRMDLRNLRGLFKSLKRNNTIDFEIPV

SEQ ID NO: 101060 - protein, 266 aa, Unknown
  Obtained from environmental sample
  DOMAIN (107)...(266): Binding-protein-dependent transport system inner membrane component
  misc_feature (1)..(266): Xaa is any amino acid
MVFAEFIAPYSPITSFPEQTYHPPNIHFYQGKFQAQEHRLINTVNWKYVRIRDHYSHIELFGKGEPYKLWGLIPMERHLFVSTDYPVFLMGTDTLGRDLFSRIIYGSRISLTIGFIATAISMLLAIFFGGFAGYFGGGTDWAVMRLAEFLMLIPGLYLILFLRSLLSSRMDTGQSYMMITLILSLVGWPGSARTLRGMTHAIKREEFIQNAQLEMIPSGVIIFRHIIPQIASLLIVSIALSVPGFIMTETLLSYLGLGIADPAVSW

SEQ ID NO: 101061 - protein, 255 aa, Unknown
  Obtained from environmental sample
  DOMAIN (5)...(254): Beta galactosidase small chain
  misc_feature (1)..(255): Xaa is any amino acid
LCGPGNTDSAQADEASIETFAKSFGPSLFRVPVQNDGLKTYIHLREERAAAFYYYNKAMYPWLDLDLLHLRLLEGKTENITCEGRPANRYSALLAAGEGAVDTSRKLGRYTCVIISGSPLVMDICFDLDPALPELPRVGISVKVPAFYNSISWLGAGNEESYPDRLAAAFLGEYNSSPVELEVPYIVPQENGNRSGVRRLTLSGDSVPQGKLRSLSIRPDRPLNFSVSRCTQENLFNALHTIDLIDVSEGGHGYY

SEQ ID NO: 101062 - protein, 198 aa, Unknown
  Obtained from environmental sample
  misc_feature (1)..(198): Xaa is any amino acid
MRKFYNYPWLIVAAIAIVTVFFGFQLPRAQLDNNNLRFVPKDDPALETSRRIDDMFGSSFFILIGLQRPYGTVFDREFLDRIQAYSAVVEVMPHVKEVTSLVSADYICSKGDAIVVEKLVGDNFSGTNEEIAELKRRLLSWDMYERALFSDDFTATQILIPLTITTEEAGLSAVTEVFMQIRDIARESFADYATVYVT

SEQ ID NO: 101063 - protein, 280 aa, Unknown
  Obtained from environmental sample
  misc_feature (1)..(280): Xaa is any amino acid
FAVDDIVVFLLAPQAEEKSLPSAQRIKDIFREVENTELSVRQEVFVSSELLDVTPSAGRIVSQEIDSETGAQKIVLSNGVNVILKETANRNNEIVFYAMAKGGTVNAKQDTIFSVSLASEMINVSGLGPYSRVELIRKLTGKQVSFSFWISNYYRGFQGSSAAQDLKTFFEMLYLFFTMPSADERAIAAMLDHYRTSLAHVEDDPQGVFSRELSRIVSGNHPLFTPLELDDMNKISIEQAFDFVGNCINPADYTFIFTGNINTETMLEYLAVYLASIPNA

SEQ ID NO: 101064 - protein, 267 aa, Unknown
  Obtained from environmental sample
  DOMAIN (1)...(267): tRNA synthetases class I (W and Y)
  misc_feature (1)..(267): Xaa is any amino acid
MNEGPVTFYEGTDPTGGSLHIGHMVPYFAFRHLRDAGHKGIALLGGGTARIGDPSGKSEMRKMLSYEQLDANTESIRAQLDRFVSFDGKTAWPVNNKDWLADLNYIDFLRDIGSHFSVNRMLSFEAYKMRMETGLSFIEFNYQLLQSYDFLELYRRHGCRLQIGGDDQWGNIVAGVELIRRVEGSEVFGITFPLVTTADGKKMGKTEKGALFLDPRITSPYDFFQYWRNVQDADIRRFLLMFTFLPIGECDALTAPGKNPNEAKERL

SEQ ID NO: 101065 - protein, 282 aa, Unknown
  Obtained from environmental sample
  DOMAIN (161)...(282): Malic enzyme, NAD binding domain
  misc_feature (1)..(282): Xaa is any amino acid
MPTREESLSYHFAGRPGKIEVAATKPCRTQADLSLAYTPGVAEPCREIAKDPWTAYKYTARGNLVAVVTDGTAVLGLGDIGPLAGKPVMEGKGVLFKRFADIDVFDIELNTKTPDEFIRIVVAMEPTFGGINLEDIKAPECFYIEEELKKRMGIPVFHDDQHGTAIISGAALINAAKLQDKALSEMKIIFSGAGAAAISCAYLYVRLGVKMENITLVDSKGVIYKGRAEGMNKYKAPFAVDTPKRTLAEAMEGADAFAGLSAAGLVTPEMVKSMADRPIVFA

SEQ ID NO: 101066 - protein, 281 aa, Unknown
  Obtained from environmental sample
  DOMAIN (56)...(279): Penicillin binding protein transpeptidase domain
  misc_feature (1)..(281): Xaa is any amino acid
SAIASDLRGRPLANGAQYYVPSSAGHDLYLNIDAKIQRNVQDVVARALADQNAKNVSCLVMDVATNGIVASAAAPFYDLNNQPRDNVQTLMDQIKNLPLINVLEPGSTFKILTLAAAIEEGVTNESDHFTCNGSRTIAGENVKCWRSRGHGTQTLGEAVMNSCNCCFMDLAMRLGVERFYKYLDKFGIGKKTGVDSKAESSGLVLNKKIVRDVDLARIGFGQAIAVSPVQFLSFVNAVVGDGILRTPRLVNHVDGLPTAVTAPEKGRILSQNTCDRVRQLL

SEQ ID NO: 101067 - protein, 281 aa, Unknown
  Obtained from environmental sample
  DOMAIN (1)...(149): tRNA synthetase class II core domain (G, H, P, S and T)
  misc_feature (1)..(281): Xaa is any amino acid
VEGFAKECAVVTHHRLQAGPDGKLVPAGELEEPLIVRPTSETIIGAMFAKWTQSYRDLPLLINQWANVVRWEMRTRLFLRTAEFLWQEGHTAHSTPKEAQEETMKMLDVYGKFAEEYMAMPVIKGEKTESERFPGAVSTYCIEAMMQDRKALQAGTSHFLGQNFSKASDIKFLDAEGKDEYAWTTSWGVSTRLIGGLIMTHGDDDGLIVPPRLAPSHIVVLPIVHDDSSANDVFEYCDKLAAELGNVRYDDRRLAVEVDKREGRGGDKVWSWIKKGVPIYL

SEQ ID NO: 101068 - protein, 39 aa, Unknown
  Obtained from environmental sample
  misc_feature (1)..(39): Xaa is any amino acid
MIGAIIGDIVGSRFEWNNIKTKDFELLTRACEATDGQRQ

SEQ ID NO: 101069 - protein, 293 aa, Unknown
  Obtained from environmental sample
  DOMAIN (1)...(292): UvrD/REP helicase
  misc_feature (1)..(293): Xaa is any amino acid
FREIYSRYEERMAQIGNVDFGDLIKKPVEILRNQPEVAQRFRDRFKVIMVDEYQDANVAQFQLLKELCSPQTYICVVGDDDQSIYRFRGAEVKNILEFPDRFSGTDIIRLERNYRSTSPILKAASSVVDCNRGRLGKVLRAEKGNGMLPVLAYLPDQDEEAAFCAEKIESSVKKRETAWSDWAVLYRTNAQSLGFETLFLRRGIPYRVVGSLKFYEREEIKDALALLSFMVNPRDEVNFRRVVNKPARGVGSVTIDKIVDSSDQYSGDLLETGRNIELSCKARSGLNDFIKVI

SEQ ID NO: 101070 - protein, 207 aa, Unknown
  Obtained from environmental sample
  DOMAIN (35)...(73): WD domain, G-beta repeat
  misc_feature (1)..(207): Xaa is any amino acid
MRMIDCRPRRPAFTAAALVVILGCAAAAFPPAARAQATRTFTSHTDRVRSVSFSPDGTRALSASDDKTVKLWDVSTGQVIRTFTGHTDAVTSVSFSPDGARALSGSNDKTVRLWDVAEGQAIRTFAGHTHWVHSVSFSPDGTQALSGSRDKTVKLWDTATGWAIKTFTGHKSSVNSVGFSPDGLQLVSGSADKTIKLWDAATGAEIR

SEQ ID NO: 101071 - protein, 290 aa, Unknown
  Obtained from environmental sample
  DOMAIN (221)...(286): Shikimate dehydrogenase substrate binding domain
  misc_feature (1)..(290): Xaa is any amino acid
NKYRKYADMAELRVDCLDPNERFLIRRFPEQTDMPVILAIRRDVDGGFFNSGEGSRINLMAQGLAYADADRRRNFAYLDIEEDLNVPSLEEAARTFGTRIIRSCHNFKDSSMDLLGKIRAMRHSEDEIIKIAMMANTTRDVYDLLRAGKKCQGQEKILIAMGPLGVYSRILAEQFGSFLSYASAYSEPDIPIVARGQLDILELAKLYRFRSITTNTKVYGVTGFPPNVARNLNFFNMIFGLEEIDAVYAPFPMDSIDTFMELAKELNVKGISVTVPYKEAVMPFLEGQIL

SEQ ID NO: 101072 - protein, 254 aa, Unknown
  Obtained from environmental sample
  misc_feature (1)..(254): Xaa is any amino acid
MVFTRECFISQPAGLLALRFSAASLDGKPLSGKISFRADLDRGVFSDRKGDTEDGAFLSRDSDIPFIAMIKAVQKGGTQRRRGGFITVEQADEALLFLDIRTGFREADYTAACAANINRAACAGDIAQTWEKLLAEHIAEYASWYKRLKLEIEGGENAARYFNFCRYLLISCSRPDTLPSHLQGIWNPHLDPPWGCDFTININTQMNYWPACMCNLAETEEPLFDLLERMYPNGKKTAETMYGCRGFVAHHNTD

SEQ ID NO: 101073 - protein, 242 aa, Unknown
  Obtained from environmental sample
  misc_feature (1)..(242): Xaa is any amino acid
MKDILLAVINAKWIHPSLALRLLKANLGPSLENNCDIIEFALRQPLSEKTGPILAARPKILGLSVSIWNHLATLELLKKLREAWAVEAVQQQGQRPVIILGGPEVSYLPQEAEIFQFADYCIRGEGEIAFRELCETILSDNEVLINNEFHTVNVTEIKSGYRLYTDEDLSKKLVYVESSRGCPFGCEFCQSAYSNSVASTSGVREFPREFTLELFLSEMDDLIRRGAKTFKFLDRTFNLNIE

SEQ ID NO: 101074 - protein, 70 aa, Unknown
  Obtained from environmental sample
  misc_feature (1)..(70): Xaa is any amino acid
MKRYCIKCRTGKLEYFDIISESDNGYMIKITRLSDGSEKTVEEAMSKSLFDMCMKTGYIFKLEDEATSAA

SEQ ID NO: 101075 - protein, 206 aa, Unknown
  Obtained from environmental sample
  misc_feature (1)..(206): Xaa is any amino acid
YAVGWLTGIIAKIKANEEFGRGERKTKAGKFEKVDVKEVVKKDLVLRYDSKTGYLGTAVAGEAVAEVSSFDRILTVRQNGIWSVTDVPEKAFVGNDAWWIGEADKDALGGMVFTIIYKEAKSGYPCIKRCVIEGWIMNKEYSLVPEGAKVLLVDTRLKFAFTLHYKPKPRLKVLKEAFKAQDYNVRGLKAGGIRLAAKEIEKVEKK

SEQ ID NO: 101076 - protein, 279 aa, Unknown
  Obtained from environmental sample
  misc_feature (1)..(279): Xaa is any amino acid
MPLNFLLNQGENLIEIRNETSQTLWLGDLTAYSDRESAPYKARGTETVAEYIRVGAADYMKKNSPHVSVNSYSSPHITPYDRLNKKIGTIRSTRAGNEIFYQFNAPYDGNYAITFHCQTAVADFSSFVSVKIDGEFPFAEAASYPLPPSINAWRNQTLTDAEGKPFLVSLSRGDHTLSIKTEFSPLSRYERSLRLLIDHINQFVIEVKKVTGKDIDRNRTWRLTQYIPEVNDYLDAYDIIFRDIIHGLSQYSPRGEDSSVITPLVQAVSYLEKLRKKPD

SEQ ID NO: 101077 - protein, 219 aa, Unknown
  Obtained from environmental sample
  misc_feature (1)..(219): Xaa is any amino acid
MRIKKVYVNSKIKTASDGIYALGLLLPYGLLFSVFIAIPIAVAIYLSFTYFDLVQAPVFAGLYNYVTLLTQDTVFFKNVLPNTIKFALVVGPGGYVISFLMAWMLAQIQPVPRTILALLLYMPSLAGGVFIGVLWRTIFSGNQSGYVNAILLNWNLIQTPIQFLQSPKYLLNIMILVSLWSAMGIGFLAMLAGILNINEELYEAAYIDGLRNRFQEIIY

SEQ ID NO: 101078 - protein, 79 aa, Unknown
  Obtained from environmental sample
  DOMAIN (5)...(42): MerR family regulatory protein
  misc_feature (1)..(79): Xaa is any amino acid
MNLTTISEISRELNISTRTLRYYEQIGLIDSVKKEDYAYRTYDETTIARLRQILVLRKLRIPLKQIDLILQSENTAAIM

SEQ ID NO: 101079 - protein, 281 aa, Unknown
  Obtained from environmental sample
  DOMAIN (1)...(190): KDPG and KHG aldolase
  misc_feature (1)..(281): Xaa is any amino acid
IAHSCRVIKIDDVEKAVPLVKALAAGGIPCAEITFRTAQGEEAIRRIAAEAPETLVGAGTVLTTDQVDRAVNAGAQFIVSPGFNSKVVVHCQRKGIPVTPGCANPSDIEQALEFGLEVVKFFPAEQAGGLEYIKAVSAPYPGLKFIPTGGISAANIARYIAFDKVLACGSSWMVGADLINAGEFEKITALSREAVQAMLGFSVAHIGINAGKDEAAAQAAALFHSLFGFAPKEGNNSTFAGDALELVKTTAPGTHGHIAIATNSIARAIAHLEHCGTAFDH

SEQ ID NO: 101080 - protein, 160 aa, Unknown
  Obtained from environmental sample
  misc_feature (1)..(160): Xaa is any amino acid
MSLFQNSVSFGKGSEKNVQKDIFFVKSKVDFSKTEVLEKSHLISHFISKTVPFKFRGIDFNFDLSQGLFSSAGIDAGTQLLLKIFSRILDEDKAAGKPPPRRLLDSGCGCGVIGICAAKAITTNDVRIRCQDRDELARLLTLHNAVQNGIPPAVLEACTE

SEQ ID NO: 101081 - protein, 277 aa, Unknown
  Obtained from environmental sample
  DOMAIN (147)...(180): Tetratricopeptide repeat
  misc_feature (1)..(277): Xaa is any amino acid
MMFLDEDWSDLPELLEKVQELLELGLIDDARDMLDKYRPVFQDYWEYHYLYSRVYAEQNMPREAVSCLIAGLRIERDNVDCLLGLFYAFSMMNMVRRGGRFLLEAHQLYPDNEPVYSALIWYYTEINEPETAVACFERAKALNSNNPDTYRNGGLAFDRLGRVEEAAACYKTALQISPNFDEVRDLYADHLIFTGKTNEAIALFEEALRESPKNVRHISKLIYCLSQYGDFNRAEALAVHAIALYPNSPTGYLDLAYVYLNTGRINEASENADQAIS

SEQ ID NO: 101082 - protein, 267 aa, Unknown
  Obtained from environmental sample
  misc_feature (1)..(267): Xaa is any amino acid
LSFSDLCKIGVDAEYPLDGNYRLLKDIDASGSRELNDGAGFLPIGERKVLVQGGFGVPDLVDSTKAFRGVFDGWGYKITGLYINRTVSDEAAGAGINVGLFGFTLGAEIKNVTVAADSVVGYGCVGVLVGRQLGGVIENSVAMGAVVGQTAVGGLVGMLDDGGAVKVCYSTANVGGGGESATDVGGLVGSSDATVSESYSIGKVSVGGGDRVGGLVGSLTNRAKVLSCYSMASVSGGEATAVGGLAGKVDDGGEVRRSYSAGAVSGG

SEQ ID NO: 101083 - protein, 75 aa, Unknown
  Obtained from environmental sample
  misc_feature (1)..(75): Xaa is any amino acid
MVKKLIQHGNSVALVIDKPILDVLNITIETSFELSTDGKNLILSPQLESEQENTVIQSLDKVNKKYGTVLKRLGE

SEQ ID NO: 101084 - protein, 266 aa, Unknown
  Obtained from environmental sample
  misc_feature (1)..(266): Xaa is any amino acid
ENIALADLWTITTITGTTLRWTSADIPITAGGYTFDTGPIIKRGNTRITSTLEVDTLNVTIETGESVSLGGIPFAHAAANGALDGATVKLERAFMQTWGTVAATVHLFEGRVAGIDPKHSEVVLQVKSLLELLNVQWPRNLYQPGCNHQLYGNGCGLSRSSYQVNGTATGGTATRINWNTGKAAGYYDQGVIVFTSGRNLGARRTVKKSDASGLDIALPLPYPPLSGESFTVAPGCDKTHTTCNSKFGNLTRYRGFPWVPPPETAR

SEQ ID NO: 101085 - protein, 296 aa, Unknown
  Obtained from environmental sample
  misc_feature (1)..(296): Xaa is any amino acid
ILQYIIDEYEKNPSGPVAAWCANEKTAMEAALGVSFAGKRAIVTMKHVGLNIASDPFINAALLKIKGGLVVAVADDPGMHSSQNEQDSRFYANFAMVPCLEPRSQQEAYDMVREAFDVSERFNVPVLLRLVTRLAHARAGVVIDKKKTQNKFSKTNDKSGWLLLPAFARKNFAKLLDKQPLFEEWTYKHPANKLTGKKSDLGIITAGLGCNYYEENLDDFIAMRKKQGKKPHLHLHIGAYPLPSKKIKQLCDNVEEIIIIEEGYNLIARKIFGVTGGAFTHVKTLIQCGELDPDNV

SEQ ID NO: 101086 - protein, 261 aa, Unknown
  Obtained from environmental sample
  DOMAIN (124)...(260): Glycosyltransferase family 28 C-terminal domain
  misc_feature (1)..(261): Xaa is any amino acid
LHNVLDVFKIAAGFFAARKILKREGASFLFSKGGFVSVPPCAAARLMKIPVFTHESDFSPGIATRLNTRFAERVFIPYKESVAFFTGKAAKKVSVSGNPVRTEFAAADPAKGRAFLGLGGGERILLVLGGSLGSREINNLVRACLKRLTEFFTVVHQTGENNIEDALKENARYKPHAYFRDEIPHIIAAADLVLCRSGAGTIWECKFLSKPMVLIPFRGSATRGDQVENARLFEEAGAAVCFIPDPTEDSSAESASAEKLS

SEQ ID NO: 101087 - protein, 281 aa, Unknown
  Obtained from environmental sample
  DOMAIN (5)...(281): Domain of unknown function DUF20
  misc_feature (1)..(281): Xaa is any amino acid
YVFGAILVFLFLAVCRLFAPFFSVLLWSVLLYIIIGPLHKRLIRGIDFSTIKGKILRHFWAVVFTLGTVAIVLIPISLLVTIFFRQIAELGRSARDLLNERPEYLRELFIKISDVVRDVSAGQVAINADTIELQIKMFITNELQRMFFWGSNIVRNIGGFSINILIMTFSMFFFYIDGPYLSRLALRSIPIKSEYISTLTAKFMDITRNLFFGYIMVALLQSVVAYIIFTVFHIKGSLVLSALTFLLVFFPLVGATLVYIPLGILKIAGGNIVRGIIFLIV

SEQ ID NO: 101088 - protein, 133 aa, Unknown
  Obtained from environmental sample
  DOMAIN (2)...(133): Adenylosuccinate synthetase
  misc_feature (1)..(133): Xaa is any amino acid
MLTAVVGINWGDEGKGRMVDLLSEGYEVICRYQGGNNAGHTVINDRGKFILNLLPSGILREGTVNVMGNGMVVDLEHLCGEIKALKEKGINVTPDTLKVSDKAFICLPYHKTQDILEEERLGDKKYGSTRRGI

SEQ ID NO: 101089 - protein, 134 aa, Unknown
  Obtained from environmental sample
  misc_feature (1)..(134): Xaa is any amino acid
AILSLYINISGGLNVYPKVIEKHLNEELPFMATENILMYCVKKGGDRQALHERIRLHSVEAAKKIKLQGGDNDLIVRILADSSFGMMEKEMNNLLSAEQFTGRAKEQTEEFLSEVKNILDKNKELLGVDVKITV

SEQ ID NO: 101090 - protein, 268 aa, Unknown
  Obtained from environmental sample
  misc_feature (1)..(268): Xaa is any amino acid
MKKIFVVIFLLISIMFSFAQESEPDASEAVPSGTVSSEDVSTKVASTEAVSDEENEEKVTESEVETPKLQILPEDAKKPKKELPFLYRLGIALAIVAAQIFFIWLIWFLFKRLDKKIEDAENEKIKPLYINKFRILTANHVVQVIQGFFKLLKYLITAIQLFLTIPIIFTLFAATKNIASKLFGYILNPIKRILIGVVDFIPDLITIIIIITITRYVIKALKYFTIQIGRGKLKIPGFFPDWAAPTLRILQVLLWAFTIAVIYPYLPG

SEQ ID NO: 101091 - protein, 270 aa, Unknown
  Obtained from environmental sample
  DOMAIN (33)...(269): Bacterial extracellular solute-binding proteins, family 5 Middle
  misc_feature (1)..(270): Xaa is any amino acid
MELDFRKSLFASEAQIYTAIYEGLFSYHPLSLEPVPALAEKWSLSENKLQWTFTLRRNARFSNGDPIRAEDFRAAWISVLAPGTDDYPYSSFFDVIEGARDYRNGILKDPNKIGIQALDQRTLVVQLSSPASFFPAMLCHHSFSPIHPSMLNKTEWSPYKAGKNWTPPVSNGPFQIVSMNTESIVMQKSEQYWDSKRVALNKLIIKFTETPEKAAHLWNSGEARWISGDVELDSLTDRSGIQVNVMFATHYYYIRSSERPWDDHRVRRAM

SEQ ID NO: 101092 - protein, 67 aa, Unknown
  Obtained from environmental sample
  misc_feature (1)..(67): Xaa is any amino acid
VGVRDMDVSYVNPFVTSTVETLKKMLNIDSKAGKLSLKDSSVHSYDVTGVIGLTGEAAGSICLSFPQ

SEQ ID NO: 101093 - protein, 227 aa, Unknown
  Obtained from environmental sample
  DOMAIN (29)...(227): FHIPEP family
  misc_feature (1)..(227): Xaa is any amino acid
MMTFLNKALSFLTRLGSRADLTVPVFVLLAIVVMILPMPAWGIDILIVTNITISLLILLLGMYVKKPQEFGTYPSILLIITLFRLAVNIATTRRILLYGGEAGTDAAGHMVRSFGQFVVGGSYVIGLVVFLILIAIQFLVINHGAGRIAEVTARFTLDALPGKQMAIDADLNAGYIDEMEARRRRQDLQEEANFYGAMDGARQFTQRDAIASFLILAVNIVAGIVLG

SEQ ID NO: 101094 - protein, 61 aa, Unknown
  Obtained from environmental sample
  misc_feature (1)..(61): Xaa is any amino acid
VDSEPLFGTGLGLDSIDALELGVALKKKFGVKFSAENADNKKHFASVDALAAYIQTAGGAA

SEQ ID NO: 101095 - protein, 82 aa, Unknown
  Obtained from environmental sample
  DOMAIN (8)...(75): Phosphopantetheine attachment site
  misc_feature (1)..(82): Xaa is any amino acid
MTREEVFLKIQDILTKEFEIEKDAVVPEAKLYQDLELDSIDAVDLLVKMKGFIQGKIDPESFKKAVTVQDVVDILYPLIQKT

SEQ ID NO: 101096 - protein, 272 aa, Unknown
  Obtained from environmental sample
  DOMAIN (15)...(272): Transposase, Mutator family
  misc_feature (1)..(272): Xaa is any amino acid
VPRYKLSPEERAAEKARREQLTSLMSQFNITGVSDFRGLFKEMVGVFLENGLEGEIEDELGYSKYDYRDKETDNSRNGHTRKSLKTSNGELELKVPRDRNGDFEPQLVKKHQSSITHEIEEKILSMYAKGMTQSDIEGHIREIYGLECSESTISRVTDKVLPVVREWQGRPLDPVYAVVFMDAIHFHVRSEGSVIKKAVYIAIGLSTSGKKDVLGMWVGENESAKFWATVMNSLKNRGVQDILIACVDGLTGFTNAIESVYPKTEIQSAYPP

SEQ ID NO: 101097 - protein, 281 aa, Unknown
  Obtained from environmental sample
  misc_feature (1)..(281): Xaa is any amino acid
LNPKDADVFYGYGTALYELAKIKQDVSLFEIASEKFDEATQLDQNYTNAFYNWGLVITDLIEITQNKSLLKDACEKFDKATQLDPNYANAFYNLGLVITDLIEITQNKSLLKDACEKFDKATQLDPKDATALCFWGYAILKFAETKYDESLLKEACEKFEKATQLDPNYVNAFYNWGYAISKMIEITQRDDFQKDLENFESASVQINDPDIYLIKGDIYFALGKNEKTKEYFEKSKKDILDILTFLDKKDREQIIIETKILHLLLNSDNNDGIFFRKTTKN

SEQ ID NO: 101098 - protein, 43 aa, Unknown
  Obtained from environmental sample
  misc_feature (1)..(43): Xaa is any amino acid
GTAKDELEKTALAMPNVKKWLEGQTITKVITVPDKLVNVVVKN

SEQ ID NO: 101099 - protein, 284 aa, Unknown
  Obtained from environmental sample
  DOMAIN (147)...(272): Response regulator receiver domain
  misc_feature (1)..(284): Xaa is any amino acid
NVPPFIIGDELRLSQVITNLLTNAIKFSHENGKIELNAEKSEEHDGEINLKIEVADNGIGISQERQKEIFTLYKRAKKDVSRKIRGTGLGLAISKRIVELMQGKIWIESEINKGSKFIFTIKVKEGIGSKDMVSDGLEENNLDLKKYSILIVDDVEINREILLAFLEKTGIAIDYAENGKEAVFKYTEHPDKYNLILMDIHMPEMEGDEATRVIRAAESETKSYGGDTRRQIPIIAMTADVFQEDIDKCLSAGMNDHIAKPIITDELHAKLKKHLYKMEELYNE

SEQ ID NO: 101100 - protein, 288 aa, Unknown
  Obtained from environmental sample
  DOMAIN (160)...(226): Elongation factor Tu domain 2
  misc_feature (1)..(288): Xaa is any amino acid
MQIPIGLEDKLKGVIDLVKMKGFLFEGANGQDIKEIEIPEDLKAQAAEYRTKMIESVADFNDHIMELALEGKDVPEELLVETIRKATIDLKITPVFMGSAYKNVGIQKLLDGVTDYLPNPTEVKNIALNIDKNEEPTEMESKDDKPLVCYAFKLTDDRYGQLTYVRIYQGMLKKGLSITNISTGKKVNVGRLVRMHADQMEDITEAGAGDIVALFGIDCTTGTTFTDGTLHMNMTSMHVPNPVIELVIEAKNRDDLANLSKALNRFTKEDPTFQVYVDKESGQTVIKG

SEQ ID NO: 101101 - protein, 57 aa, Unknown
  Obtained from environmental sample
  misc_feature (1)..(57): Xaa is any amino acid
MGRGRSGVLLPQVPVEQGWNLDEYLDYICVKSGLPQGAYKAPDTQLYTFTAIVFGED

SEQ ID NO: 101102 - protein, 172 aa, Unknown
  Obtained from environmental sample
  misc_feature (1)..(172): Xaa is any amino acid
FDDFALSGCSSLTNITIPDSIIRTGTDFSYDAKSPPTYRIPWFNNQPDGVIYVGKVASKYKGTMPANTSITLRNGTKTIAKYAFLECTGLTSITIPDSVNRIEESAFSGCSNLTSITFQGTIPSSLGYNERGLQGLAYEGDLYEKFYATDKDKGTPGTYTRPDGKSKTWTRQ

SEQ ID NO: 101103 - protein, 278 aa, Unknown
  Obtained from environmental sample
  DOMAIN (116)...(141): The GLUG motif
  misc_feature (1)..(278): Xaa is any amino acid
IKLGNDIALNNTENWENWGTSPPDNSWSRIGASDAKAFQGTFDGNGKVISGLYYYTSGSADRNGLFGVLGSNGIVKNLGVIDSYISCGGSTWWVGGIVGDNYGTIRNSYSSAWLTAPQYVGGLVGRNYGTISNSYSTGKVNGTGNIGGLVGQNNYSTSNGTGKIENSYSTGLVTRTSGTNITFGGLVGAPFITNSIITNSYYDKTTSGQTDTGKGEGKTTEEMKLQATFVAWDFANIWSISSAINNGYPELKWSACSVGGGAWENGTCKMPGVFPAQI

SEQ ID NO: 101104 - protein, 290 aa, Unknown
  Obtained from environmental sample
  misc_feature (1)..(290): Xaa is any amino acid
ERFKPVVRYFGPYELKAGEKKTERFTLPPYIGALRIMVLAASSSGENGGRSNRAYGTAEKQVKVSSDLMVFGTLPRVVSPGDEAVIPVSVALYRPGARNVEVSMAVQGAALQGRGNQTVSFTETGEKTIPFTIKVPDTPGIVRFTITASSPSLKNARHSTDLEVRSTAIPVTTAQLKLLSPNETWTGNLVYPGMNGTNTAVLELSRLPPINLDGRLGFLINYPHGCVEQTTSTAFPQLYLDKVLELNAARINEIRTNVRAGIERLATFQVPDGGFAYWPGGESADTGPAV

SEQ ID NO: 101105 - protein, 286 aa, Unknown
  Obtained from environmental sample
  DOMAIN (1)...(173): Alpha-2-macroglobulin family N-terminal region
  misc_feature (1)..(286): Xaa is any amino acid
DIAGGRPASGLRGLIYGERGVWRPGDDIFLTFLLSDPEKTLPANHPVSFELEDPRGRISGQRTFTSSVDGFYPIAASTSANAPTGDWTARVKVGGSVFSRNLKIETVIPNRLKIDLDFGRKDYFERAQSVGLEAAWLYGAPAPNLDADIFASFSEKTGVFPGNGDYVFSDPSRSVSGERQKVWEGKLDGEGRARFTFDVDPGTAPGKLNARFITRVFEPSGAFSTEQMTKEFSPYSRYVGLRLPRGDATRNMLLTDVNHRADILLLDPDGKLVSGRAELDCAVYKL

SEQ ID NO: 101106 - protein, 283 aa, Unknown
  Obtained from environmental sample
  DOMAIN (90)...(283): Nucleoside diphosphate kinase
  misc_feature (1)..(283): Xaa is any amino acid
SCRKLSDICDALFPEKHSVEALSGETIRDTYADYIVDRDDPEKIIHFEPAILTPRHEELANESMAAFVKYFKNSSNVADNRSYQDSSKRERTLVILKPDNWSFASSRPGTIIDMFSRTGLRIAGIKIFSFSLKQALDFYGPVESTLKERLAPVYGQKAREILERNFEFPLSDDTGRILGESFGREYAQEQFYKIVTFMSGRRPDTCPAGEEDKPGNVKCMILVYEGENAIKKIRDVLGPTDPLKAPGGTVRREFGSNVMVNTAHASDSVESYEREKDIVKSEE

SEQ ID NO: 101107 - protein, 250 aa, Unknown
  Obtained from environmental sample
  misc_feature (1)..(250): Xaa is any amino acid
MGANWLLRTFNWNRIEETEGQWDFDHYDKYVDTAKAAGKKIIGILAYDVPWIHKDGKTRKYIPPDKTYLYLNYVRRTAEHFKGRVDAWCIWNEPNFGFWKGNRDEFLSLARQAADALREIDSEVILLGGAFNRGIFGLPIAYIKGLFESGVMDKADAVAFHPYELNPNRSTRLFLEFRAQAAKYGFEDRIWITEAGYPTGGWYPTAVSEKKFPAYIVKTFVGLAINGAKKILWYQLFDPQNRSKKNSENY

SEQ ID NO: 101108 - protein, 246 aa, Unknown
  Obtained from environmental sample
  misc_feature (1)..(246): Xaa is any amino acid
SCAEPMYSPTWGFFLDLPEGYEFVDGDARDRFSFQGPSGAVFDIAVYYGRYPGIREMVSDVNKRIGNTGDVDFFRYNNRQAAIIKLTFNKNEGLAFAVELDKNNGQQPILIALAYGPIGQKELELFHISALDSICPSQAERRYPGPLIDYSFPRGGQKKVVIQPGNVNVTIRENDAEASQVYIEREFQLLQNYVNSQKWQEAWIRYYRSIYRDSYDRVANAAELIVRSWGGPSSGGDAEKRAFAQR

SEQ ID NO: 101109 - protein, 202 aa, Unknown
  Obtained from environmental sample
  misc_feature (1)..(202): Xaa is any amino acid
MKFIGKALFPIILFTGMAGIGHAQVDRGELQNNLAPITFYNNEGPQARIETREQIRQIGAVLGQAIKAKQARSGASNRYFVIHSVTAPDGNKLDADIFGLGSNAGVDHIRNLRTIIQGYLQEAYGYSASDAALLAEYITIYNAVYRGNWSYFSGRFKKPVIDNLNRDSAGLAVRYQEWPGKTLMLIPLNAGGLSSINTSTIS

SEQ ID NO: 101110 - protein, 77 aa, Unknown
  Obtained from environmental sample
  DOMAIN (13)...(67): Helix-turn-helix
  misc_feature (1)..(77): Xaa is any amino acid
MGKKRSDAFGPVLRKLRLEKKLTQDQLSEMVGVASPYISMLESGHKYPNLEMIFKLAEALGVRPGGMLDAMEERLKV

SEQ ID NO: 101111 - protein, 184 aa, Unknown
  Obtained from environmental sample
  misc_feature (1)..(184): Xaa is any amino acid
ITLTEEDAIDDESGHKGLYSPRSHIVWEEYLYDRLNSELHHCASTEKDLTLLMLEFKEKITNYQFKDAAREAASLFTSRDLLFEKGEQGITVIMPGVDLESGLDKAQKFQLRIKEKLFSNNKDDCAYIGLSSRAGRLMNAERMMMETNEALNKAKADRDTSIIAFKSDLEKYRKFIVSQNPARS

SEQ ID NO: 101112 - protein, 272 aa, Unknown
  Obtained from environmental sample
  DOMAIN (1)...(270): tRNA synthetases class I (R)
  misc_feature (1)..(272): Xaa is any amino acid
MLAYKEQGQGKTPESEGVKSDRFVGDWYVSFSKALKQETDELISSGADKDKAEAQTQSMKKAQELLRNWEAGDGETVDLWKKMNSWAIEGMKKTYNRTGVSFDKYYFESETYMLGKDEVLKGLEKGIFFRQEDGSVAVDLSEEKLDKKILLRSDGTSIYITQDFGTAINRHKDWQFDKMIYVVGSEQNYHFKVLFILLEKLGYSWAKNLHHLSYGMVNLPEGKMKSREGTVVDADDLLDSLRDMALTEIREKGREEVVGDPWKGGKNRPWRA

SEQ ID NO: 101113 - protein, 260 aa, Unknown
  Obtained from environmental sample
  misc_feature (1)..(260): Xaa is any amino acid
MPDRGQTQAIVFSGNQPGKLRGFPVSGSRDIFDVVFQAGGRDVSLKFMRNLQNNFELFSAVIDTRPYTLHSDTELVLLAISSNIIAGQNEVQAYAQAGRSGLVEGRGSLGKNQIIAYIKRQNPSVNDNLLNKLIDTYIEEAAFENINHDIAIAQMLYATSFLKGSKYVSSHNYGGLLELPSWNGKFANMTEGVRAHIQHIKGYASTTMNNRQIVDPRYYLLINLKYLGTVKTFDQLYTRWAANPAGYKQNIEKILDGLYR

SEQ ID NO: 101114 - protein, 255 aa, Unknown
  Obtained from environmental sample
  DOMAIN (193)...(255): Biotin and Thiamin Synthesis associated domain
  misc_feature (1)..(255): Xaa is any amino acid
MTLRRFGKTIQLYLPLYLSNDCTNSCVYCGFNQKNHIERKTLTEREIFEEIMEIKKLGSFEHILLVTGESPKNAGFEYIKNAVKLCHEHFSAVSIEVQPLGMEEYAELAKCGVSAVYVYQETYREETYKQHHPGGKKSIFEYRLHCPDRIGIAGVRKIGIGALLGLENWRADSFFTAVHLSYLQETYWQSKFSISFPRLRPFEGQTFELHTPSDRELIQLMCAYRMCFPDVEISLSTRESANFKDRAMMLGLTTM

SEQ ID NO: 101115 - protein, 269 aa, Unknown
  Obtained from environmental sample
  DOMAIN (103)...(264): NAD-dependent glycerol-3-phosphate dehydrogenase C-terminus
  misc_feature (1)..(269): Xaa is any amino acid
FLLDTLKKVLTVNSIREGETYIAVLTKGFLPTANGPKLIVETMEDYLPGFYQHSLVYISGPSHAEEVSRGKITGLIAASENAKNSIRFRDLLKSPGLFVYSSLDVHGVQAAAASKNVIAIAFGMLDAIKSIGGSDMFGDGTESLLLAAGLNEIQLLGKALGATHPETFTSIAGIGDLDVTCRSIYGRNRRFGREIIEKNILEPYKDLDDLLTRIGEISYLPEGVAAAKYIRVLAEKHKLKMPVSIGLSRILNRELDPYEFVKDFFEDLR

SEQ ID NO: 101116 - protein, 83 aa, Unknown
  Obtained from environmental sample
  misc_feature (1)..(83): Xaa is any amino acid
MKITDLAAALNMKIVCPGKTDDTEVTCGYTSDLLSDVMANADDGCALITIQAHVNTVAVSALAGVAAVIICNNHSIPSDMRRR

SEQ ID NO: 101117 - protein, 147 aa, Unknown
  Obtained from environmental sample
  misc_feature (1)..(147): Xaa is any amino acid
DAAAAGMTLRADKIDAFRTRFNEAVKSKLSEKDLAPQVTADAEVPIEALTPKLLRIIKQMEPFGPGNMRPVLLTRGLKHRYPPKVVGQKHLKMSLTDGKAVIDAIAFGMGERLREVSAAKSIDVAFALEDNEWNGKVSLQMNVRGIF

SEQ ID NO: 101118 - protein, 299 aa, Unknown
  Obtained from environmental sample
  misc_feature (1)..(299): Xaa is any amino acid
GQRFILGCKIGQRSNRSSLKKGGKQGLTVEVNSFWKCAPKVDLDYKYPYATSAEVVEYEQKGFSTNFFGGPYPPISDADDDDSLVKSYSTAVEWMNEARLGYVSKTELDAKLNQLRNSDNRQQFKKLMLQNPFTQQYNVSISNVTNRSTNVLSLMYEGYDKSYKNNHQNKYTANFRSSNKIFSWLDAHFSGSFGTTKNTGALGMTDDTGALDASTRSDAETLFALPAPYDMLLNDDGTRKAIPRNYYFPNMKRHVPMDKFPYSDWTYNPLDEMEARDFSKTALNTRVQGGLTFKLLEGL

SEQ ID NO: 101119 - protein, 283 aa, Unknown
  Obtained from environmental sample
  misc_feature (1)..(283): Xaa is any amino acid
VSWNNPTGGTITATAVIAPSSTPAPYTNGTASLAAGDVVTLTLAVSSTHQISSSGLTWTNAVKDGSDQTKATVTIANPATDVSVTVSGLEQKVSGPTVTSVTVSPAVVVIDLGTTPTTKTQQFTATVVGTGNPAATVNWGGSGGTGISINSSTGLLTATGSATGTFTITATSTVTGTVSGTATVTIMTTGGTAGTLSLSNRAAPKVGETLTATANITTPTTGTVGYVWRTGTATGDTIAKSGSTYTVKWADLNKTISVVVTKGTGTNPLTISTATTVSADPLV

SEQ ID NO: 101120 - protein, 88 aa, Unknown
  Obtained from environmental sample
  DOMAIN (1)...(84): PTS HPr component phosphorylation site
  misc_feature (1)..(88): Xaa is any amino acid
MTEKVITVSNRAGIHARPSALLVQTTKNFSSNIYIEKGMDRINAKSIMGIITLGASYGTELRIIAEGEDEVAAVEALVKLFESQFEEE

SEQ ID NO: 101121 - protein, 286 aa, Unknown
  Obtained from environmental sample
  DOMAIN (72)...(213): Pyridine nucleotide-disulphide oxidoreductase
  misc_feature (1)..(286): Xaa is any amino acid
GRKISLIKGTAAFTGPKTFNVTDAVGTAAEYGAENIIIASGSEPSSIPVPGANLPQVLNSDAVLSLTAIPDSAVIIGGGVIGIEFATLFNSLGKKITVIEMLPRILNGMDQSICDAMTKTLSKRGVEIHTGAKLLEIKAASNGTVCAYEENGAKKEASGSLIIMAVGRRPVSKNLNLAAAGVAENKGYITVNEKMATNVPGIYAIGDVTGKVLLAHVASAQGMVAAAAIAGKKAAMNYDIIPACVYTNPEIACVGKTEAQVKEAGLPYKTGNFPATGNGRSLIMNA

SEQ ID NO: 101122 - protein, 157 aa, Unknown
  Obtained from environmental sample
  DOMAIN (103)...(139): e3 binding domain
  misc_feature (1)..(157): Xaa is any amino acid
MAERIIMPKQGLQMTEGTVVEWLVQEGGEVVEGQPLFTIETDKLTITIDALVSGTLLKIVAGPGDTVPITALIAVVGKPGEDISAILAEAPAASPAPGERVFISPRAKTLVEERGLDWRSLRGSGPDGMIVERDVLAAQECRSGVKATPLAAKVASI

SEQ ID NO: 101123 - protein, 284 aa, Unknown
  Obtained from environmental sample
  DOMAIN (1)...(258): Peptidase M16C associated
  misc_feature (1)..(284): Xaa is any amino acid
KFLEEKEAALAARLEEIEKSLGSEDKEAILKKTADLQTAQEKEDAPEALAAIPHLSRSDLSPEIETVKREYANVSGAPALFHPIFTNGISYVDLAFPLDLFSPEDYLWFPFFSRAVVSMGLPGMDYGEVSSLLARIAGGFHAMLHSSPQTPGTSREEKLPTGNLDLRSREWIIFRIKALDEKIGASLELALRLITEADFSDLRRIRDLVLEMKNDLDSGLAPAGHIFASGFSSRLFSRSRLIDELWCGLDQLLFVHKLSNLDVSETSAKLKSIQAALSGGGVLI

SEQ ID NO: 101124 - protein, 57 aa, Unknown
  Obtained from environmental sample
  misc_feature (1)..(57): Xaa is any amino acid
ADAKLYDDLELDSIDAVDLLVKMKEFVPLKIEPEQFKKARTVQNVVDILYPLIEASL

SEQ ID NO: 101125 - protein, 287 aa, Unknown
  Obtained from environmental sample
  misc_feature (1)..(287): Xaa is any amino acid
PADATLVITAASTGSLEATGSAGISDGNNVTGGTITINGGTVTAIGDGSAGINSNLVTINGGTVTATGNGAGAYNNGGPGINGSTVTINGGTVTATGSNNNAGISGSTVIINGGTVIANGGSSGGPGISGSYDSTVTINGGTVTATGNGGGAGIGDSPGRTGGTVIISGGTVTATGSDGGAGIGGGAGPRQGGGYASGGGGGAVTISGGTVTTTSIGKGSYNYSGSGGTLDISGNAVLFTGSVPNTLIEGDNVNNAIVFIDSTAAWYGSIAGTLYGNVTLAQDITFA

SEQ ID NO: 101126 - protein, 142 aa, Unknown
  Obtained from environmental sample
  DOMAIN (35)...(142): Alcohol dehydrogenase GroES-like domain
  misc_feature (1)..(142): Xaa is any amino acid
MMVGGLERFSNDRIAIVDAPGRVSLHPKTPQPLASDEVRIEVIYSGICGSDLHTFRGKHPSVQLPSTIGHEAVGRVCEVGANVKHLSVGQRVVIEPLKVCGICDACVRGEYSYCDDMKLQYRVGNGFLCKYFQTLARFVYPI

SEQ ID NO: 101127 - protein, 66 aa, Unknown
  Obtained from environmental sample
  misc_feature (1)..(66): Xaa is any amino acid
MDQILILDFGSQTTQLIGRRIRDLGVYTEIVSGDAQLNPQILNDNVKGIILSGSPESVNGSGAAPD

SEQ ID NO: 101128 - protein, 206 aa, Unknown
  Obtained from environmental sample
  misc_feature (1)..(206): Xaa is any amino acid
MKEKYNVFIITISTFLFWNLYEVLSKCFVITEDHILLKALFACFFSYATYKTFVFLIFLLGNRIDLIKKLMLGNEYLNGTWIGYYRGVSGNIRYIIEIFEQNLDSIKIRGKSYNEDMELNSTWDSEAVNVDGKSGTLTYTYLTSGRSNDSDSLGMAKFLFNRKISREIPKSMDGFSTDLIYGERITSYEEKIVDNLSVNQLLIKAK

SEQ ID NO: 101129 - protein, 56 aa, Unknown
  Obtained from environmental sample
  DOMAIN (2)...(25): 4Fe-4S binding domain
  misc_feature (1)..(56): Xaa is any amino acid
MAYAISSECISCGVCASECPVSCISEGDGTYKIDSAACTSCGACADVCPVSAPAEA

SEQ ID NO: 101130 - protein, 212 aa, Unknown
  Obtained from environmental sample
  DOMAIN (34)...(195): MatE
  misc_feature (1)..(212): Xaa is any amino acid
VSDIDIQTRIKGMFAPRDMTEGKPWKSLLTFTGPMLIGNVVQQLYNTVDAIVVGKYVGDNALAAIGSTTPIFFLLLALFIGISAGAGVMVSQYFGAKLREELSSTIGTCLTVLTIAGIFIMILAPLGTKQLLKLLNTPDEILDWAGIYINILLWGVLGVGYYNILTGILRGLGDSYSPLLYLIFASFLNIALDLWFVPDFGLGLGVAGAAIA

SEQ ID NO: 101131 - protein, 89 aa, Unknown
  Obtained from environmental sample
  DOMAIN (4)...(79): Bacterial export proteins, family 3
  misc_feature (1)..(89): Xaa is any amino acid
MSIGEVTVILRQGVLQVLMIASPLLISALVIGLIVAILQATTSIQEQTLVFVPKVVVILLVLAILGGWMFTQLRQYTTELFGRIPDMAR

SEQ ID NO: 101132 - protein, 278 aa, Unknown
  Obtained from environmental sample
  DOMAIN (132)...(212): B12 binding domain
  misc_feature (1)..(278): Xaa is any amino acid
KIIAAAAEYGIPKKDIIVDALTMTISTGADNARVTLDTVEYVRHELGVHTVLGVSNVSFGLPGRENINAVFFTLAMKAGLSAGIVNPMNSAIMDAVYAYQALNGSDENCAGYIAHFSNQSHAAVSTAKDAAREVSLQDTIIRGLKEQAAKMASAMCADTPPMEIINAHLIPALDKAGKDYETQKTFLPQLLMSAESAKAAFEAIALKMAKQGGVQRKRGKVVVATVKGDVHDIGKNIVKTLLENYNFQVIDLGKKRRAALLFCGQCGRKSNACGLKRV

SEQ ID NO: 101133 - protein, 173 aa, Unknown
  Obtained from environmental sample
  DOMAIN (21)...(162): Protein of unknown function DUF88
  misc_feature (1)..(173): Xaa is any amino acid
MPLLPFSGIPVGDHQPSEMRQAKLAVLIDADNTQPAIIEGLLDEVAKYGIASVKRIYGDWTSTNLRSWKERLLEYAIQPIQQFSYTTGKNATDSAMIIDAMDLLYSEKLDGFCIVSSDSDFTRLAARLRESGRIVYGFGEKKTPRAFVSVCDKFIYTEILKEAQEETDDEDSS

SEQ ID NO: 101134 - protein, 214 aa, Unknown
  Obtained from environmental sample
  DOMAIN (23)...(213): RNA polymerase Rpb3/Rpb11 dimerisation domain
  misc_feature (1)..(214): Xaa is any amino acid
MARKNLMKGIKRPKSNFEQVEHNSSYGKFVAAPFEPGFGTTIGNTLRRLLLSSIQGYAITAVKIVSYDSNGTAHNVSSEFETIPNIVEDTIEVINSLKQIRLKLPDDVEQDILLYEWSGKREITSDDFCRPGQVDVLSTGQHIMTLMDDAKIEFEIQIDLGRGYVPSEVNERYVEVIGTIPLDAIFSPVKKVKFAVEPTRSGQRSDYDKLVLEV

SEQ ID NO: 101135 - protein, 302 aa, Unknown
  Obtained from environmental sample
  misc_feature (1)..(302): Xaa is any amino acid
YITLSESINVTIKNDGTETLTINTVDITITGADSAAFIKTTSPGSSVSAGGKTSFFIECKPLKVGVNQAVLTIPTNDDSRNPVTVFLKITGLKGTPVPELRQNTTIITNNTLTPLDFETVEIGSSKTLTFTIKNTGTIALELTGETIVLSSNAAFSISNQPSNKIINPGNSVSFVIRYTPVLEGEVTGNITIADNTDIGQFVFPVKGTGYVKKPQITVKQNTTTINPNGEYNFDTVATDVTKTITFTIGNSGDANLTFETVNGNRVNLENNSAGHFSRSQTVSSVVAPDGMTTFTVSFHPQS

SEQ ID NO: 101136 - protein, 123 aa, Unknown
  Obtained from environmental sample
  misc_feature (1)..(123): Xaa is any amino acid
MTETQTNRKHKDSVFTLLFSEKSNLLELYSAISGKSYPESTKIEIVTLSDVLCMKQLNDIAFVLEDRLIVLIEHQSTINNNMPLRMLQYLSAEYDMIIDRKSLYKQGRIMLPTPEFIVLYNGD

SEQ ID NO: 101137 - protein, 270 aa, Unknown
  Obtained from environmental sample
  DOMAIN (13)...(269): Histidinol dehydrogenase
  misc_feature (1)..(270): Xaa is any amino acid
MHIPIIKATSNEVLKICSRSAAQNGEIEKLVKEILLNVKNDGLKAAVLYAKKYDGLKKNNLRISEAEIKQAAAKIDSGLKNALKQAIENVKVFHQRQREKSWAFDGRDGELLGQKIRPLKRVGLYVPGGAGVYPSTLIMNAVPALVARVKELVVVSPIKEGLHSSVAYVLLELGIKEVYHIGGAQAIGLLAYGAKGIAPVDKIVGPGNVFAAFAKKEVFGTVDIDMIAGPSEIAVLADSTANPQWVAADMLSQAEHGSGYEASVCVTESL

SEQ ID NO: 101138 - protein, 296 aa, Unknown
  Obtained from environmental sample
  misc_feature (1)..(296): Xaa is any amino acid
KDSRYTDAAKAYLFITENYPQDSMAVNAIFAAGGTYDSIPAKDSVAIRANKKLAAQTYEIAFRKFPKHEKTPALLYNACLAWDDARETKEAIRCNRDLVREYPKSSYALDAAYSIPVAYENAKDWKNAIIEYENFIKNYQSDKEKLINAYTKTGRAYLEAKDTAKAMNAFKNTIATYDKFGVQLKNSDPAFAAEAAFMLGEFEKASMNPLVIKGNDKAKLDMIKKLMGILQGATKHYAKSAEYASEKWTFRAKNRIAELFVVVAAKVRGQELDVRDKKGKVDKEKLFVERIQVVQQ

SEQ ID NO: 101139 - protein, 277 aa, Unknown
  Obtained from environmental sample
  DOMAIN (20)...(53): Tetratricopeptide repeat
  misc_feature (1)..(277): Xaa is any amino acid
DIDRAIADYDKAIQLNPNNKIAYNNRGNAYKDKGDFENAIADYNKALQIDPTYTLALNNRDNVVAARGASTQAQTQPQVRLVSTTPDTVTEDDFEIRQNTDNTLTITNYKGTAKNLVIPDTLYGLKVTVIGGRAFQKKGLISVVIPDTVISIENGSPDDYSGVFTGTGAFLNNEELIKVILGKGLKTIGDYAFSCTDNGWRNTIKGQLTEIIIPDSVTRIGKDAFSCAGLTKVTFGTELQTIEEYAFYRNQITEINFPSSLTEIGREAFYSNKIQKL

SEQ ID NO: 101140 - protein, 302 aa, Unknown
  Obtained from environmental sample
  misc_feature (1)..(302): Xaa is any amino acid
IASTADIANTYEYWAIYNNSTETVTISGGTVSATKGRAIQNTSTGKIVVSGTATITSEGTVIRSQSGIVEITGGTVSATGNSGYAVENIGTGTMTISGGTISGGGVSNSGTGTVTINGGTVTATDYSDAVSNSGTGTVTINGGTFTSVFNSGTMTINGGTFTSASNMGNGATMTINNGTFTQVSNSDTGTAKITGGTVSATGDYNQAVYNNGPGKIIVSGTATITSQCNYNGGGTIDNGGSGTIEITGGTVNNTATGIYAFAILNASTGTVLLLGGTVTGGTGSTPYYTSPNGTIMNGRNNI

SEQ ID NO: 101141 - protein, 269 aa, Unknown
  Obtained from environmental sample
  DOMAIN (1)...(164): Glycosyl transferase family 2
  misc_feature (1)..(269): Xaa is any amino acid
VIPVYNEEESLPELMKGICAVLDPMGKRYEAVFVDDGSSDKSFDVVKTLHETYGGGKVKAIRFSRNSGKSAALSAGIAQAAGNIIITMDADLQDDPAAIPEMLAKLEEGWDVVSGWKKVRHDPFGKTFPSKIWNAMTSMAAGLKLHDFNCGFKAYRCGAAKSLEIYGDRHRYLPALAHWDGCRVTEIVVPHHARKFGKSKYGAWRMFNGAMDMITLLFLKRYMKSPMHFFGILGMLLIASGVGVLGYFGVMWAVTGVMRIRPLTLLAVG

SEQ ID NO: 101142 - protein, 279 aa, Unknown
  Obtained from environmental sample
  misc_feature (1)..(279): Xaa is any amino acid
GGLSAETAANCTLGNFYSSNGSSRPITDADPPNAPRGYIISTDDADIGKLIAIHPAAKIGGKEYTTLNEAIADAADGSAGSPTEIVILRNIAAPERGMADAAGYVIPQGKHIKLITESGESHTITASSGNYTLFSITHTDSSLTLGPVGGGGTLTLSGGSTAAESERRCVYVNGSGGSFTMNDGVIITGFNKSAAFTGGVHVDSYGAFTMNGGEISANTSLNYGGGVFVNSTATFTMNDGKIKDNSVHNGSSSGGGVYISNNGTFTMIDGEISRNNAGY

SEQ ID NO: 101143 - protein, 298 aa, Unknown
  Obtained from environmental sample
  misc_feature (1)..(298): Xaa is any amino acid
FDGWNSQSNGNGTNYTEGQSVKNLTATAWAVVTLYAKWNINSYTVTYDADGGSPALSSPSTVTYGAVITQPPGMSKTGYTFDKWYTNSAKTVPATFPITVTGNVSLYAKWNPISYTVTYVANAADATGATADSSHTYDSDNALSANGYSRAGYTFDGWNSQSNGSGTNYTEGQSVKNLTATAWAVVTLYAKWSINRYAVSYDSDGGSPAPPSPITADYGSTILPPEDMAKTGYTFDKWYANSAKTVPAAFPITVTGNVSLYAKWNPISYTVAYDKNNADAGGEMFNSSHIYGEPKALN

SEQ ID NO: 101144 - protein, 283 aa, Unknown
  Obtained from environmental sample
  misc_feature (1)..(283): Xaa is any amino acid
YHRAEVFRQWLLKPYRTLEGGEILREDPLTESARVLPNCADVAKEVFKILDLEGKLRDLPEFKELRRRIRALQKNIESTASRYAGNEEKRRMLQSEIPSQRDGRMVLAVKANFRGRIKGIVHEVSSSGQTVFIEPEEVVEMNNELLIENRRLDAEIRRVFRELTGRISSRREDLGTFYRGIVFLETIRAKARYGYENKLIFSENMETEGEGKLVLRQARHPLLGRKAVPLDLFMGEGIRTVIITGPNTGGKTVALKTLGLLALMNQFGLALPAGEGTLLPVFD

SEQ ID NO: 101145 - protein, 293 aa, Unknown
  Obtained from environmental sample
  misc_feature (1)..(293): Xaa is any amino acid
LRLPFHPSHVYEIETLINNAWDIAHDLMKNGGKETGFDLRRHMRGGQITFSQGIIAGCSGGLYENVCAAASILDGVTRGSEGAFPLSVYPASLPVCYALTENGVASRLTRTGAVLKTAFCGPCFGAGDIPSHNGLSIRHTTRNFPYREGSKPDSGQNAFVALADARSIAATAKNGGILTAAPEMPEDSHKRYFFEKTIYDNSVYDGRGRRDPGAALALGPGIRDWPPLPPLPEDLLLAVAAFITDPVTTTDELIPSGETSSYRSNPLALAEFTLSRKDSGYVARAKAAVSGSL

SEQ ID NO: 101146 - protein, 285 aa, Unknown
  Obtained from environmental sample
  DOMAIN (47)...(190): ATPase family associated with various cellular activities (AAA)
  misc_feature (1)..(285): Xaa is any amino acid
EPAPEVFDLKSAQAILEEDHYGLKDVKTRIVEYLAVRKLRKDTKGSIVCLVGPPGVGKTSVGRSIARALGKQFFRFSVGGMRDEAEIKGHRRTYIGAMPGKIIQGLKIVKTRDPVFMIDEIDKMGSSFQGDPASALLEVLDPEQNYAFRDHYLDLPFDISHVFFIVTANTLDTIPVPLMDRMEIIQLPGYIDIEKLEIAQRYLLPKSLEKNGLKKNQVKYTKDSLLHIANAYAREAGVRNFEKNLDKIHRKLAKQIVEAQETAPPAEENSDKKRGKARQNRKFSM

SEQ ID NO: 101147 - protein, 277 aa, Unknown
  Obtained from environmental sample
  DOMAIN (117)...(246): Protein of unknown function (DUF1215)
  misc_feature (1)..(277): Xaa is any amino acid
MLAAVCSLATQPPADLSLSQVSAKSASSVKGQVASAVNKLRGGAASIAYDIRDPFAEARAVSFAHVEAFLKNGALDVYRGGLSKLAEKIRVCGDRGSYVPFIARGSDGPLRECRIALDRAYVSMPPPVSASLKRVLEPPLEVAAATLTKAIAEEIEESWSAEVVNPYVNKLTRRYPFDKKGNDAAWSDFEEFFKPQSGLLWVYCDKNLSGVLERTSRGWEGVGRLLPLPLSLNDEMLRALGGAERIADSFFKKDGSPQRHEMIFRPIKSSSGEVVLL

SEQ ID NO: 101148 - protein, 148 aa, Unknown
  Obtained from environmental sample
  misc_feature (1)..(148): Xaa is any amino acid
MPVRVLERLGAKQFAARKKGLESGGINFCSFLSILGLALEAALLLGEILFALMTASLLFPTAVDYLQENNQIAEVFIFAAFCFNYILVESLYGCMGFGLYINSRVEVEGWDLELLFKKFAKLQIVKQQSEARQNDAQLIKIALLVCLF

SEQ ID NO: 101149 - protein, 192 aa, Unknown
  Obtained from environmental sample
  DOMAIN (11)...(152): RNA pseudouridylate synthase
  misc_feature (1)..(192): Xaa is any amino acid
MKLDIVYEDSSCIVINKPAGLAAQGGKGIGISLDSVLTQSRQQRPLLVHRLDKDTSGLILVAKNKTAAAAYSRLLGADTAGHRAVVKRYMAICKGRPDRDEGIIRLDLEIRGTKKSSETRYHIIEAFESGFSLLELELGTGRMHQIRRHLALTGNPVLGDDKYGDFNLNHLLRKTMKLNKLLLYASRLIIPK

SEQ ID NO: 101150 - protein, 179 aa, Unknown
  Obtained from environmental sample
  misc_feature (1)..(179): Xaa is any amino acid
GDCDAAHRKGCEFLLSKCGAEPVIADIVISTNGGYPLDQNIYQAVKGMTAAEATVKKGGVIIHLSESGDGHGAPEFHKTFVEEKNLDRMLDTFMKTPRENTRPDQWESQILLRILKRAHVIYISDAPDEIIRDFQMTPARSINDALKMAEEMLGNPGASITVIPDGVSVVIKQIFSRDS

SEQ ID NO: 101151 - protein, 74 aa, Unknown
  Obtained from environmental sample
  misc_feature (1)..(74): Xaa is any amino acid
MSMEDWKKNEKNCLGELYAITQKAGGKISGEHGIGIKRREFYKDLVSPVELELMKKLKQAWDPNNIMNPGKIFV

SEQ ID NO: 101152 - protein, 241 aa, Unknown
  Obtained from environmental sample
  misc_feature (1)..(241): Xaa is any amino acid
MCEKSGAMYGSAIYGDESPIAAFATVPGNSALSVIRCSGKRAVEMAALIFSAPEKLKNTQGNTVIHGWITTNGEKIDEVLVSVFRAPKSYTGEDSLDISCHGGAVAGKAVMNALKSTGFRGALPGEFTFRAFINGKLDLTRSESVMELVAAKTDTGRRHAIMRLSGSLYTEIDEIKKLIVQVLSGAEIYLDYSEDEISASFDTSASEEIAGRLPNKETALLVLERLKKLQVSWQIERVYQE

SEQ ID NO: 101153 - protein, 297 aa, Unknown
  Obtained from environmental sample
  DOMAIN (169)...(243): ACT domain
  misc_feature (1)..(297): Xaa is any amino acid
DARDLIKTNSNYGKAEVLKKETEENIKAYFKNVKKTVQVVTGFIGSTMDGYTTTVGRDGSDLSAAVFAAALGAKKLEIWTDVDGMLTADPDQVKNAFLIDEISYNEAIEISHFGARVIFPPSVKPALEKNIPIYIRNTFNPKGSGTKITAKASPGKYPIRGISSINQVALIRIQGTGMVGVAGFSARVFGSLARKGINVMLISQSSSEYSICFAVLPEDIHGADAALKEEFANEIHSCSIENPIIEKDLSIIAVVGSAMKNTTGISGKFFHALGRNGINIVAIAQGSSEINISAVIS

SEQ ID NO: 101154 - protein, 110 aa, Unknown
  Obtained from environmental sample
  DOMAIN (10)...(110): Putative transcriptional regulators (Ypuh-like)
  misc_feature (1)..(110): Xaa is any amino acid
VTQNIEKETALVEAILYMEGDPLDEGAIARICGLSKETVTSALDNLRERYANIDSGLELSQVGGGLQISVKREYWDNLKERYGRKNEGKISRAAMETLAIVAYSQPITRA

SEQ ID NO: 101155 - protein, 73 aa, Unknown
  Obtained from environmental sample
  misc_feature (1)..(73): Xaa is any amino acid
MKSEKLVILVDDNPAHLRIGKNVLSEKYTVATAPSAAKLFSLLENNHPVVILLDIDMPEMNGYEAIAVLKSKP

SEQ ID NO: 101156 - protein, 292 aa, Unknown
  Obtained from environmental sample
  misc_feature (1)..(292): Xaa is any amino acid
SATLNVLEKLSSPLYELGFLVAPLGKSKNKVEFINNQTGIYPVLTNWKLNTEQQLGLKTKINNHVTELSRAFSAKERLAQARAELDSLTVEIKYFEQYCSETHISSPERKYSRNLTAKKVMLLWQECNELLDKNCISLFLFKFKCVFVYKILGKRIFKCDLLTIVTFFQRIFYHLKQSELRNEITMLENKLTVMNSNGKMIELTKWSMNYLRAKLFERYGDKTERIRFSEDDLWKNTSKVVKEYPVILSTTFSSCSSLKGEKYDYLIMDEASQVDVVTGALALSCAKNAVIV

SEQ ID NO: 101157 - protein, 287 aa, Unknown
  Obtained from environmental sample
  DOMAIN (1)...(287): Hsp90 protein
  misc_feature (1)..(287): Xaa is any amino acid
KVFISDDIKELLPDYFRFVRGIVDSNDLPLNVSREILQDNPVIGKIRKALTAKIFSELKKLAQNDKEKYSAFWKELGAIIKEGLYNDYENRDELLEVLRFNSSGGDSADYLTSIDEYISRMNEKQKDIYYLIGDTYEAVRKSPHMELFREKNIEVIYFTDPIDEFIVPALFNVKGKELKSIADAKLDLGELDGEDKAAKEESEKKLKKFIGRVKNILGDRVADVNVTTRLKESPARIVAGEGGVGSQMEKMMRAMGQVIPESKKNLEINAQHCVIDKLNSLYEKDPK

SEQ ID NO: 101158 - protein, 305 aa, Unknown
  Obtained from environmental sample
  misc_feature (1)..(305): Xaa is any amino acid
SKILSYMRIPSIEEKRKILEKEFPYTQFKNRRDLVVLYDKKYELPWEVDVCRKSLEESVYPLVNAASKYEILVVISEDGNMRSTLESEIKNAFAKKGCTDPVVRVVCAFKQGFSWICDYVIPDLRLLSGVKAVEIEFTAFLPEGRNAWTDEDGATPKITANRKDNPDAWMDTPIRLLQELYPVDDCIAQALAIDRDNIKFKLFEEAAGFKGYRLRAFDLNGAILYESVHAVSFSERPYLDEYPGIGKVHPSTGSIVLRENGNVRYQCCFQTDMETIWSLYQSDVLPICKDHISKVCGGSITAEKQ

SEQ ID NO: 101159 - protein, 217 aa, Unknown
  Obtained from environmental sample
  misc_feature (1)..(217): Xaa is any amino acid
LPGKKRILILGAGVLQGPALRLAGEMGLETIAVDADPTAFCVPLADRFEKIDLKDREGIEKLARSLIKNGGLAGIMTAGTDFSASVAWVAEKLSLPGISYEAALDASDKERMRKRFKEAGVPSPEFIVIDNLSGESPNLPFSWPVVVKPVDNMGARGCRRVDSQVGLETAVAEAMAFSHSGRVIVEEYMEGPEFSVDALVYHGEITICGFADRHISS

SEQ ID NO: 101160 - protein, 136 aa, Unknown
  Obtained from environmental sample
  misc_feature (1)..(136): Xaa is any amino acid
MINKQIDGYTIIEFIGKGTFGSVYKCEKNGEIYAMKVFSADFIYQEFAKGSNNRITREIEALKAVNSKNVAKYIDDGNFVDNNWKYLYVVMDYIDGSDLEEIMKSKVFSVDESIEIFQSLLNGISAIHEAKIIHRD

SEQ ID NO: 101161 - protein, 250 aa, Unknown
  Obtained from environmental sample
  misc_feature (1)..(250): Xaa is any amino acid
ADLTGAILAEALDVDEYENWTDVDGIFSAHPHMVDSPKQISALTYKEMRELSYIGFNVLHEEAVRPVMRKKIPIRLRNTNNIENNGTLIVSERLPGLRDIVGIASGGGYCSFTLQKFLMNREKGFGRRLLSIFEDMNLSYEHCPSGVDNISVILDQDQLKPETVNNIIRAFDEKLTPDELKTEFGIAMVSVVGEGLAHKIGVLATAANALSKAGVNIKMVNQGSSEISIIFGIDAADEKKAVNALYNEFF

SEQ ID NO: 101162 - protein, 76 aa, Unknown
  Obtained from environmental sample
  misc_feature (1)..(76): Xaa is any amino acid
LDYLKAWVKENNTALIGVFHDLNLARYFGDTAILMNEGNQVAYGTIEEILNSEILEAVYGIDIRSFMRKSLEKWTP

SEQ ID NO: 101163 - protein, 166 aa, Unknown
  Obtained from environmental sample
  misc_feature (1)..(166): Xaa is any amino acid
AGLASGLHKIWEIPDEDMEAMLRTNVEGVVKTIRAALPHVRKSGWGHIFFIGSTAGHQAYEGGGVYSASKHGVKALAHALRLELCGEPIRVTSIDPGMAETEFALVRLKDPGRAKALYQGIDPLTGADIAECIRWCLELPTHVNIDEMIVKCRDQASHTMAKVNRK

SEQ ID NO: 101164 - protein, 199 aa, Unknown
  Obtained from environmental sample
  misc_feature (1)..(199): Xaa is any amino acid
MIRLLCIIIAGVTLFMLPSLFTAIILGEVSMIRAFLIPLITGIVLALFAVLFIRKDVHGIRPREGILLVFLTWIFSSLIGSIPYYLSPSGIHIIDAIFESSCSFSTTGATTLSDVESLPRSLLLWRSIGHWAGGMGIILLTVALMPLLGVSGGVQLIKAEVPDPEREKITPRITTTAKILWSAYCIFTVILALLYRMEV

SEQ ID NO: 101165 - protein, 89 aa, Unknown
  Obtained from environmental sample
  DOMAIN (18)...(86): TrkA-C domain
  misc_feature (1)..(89): Xaa is any amino acid
MGSGISDVHNLGDGSVSIIKIEIAEDPPAVEKNIKEFRLPQNGLLMLVNRGEASFIPQGDYVYKAGDKVVLIVKNGNEAELEKHFGMAK

SEQ ID NO: 101166 - protein, 290 aa, Unknown
  Obtained from environmental sample
  DOMAIN (7)...(136): RNA polymerase beta subunit
  misc_feature (1)..(290): Xaa is any amino acid
EFEHYTFDEDNIKVTEFECKQKGLNYAVPLKARINLVFQQTGEIRQKDIYMGDIPLMTERGTFIINGAERVVVSQIHRSPGVIFSHEKGIFSSRIIPYRGSWIEFEIDQKRDLIYAKIDRKKRILGTIFLRALGFSSREEIIEAFYVTETLKIKDDRETKEKISGMVLAKPVMIKDESGSKGAEKVLYRAGEKLHPHNVDELINNGIKSICYIDFEAEGSLNSTMLLNCFEREDIKFVKEAGSEPAKDDALMAVYSVLMPGESITVDQAEKDLTGMFFSDRRYDLGKVGR

SEQ ID NO: 101167 - protein, 174 aa, Unknown
  Obtained from environmental sample
  DOMAIN (18)...(174): tRNA synthetases class I (I, L, M and V)
  misc_feature (1)..(174): Xaa is any amino acid
MNAVELEKAYDPKGFEKRIYALWKKAGAFKPENDAAEKEAKDKYVIVIPPPNVTGVLHLGHGLGISIMDTIIRYHRMKGEPTLWVPGTDHAGIATQHVVEKKLQTQGLTKHDLGREKFLKETWKLKDEHHAIISEQIACAGASVDWDRERFTMDEGLSRAVREVFVTLYERDLI

SEQ ID NO: 101168 - protein, 261 aa, Unknown
  Obtained from environmental sample
  DOMAIN (42)...(192): Anticodon-binding domain
  misc_feature (1)..(261): Xaa is any amino acid
MDKESFKLGSKFANKVWNASRYILMNLEGRNLVENPALLPVDKWIYSRLNGTARAMEEAFLSYRFNDAAGSVYEYFWNDFCDWYVEATKLSMKGESNGEKDRASTVLLDVLAKSLRLLHPLLPFVTEEIYGKLPNIQNELLITAPYPVYQKELADDKVEKDFAFLQDLVRQVRTLRSECTIPPDQKIRVRLRLSLPESEVLVKENTALVKLLAGIGDLEIAPASGKEADSGQETRPQGSIGIAGNGFEAFVLSPKRGRKTV

SEQ ID NO: 101169 - protein, 270 aa, Unknown
  Obtained from environmental sample
  misc_feature (1)..(270): Xaa is any amino acid
NHEPAGFGGSNAQAKRPAKNPPPVFFKETEKLKIPVSAPEGEPSQDSKYRRVAKFLILIGSEQAAGILAELDPDQISEISKEIALVKVIRPEERDQILAEFRSLFSKPFDYYGPSRGGIETARRILYLAKGPEEGESILNKAIPKSKDNLFGFLEEYSAEQLVMLLKDETDQTAALLLSRMTAKLSAETLSRLPAKRKAVILKRIAHQSEVSPEVLEQVSAAMKEKIRNISVSSDEIKIDGMQALTAILKQGDYSFGDKLINEIEKNDPE

SEQ ID NO: 101170 - protein, 212 aa, Unknown
  Obtained from environmental sample
  misc_feature (1)..(212): Xaa is any amino acid
MFHAALVLIIMVVILAIGSVLAKKLKIPMAAILLLCAVVGALAGGFGFPLRHFTEGTQLFFSLILTVGTGMLFMSTLKANGALNALTRFIVGTFYKSPTILLVFLMLLIMLPAMLSGSAPASVLSTGVLVAPILLKLKIPKVEAASIIAMGALFGMIAPPINVPAMLIGTGVYMPYEGFTIPLLVLTAPLAIFTVLWLGRKFIKVIDKDEIL

SEQ ID NO: 101171 - protein, 239 aa, Unknown
  Obtained from environmental sample
  misc_feature (1)..(239): Xaa is any amino acid
MKNKYTGFAVLLLVLVSLAIFVSSLSFMEQRKTEPIVPGPGVTEVKHLSDYFEGLKGTAGDSTVYILDSGIPGGVMIVMGGTHPTEPAAVIASVLLVENARVTSGKLLVVPHSNSSGFSWTEPGQGHAPFFYFKTDHGVRYFRYGGRGSNPIDQWPDPDMYLHYPSGQVLAADEIRNLNRAHPGNPNGRLTQKVAYGFRRMIEIEKADMIIDQHEAPPEKPLVDAMCVHQRVLDLATLS

SEQ ID NO: 101172 - protein, 225 aa, Unknown
  Obtained from environmental sample
  DOMAIN (1)...(223): eubacterial secY protein
  misc_feature (1)..(225): Xaa is any amino acid
MWVGEQITKRGIGNGISLLIFAGIVARLPTAVWELVNKVRAGELNLVFVVVVLFLYVAVVTLVVFEQQGQRKIPVNYAKRIVGRKMYGGAPNAFIPFKINPSGVIPVIFASSILTFPLQIAQTIGEGVAWLNSVARVLTPRGTLYNILYVLFIIFFAYFYTQVTLNPVEIAKNIRENGGSIPGIRSEKIEEYLTKILNRIVLPGSLYLALIAVLPSMIQYFFKFP

SEQ ID NO: 101173 - protein, 133 aa, Unknown
  Obtained from environmental sample
  DOMAIN (6)...(105): Ribosomal protein L15 amino terminal region
  misc_feature (1)..(133): Xaa is any amino acid
MAHDFNLHAPEGANKKKKILGRGQGTGHGTTSGRGNKGQKSRSGGKTYVGFEGGQMPLYRRLAHRGFSNYPFKKSFQIVNLNEIEKRYSEGDTVDETSLHEKGLIKGRVKKGVFVPDFSVQILGNGELTKKLT

SEQ ID NO: 101174 - protein, 281 aa, Unknown
  Obtained from environmental sample
  misc_feature (1)..(281): Xaa is any amino acid
FVGDGFFGWYLTTTEGHLGLQENTDDAFINYSNYGLGHSWSYAVRCIQDTSSFISSSSSVSSSSVEIVYGTPVNYQGETYKTVVIGNQIWMARNLNYAVEGSKCYDNSTANCNKYGRLYDWATAMKLPASCNDNSCASQVSQKHQGICPDGWYVPNDDDWYVLMKFVNPNCYDDEKCGNVGNKLKATSDWSYDDTRNTNGTGNGQDIYGFAALPGGGSDSDGYFAGVGYSGSWWSSSEVISQLSAQSELNANCWHMSELWYLWKRQGKKNGFYSVRCMQYG

SEQ ID NO: 101175 - protein, 187 aa, Unknown
  Obtained from environmental sample
  misc_feature (1)..(187): Xaa is any amino acid
MQNAASSFGHAFLLWGNPSSSYNTWATIEYVADIEDGVNAFSYVYNGISGGFSGQYDIVSFKEKIQHYCEKEKRTLWIYPIKLTPKESMKFGDTLSAWLDKESPYKFFTNNCANGLYDLLKATIDSIPEPDALVLSPQDLIAILEKSNRLDRPFLLSGENQSRRIVPHKYTRLDFGFDFHGYGAILF

SEQ ID NO: 101176 - protein, 183 aa, Unknown
  Obtained from environmental sample
  DOMAIN (6)...(170): DNA / pantothenate metabolism flavoprotein
  misc_feature (1)..(183): Xaa is any amino acid
ASLAVAAWLRGAEVDAVCGPGCPWLPAGIRRHEVVGAGQMFDVAQALWPAADCGIFAAAVADFSPEPYGPEKFKKADAAEGFSLKFTPNPDILKTLASRRRPDQKLVGFAAETNDDLGVTVRHKLRAKGADLMVGNRIGREGTGFESPTNAAHAVDATGREEQWPLMPKTEIAWRVCSWLLRL

SEQ ID NO: 101177 - protein, 205 aa, Unknown
  Obtained from environmental sample
  DOMAIN (134)...(205): CAAX amino terminal protease family
  misc_feature (1)..(205): Xaa is any amino acid
MMGNKFYPTIKNSLLLCLIIIGIQIFLGIIISVLKKIFFFSDDSSFMGVLTILSSIYSFGIAVIIGFKETKRKFNEVFKFNRVSVFLWISSIVFITGFTIISSETDNVLNYLLPPPESFRYSFETIMAGQPLIISIIAIGIIPAFTEELFFRGLVLDGFNRNYSKRKAIFLSALFFGIIHLNPWQFLSGFIFGIITAWILHKNKF

SEQ ID NO: 101178 - protein, 54 aa, Unknown
  Obtained from environmental sample
  misc_feature (1)..(54): Xaa is any amino acid
MKALFIGGTGTISSAISRLAVQKGWELYLLNRGSRNAEFNGKTYTILIVISERK

SEQ ID NO: 101179 - protein, 262 aa, Unknown
  Obtained from environmental sample
  DOMAIN (181)...(259): Alpha amylase, C-terminal all-beta domain
  misc_feature (1)..(262): Xaa is any amino acid
MGKHAPHAIFIAEESTSFPSITRPPEFGGLGFHYKWNMGWMNDFLSYISKEPIHRKYHHHNLTFSMIYAYSENFILVLSHDEVVHGKGSMLSKMPGDCWQQFANLRLAYAFMYAHPGKKLLFMGSEFGQGKEWEEQHSLDWHLLDFEVHNGLHNMMKTIGSLYKSERAFWEIDHHWDGFEWITCDDVDNSVLSFFRRSRNGELILCIFNFTPVPRIPYRVGAPACGKWIEIFNSDSQLWGGSNMGNAGERGQRMFNATAGPL

SEQ ID NO: 101180 - protein, 219 aa, Unknown
  Obtained from environmental sample
  DOMAIN (121)...(201): Cache domain
  misc_feature (1)..(219): Xaa is any amino acid
MSTIEHKHLLRDVEYAMTSTQANIEADFLESKMTLGLVSENIRGLILHGVDQKEVNEYIKEVTEFVLADDRIPYATSFFGAFEAFGNSHLSGISWMPPGDYMPEDRPWFKAAVEAEGKVGVTEPYVNVAENVEVITFARRIFDDEGNPLGVVCFNIKLDRIRKYAVGTAITPGGYGLLMNKNFDVLAHPNPAYLGRNIKLLNDGEAFERDLLHGKEITE

SEQ ID NO: 101181 - protein, 278 aa, Unknown
  Obtained from environmental sample
  DOMAIN (71)...(222): DEAD/DEAH box helicase
  misc_feature (1)..(278): Xaa is any amino acid
EFAAWFDALWNNTQKLKEAKQEFLDEIANVFKEYTPCDMYMKIVSELLPEENVQEKIEQRLGKTEIYKTLFDFQKKAVVSLVKILEKKNGAVLADAVGLGKTLTALAVIKYYRMQNREVIVITPKRLKQYWEQYTWHDGTVPEGDNFDYEIIQYQELTAGQLSERLEYLTNEKPKLFVIDESHELQNDEDSRYQFLLEIILRSNSDAKVLMLSASPLNNSFWGIRNRIKLIGGFENVDALFRRAQERLNEWAGAEHPVIGALIGALRGVDGGTFLNLT

SEQ ID NO: 101182 - protein, 255 aa, Unknown
  Obtained from environmental sample
  DOMAIN (52)...(197): GAF domain
  misc_feature (1)..(255): Xaa is any amino acid
MSNNLKCPESTEIRRESALPADGAWASRRGKGLMSTLGRMAEIFLSRSGGATFDEVMTAGIRLLSDAVGLDSVSVFRSINAPDGRHASQIYRWHIASGGTTKPNSAFADFRYADIVPSWERSFLEGNAVNGPVAKMPEREAATLNPAGTVSLFAAPIHINGVFWGFVFFEDHRKERTFDSDTADMLRSAAYLCANMVMRSDMESAIEITQTMIDATPLGCMLIDKDFKLLACNNESVSLFGVSGKEELIKNFDKL

SEQ ID NO: 101183 - protein, 68 aa, Unknown
  Obtained from environmental sample
  misc_feature (1)..(68): Xaa is any amino acid
MKTNVYIVKCESYEKADGKINELLNLMGGISQFAKKGEKITLKANLLGAVPPEKAVSTHPLVVAAMDV

SEQ ID NO: 101184 - protein, 281 aa, Unknown
  Obtained from environmental sample
  DOMAIN (187)...(265): POTRA domain, ShlB-type
  misc_feature (1)..(281): Xaa is any amino acid
DSQGSEVILRFTVVERPTVSRINFVGNSGVKRNELSDTVSIKTNDVFTQVKLKIDEQAIINKYLEKGYPDVKVRTEVQDTGKSNIVVTFHIDEGEKIVIESFHFEGNSVFSSRTLQRQLSLKTKGIIVDGAFQESKLIADKQTLTRYYHDRGYIDAVVIDDVREVRKNDKGQNLMSITFRLYEGRQYTFEGISFDGNQIFSDAQLSALVNSKRGQTVNAARVEDDLMRIADLYYENGYIFNRIEPVPVKDAENGTLSFIVYIVERGRAHIENIIIRGNLKT

SEQ ID NO: 101185 - protein, 228 aa, Unknown
  Obtained from environmental sample
  misc_feature (1)..(228): Xaa is any amino acid
QQDGRAFEYVPAAQKTETFCLDVLKKNWRALEYVPEALKTEAVCLAAVENNGKAFEYVPAALKTEAICLTVLQKNWRAFEHVPEALKTEAMCLDAVQKDGKYLEFVPEALKTEAMCIAALQQDGMAHEYVPEALRNDALAEVAFISLAQKDYHIIETLPNKYKTEAICLAALGKSVKAFDLIPDKCKTEAICLAAVQKDGKLLEFVPKAKKTEAVCLAAVEKYANALE

SEQ ID NO: 101186 - protein, 79 aa, Unknown
  Obtained from environmental sample
  DOMAIN (12)...(65): Sigma-70, region 4
  misc_feature (1)..(79): Xaa is any amino acid
MKQVSLDNTIRVLNKLKDKERNILTYRYQLNGCERQTLREIGDKFNISPETVRQIELRALRKIRSHAHEIRDSIYVEAI

SEQ ID NO: 101187 - protein, 170 aa, Unknown
  Obtained from environmental sample
  misc_feature (1)..(170): Xaa is any amino acid
MIVENALVVYKNKPALVKEISNGKITISLQNAEQVKVRDKDIELIHPGPVKSFNEIDNIHKGNDSGSASQVREAWELLSDDTDASHSLKDFASLVFGEYNAAFAYAAYCLLSDGLYFSGTVGAIVPRSREEVEAEERKRGEKQRETGERAAFLERIKHCLKKPAANSMLP

SEQ ID NO: 101188 - protein, 135 aa, Unknown
  Obtained from environmental sample
  misc_feature (1)..(135): Xaa is any amino acid
LKVLKLFVFIAFFALAFIHEPCRAQWSPKDQNLGYWAQEYHARKRQLAQYRPEINFIFQSRVVCDSSFIAIQGCHIINITQHTGTVSDAYGDFKITANVNDSISFSALGYEKFTIVLTESMYNYGYIVKLKPKAY

SEQ ID NO: 101189 - protein, 235 aa, Unknown
  Obtained from environmental sample
  DOMAIN (52)...(226): Transposase DDE domain
  misc_feature (1)..(235): Xaa is any amino acid
AKWFCNFGLLEKTPDFTTICKFRNSIGTGQVSNLFTEVKSQLRAKNYCSEVFTFIDATALVSKLNLWEERDKAIAAGYEKLNNEVLPKVSFDPEAKIGAKSNKKFWYGFKKHVAVDMQSGMITRVAVTQANVADADGARHVMPRSGAAVTDKGYVGAIREMLRRGVHAMVIKRNNMKDKNVDLDKWISKLRAPYEGTFSKQNRRVRYRGVVKNQGAEFLYAIAYNFRRLIILNEA

SEQ ID NO: 101190 - protein, 284 aa, Unknown
  Obtained from environmental sample
  DOMAIN (1)...(284): Protein of unknown function (DUF1703)
  misc_feature (1)..(284): Xaa is any amino acid
EQTRVAARAHGVDVGDLTLPRVMLSRIITDISEKRGKPVVVIVDEYDKPFIDFYSKPPIAQEVREIMRDCYTVFKANEQHMRFLFMTGISKFAKMGVFSTLNQLTDISLKKEFGTLLGYTEEELVENFGEYLETGANELNCSVDELVERMRRYYNGFCFDGMQKVYNPFSVLNFLTEFEFANHWMNSGSTRMIADYMRDRSLTVEQFIGIPVSKDFVKNPGEMETAPPESFLYQAGYLTLSDGGDGEFSLDYPNTEVLESMSQLVSNNIIRSGGGEYFADFRNP

SEQ ID NO: 101191 - protein, 283 aa, Unknown
  Obtained from environmental sample
  DOMAIN (27)...(69): Putative Ig domain
  misc_feature (1)..(283): Xaa is any amino acid
KSAVNVAISNIDLAAGLNVSGGTGPYSYASSNLPAGIVISAAGVISGTPTTAAVAGTATVTVTDATPTTPNTGTYSLAYGAISDILIVEKSGAVQIPASVVNVAISNIDLAAGLTVTGGTGPYTYASSNLPAGIVISAAGVISGTPTTAAAAGTATVTVSDATPTTPKTGTYSLAYGAISELSIVEKSGAVRIPASVVNVAISNIDLAAGLTVTGGTGPYTYASSNLPAGIVISATGVISGTPTTAAAAGTATVTVSDATPTTPKTGTYSLAYGAISELSIVE

SEQ ID NO: 101192 - protein, 266 aa, Unknown
  Obtained from environmental sample
  DOMAIN (67)...(148): Fibronectin type III domain
  misc_feature (1)..(266): Xaa is any amino acid
MEQAVTMYTRSTSESGTYTKINSAAISGTEFTDTGLSPDTTYYYRISTIIEGVEGLQSTPVSASTQSSVPTNVRITAVTTASVSLTWDAISGASGYNVYRSTSESGTYTKINSAAVSGIEFNDTGVSAYTVYWYKVKGIFGGIEGLQSSPLSVSTGILVQGSGLGPKLAWLQSNAASNNLYVVEINVDENIGPQTLSYSGKSGITIMLRGSGTMRSINLSNNGSLFTVGSGVTLILDNNITLKGRSGNSTYSMIMINSGGATIMNT

SEQ ID NO: 101193 - protein, 117 aa, Unknown
  Obtained from environmental sample
  DOMAIN (1)...(113): Response regulator receiver domain
  misc_feature (1)..(117): Xaa is any amino acid
SIFIVDDSDTNLATAEEALEDDYNVMTMPSALKMFSLLEKVTPNLILLDIEMPEMNGFEALEKLKSSALQANIPVIILTGTVDASIEKRGSSMGAVDIISKPFSKPVLLEKIKAHIK

SEQ ID NO: 101194 - protein, 299 aa, Unknown
  Obtained from environmental sample
  DOMAIN (2)...(87): GTPase of unknown function
  misc_feature (1)..(299): Xaa is any amino acid
EFSRRTVDQKTGEIIGYKDASIVDLPGIYSLSPYTSEEIITRDFLLKQKPDGIINIVDATNIERNLYLTMQLIELQIPMVLALNMMDEVQANNGSIDIQRMRESLGITVVPIAAVKKQGLSELMEKAVEIVRHQIKPERIDFCSGAVHRAIHATAHLVEDHAQRQGIPMRFAATRLVEGDEIMLKALALTENETDMIEHAVKEMETELDTDREAALADMRYQFIEDVCKKCVVKAHESREYRRSVTLDSILTHKVWAFPSFLAIMLLVFALTFGVIGNKLSDLLVLGLDDLSGVFSKAL

SEQ ID NO: 101195 - protein, 183 aa, Unknown
  Obtained from environmental sample
  misc_feature (1)..(183): Xaa is any amino acid
MPDKNSCALRHYFDWAASAPFDIDIINQVNNKSLFGNPSSLHGEGKAAKLALEDARKRCAAVLNVPPETLIFTSGGTESNSIALFSNLVKKGQGRIFSSQAEHSSVREGMETLEKMGKPTGRIAVDSEGRVTPGIFAKILEKNGEVRFVSCMAVNNETGTATDIASLTDIIRKRSGVPVHFHC

SEQ ID NO: 101196 - protein, 269 aa, Unknown
  Obtained from environmental sample
  DOMAIN (149)...(268): Homoserine dehydrogenase, NAD binding domain
  misc_feature (1)..(269): Xaa is any amino acid
MAGVAGFSARVFGALARKNISVMLITQSSSEYSICFAVLPEEITAAESILKEEFASEIHNGSIEKPIAEKDLSIIAVVGSAMKSTSGISGKFFHALGRNGINIVAIAQGSSETNISAVISKQDEGKALNAIHAAFFFANHRSVNLFLIGAGNIGGTLLDQIAENREKLADRDLIKVNLIGAAAWDKMIFSLDGLDPVKTKELLNKTGKAAGTEEYKLDSFIERMASFNLPNSCFCDCTASEEIAASYEKILRRSIPIVTPNKKANSGAL

SEQ ID NO: 101197 - protein, 65 aa, Unknown; identical to SEQ ID NO: 88247
  Obtained from environmental sample
  misc_feature (1)..(65): Xaa is any amino acid

SEQ ID NO: 101198 - protein, 256 aa, Unknown
  Obtained from environmental sample
  DOMAIN (1)...(256): tRNA synthetases class II (A)
  misc_feature (1)..(256): Xaa is any amino acid
MVPFIPYFLGEEKAPYPRIASVQKCIRTGDIENVGRTTRHGTFFQMNGNFSFGDYFKEGAIDMAWELLTTPQDQGGYGFDGDKFWVTIWDEDKESYDTLTKKIGIDPRQVVRLPRKENFWDTGQPGPAGPCAEWHYDRGPKYGPDAVGGNVDPGGDRYLEIWNLVFDQFVRGEGVGKDYPLLGELDQTGVDTGAGLERIAFLLQGKENFYEIDEVFPVIQVVEQLTGKRYGANVEDDVQMRVVADHVRAALMVIND

SEQ ID NO: 101199 - protein, 298 aa, Unknown
  Obtained from environmental sample
  DOMAIN (143)...(187): Threonyl and Alanyl tRNA synthetase second additional domain
  misc_feature (1)..(298): Xaa is any amino acid
VLDSGAVMRFDDVQAPIKGLFVHRGRLTEGSAAMGDTGTATIDVTRRAAISRAHSATHMIHKALHEMVGEDRTQAGSENAPSRVRFDFRSATPVTGGQLSEIEERVNKRLIENLDITDSVMSLDKAREAGAMALFGEKYGDQVRVVNMGDGWSLELCGGTHVKKTGEIGRVALLGEASIGSGVRRVDALVGDEAYGFHAKEHALVNQLTGLLGARPDELAERVSLMMTKLRDTEKELTAVRQAKLLSASSELAAAVPAGAKFAAVTYDAGDVGSADDLRALALDVRLRLGESRPAVVP

SEQ ID NO: 101200 - protein, 257 aa, Unknown
  Obtained from environmental sample
  misc_feature (1)..(257): Xaa is any amino acid
VWDAKNSRQWLGYRDERRRKSDISGEDRRNELMKFFPADNPDYEIVRTFYDEQWVDPYSEEVWEYNAAVAAELHERGFDEIQFDYIRFPTDGVNIGDARYRWQDQGMDMESAILSFLRHVRRRVKAPISIDIYGANGWYRTGARTGQEVELLAPWVDIISPMYYPSHFEQYFLAQEPAELRPWRIYFQGTLRTSRIGRGQIIVRPWVQAFSLNVSYDRRYYNANYVRYQREGVRSAGNGGLMYWNNSGRYEDIPEKE

SEQ ID NO: 101201 - protein, 284 aa, Unknown
  Obtained from environmental sample
  DOMAIN (177)...(210): Tetratricopeptide repeat
  misc_feature (1)..(284): Xaa is any amino acid
LLVACASTGGSGAGVSLLEAVEQSAEKIAAELPKGSRVAIVAFESENDNLSDFIMEEITGALADRGIEVADRQNLAFVYKELNFQMSGDVSDETAQSVGKFLGAQLVITGQLTGLGGSYRYRTSAIQVEKATRDSVTRLMVRNDKETRDIIAALAKQKASVKTAKQGATETTAPKTAGTFLDRGILFASRGDYETAIDCFTEALKLNPNLGAAYSLRGRARYASASKVISVGANFGSVGTISTGGKATADQARAYEQAIADFTSALRLDTDNPNIYRERGVAYM

SEQ ID NO: 101202 - protein, 133 aa, Unknown
  Obtained from environmental sample
  misc_feature (1)..(133): Xaa is any amino acid
MPDKNSILRKITRKGKQILEKYLITGISGFVAPYFVEYLDLLGDKNIDVLGISAHKLDADFASNLKNVRFNAIELNLMEIDKLKIAISSFSPDYIVHLAAFSSVGSSWLDPSNAFVNNTNIFLNIAEIVRSQN

SEQ ID NO: 101203 - protein, 277 aa, Unknown
  Obtained from environmental sample
  DOMAIN (28)...(145): Phosphoglucomutase/phosphomannomutase, alpha/beta/alpha domain II
  misc_feature (1)..(277): Xaa is any amino acid
MYNYCCVEKIPENASGKITEYDAEDDSVNWMTQILGEDTKSALKDITLIFDSANGATDSIGRKVLENLGAKYVSVNEKCTGDNINRGVGVAEIEGTEFYSGKDYDKHILTVKKIFDEGRKSPAQSVFAIAVDGDGDRGFLLYYSKKDDDIYVLDGDKCGYILAQYLIKTKNIDAKKYWFLSTIESDIMTAAAASANLGLNAKIVSVGDKWIGNFKDGEVLVGLEISGHLIFPIEVIDKNGKKHTLLSGVGLLTGLVSICAIRGLGLSEEKIIEPFEP

SEQ ID NO: 101204 - protein, 277 aa, Unknown
  Obtained from environmental sample
  DOMAIN (14)...(129): Response regulator receiver domain
  misc_feature (1)..(277): Xaa is any amino acid
MLFARSSERLMDKRRVLIFEDSEIFADMLLEFLNEEGYETARAENGLEGIKMVYDFLPEIIVTDVEMPLFKGYQSTRLLKSRPATQKIPIIMFTSLGESKDKFWGEQAGADFYIEKAPENFEKLAGEIRRLLQESPPVDYGLIKREAKKITNDSLIEMVNSLLDNKLFQTTIVGLLAELSARVSSLEDTVSGVIQLLNNVCQNEICSVIIKDADNGLLIYNANTAGLTEAIAEDFEAITIADFNAHFSDYKVHSKDIKALCPPGKKNKRMESYTFIP

SEQ ID NO: 101205 - protein, 245 aa, Unknown
  Obtained from environmental sample
  DOMAIN (72)...(245): NADH-Ubiquinone/plastoquinone (complex I), various chains
  misc_feature (1)..(245): Xaa is any amino acid
MSLACLPVRGLLFWGVYQVDALSQFFKVLVAVGFFVTVVNARRQPTLEEGQRLDYFLFLSFSSWGLTLTASAVELVTVYLALELASYSLYVVLPLRAQSREAAEAGIKYILFGAASTAVALFGLSWIIAGQGTTFIQELTTRDWSFARNPLALAGLTLFLAGLFYKLALFPFHFWAPDAYQGASNETTTFVATLPKLGAAVVLVRLEVLVLPGQTLADVLALLAALSMTFGNLCALAQRDLKRML

SEQ ID NO: 101206 - protein, 152 aa, Unknown
  Obtained from environmental sample
  misc_feature (1)..(152): Xaa is any amino acid
MADQSNELRPVKPDKRIGLLRILFVALFAIYSWRLFNMQILSGEQYRSQAQDISRRTEVIPSQRGEIYDRNYTQPIALNTDSFAVSIVPAEVPRDQIRELFAEVAGILKIPVSDIEAKIPEQYYRLYQPVEIAVNVPYMLIASLAERKDSLP

SEQ ID NO: 101207 - protein, 249 aa, Unknown
  Obtained from environmental sample
  DOMAIN (1)...(104): ABC transporter
  misc_feature (1)..(249): Xaa is any amino acid
SSKEKIRKAVDDAIAACGLEGERSHRIESLSKGFKQRVGLAQAIIHDPPILILDEPTSGLDPNQIIEIRSLITELGKRKTVILSTHILQEVEAVCSQVLILNEGRIAAQGTLDEIAKTIRSSGGMDTWELLLKGAAAAEIESRLRQLERETGEIKAEALVDGIVRLGFVIRNSGAYALDGEIIFDWAIKQGYKIIGMNRKKLSLEDIFVKLTAEERSGKPLTSEERGGEPLTSDERGSKQLTAEEESRG

SEQ ID NO: 101208 - protein, 285 aa, Unknown
  Obtained from environmental sample
  DOMAIN (108)...(285): FtsK/SpoIIIE family
  misc_feature (1)..(285): Xaa is any amino acid
MIFDAPQQLSDKSRWYLERLVEHGPRCGILPVIAADTKLIEERKYEDFREFLKKNAGQFEDFFKVSINLNKEMSSTFQTEEWPRQETLDVFIAAISQCYAENARFNKALPELWAGFENDCKTIDGFDIPIGWTISSEIVSLKLGSSNSEHHALLAGKTGSGKSNLLHVIIHSLCEKYPPHEVDLYLLDLKESVEFITYASGPLPHARLVATESDPEYGVTVLQHLADEMEKRASAFKSAGVQNFTEYRKSSRDQLPRVLLIIDEFQVLFTETRQVAENAERLLLL

SEQ ID NO: 101209 - protein, 296 aa, Unknown
  Obtained from environmental sample
  misc_feature (1)..(296): Xaa is any amino acid
LSDCQLYDDDDDDDDGPPDCSSEEADVQNAEANVTEAGAKLEQTGENRRRMEQRVEYAKQALLMAEKAFEQARSECASRLASVCKYIEIGTARLNSARQALEAYLSTNHDAGQFYSWLHWKPEQRKPVTPDIIRDRLNLPAEQQRLLQEYLYDRNANYRNLVNKYRGELASANGDVERNMVNRNICVHLSGGFAEHITRYALAPLGGTIETQGRVYVGNDGGYTKIDLIVKDLHVPVILGRGENMGAPVGGSLAFEVKCGGEYYLYSQKDHMVYQAEGHKEADAHCTICSRDIHNL

SEQ ID NO: 101210 - protein, 123 aa, Unknown
  Obtained from environmental sample
  misc_feature (1)..(123): Xaa is any amino acid
DALREKTQLIILSDTFEQFAKPLMAKLSWPTLFCNSLQVDNDGTVTGYCLRRQNGKKEAVKAFKSINMRIFAAGDSFNDLAMIREADGGCLFRAPEQIRKDCSDLKCVDTFDELLAEINNFLK

SEQ ID NO: 101211 - protein, 264 aa, Unknown
  Obtained from environmental sample
  misc_feature (1)..(264): Xaa is any amino acid
MRTFHIGGAATKISEENRIFLKYPVYIREVEGAHVELPEIKSKNKDGKWEVSKPSYWLFTRKGRAIVNKVMKEYKLESRDELLVEDGQRVIRDAPIIKRGSKEILSPEIAYAMILKDAKGNDSTLCLIGQNQTIEIRNGSEFVAKKGEVVEAEKTIATFDPFSDPIIAEAGGIVKYEDIIPGTTLKEEVDEDTGNIEKRITEFQLEGKQPRIIIMDENGNEAASYFLPGGAYIQVDEDEKIDAGRTIAKTLKESSKAMDITSGL

SEQ ID NO: 101212 - protein, 251 aa, Unknown
  Obtained from environmental sample
  misc_feature (1)..(251): Xaa is any amino acid
MFLETSFYHLKILLPIIALCCGSIFALVAESFLSKDGKHQVLPWINMLFLAVSAVFVKMISSEFEEPWNLFSLNYVKEIFLYAIILCGAIGTAALQNTLKNKDTLCGEAYSLLMLSSSGVMLMVLSKDLMPLFLGMELASFPIYALVAMNRHSKESNEAAFKYFISGAALSAVFLYGIALFYGATGTTLIGGSVLEGREAIYQAAIFMLTFGLLFKVGSFPLHFWVADAYTGAIAAVTGYMAAVVKIGAFL

SEQ ID NO: 101213 - protein, 228 aa, Unknown
  Obtained from environmental sample
  misc_feature (1)..(228): Xaa is any amino acid
MCDEWEKQTKNIIELLDAINNLISEDNNMHPDLVPLMEKNKNIIIPSIEDIQTYFNFLLSLPVESCVEKSESHPLQKQLITFLRFLSKICAINLNKGRNTEYKEKFKEIRENLKELFGKFSSLTVSCMQAGLIISIMSLLGQLQEQYLESKRLEGVLTFNDVANLARTILLEHHDIRQSEKESFKAIMIDEFQDNNDIQKDLLFLLAEKQDVLNNGIPGELDLTRGKL

SEQ ID NO: 101214 - protein, 178 aa, Unknown
  Obtained from environmental sample
  DOMAIN (37)...(178): ABC transporter
  misc_feature (1)..(178): Xaa is any amino acid
MAEREKLIEVKNVSISFGTGKKEFVAVKNVSFDIYKNETFSLVGESGSGKTTIGRAILRINPVSHGEIYFKGQKISGKIPRALDKEIIRKCQMIFQDPMASLNERAKVDYIVSEGLFNFNLYDDNAERKDKVEKALREVGLLPEFASRFPHEFSGGQRQRIGVARALVMEPEFIVADE

SEQ ID NO: 101215 - protein, 60 aa, Unknown
  Obtained from environmental sample
  misc_feature (1)..(60): Xaa is any amino acid
SEATQQYVDEEIARIVEAQYEKVKECLRSSRTYLETVAEKLLEKETLDEKEFKILIGQAD

SEQ ID NO: 101216 - protein, 282 aa, Unknown
  Obtained from environmental sample
  DOMAIN (70)...(96): The GLUG motif
  misc_feature (1)..(282): Xaa is any amino acid
EQAGWRVGANEWVAIGDETHPFRGTFKGGGFVVRGVYITKSNESFQGLFGNVKKPGAIEKLRVAESDISGKSYVGGLVGNDSAAAITDCYSTAKVTGSGNKVGGLVGYMDKGAISSSYATGDVIGGDSVGGLLGAGLRDTIRGGYATGSRVEGRGDYVGGLVGISSGNGYTINAYATVDIVIGKRYVGGLVGRSSANIVNSYDSGSVTGASYAGGLAGVKDSAAMKNCYTAVEVNKGMLSSTDNVGALIGSVMNNATITYCYYKGDFYGGVPNSSGLGIPQD

SEQ ID NO: 101217 - protein, 240 aa, Unknown
  Obtained from environmental sample
  DOMAIN (27)...(53): The GLUG motif
  misc_feature (1)..(240): Xaa is any amino acid
MAGGLVGWSSGNSRIAYSYAQGRVSVIGDDVGGLAGRNDGSTVRNCYATGDVSAANDPSGKGGNVIGGLVGMNFNATVTKSYAVGKVGGNSSVGGLVGSRMSGGRVDSSYYRIDLESNNINDFGAPKSDSVMRFQSTYVGWDFDKVWAFGTDYVDSVWSFPYLGMIRTAAPVITREPKGAWVDVGAKAVLSVDARSTGGVLSYQWYSNVDPQNDDVTKVKIEGAKDASYSAPTNEEGITY

SEQ ID NO: 101218 - protein, 92 aa, Unknown
  Obtained from environmental sample
  misc_feature (1)..(92): Xaa is any amino acid
AVVSPSALDKAYIAGGLGFYINLENAAYTGLLPREIIPKANVSGNTSLKGAVQSLTDESFLPRCREIIARSTVVDLAVDKEFAEAFADNMVI

SEQ ID NO: 101219 - protein, 263 aa, Unknown
  Obtained from environmental sample
  misc_feature (1)..(263): Xaa is any amino acid
MSFAADITAPTFQNLAGKVGMSFLIADIINISGSSQFNLRESQNGNGPSPIPSIGISAILKLNSGGQKIIGGALTSEGELAVDLAAKPLYNGIWTMGGGATWTAGVADKNPPVITLDYPQTAWISPNNDGKSDYLEFPISITDERYIAEWIFEISDAYGEPVRVYRNKEIRPETQGVQNFLGRLRSINSGVDVPESMRWDGTLDSGGIAQDGRYFFTVTAQDDNGNTSRKGPYEVNVDNTAPEINLNPFVGEMNIFAPGSGGG

SEQ ID NO: 101220 - protein, 306 aa, Unknown
  Obtained from environmental sample
  misc_feature (1)..(306): Xaa is any amino acid
LTIADPYVATTKVYDKTTTAAVTADRLTNIVGSDTVTVSAAAAYNSANVANANLITVVYSIDGANAANYIKPVNYTIAGTITKAAGAAISSSSTVSGTKTATSITINSVNVSTTNPGSQTAEYAVSTTNTAPTTGWQDGRTFNNLTPNTAYYLFARAKENDNYFAGAAKASAASLTTDRATITVSIFKSGNTGSDNVTVLPTTGINGDSVTLSYTLAGTSPRNRIVFGGTAQIIEEVISAGTGTRTYTINELDAAGNVVTISAEFTHSALEFDTIAFANTNNESKVYGSGNFTKAITNTGSGTGAI

SEQ ID NO: 101221 - protein, 297 aa, Unknown
  Obtained from environmental sample
  misc_feature (1)..(297): Xaa is any amino acid
DAVEGVITINAVFTHTDKEINTIAFADTSNEEIVYGDSFTKAITDAGSGTGAISYVSSDTSIAKVDGSGAVTIIKVGTVTITATKAADAVYEKTQAQYTLTVTPLKLTIEPPVFRSKVYNGETKADVTVGALTNKVGKDDVTVSAEANFNSANVADASSITVVYAISGASVGNYIKPDDSVITGNISKAPGGTVNTNPETQTKTANSITSKPVTTSTGQPAEYAIAAAADPVPTDGWQVSLIFSGLTPITDYYIFARAKENENFQTGAAKVSSKITTEAPSISIKISMTGKNENDNV

SEQ ID NO: 101222 - protein, 261 aa, Unknown
  Obtained from environmental sample
  DOMAIN (182)...(249): Elongation factor Tu domain 2
  misc_feature (1)..(261): Xaa is any amino acid
MDNDQADFNRTLSDIKEKFKVEPVAITLPIGSGGGFKGVVDVLHEKAYIMQGEALEKEEAVPAELKDAVAAAREKLIEAAAEGDDSLMEKYIENGSLSVEEMKKGLVEALADNKYVPAFAGAPLKNSGIIPLIDFILDAAPNPRTARDSVLDAESKETPVAIDPDKPMSGLVIRTNYDQFSGKLSWLKIITGKLSADTEMLNVTENKKERIGKLYTCQGKKLEEVKELSAGDIGIITKAATLKTNDTLAAADTKNFVHLRL

SEQ ID NO: 101223 - protein, 254 aa, Unknown
  Obtained from environmental sample
  misc_feature (1)..(254): Xaa is any amino acid
GLKKEIVNFFPDRSIKFLWNEHEYIYCFQSLNEKGNWDNVALKVDGIGLSNNERLLPIMEDIINLILFGNQSINGTLPTEIMEKCIIGGLIGKDEELERFVKQRYIWVSRITGGATSNSLGNLAQTYVINYLKASLVNWTFNKKTIPNISQNDNRTLMSFDTVAKSPNNKYCAIEVSFQVTTNSVIERKAGQAQSRQNILHENDHKIAYIIDGAGNFERASALRTICQYSDCTVSFKDEELNKLILFLKDFDGE

SEQ ID NO: 101224 - protein, 259 aa, Unknown
  Obtained from environmental sample
  misc_feature (1)..(259): Xaa is any amino acid
MLKTAKPNNSFPDSKWQKAGGPPEIQRQDRLTAALYSGLASHAGIIVIALIALLVLVALACILSKTPGRTLFFFFIGPFRNVYSFGNMLNSAVPLIFGGLGVSIAMQAGSLNLGGEGQIYSGAFIATITALPLAFLGLPGGLISILAGAFFAGALAALSGFCKARWNTNELITSFLLSNAMILIVNYLVTGPFHDPETNLQSTRKIAANLRLPLLLPPSNLNMALVIAFVAVAVVHLFLRRTRLGYEFRISGSNEIFAR

SEQ ID NO: 101225 - protein, 277 aa, Unknown
  Obtained from environmental sample
  DOMAIN (108)...(277): Predicted permease
  misc_feature (1)..(277): Xaa is any amino acid
AIRADKWEGDLLPTLSGEDKPLVEAAYEYQDFLEGYLLVENDEKALNEILAAMIRAGFSGAVRHVNQVLDVKVIGIINSPAPLPNGNTAYIPLDILQDEAGMMLEGAVTELVIREKNAPDSRLPGKSESAAVINAALERGLAKEGYVMPDELAVHTWEEYMQNYLGYEAMENTMPQVIACLLLLLSFLGISNTILLAILERTKETGMMRAMGMTDQQMILVYMLEAGFLGFIGSVLGIILGCIINYPMVKYGIDFNAFVDIMGGEGIGFRTTSSFRS

SEQ ID NO: 101226 - protein, 111 aa, Unknown
  Obtained from environmental sample
  misc_feature (1)..(111): Xaa is any amino acid
MQTLTERGSVKLFAGNSHPSLASEIAELLDIPLAQREIVEFSNGNTFIKINETVRDHDVFVIQTANDPVNNHLMELLFMIDTLRYSSPARITAVMPYFPYVRSDKKDQPRI

SEQ ID NO: 101227 - protein, 279 aa, Unknown
  Obtained from environmental sample
  misc_feature (1)..(279): Xaa is any amino acid
VRLHARMTEIIAGDIPFEEELLSREDALNYFSKKNFMDKLELLRLTNLDMIRITRLGDIREIRYFPPLPSTSWIHAWDIVLHGEGLILRYPETTDPSVLPTFEVQNKLFSILTEDSHWTKILEITNVGELNHAISNRSISEVIKIAEALHEKKIAEIADAIAKRMPAIKFILIAGPSTAGKTTFSKRLAIQLRVNGIKTANISTDDYFLPREESPRLPNGEYNFEDITALDLELFNRHLEELYAGKPVMVPRYNFTTGRASPEKATRLELPKEMPVIIE

SEQ ID NO: 101228 - protein, 209 aa, Unknown
  Obtained from environmental sample
  misc_feature (1)..(209): Xaa is any amino acid
MAVLSIQSHVVFGYAGNTAAVFPMQRLGHEVWAINTVEFSNHTGYGAWKGKILGAELTADLVTGLEERDVLVRCEAVLSGYLGDASVAMAIVDAVKKVRSKSPDAIYACDPVMGDVGRGFYVKPDIPGIFKKELIPLADIITPNRFELDAITGINAKNMTDTLKAINILHEMGPSIVLVTSYKEKEGELSMIASNNNEIYKITTPELPF

SEQ ID NO: 101229 - protein, 254 aa, Unknown
  Obtained from environmental sample
  DOMAIN (4)...(250): Bacterial extracellular solute-binding proteins, family 5 Middle
  misc_feature (1)..(254): Xaa is any amino acid
MINNNDWSKKPPVCNGPFRVDSIKKGSIVMIRNENYWDTGRVVLKKIIIKYTDTAEDASYLWNTGEARWIAGGVSLEALTDRSGIQVNVMFATHYYYIRSGEKPWNDYRLRRAMMLVLPWDEIRDGHYLPAKTLIFPIKGYPEVEGVTETDYEEAEKLMKEAGFAGGVGVPELVIRLTPSSDAANIGSLMASAWKDKLGLKVRVEVIPYENYFQSMKENGYIIGSSTWIGDFADPYTFLQMWRRDSHLNDAHYS

SEQ ID NO: 101230 - protein, 104 aa, Unknown
  Obtained from environmental sample
  DOMAIN (15)...(96): Phage integrase, N-terminal SAM-like domain
  misc_feature (1)..(104): Xaa is any amino acid
MPEAERTIGALSAPIAAFLLEQRARGTSAHTQRAQTADLKKLEAHAVVEKWPGWDVRPRTLQRFALELGERGLDPASRARILSTARAFYKWMYETGRLTKNPAT

SEQ ID NO: 101231 - protein, 101 aa, Unknown
  Obtained from environmental sample
  misc_feature (1)..(101): Xaa is any amino acid
MLDARTVRKDFPLLLEPYHGKRLAYLDSAVSSQMPAQAIERMRRYMALEHTNVHRGVSDLSQRATDHFEAAREKVAAFINAQSAKQIVWTRGATESINLVA

SEQ ID NO: 101232 - protein, 69 aa, Unknown
  Obtained from environmental sample
  misc_feature (1)..(69): Xaa is any amino acid
MVTSSTNDRDVNVVEVEQLIAHLKAAGKTFEHHIEKDAPGGHSWDRIDTTFARKARQRMYDFLKKHLGK

SEQ ID NO: 101233 - protein, 271 aa, Unknown
  Obtained from environmental sample
  DOMAIN (1)...(27): Sel1 repeat
  misc_feature (1)..(271): Xaa is any amino acid
MYRLGWGVPQDYQEAAKWFLKAAEQGHAEAQYDLSYLYYHGEGVPQDYQDAAKWLHKAAEQGHAKAQHALGSMYRDGERVQQDYQEAMKWFRLAAEQGHAVAQYGIGLMYHRGEGVKPDYREAMKWYRLAAEQGHAVAQCTLGAMYHYYHYPLQDYQETMKEAMKWYRLAAAQGNDRAQGGIGLMYHYGEGVQQDYQEAMKWYRLAAAQGNDRAQCGIGLMYHNGEGVQQDYQEAMKWYRLAAAQGNDRAQCGIGLMYNNGEGVQQDYQEA

SEQ ID NO: 101234 - protein, 258 aa, Unknown
  Obtained from environmental sample
  DOMAIN (216)...(251): Sel1 repeat
  misc_feature (1)..(258): Xaa is any amino acid
TPDERLFNLGDMDYRALKYKKAANCFRLAALLGHADAQFILGRMHYGGQGVSQNYLEAEKWYHLAAEQGHAGAQNNLGIMHNNGEGVPQNYVEAMFWFRLAANQGHAGAQFKLGEMCYSGKGAKKDYKEAMNWFRQAADQGHAGAQFKQGEMCYSGDGTKKDYQEAMNWFRQAADQGHAGAQFKLGEMYYNGNPRIARDYVEAMKWFRLAASQSHVGARQMLGKMYEKGHGVQRDKSEAQEWYRLAAQAAHQVIGKDT

SEQ ID NO: 101235 - protein, 120 aa, Unknown
  Obtained from environmental sample
  DOMAIN (2)...(108): S23 ribosomal protein
  misc_feature (1)..(120): Xaa is any amino acid
MENIALVKSRKFAIRIYNLYKYLCDEKHEYTLAKQILRSGTSIGANLTEAQYSVSRKEFLVKVKISLKECAETEYWLDLLKETNLITSTEYSSIINDCKELLRLLISISKTTTNKIINNE

SEQ ID NO: 101236 - protein, 298 aa, Unknown
  Obtained from environmental sample
  DOMAIN (2)...(89): DNA methylase
  misc_feature (1)..(298): Xaa is any amino acid
SFKRYLDTMPGVPLQDVWDDIKVISSSSNERIGYPTQKPEALMERIIKMASNEGDIVLDPFMGGGTTIAVAEKLNRKWLGIDQSPMAVKVTDIRLEKQHNLFSSIYTVQLHKYDYDTLRYKDAFEFESWIVRQYGGTANVKQRGDLGLDGKNGDGTPIQVKRSDNIGRGVIDNFLSAVQRYDKNLFEKNKKARNPSGYIIAFSFGKGAIEEVARLKNVDGIIIKLVRVDEIVEVAVKPAVGINIKELGRDAKGNRTIEFTARGEGGAGIEFYSWDFDHNKERGFKASVIMDKEGRQVI

SEQ ID NO: 101237 - protein, 284 aa, Unknown
  Obtained from environmental sample
  misc_feature (1)..(284): Xaa is any amino acid
VNVAKAAGTFGSPVISTTYTPTLTLASLNSQFVGDKAGYAWAESVNTTDLLSAGDNQPFAATFNDPSGNYEAAPGTIVVNVAKATLVAGTDYVVPTGLTAVYGSTLAEVSLGIDPKNKGAWSWVDIATTSVGNVRDENSFAVTFTPNDDTNYEVVNENVVIAVTKAPGTFVAPATQNIQYRTGLKLSDIVVANYTWVNPNTTLNADNGQTFQATYEDPSGNYTESEPGTITVDVAKGTGLALTNPLQAYTILVSSKNNNEKHFDLEQILLNKPDHGTLQYAVNL

SEQ ID NO: 101238 - protein, 127 aa, Unknown
  Obtained from environmental sample
  DOMAIN (17)...(69): Clp amino terminal domain
  misc_feature (1)..(127): Xaa is any amino acid
MNLNQFTIKAQEAVQKAFQIAGENGNQAVETGHLMKALFEEGEDVVSFLLRKLNVNVNRVSTVVNSIVASYPKVSGGEAYLSKEASAALQKAITLSKESGDQFVSVEYVLAGLLEAGDQISQMLKDN

SEQ ID NO: 101239 - protein, 142 aa, Unknown
  Obtained from environmental sample
  DOMAIN (20)...(142): 3-hydroxyacyl-CoA dehydrogenase, NAD binding domain
  misc_feature (1)..(142): Xaa is any amino acid
MAESLDKFALNKKIAKQGLIHKAGLIGCGEVGQEVARIASQAGIELVFVEINEQRVADVGRLINVRLDEMINRWGLTHGDKRVILSRIKGTTDFNMLRNCDLIIETISSDNPLHDRIQLFRRLEDYVSPTTPITSSVSTLMI

SEQ ID NO: 101240 - protein, 293 aa, Unknown
  Obtained from environmental sample
  misc_feature (1)..(293): Xaa is any amino acid
MHRAQEKGVSAGQYAALILAAGFSSRMRKGFKPLLPLPFADGERNALESLARLYAEAGIQRICVVGGHRGADVAAEAKRLGLAYVRNPDAERGMFSSVCAGLEALGASGADCFIHPVDIPLVRLAALRALLAEAEKHSGAVLVPLFKGEEGHPPLLPAAHIAAVLAWKGEDGLRGALRALPRRHVSVADRNILLDMDTDDDYVEVCGRAGRRHILEPEEAEELLRCLAVETRGMAHAKAVGLVAEKLALACNAAGAALDPLLAEAGGLLHDMCKGQKAHERAAGEALRRLGLP

SEQ ID NO: 101241 - protein, 266 aa, Unknown
  Obtained from environmental sample
  misc_feature (1)..(266): Xaa is any amino acid
MRWLDTNVQSDNIYIIELDSNESIADQIFYYNGKTNISITLRGLGLTPVTLGYGGNINVKSGISLILDNNIKLQWGGLYPINIGSGGNLIMNNGTKINGRVYIDNGGTFTMNGGEITGGTTFSNYYNPYSYGGGVYVLGTFTMNGGIISGNSAGGTSEGYSPCSNGGGVYVSGTFTMNGGEISGNTATTTTTMSSSSSSSYGCSSYGGGVYVSGTFTMNGGEISGNTATTTTTISSSSSYSSSSSYGGGVFVSGTFTMNGGIISDN

SEQ ID NO: 101242 - protein, 135 aa, Unknown
  Obtained from environmental sample
  DOMAIN (1)...(98): Uncharacterized ACR, YhhQ family COG1738
  misc_feature (1)..(135): Xaa is any amino acid
EGYAGTAAFDAILGGMSTGGITIASLAGYVIGEFSNSVVLSRLKVAMKGNALWVRAIASSLVGELLDSLTFVFFASLTGVFGWELFLSLVLTNYLFKVLIEVLVFPLTFLAVKKLKKAEGIDAYDVGVKLNPFRG

SEQ ID NO: 101243 - protein, 219 aa, Unknown
  Obtained from environmental sample
  misc_feature (1)..(219): Xaa is any amino acid
MIENFRTLMLERRPTDGKPWKLSQCVRTLVDNIDYWSYLVLEHGKDEKKARWKYTNIEYFVRMIENWENDPDNLDAGLYPWLNRISLITRDDGEDDNKGKVNLSTIHAAKGLEFPVVFIAGVEKGLIPHEKSIGEDEDEAGSIEEERRLFYVAITRAREKLYITSCRQRRRLQTASECSPSPFLEEIPPELVKYHEKEPDVIDEAQADKYMAQMKALLK

SEQ ID NO: 101244 - protein, 146 aa, Unknown
  Obtained from environmental sample
  DOMAIN (23)...(136): Ribosomal protein L19
  misc_feature (1)..(146): Xaa is any amino acid
IYRTGGPEACGLGGEKSQGVGLMDPIYHINQEQFRLDLPAFRVGDTVAVSVRIKEGDKERLQVFKGVVIRHHRGNAADASFTVRKVSYGVGVERIFPLNSPNLDRIEVVTQGRVRRARLYYLRDLKGKAAKVRARNKFFLADKAAD

SEQ ID NO: 101245 - protein, 68 aa, Unknown
  Obtained from environmental sample
  DOMAIN (4)...(62): Ribosomal protein L35
  misc_feature (1)..(68): Xaa is any amino acid
MPKMKTNRGAAKRFKSTAGGKVKRSRAYARHILTSKTTKQKRGLRRPATASSANVGALKKLLPYLGIE

SEQ ID NO: 101246 - protein, 147 aa, Unknown
  Obtained from environmental sample
  misc_feature (1)..(147): Xaa is any amino acid
MKASLNWLGDFIDLSGLAPRDIADKLTLAGLEVEDIRPLSAGREDWALEIGVTPNRPDALSILGLARELAVLLDRPLKKPVPRVREDGPEIKTLAQAAIDDPEHCFRLAVRVILDVTIGPSPDWLADRLTAVGLRPINNMWTSPTTS

SEQ ID NO: 101247 - protein, 89 aa, Unknown
  Obtained from environmental sample
  misc_feature (1)..(89): Xaa is any amino acid
MSDTNKERKSAVREAWKNERAYVREARGTRDWSQSEQREIVAKGKADGYYGHHMKSVKDYPQYAGDPKNIQFLNRSEHISGAHNGNTHN

SEQ ID NO: 101248 - protein, 303 aa, Unknown
  Obtained from environmental sample
  DOMAIN (167)...(208): Putative Ig domain
  misc_feature (1)..(303): Xaa is any amino acid
ITDIGDSAFNGCYELTSLILPNSLKDIGKKAFDGCWGLTSVKLGNSIMNIGESAFTGCSGLTEFIFPASVENIGERAFAGCYAIVFVTFKSQTPPVLGKDVFYYCDKINDIYIPYGTTSAYQYEPQLNEYGFTEIEIAPQIVTMSLPDGKVNTVYDQTLTSTGGVNSWSIEDGSLPTGLSISTNGVISGTPTATGTFSFTVKALNTAGSDEKVLSIKINGDSGGSGGSGSGGSGGSGGTGDSDNGSGDSNGGGLTSADVKKELSITILSSSIEIDGVKIPANSIIVNLGNLHGDFGFDYSFKV

SEQ ID NO: 101249 - protein, 164 aa, Unknown
  Obtained from environmental sample
  misc_feature (1)..(164): Xaa is any amino acid
MIYNIMDYSGMKALIMGLGLHGGGLESARYLLRHGAMLTVTDLRDEKILAMSIEQLEASCAGEPGRPAIRYVLGRHEIDDFRNADMVIKNPGVRPDSPYLQAARHIETDIGLFLAAIGSFAVGKPSVRLITVTGSKGKSSVSSALHWALKESNLRVYLGGNITV

SEQ ID NO: 101250 - protein, 285 aa, Unknown
  Obtained from environmental sample
  misc_feature (1)..(285): Xaa is any amino acid
VSFRGGYSDDAGSTTRLGGEAIFTGSAPTVIEGNFSAKGMDITGTGATVNAADAAGFNLNGGSLNIGTGGNTLNAGAHALDLNNVALAANSTLHGGDLTVRGSYADAPDSVVDLSGMATFYGNAVINAGNFAAAGMTVGDPNRRQGGTTVQLTAAAADGLDLKGGGLNIAGNSRLASEGKLDLTNAGRVDIDLNRTPNTAETAALYAAGGILLDGNPLTLRHTGTIQQEGIWTLAHADGGIVNQFDPNMQNVNSAKLKGNVIYQQGGGGDTVTDILFDGRYTPLS

SEQ ID NO: 101251 - protein, 287 aa, Unknown
  Obtained from environmental sample
  misc_feature (1)..(287): Xaa is any amino acid
IYYSYRRFNESFILNEENDDIYKPVYGNYQNGLYMATNPYILWKIPLGINAGNYGEIEFIPGISVVIPHEFSKWPLAEIRKGPVLEFSQNFGFSKIDWIDNFRNGLDVSLINSLDFNFYKLKNKKNPWEDNISIYGIGHFKITNFFGVSAKLMYRQWFFSDYGYTMAGDALRGVIDREIFADCMISLNLNLNFRLFKFKPSVWLNKPKLRVFNFEFFVSPFFDVAVYHDSSYKNNFNLKNIVPTGGLEFIIFPEFFRSLFLRVSLGWNLKNRPKYNNMEIYIGTDFF

SEQ ID NO: 101252 - protein, 278 aa, Unknown
  Obtained from environmental sample
  DOMAIN (49)...(114): His Kinase A (phosphoacceptor) domain
  misc_feature (1)..(278): Xaa is any amino acid
DLPRLPYYQSESKLAAIFSILGIALASILSFVLIRVDAARNKADMESKYKSAFLANMSHEIRTPMNAIIGMAELLTNEQLSKRQMGFIDDIKVSAYSLLSIINNILDFSKIEAGRFSLIPVNYDFRALLDNIISMFRYMTQRKGLDFKYESLGEPPEYLYGDDLRLRQVLTNIYENAIKYTDWGYIVLKTSFLENNLIFEVSDTGMGIREENLPKLFDAFERFEMKKNRSIEGTGLGLPICKSIVEMMGGMILVKSEYGKGSVFTIIIPVVSGGKPEV

SEQ ID NO: 101253 - protein, 293 aa, Unknown
  Obtained from environmental sample
  misc_feature (1)..(293): Xaa is any amino acid
GRIIYCGDEVPALYAACPAVDMGGKTVVPAFADTHIHFASHSLFESTLDVRDAEDFAQLGQMLRNYEAHTKKQKLTICFGCCAHTVKEGRLPNKDDLDAFTTRPTMIVKYDGHAGVGNSALIASIPDAVRTDPGFNMQTGWMTQNAFYEGVNFMSAQISPLSILMGLQKTADAMARRGIGLIHAAEGVGFKNDIDLDMMRFAARGLPQDFRIFFQTMEINKVLKRKLPRIGGCFRLALDGCFGSEDAALLEPYSNNPENRGFLSYTQEQVNNFCIEANRPGLQIAVHAIGDAA

SEQ ID NO: 101254 - protein, 237 aa, Unknown
  Obtained from environmental sample
  DOMAIN (1)...(232): Glycosyl hydrolase family 53
  misc_feature (1)..(237): Xaa is any amino acid
VQIGNEITNGTLWPVGKVDYDEATGEPVNYDKMTRLLKAGATAARESGEVKIIFHLERSCDNARYRQWFDAVTAAGIDYDIIGISYYPHWHGTMREVNYNLEDISARYNKDVMVVETAYPFTDKHYDAGRPGVSLVINDRITLPDGSSPPYPLSLEGQRNFLRDLVKMVKSVKRCKGLYYWEPGWLPLEGSTWSTEAARRYIGEEHKAGGNEWANQCLFDYKGNLLPTINELDELNK

SEQ ID NO: 101255 - protein, 295 aa, Unknown
  Obtained from environmental sample
  DOMAIN (7)...(123): PAS fold
  misc_feature (1)..(295): Xaa is any amino acid
SYMNLVFDNSPDIILLLDKDACLVHCAKIFRQKLKINELDEIYKASFNEIFDVFTDFETTNQITAHFEKSIKEKKPAIFEQIMNFDDDGNDRHYEIHFTPMYNNNGEFQGAFIFFHDMTEILDAMNRAEQASRAKSTFLANMSHEIRTPMNAIIGMTAIAKDTNDSERKDYCLSKIEGASVHLLGVINDILDMSKIEEDKFELSYAEFELIAMIQRVTNIFEFRFGEKKLIFTMNLAPDLPRRIITDDQRLAQVITNLLSNAVKFTPEGGSITLSARRLEDKEQGFCTLEIAVTD

SEQ ID NO: 101256 - protein, 127 aa, Unknown
  Obtained from environmental sample
  misc_feature (1)..(127): Xaa is any amino acid
VFVDDFRPMFFCLRDTPESETSGAAERRRLEMRGLDMREVDCLYFDTYAAMQQGARGLRAAGYPVYESDVNPLQRYLMERMVSGSMRVVGASERIGRFAGFKNPRVRGCEFVPDLRVMSICIDGDIN

SEQ ID NO: 101257 - protein, 293 aa, Unknown
  Obtained from environmental sample
  misc_feature (1)..(293): Xaa is any amino acid
TYSSPNNKTLNVNSTGAKPMFAGSTQLTSNNWGTYVSTTQLSEWEYDGTQWNLLNPGGGEYRLPSTVSSGGSALPTPSTISTVLRTANLVGSVWGATWGKLDLNTDVTSFLGVANGGLGTSSLGTANRVLLSGASSTSAVSALAAGSNGQVLTQTANGAAWQNAPSGGGGTAYLPLTGGTLTGTLNMTGQTIIVDRVRLNNGIVPLGTSWTLGAQTSSLTVDANNIGLLSTGSITMISSCLASTVANRPTISFGGGGNSTESLSITAPVVSIVARSTLYLYSGNRCEIDSNVY

SEQ ID NO: 101258 - protein, 103 aa, Unknown
  Obtained from environmental sample
  misc_feature (1)..(103): Xaa is any amino acid
WKTGSSTRYNRNDFYANGASAKIPGMVAVFDDNAADAFINSILSSDILPYRLRNPAKFRRLRTLTQIVLDRVSVSFKKKKILELILNEKKEKEFFSMLKISES

SEQ ID NO: 101259 - protein, 289 aa, Unknown
  Obtained from environmental sample
  misc_feature (1)..(289): Xaa is any amino acid
VEKIHSQNSYAYDALGRRTLTENTTGQTLRTLYDGKGCEAIREGETFSDGSFTTRFAPAEAASAAPSNQATGERYRWVSDNESARTRNSSDEYVIQNSRYSGRGVTLYGNGEAVAVIYSSSGISRSMYMGKDIMGSVRSITVDTGSLDDRYEYDAFGQPYKGDLSGGMNLGYASKSYDTATGLYNYGYRDYKPQAARFTTVDPIRDGNNWFAYVNNDPVNWVDLWGLDIMRSTYIQGSGKITTVYIPTKSDGSMDVDNVKTYKFDAANDVTTNPNMTIPKTGTPEYYYP

SEQ ID NO: 101260 - protein, 110 aa, Unknown
  Obtained from environmental sample
  misc_feature (1)..(110): Xaa is any amino acid
MKTWWKDSIVYQIYPRSFQDSSQTEFPNDGIGDIPGIISRLDEIKELGANVIWLSPVYKSPDADNGYDISDYCSINPKFGTMADMEKLFSEAEKRSIKIIMDLVINHTSD

SEQ ID NO: 101261 - protein, 292 aa, Unknown
  Obtained from environmental sample
  DOMAIN (1)...(244): Domain of unknown function (DUF323)
  misc_feature (1)..(292): Xaa is any amino acid
DPDTSIGEDKERPVHNVTLTGFYIGKYQVTQAQYQSVIGSNPSNFSSNPASGEVQGNRPVENINWYDAIEFCNALSIKEGLSTYYTIDKVNKDPNNTNNYDSYRWTITRNNAANGYRLPTEAQWEYAAKGGNGTPGNYTYSGSNTVGDVAWYWENSNRMTHEVGKKAPNGLGIYDMSGNVWEWCWDWQRIYSSEAQVNPGGPIAGANRMKRGGSYNYSAFGARSVYRYEDNSLVSLGVGIRLVRSSDTGSNNSVINIAAIQGVTAPVSGGIPKTSITDTAQYTGTITWSPNI

SEQ ID NO: 101262 - protein, 274 aa, Unknown
  Obtained from environmental sample
  misc_feature (1)..(274): Xaa is any amino acid
VDKKGYRVTIYERSERLGGRIWDFEGKRISRELIDEQLRCIDDMDVKLVFGRKIGVNALAALKDEYDAVYLGTGVWEEFLPIDPGTFQVLNSSVFAAGRLLGTGGGPRPVRASAGGTASIIESVSTGKRAAISIERYTQKISMTASRDREGPFETPMRYNTAGVETRTAIELTEEFYTKEEASGEAKRCLQCRCDECVKACAHLRKFDMAPKAYARQILINDDVIMGTRYANTMINSCAMCGLCGEQCPQGIDMREIIREARASMVETGKMPPS

SEQ ID NO: 101263 - protein, 91 aa, Unknown
  Obtained from environmental sample
  misc_feature (1)..(91): Xaa is any amino acid
ASFSLRIRFTPELFRTWQICKGNFEPYNTYGDTKMFPLIIKPKQAAAAVRNQSYKLVCLNDNVHIRNYGQVMKNLRDAFESILPERSGFEK

SEQ ID NO: 101264 - protein, 253 aa, Unknown
  Obtained from environmental sample
  DOMAIN (91)...(252): Glycosyl hydrolase family 3 C terminal domain
  misc_feature (1)..(253): Xaa is any amino acid
TNSPEESAALALNAGCDLNCGCTYPMLTVSYKKGLVSEEAINTALERLLRTRFKLGMFDPPGSGKYGKLGRKVINCEKHKKLALKAAEKSIVLLKNDNGLLPLDSGPKNITVVGPSSANAHALFGNYYGVSSRFITILEGLGDKVKDKFGINLEYRQGCLMYSETSKTLAAYGEAAAADVIIAVMGLDGAIEGEEGDAIASDSNGDRDTIELPSWQLNYLRKVRDAGKKIILVLTGRQSNRFSRRYCGRCNFC

SEQ ID NO: 101265 - protein, 250 aa, Unknown
  Obtained from environmental sample
  misc_feature (1)..(250): Xaa is any amino acid
LFIQTETKGADKLGYPAKLFLDFDPLLALATFLSGHAILKGMLLSLVLVVITIVFGRAFCGWACPFGTLHNIVGAMKKWKGPQAVRGWFRAKYLLLVFLLSGSIVGIQLTGIFDPISLLVRHLTIGVYPAFNYAAIGITEAAYKTDIGFVAKLGDGFYWILSKTVLAFKQPYFLQGTLITLLFVGILLLNLSERRFWCRYICPLGALLGFLGRWAPFKRRTLEACNNCGLCDRKCQGGTKTDSWAVSECY

SEQ ID NO: 101266 - protein, 256 aa, Unknown
  Obtained from environmental sample
  misc_feature (1)..(256): Xaa is any amino acid
MGDDAATRAIFDLIARLNPDLQHDLLVAATQAVASIGFNQGFADALHTEGNDGLVFAALEASLLMNNPLCCQHIKDIFWRHGRDIQRAAAARLARIAGPDDVPFFLDLLERHTDSDVFKAALFFLGNRMRAEQALEKLFSMLTHPNDEVREAALAACIALQSPEAAQHFKTLFQADDPQLRAMAVYALGRQSLADNLPELRLALEDENPQVRRITVETFGASGELGKDYLTLLLPRLHDENRDVRLAMVSLLGKSN

SEQ ID NO: 101267 - protein, 293 aa, Unknown
  Obtained from environmental sample
  DOMAIN (83)...(274): 3'-5' exonuclease
  misc_feature (1)..(293): Xaa is any amino acid
DISELSAENLNRTAAARLLLREGIRQGAKQLDPELNSKTGQGPVRDGAAGVPTEDNFAEAGTGGSAKAGGSCTDAALLGEGNYKIILDLAELQTVLAEAKKQRLFALDFETDSLDAWHSRPVGISLALKPKEAYYAPVAPHGVQPDGTASSPQHIDPEKVKALIAPLLADPQMTVVAHNAKFDYKVSRGWGIERWTCKIWDTMVAAWLADPERNNYSLDSLAAYTFNYTPMTFQSIVPKGCTFDTVPLETAARYSAEDADLCLRLMRHLEPQLAEADAVGLLKTSKCPCCPYC

SEQ ID NO: 101268 - protein, 171 aa, Unknown
  Obtained from environmental sample
  DOMAIN (1)...(152): Peptidase family M48
  misc_feature (1)..(171): Xaa is any amino acid
SGGHIFISRGLIASAKSEDALAGVIAHEIAHIQLQHSIKAIKTNRITQALLVTGAATAGAATGMSAKELTDVFNEAVGEIVTTMVNNGYSQTQEFDADTAALSLLADAGYNPSGLIDMLKELQKTQSGHSGGFNKTHPTPDKRIASAEKNLKKHNVKDTSSYRRARFNEVQ

SEQ ID NO: 101269 - protein, 301 aa, Unknown
  Obtained from environmental sample
  misc_feature (1)..(301): Xaa is any amino acid
NMTSIYKARDIEGSKDDFIKENDAVVIMANRFDGVDFPDDECRMLFIYNLPQTINIQEKFMISRMSALKLYAERIRTRIIQAVGRCSRNPSDYCVVCILGNSIYKELTDPSRQKQFAPELRAEIQFGIENSTDYTKVEDIIEQVSDFLNKTEMWQEAEKNIVEKRNSYWHEENKETELLNSKLHKAAQEEVNFQYFMIKKNYKEAYNAAQNILSSLDAPALSGYKVFWNYIAGSLSYFLYKQGNNEYRNIGIEHLTNAAKMQTNVKWLSNLAVKIFDNKLVLQQDTYIADVIDRFEDVLLS

SEQ ID NO: 101270 - protein, 101 aa, Unknown
  Obtained from environmental sample
  misc_feature (1)..(101): Xaa is any amino acid
ASGVDHLIVVVEPGQRSLETARTVRRLAADLHLRRISAVGNKIRSRDDEDFIRRELGDLEILGFIPFADSIIEADRRAVSVFLNSPEAAAAGREIYKRLAG

SEQ ID NO: 101271 - protein, 254 aa, Unknown
  Obtained from environmental sample
  DOMAIN (32)...(252): Domain of unknown function (DUF323)
  misc_feature (1)..(254): Xaa is any amino acid
AHFREIPSGGKAGKTAANKPAARTAKRTGGKPEIDMVFVKGGTFKMGFAGERENGNSRTHAAHNVTVGDFYIGKYAVTQKQWLQVMDGNPSGGVEGDDYPVNNISWHDAQEFIERLNAATGKKYRLLTEAEWEYAARGGAESKGYEYSGGDNPDDVALHDGNSGGGSHPVGSKAPNELGIYDMSGNVWEWVSDWFGDYDRGDQVNPTGPQTGEFRVSRGAYWGLIAEDCKVYQRGYYPPGGSCYDTGFRLALPK

SEQ ID NO: 101272 - protein, 248 aa, Unknown
  Obtained from environmental sample
  DOMAIN (1)...(223): Peptidase C10 family
  misc_feature (1)..(248): Xaa is any amino acid
MDGDNRSITGCVATAMAQIMKYYNHPARGNGQSEPYTGSHGVYVPAVNFDVNYDWNNMLNSYTSNMKLCGSKICYDSNWTKTQANAVATLMYHAGVSVKMDYSSSGSGASSVLYVGDALRDNFGYDNGIQFKYRYEYNDDVAWEMMLKEQINAGMPVYYRGQGGSGGHAFICDGYDNNGRFHFNWGWDGDNGGSTDGYFVTTALNTYVGAFNTLQGAIINIKPAPPTITAQPTAKTVQVGQITQFTVA

SEQ ID NO: 101273 - protein, 275 aa, Unknown
  Obtained from environmental sample
  misc_feature (1)..(275): Xaa is any amino acid
IQTHKVTFTPIDTDNYSVVTGINVTITVAKAVPVYTAPTDITATYGDVLSSVVLPEEWSWERTGSVGNAGTQIHKAIFTPTDIWNYNVATGINVAVEVEKATPRYTIPTGLTANYGDVLSNVILPYGWSWEEPETAVDVGIQTHKATFTPTDTWNYNAVTDVDLTVTVNTVNATPPIITAQPVGDTVKLGKPYNLTVLATVNNGGTRSYQWYNNTIASRNGGDAINGATSSSYSVPTSTAGTYYYYVVVTNSITDNGDGGVKSASATSDVVTVVV

SEQ ID NO: 101274 - protein, 278 aa, Unknown
  Obtained from environmental sample
  misc_feature (1)..(278): Xaa is any amino acid
NSETTKTRFGIEGDSLGIIYTRTGRHFFDEKAHERAILLRLKAALDNSGFWEAFSTNWVCLDAELMPWSVKARSLILEQYAPTGRAGQNGLTKAVEALRAAKVSYNGKDTSGVTFVPGTPGDMNLAAVLADYQNRQECVERYIEAYRRYCWSVNSVDDYRIAPFHILATEGKVWLDENHPHHLAVIRDYITAGNNPVFVATNHLTADLNNETSIAEAVDWWLNLTKSGGEGMVVKPLDFIARNKNALLQPAVKCRGREYLRIIYGPDYTTAAHLTGCE

SEQ ID NO: 101275 - protein, 203 aa, Unknown
  Obtained from environmental sample
  DOMAIN (1)...(203): tRNA synthetases class II (D, K and N)
  misc_feature (1)..(203): Xaa is any amino acid
MDSLALTEELFSHLAKDSAITVGSFERITVADAFAKWAGFDLFAAAEEGSAAMDLQARKLGLDPMPGMTVHQLYDLIFIHAVEPQLKTEKPIALLDYPAFVPCLAKKSPNRLTVERWELYYNGIELANCYSEENDPQAVKDFFISEEAEKNRTAIVKHNVDHDYWKIFKTFPRCSGVAIGLDRLIMSLTGKTTIDGVLPFIGS

SEQ ID NO: 101276 - protein, 238 aa, Unknown
  Obtained from environmental sample
  misc_feature (1)..(238): Xaa is any amino acid
ESPNGEDYKIDFKYHAKVFSSGRIENALQYFKDKSSFGKPWLIIIDEAHKYRNEQTADYKNLHDLCRANKVMLLTATPFNNRPSDIYSMVKLFQIPLKSTLKNVDNLGFRFQELIIRYNELRKKQRKKDIDEHSLKLEIEAIAANIRRIISPLVIRRSRLDLMKITAYKNDLEKQKMGFAETGDPQALEYDLGEIKDLYLSTLQQISPDIETDDTQLHYQAARYNAVHYVKHEFEDKR

SEQ ID NO: 101277 - protein, 232 aa, Unknown
  Obtained from environmental sample
  DOMAIN (1)...(232): Poxvirus D5 protein-like
  misc_feature (1)..(232): Xaa is any amino acid
LNVRNGTVNVLTGEFGGHRQEEMITKIANVDYDPAADCPLWKQFIREIMNYKTDLVNFLQTAAGWALTGNIEEQTMFILYGSGANGKTTFLNTVMHLLGDYAIATPTESFMKKNGDQNTNDIARLRGTRFVTTTEAEQGRRLSEPLIKKITGNDQMTARFLYGEYFNFTPTFKIFMATNHKPVIKGTDHGIWRRIKLIPFTTTIPEERQDKNLEERLKQEASGILNWWTLPR

SEQ ID NO: 101278 - protein, 68 aa, Unknown
  Obtained from environmental sample
  DOMAIN (10)...(65): R3H domain
  misc_feature (1)..(68): Xaa is any amino acid
ISAKITCPPCLNVAEKVCENKGSVLLEPMNPFDRWLIHTTLNDINDVETKSEGDGLYKQVRVSYRGFR

SEQ ID NO: 101279 - protein, 93 aa, Unknown
  Obtained from environmental sample
  misc_feature (1)..(93): Xaa is any amino acid
MTSAQVDAVSGATPKAGTLTYTWDCTDSRGAVVPAGDYVIILEGTLRWENQVYYRAPIRIGQGPAAATVNVEYKGDAGEDRAMISDVKVRTLR

SEQ ID NO: 101280 - protein, 238 aa, Unknown
  Obtained from environmental sample
  DOMAIN (5)...(238): Aminotransferase class-V
  misc_feature (1)..(238): Xaa is any amino acid
MSKRTINFYAGPAGLPLEPLKKAQEELLDFAGTGMSVMEISHRSKEYDAVHEEAIALTKELLGIPSNYKILLLQGGAHLSFAMIPMNLLRKDRRANYITTGNWAEKAFKEAKLVAGDRVREAATTKGEKFARLPKASELQISPDAAFVHFTSNNTVEGTQWHEFPKTDKPYICDMSSDIMWRPIDISQFGLIYAGAQKNLGPSGVTLVIIRDDFLEMCEAQDLPSYLRFKIHAEKNSL

SEQ ID NO: 101281 - protein, 199 aa, Unknown
  Obtained from environmental sample
  DOMAIN (10)...(199): haloacid dehalogenase-like hydrolase
  misc_feature (1)..(199): Xaa is any amino acid
MNVYNLPGKCAAVLFDIDSTLYTNPEYARSQIDLPIERLAGMRGISFSQMNDEIARYRVDWAKEHNGQGISLGNIFKAFGVSISESVKWREELCQPERYLSEDTRLRSALERLKTAVALGIVTNNPVSIAKRTLRVLGVEDLFHAIIGLDTCGVSKPHREPFTRAASLCGAAPEACVAVGDRYDIDIALPLELGMGGIL

SEQ ID NO: 101282 - protein, 205 aa, Unknown
  Obtained from environmental sample
  misc_feature (1)..(205): Xaa is any amino acid
MLIQKLHDNWKMRKLPSGPFLPAKVPGSVYNDLLLNKQMEDPFYRDNEDKAFALMENDYEYRTAFSVSRKMFSMDKVLLRCEGLDTVADIILNNKTIANTKNMHRIWEFDVSGILKEENELKIIFHSPVKYVREAHKKLFVDGASQCLDGFPQLRKAHCMFGWDWRPRLPDAGIWRDISLAGIRAARIDNVYVTHIHKEETVELD

SEQ ID NO: 101283 - protein, 266 aa, Unknown
  Obtained from environmental sample
  DOMAIN (127)...(205): Bacterial Ig-like domain (group 2)
  misc_feature (1)..(266): Xaa is any amino acid
MSNKSVFKNAAAVLLAALFLIISGCSDPFFIRILYIDGVPETGEVGTPLTLTGNVRPAFASNKDIVWSVTDGGNTGADINGNILNTAASGTVTIRAVIVNGIAEGKEYVQDFEIIFSEGGGVIGDTAVTGVSLNHTNLTLTIGETATLIATVHPSNATNKTVTWSSNETGVATVTSGGVVIAHAAGSAIITVITEDGGKTAECSVDVNDPSLLTLSGTITISPSSGVTVGTELTAVYTGSETVTYQWEKDGSGVGTNSNKYTPTDV

SEQ ID NO: 101284 - protein, 252 aa, Unknown
  Obtained from environmental sample
  misc_feature (1)..(252): Xaa is any amino acid
MGREVKAKPGTVLNAAAGNDGMALQISEGEAVIAEENQNLEISAGEAIAMDQSGSIRSGPAAFVIQPKPNALYRKSTDDPLNISFSWNRINLQPDETLRLEIAEDQSFSRSVRTFDELNDSAQAALNAGIWNWRLTYNGAVLDSGRFTITDSSGVELLSPARNRQFFYENELPKLYFQWSQVDDALHYIAEIDVTPEFRNPVIKRQTTAASFSDSSLGEGIWYWRVTPVFSQTGESGVNPHTAAFRIVKSNE

SEQ ID NO: 101285 - protein, 52 aa, Unknown
  Obtained from environmental sample
  DOMAIN (1)...(48): PTS HPr component phosphorylation site
  misc_feature (1)..(52): Xaa is any amino acid
KDGNTADAKSIMNVMMLAAAKGTVVTVRADGEDEEAAVQAVISLFENKFNEE

SEQ ID NO: 101286 - protein, 154 aa, Unknown
  Obtained from environmental sample
  misc_feature (1)..(154): Xaa is any amino acid
TYTLVQRAVYLMEERGIRPEQILMATFTEKAAKELVTRITNELSARNIPANLNEMYIGTFHSICLRLIKERLEHTRLKKNYRILDTFDQCYTVFQNINRFRNICGVDALLPNTNSSTWRMASDICGYINTLVEELIDPAVLSEDADPKVAALGL

SEQ ID NO: 101287 - protein, 57 aa, Unknown
  Obtained from environmental sample
  misc_feature (1)..(57): Xaa is any amino acid
GYIARSKGMAQIARELNLNREGLYTALSPQGNPSFITIARVLDNLGFRLSVQLKEAS

SEQ ID NO: 101288 - protein, 283 aa, Unknown
  Obtained from environmental sample
  DOMAIN (111)...(283): DEAD/H associated
  misc_feature (1)..(283): Xaa is any amino acid
ADGTKIGELDEEFVWERRIGDCFDFGARGWRIKNISSESVEVTPLDNVADFIPFWKGDIPFRSTNLTNRILTILENYNNKNDIKTHLSVQAHESLKVFFESQRTSQQGLPLPDTKNIVIEIVKGTELNRDFYSIIMHNFRGGQVNYPLSLALSVEIEETIGLRVENFPSDDNILFLLPRQGLGDTSSPEEILRCAIAALEKTDTTGVSKGERLFRNRLESSALFGANFREAAERSLLVPKSPFGKRTPLWIMRQRSKRLFDAVVNDEGFPATAEAWRSCLIDS

SEQ ID NO: 101289 - protein, 135 aa, Unknown
  Obtained from environmental sample
  misc_feature (1)..(135): Xaa is any amino acid
MLPQTFHPVIRSWFTETYGNPTSVQAESWPLIESGENILALAPMGSGKTLTAFLSAISRFCSPVADASTGTQYPAETKYPADKLSVLYISPLKALNEDIKRNLLEPLAAIKIRFEKEGLQFPPIRVQTRSGDTPQ

SEQ ID NO: 101290 - protein, 192 aa, Unknown
  Obtained from environmental sample
  misc_feature (1)..(192): Xaa is any amino acid
YHSVLSISAIKCSFNITGENIESSIITQYERFYFRKPGEELGKRAIAVNGLTDEEITKRRNGDNYPKYFHEDISTFRYSFCNDTRHFVGHNIYYDKQYIDFWLPNIFCTMRTNTKIIGLKKTDGKPKYPSLNETALFYGVETDKNKLHGSMYDSYIAYQIFIKMLENEKIRDKPLAFLEAGGGEKYVVDKRA

SEQ ID NO: 101291 - protein, 238 aa, Unknown
  Obtained from environmental sample
  misc_feature (1)..(238): Xaa is any amino acid
DFIYGKTFIKTDAILPSYLVLIPLIYFRFHYKDKWHTTNNIQEYLLKTLLASAFSGSPDALIDKCTRKIDELKAFDVAEIFGVIRADGRNLEISKDTILNTYYGSKQIHLLFNLWYNFNYQPAYDQNKPQVDHIFPQSQLKKFKVQNPATDRKDILKYKWEDRDQIANCMLLTAQENGAGEKTDTLPEIWFANKPKEYLEQHLIPQDKELWKLDNFERFIEERKKLILVKFEHMIIKN

SEQ ID NO: 101292 - protein, 289 aa, Unknown
  Obtained from environmental sample
  DOMAIN (2)...(79): Rho termination factor, RNA-binding domain
  misc_feature (1)..(289): Xaa is any amino acid
IIYAFGSLEILPDSFGFLRSPQNSYLPGPDDIYISPSQIRLFALKTGDTVYGQIRSPKEGERYFGMLRVETVNYNDPTVAQNRIPFDDLTSLYPEQKLDLETSPGGISERIINLFCPIGKGQRALIVAPPRTGKTIMMQKIANAITKNHPEVYLIVLLIDERPEEVTDMKRTVRAEVISSTFDEQASRHVQVTEMVLEKAKRLVEHKKDVVILLDSITRLARAYNQTVPASGKILSGGVDSNALHKPKRFFGAARNIEEGGSLTIISTALVETGSRMDEVIFEEFKGTG

SEQ ID NO: 101293 - protein, 200 aa, Unknown
  Obtained from environmental sample
  DOMAIN (11)...(196): ATP-dependent protease La (LON) domain
  misc_feature (1)..(200): Xaa is any amino acid
MGKSPAQPAARIPMIALRGLVLYPRMVLHFDIGRNKSIKALKDAMDGDRRIFLVTQRDIREDDPPADALYSVGVVGEVRQLIRGSRGENGAVRVMVEGLYRGGIESVVSSEPYLLADVRQLAMRGVRGKQRERSQALMRTVKDLFEEYCYLSTKVPKELVLNALVEEDANNLAEYIAGNIPIPINEKQRIWRKTASGPPE

SEQ ID NO: 101294 - protein, 290 aa, Unknown
  Obtained from environmental sample
  misc_feature (1)..(290): Xaa is any amino acid
DGFYARGALRIGAGMVPRGEVALIIAGIGLASGILDQQIFAAVILMTLMTTLAAPPLLSATLKIAGVGTRRPVKGDDSVLLKWEFSSAEIADIVINTLLNDLRGEGFYVQVMNLDEGISQARKDDIVLSINEKDNFVTIETARADVPFVKTLVYEVIVELHDSIQKLKDSSDPKAMKKELLNKDGRTNEDLLALVCPECTSIELKGQTKPEIITELVDLLAIRHKLLDRDVVLADMFDREKTMSTGMTHGIALPHAKTEGVDELVVAVGIKKTGIDFESVDGEKSRLFIM

SEQ ID NO: 101295 - protein, 276 aa, Unknown
  Obtained from environmental sample
  DOMAIN (2)...(109): Cytochrome C biogenesis protein transmembrane region
  misc_feature (1)..(276): Xaa is any amino acid
NYEKRFHLNNKPRGLVGAFLAGGAFGAGWTPCIGPALAGILLLAAQSGGIPKAVLYLSFFSAGMGVPFLLASVFFSAFVKASAALRARLPLIQRISGVLLVIIGITMITGHYRALSALAARLQSDPANGTKADGAAFVPASASGETSMSDNAVSASVIGAFKKAGLPVVSAGIAPPDFTLSTLDGSTVRMSDLKGKVVFLNFWATWCGPCRAEMPSMDAVYQQLKGRGFDILAVNIQEAPAGVDAFVKEYKLGFPVALDRNGKISAEYGIQAIPTS

SEQ ID NO: 101296 - protein, 104 aa, Unknown
  Obtained from environmental sample
  misc_feature (1)..(104): Xaa is any amino acid
DFRSPPEPQKYDSTAAMISACGLLEIAEHSSEHERALYLGSALNILRTCEKAFASWDTETDGVIGGGTAAYHGGIKDTDVPIIYGDYFFTEAVLRLLGKDFLIW

SEQ ID NO: 101297 - protein, 68 aa, Unknown
  Obtained from environmental sample
  DOMAIN (1)...(65): NADH-ubiquinone/plastoquinone oxidoreductase chain 4L
  misc_feature (1)..(68): Xaa is any amino acid
MLNAANINFIAFAHFRALDATAGAIFSLFVIAATACEMAIALAIVIAVYRRYGHLDVDELTELRDPDV

SEQ ID NO: 101298 - protein, 257 aa, Unknown
  Obtained from environmental sample
  misc_feature (1)..(257): Xaa is any amino acid
YQHRVRVTTGTPANIFNNLPDGNHSITVTAYDFAGKVVMSKPYIFIKDTTPPVVTLNNVNLDGNSRITEANAEIRAAFNDEYSRIGQLVNANAQGVGAINNWFEYRIYKYVSEDQTDTTTGWAKQTIVDTAKAEVVNPTKSASANISLMGNGGYTPVTGSPGRFWTTADSIPDGKYWLEIRVYDRVGNDSSRISDDSTKDDIEGKSPTRVAFYVNRAAPELKVYKSDKPVANYNTQKEANGSLSPDSKVMFTLYGTA

SEQ ID NO: 101299 - protein, 297 aa, Unknown
  Obtained from environmental sample
  misc_feature (1)..(297): Xaa is any amino acid
DNIPIRRVSEIIMDTLPVCSERGISYATFTLVDIAPDATVKIMEYDNPPYTFIRGEAVVEPSKEATAFERRDKSTGPKNDTRVLYSRFNAAIGDRLVFFSDGVSQAGMGTKRYPFGWTTAKAREFALGSVREKPEISARELARSIVRQASQIDMSKPKDDISCGVIYFRQPRDMLVVTGPPIRPESDREIVNIFSSFVGKKVVSGGTTATIIGRELNRNIRVNMKSFVKNVPPWSEMEGADMVTEGIITLGAVQAMLEKRQEIESNTGGMDAASRMIDLFLDSDRITFIVGTKINEA

SEQ ID NO: 101300 - protein, 293 aa, Unknown
  Obtained from environmental sample
  DOMAIN (89)...(239): HD domain
  misc_feature (1)..(293): Xaa is any amino acid
RKISQGGFWMAGEIEVGIHKILLDDEERLSPFAKRSDESLGRCRPIDRDPFRLEFARDETRILHSRPFRRLKHKTQVFLSPDDDHICTRMEHVLHVSSIAAVIGRCLNLNTDLINAIAKGHDLGHPPFGHAGERVLNKIIVNKEKNDDKESDKKVSGGFKHEIHGLRVVDKLTNYGAGLNLTYEVRDGIATHCGENFDRVLQPDRSRDLHALDTLTDRNCMPATLEGCLVRLVDRIAYLGRDMEDAIKARLINKDDIPTEVVNGLGADNGRIIGVFVNDTIANSAGKDQIEMS

SEQ ID NO: 101301 - protein, 288 aa, Unknown
  Obtained from environmental sample
  misc_feature (1)..(288): Xaa is any amino acid
MAFDTMRRDYEARKAAAKNLTDGKFVRREDCVRLLETIIKPRDRVCLEGNNQKQADFLARALVSVDPAKINNLHMVQSSIVLPEHIQVFEKGIASNLDFAFSGPQMKELYELVVSRKAKIGAIHTYLEIYGRYFLDLFPNVALVVAEEADADGNLYTGFTTEDTPTIAEATHFSSGLVVAQVKKRSSALPRVDIPGGWVDYVIETGEDFWMQALFTRDPARISDQQVLMAMMTIKGIYDEYSVASLNHGLGFPTAAVELLLPTYGKELGIEGRACTDWVLNRTRRSSP

SEQ ID NO: 101302 - protein, 103 aa, Unknown
  Obtained from environmental sample
  DOMAIN (6)...(103): Response regulator receiver domain
  misc_feature (1)..(103): Xaa is any amino acid
MPEIRKKAIMVDDNPLNLKVARNTLMGKYDVFTVPSAEKLFELLEKTLADVIVLDVMMPGMSGYEAIKILKTNPRTADIPVIFLTSKADANSDLEGFIYGAVD

SEQ ID NO: 101303 - protein, 75 aa, Unknown
  Obtained from environmental sample
  misc_feature (1)..(75): Xaa is any amino acid
IVKFPNALVMPLGQLERRMDELDPSRDAVFLCKIGQRSILGIKALQEAGYKGKLLNLHDGLNAWARDVDKSMPVY

SEQ ID NO: 101304 - protein, 230 aa, Unknown
  Obtained from environmental sample
  DOMAIN (19)...(187): ABC transporter
  misc_feature (1)..(230): Xaa is any amino acid
KGFGDRILIDGLSFTLPRNGIVGIIGPNGVGKTTLFKTIVGLEPLDDGDLKIGETVKISYVDQSRGNIDPNKTLWEVVSGGHDFIKVGQVEIPSRAYVASFGFKGPDQQKKAGVLSGGERNRLNLALTLKEGGNLLLLDEPTNDLDVETLGSLENALLEFPGCAVVISHDRWFLDRVATHILAWEGTDENPSNWYWFEGNFESYEANKVERLGADAARPHRVTYRKLTRD

SEQ ID NO: 101305 - protein, 241 aa, Unknown
  Obtained from environmental sample
  misc_feature (1)..(241): Xaa is any amino acid
VEPSKILCLTYTNAGAVEMKERIFARAKSWVGMESTELQAELLDLFEDDEMPAGDEIEKLEARARGLFSKLVDSPLPLKIYTIHAFCESILKRFPLEAGVSPHFNIVEGADAAAMVVDAWRKTLSDMREAKTEEARQSSEAFSMLTKRSSEKSFGQIRDFVLAERRKYSDLLERYRGIEAAADALRQRIFKGVAGVVPDLIQNPDVYLMQEISRIPEGPMRAYMSAIEASDKKTDIKNLES

SEQ ID NO: 101306 - protein, 267 aa, Unknown
  Obtained from environmental sample
  DOMAIN (21)...(261): Ribonuclease BN-like family
  misc_feature (1)..(267): Xaa is any amino acid
ARLLSCRQFAVFVRVVVSEYMQNHCTSRASGIAFVLLITLIPLIVTVAVLFGSIAEITPHHVERAVTALLPFAPPTVVGYILEFFQNARGLKGIGIAVLVVTAMGLFSIIEQSLNAIWKVGRVRSFFNSLRTFTMVIIYSPILFFVSFQVRHSGIFGLLPRDFFLMRLPPVILTALAFAVMFWSIPNTRVRPSSAAIGGLISCALFELERWGFGYYVNLSIQTQTIYGTFGLIVFFLSSLYFSALLLLIGAQVVYVHQNFRPLLRAA

SEQ ID NO: 101307 - protein, 297 aa, Unknown
  Obtained from environmental sample
  DOMAIN (108)...(135): The GLUG motif
  misc_feature (1)..(297): Xaa is any amino acid
AYGKNSAFNDANGWIPIGVISDNDKSFHGVFDGNGMKVSKLFSKHGGLFGAVAGEGSAVNNVGVTDAEISFDGSSTSADLSSPVGGVVGSLTGIGSMINCYSTGTISGASSVGGVVGYLADIRSIANCYSTAKISGASFVGGVVGYLNGNAGGSVTNSYSSGTVSGDSAVGGVVGAFSVDYHSLCVLTNCYSIAAVSGTVGYTGGIVGSVIRINRGGNISVTDCAALNPGVAASDANTVGRMVGGTIGDMTETLRLLNNVAFSGMKNSQGAAEWQNIGADGFDGADMAKDEIFADDG

SEQ ID NO: 101308 - protein, 276 aa, Unknown
  Obtained from environmental sample
  DOMAIN (110)...(267): DNA methylase
  misc_feature (1)..(276): Xaa is any amino acid
MNKPKFETPNLTTANVAKIAELFPSVVAEGKVNFDLLRSMLGDNVFGDEAYEFTWVGKRAAIAEAGRPIRKTLRPCVEKSKNWDTTENLYIEGDNLEVLKLLQESYLGKVKMIYIDPPYNTGNDFIYRDNFKQSGEEYNDEAGVYDENDNRLFKNTENNGRFHSDWCSMMYPRLVLARNMLRDDGVIFISIDDNEVDNLRKLCNEAFGEKNFVGQITWSKKRKGSFLSKGIISTTEYLLVYTKSIVNFSGLFGGKADENESQPIIKRTNKISTLKI

SEQ ID NO: 101309 - protein, 87 aa, Unknown
  Obtained from environmental sample
  misc_feature (1)..(87): Xaa is any amino acid
MKPELKVYENIRLCLTNARTKVFNVINATMVQAYWEIGREISASVGDRAEYGKRLLQFLSERLTAEFGKGFTIANLRNMRQFIRISR

SEQ ID NO: 101310 - protein, 87 aa, Unknown
  Obtained from environmental sample
  misc_feature (1)..(87): Xaa is any amino acid
LPAKDILNGLDDEQIKAVTLETNGVVSAGAGSGKTKVLASRYAWLVMEKKLKPEDILTLTFTNKAVSEMYSRIYRYLLDQTDTEAAN

SEQ ID NO: 101311 - protein, 283 aa, Unknown
  Obtained from environmental sample
  misc_feature (1)..(283): Xaa is any amino acid
NSGNPRVQATAMNNNYSTVDELLLSFGPSGISLDDQIAEQIGKAVSQIKSKYTKNVVEQINLLFYALGSLPPFIPIDVLSATTEIDKSMIKSFLSDIGRPLWITDNSIQFRDEPTETWFRKMYDADITMLNKFLDRLKHITTTYSYAAQVLPILLLKTEQYNDLINLALSDEYLPGNNPIEQRTIRLARYQFAFTASLKTKEYKDAIKIALRAGEETAGNERQQDLLLQNTDLFSLFETKDRVHEIALHHSLHNEWQGSSTIYSSSLLSFHDEYKGEAISFLR

SEQ ID NO: 101312 - protein, 286 aa, Unknown
  Obtained from environmental sample
  DOMAIN (20)...(110): Rare lipoprotein A (RlpA)-like double-psi beta-barrel
  misc_feature (1)..(286): Xaa is any amino acid
IPVPSPVPAPVPAPAGDFFRQDGIASWYGYEFEGRPTASGEIYNSSLFTAAHPTLPFGTILLVTNRQNNRQVAVKVNDRGPFVAGRIIDVSRAAAEQLDMLITGTAPVSVDKIQTNHPMYAQGAYTPPPAYAAPPPGYTPPPAYAAPPPGYTPPPGYVAAPPGYLPPSGYAAPPGYVPLQQAPVVVTQPMPPPQRLPPPPQQLPPQLLPPQAQTPVLIPTPPPLPPETPPATPSINVTVYPPAPAPMDFGPRARLNPSITPSPNRIYKLQVGSYKIAGNAVDAYVK

SEQ ID NO: 101313 - protein, 267 aa, Unknown
  Obtained from environmental sample
  DOMAIN (163)...(238): Acetyltransferase (GNAT) family
  misc_feature (1)..(267): Xaa is any amino acid
SSDEIALALSAALGAIKLFIVSVQGGLRRGNFPIPENIEVRENGSVVRLTPQEADTVVAAFTAYNTGVMPAALRELKLALRASRAGVDRVHIIDGREEGAVLKELFSNLGAGTMIYADAYESIRPFRNGDLPDILRLMEPLMQTGILIRRTAEQIQEKKNDYVVFEIDGSVHACAALYDWGEGQGEIAAVATDPLCSGMNLGRRIVSYLIEKARKNRMNRVFVLTTQTQDWFESLGFREASVENLPERKRQMYDQSRKSKVFALELG

SEQ ID NO: 101314 - protein, 105 aa, Unknown
  Obtained from environmental sample
  misc_feature (1)..(105): Xaa is any amino acid
MILYHGSNQNFNNVDLSKSKDKRDFGKGFYTTTIREQALQWGYNMFNRFGGEGIFLYEFDFSPSNDLKSKQFPEISDEWFDFILLNRTSNVLQHDFDFVQGPVAN

SEQ ID NO: 101315 - protein, 148 aa, Unknown
  Obtained from environmental sample
  DOMAIN (31)...(108): Bacterial Ig-like domain (group 2)
  misc_feature (1)..(148): Xaa is any amino acid
MPGTATITVHLQANKNKTATCAVTVTPGSIAPTSVSLNKTSTSISVGSTETLVATVLPANATNKSVTWTSSNPSVATVSNGVVTGVAAGSATITVATVDGNKTATCAVTVNTTNVAPTSVSLNKASTTISVGGTETLGPVDTNAKHRG

SEQ ID NO: 101316 - protein, 78 aa, Unknown
  Obtained from environmental sample
  misc_feature (1)..(78): Xaa is any amino acid
GKATRELAESLGYRPVVPPKRNRRDPWGYDEELYKKRNEVERFFCRYKRFRRVCTRYDKLDRMFAMFIHMGLIHDALH

SEQ ID NO: 101317 - protein, 289 aa, Unknown
  Obtained from environmental sample
  DOMAIN (109)...(186): Bacterial Ig-like domain (group 2)
  misc_feature (1)..(289): Xaa is any amino acid
ITVATVDGNKTATCAVTVNTTNVAPTGVSLNKTSTTISVGGTETLVATVQPSDATNKTVTWTSSNPGVATVSNGVVTGVSVGSATIIVSTQQGGFTATCAVTVTNENIPTTGVSLDKATATISVGGTETLVATVQPSNATNKGVTWSSGNPSVATVNNGVVTGVSAGNTVIIVSTQQGGFTAFCSVTVNQGHVAPTGVTLDKTSVTLGVGGSESLVATVLPSNATNKGVTWLSTSPAVASVSNGVVTGLATGGATIIATTQEGGFVATCSVTVLGIIPVTGITLEPGPI

SEQ ID NO: 101318 - protein, 237 aa, Unknown
  Obtained from environmental sample
  misc_feature (1)..(237): Xaa is any amino acid
MPPGTSVFLVSRTVPNIKIANGIYEKKIFNISEDDLRFTEGELAQYFRSRNISVSHENLREIMQDTGGWAFAINFIAHYFQKAPGYSGYVRNALRTNLFGIIETELWNEISAPLQNFLLRLSLIDHLSVDLITQLAGKEEELVAELEKQSAYVRRDNFINAYLIHPLFLEFLSTKHNLIPEEQKKETYAISGNWCARNGFKIDAMSYYEKTGDYKSILLILASLTTQIPHDIAQYAA

SEQ ID NO: 101319 - protein, 261 aa, Unknown
  Obtained from environmental sample
  misc_feature (1)..(261): Xaa is any amino acid
SPNSSLGVRWSSTGKPIQKQKGNTFKAFVSALQSIGYTVDWKILTAADYGDPTTRRRLFVQAVRGRKRIVWPQITHMDGAENLMGYQPWRPAREIIDWSIPGKSIFDRKKPLADATIRRIAAGIEKYWGDFAKPFLAVLYGTNDVRSLDLPLPTVTGSGAHHGLVYPVPMLMGHESGQVPKSVDDPCQTVMAQGRINLIEAAAFMLGQQSGAAPRSVEQPAPTVATAGAISLVSPFITRYQGDHDGQQDGENRNHELKRPL

SEQ ID NO: 101320 - protein, 241 aa, Unknown
  Obtained from environmental sample
  DOMAIN (1)...(213): D12 class N6 adenine-specific DNA methyltransferase
  misc_feature (1)..(241): Xaa is any amino acid
AAILLRKGRSHEEIYNDLDSDIVNLFKVTRDSGEELKRRLENTPYSKEEYIQAYKPTEDPIEQARRTVIRAFMGRANTGAAGNNFVKEKAVTGFRGRTPYCGKTSAKVWASYPEAFSALIERLKGVVIENRDALEIIDLYDTENTFFYIDPPYILSTRDAGTDYRYEMTDKDHAELAKKLNKVKGSVIVSGYFSDLYDKLYKDWTVKEKLTYSDGDKKKPRIEVLWMKGINIEPDLFDGGE

SEQ ID NO: 101321 - protein, 236 aa, Unknown
  Obtained from environmental sample
  DOMAIN (78)...(158): Cache domain
  misc_feature (1)..(236): Xaa is any amino acid
MILDGSSDEEIYNYMKIIANDLMNKTDGFVLDGLYGHFNIFGNIFFTTSTDWVVTPDYDATTRPWYIAGVKANGEVAFSPVYFNVRFQDFVVTVARQIFDNDGNQLAVIALNVPLYNIINVVAKAQLSRGGYGFLMDEDFVLITHKNKDVIGKSLQEVNPVFAAISDNLKQGLYIPAIETINDQGDVLIVYCEKLENGWYLGLTTLKKEYYAQLKEMALIIIILGTVLSAALILIL

SEQ ID NO: 101322 - protein, 277 aa, Unknown
  Obtained from environmental sample
  misc_feature (1)..(277): Xaa is any amino acid
FADYIRYFGFEPRYMVTVNVASSGGPAGDVLVELEQSGNNLFSAKTNVNGNAYLFPSGNLNKKNIKIKVNGAEEALTYNGDVIQITLEENVEKNPILDLMFVIDATSSMGDEIRYLKYEFSDIIGKIKNANSEYAINLALLFYRDTGGEYVTRYFDFTKDVEEQQKNLDKQAASGGGDFPEAADRALAEAVDKDWTSDNAVRLIFHVCDAPPHSDQISQSTYYNAVKTAAQKGIRIIPIASNGIYIAAEYLLRQEAIMTGGTYIFLTDYTGKDESDL

SEQ ID NO: 101323 - protein, 76 aa, Unknown
  Obtained from environmental sample
  misc_feature (1)..(76): Xaa is any amino acid
RGSFWITPAVFALYHHERWDGLGYPQGLKGEEIPLPARLMALIDVYDALISKRPYKEALAHEEAVKIISEGRGTQF

SEQ ID NO: 101324 - protein, 236 aa, Unknown
  Obtained from environmental sample
  misc_feature (1)..(236): Xaa is any amino acid
MGIEKAILVGIATPKVKIQKAQEHLQELQRLAETAGAMVAEIFLQKVQAFNPATLIGEGKIEEVRTALENHEASMVIFDEDLSGSQVRNLEKRLPGIKVLDRTGLILDIFAKHARTAESRLMVEVAQMQYMMPRLTRAWVHLSRQVVGGSPGIGTRGPGETQLETDRRLVRKRIQELKEKLKKIERDRALQAKRRENIFHVGVVGYTNAGKSTLTNRLTNAGVLVEDKLFATLDST

SEQ ID NO: 101325 - protein, 258 aa, Unknown
  Obtained from environmental sample
  DOMAIN (42)...(232): ATPase family associated with various cellular activities (AAA)
  misc_feature (1)..(258): Xaa is any amino acid
NHPQLQEEYTFDTYVVGEVNNYAFNAASAVSRNPGNSKIYNPLLIYGGTGLGKTHLMQAIGHHIYLNSDLQILYITGEGFMHEFVETVGLGQKNKDAFAKKYRNVDALLIDDIHNIGAQATGTQDELFYTFEALYNKKKQMVFTCDRPIAELKHIADRLKSRFASGLSVELQLPKYEELINILKKKVELKKLELKKNIEISDEIIELIIKNISSNVRDMEGALNKLMGYADLVNKPVTMEIAQRELKDIFSDPKQGNM

SEQ ID NO: 101326 - protein, 95 aa, Unknown
  Obtained from environmental sample
  misc_feature (1)..(95): Xaa is any amino acid
MKTSKWDMAEFLDTKEDIIAHLSLALEENDIDFLLSILNALSRSKGMAQIASELGVSREGLYRSLSPGSNPAFGTVVKTLDNLGFKLNVELKTAS

SEQ ID NO: 101327 - protein, 54 aa, Unknown
  Obtained from environmental sample
  DOMAIN (1)...(46): Phage derived protein Gp49-like (DUF891)
  misc_feature (1)..(54): Xaa is any amino acid
MRIDYGPGYRVYYKDIGQEIIIILCGGDKSSQQYDIAKAKQLAREEEEEDNENE

SEQ ID NO: 101328 - protein, 88 aa, Unknown
  Obtained from environmental sample
  misc_feature (1)..(88): Xaa is any amino acid
GHRETVFQGGWPAYDEAATLLDQVEYVVQIGGKVRARIKLPAGLAQAEAEPRLLADPALAKWLEGQAIVKKTFVPDKLLNLVIKPQTD

SEQ ID NO: 101329 - protein, 280 aa, Unknown
  Obtained from environmental sample
  misc_feature (1)..(280): Xaa is any amino acid
EYRPGPKAALAAYQAEAARLSEVDRQAEGREKTGVFTGAWAVNPANGERIPIWAADYVLMGYGTGAIMAVPAHDQRDFDFARKFGLPIRQVVSPDGRLRDLTEAYLGEGVLVNSGDFNGLEAKKAGGAAITDRLAGNGLAEPKVNYRLRDWCVSRQRYWGPPIPIIYCERCGTRPVPEKDLPVLLPFLKDYRPDGRGLSPLGRDEAFHKTTCPDCGGPATRETDVSDNFLCSAWYFYRYPATEFDDRPFDAARLKKWLPVDLYVGGNEHAVLHLLYSRWL

SEQ ID NO: 101330 - protein, 111 aa, Unknown
  Obtained from environmental sample
  DOMAIN (6)...(102): OmpA family
  misc_feature (1)..(111): Xaa is any amino acid
SIENIQFQADSAVLLPQEKEKLDKIAEILQKYSQRDILVSGHTALAGTYQGRMQLSQERAGSVADYFIEKNVRTPDRIIIRGYGAERPIADNRTEEGRSRNRRVEITILEN

SEQ ID NO: 101331 - protein, 176 aa, Unknown
  Obtained from environmental sample
  misc_feature (1)..(176): Xaa is any amino acid
MGRGLFKKLIHGLEKKGDTLPDNRNTGHNFWYSIRDALKCAFAVFFFQHRSMLDFQRQMQEKRRRNNMGTLLGVHKIPSDTQIRTLIDGIAPDSFGGLFNEIVQIADEHKVLDRYRVLEGGVLIALDGVWYHSSEKIHCKRCLHKSKAGVTTYYHTILAGTIVKPGETTVLPVMGE

SEQ ID NO: 101332 - protein, 311 aa, Unknown
  Obtained from environmental sample
  misc_feature (1)..(311): Xaa is any amino acid
AGTYKLKMVFSVDGGVNGLPINLSYANVPNSIDCTVNHVPPIITAHPSDQTVAPGVAAKFAVTAASNDAGTVTYQWQVNTSASVAPISRSVTVSMWDKTGDGWNGGSLRISVNGADLSTNPTINMGNTGTYRFNVYPGDVVAFYWNISNYNSECAFAAFYADAPPSPAFNPAVGAANDTAALLVYRQYGGLISAEGKLLGSFKAAAAVDVDVFSNVSNGVGAASASYTTPAATAAMSGYRYRCVVSNSHALSDTSEYAVMTVKTNAVMSSDRVIPIRSDGDGREAVSATPSALTAEFTAGPNPASRRGGAV

SEQ ID NO: 101333 - protein, 288 aa, Unknown
  Obtained from environmental sample
  DOMAIN (1)...(288): Peptidase C10 family
  misc_feature (1)..(288): Xaa is any amino acid
AAVAAVAVVIAVPVSVRAEAVDPQEAERLVRRFAESGNMPRGGLRAGADVRLRHTVKKQRHKLGGGAALAKPAASPDGREAALFYVFNVASGVDSGFVIVAGDDVLRPVLGYSDNGGFDQNNLPPNFAYWIDYLQRQAEYALERGEGRSEGVKREWEAYASGGVPVMSMAKTSAVAAVSPLIQTTWNQRAPYNDMCPTPNYPNTSGTRMPTGCVATAMAQIMKFHRYSGPGYVYSKAYTTRSLKINMPAEILGGYEWSNMLNSYATAASGTVTQRNAVAALMYHAGLS

SEQ ID NO: 101334 - protein, 100 aa, Unknown
  Obtained from environmental sample
  DOMAIN (31)...(98): Histidine kinase-, DNA gyrase B-, and HSP90-like ATPase
  misc_feature (1)..(100): Xaa is any amino acid
MSDQQYNASSITALKGLDAVRKRPAMYIGSTGSPGLHHLVYEVVDNSIDEALAGYCTRVDVTIHQDNSVSVLDDGRGIPVDYHEEEKMSALQLVLTTLHA

SEQ ID NO: 101335 - protein, 205 aa, Unknown
  Obtained from environmental sample
  misc_feature (1)..(205): Xaa is any amino acid
MKIKIKLSIVVIAIMAVVVAGIATLLLLQASKNTLQLSLRSQENLANSRAEFWKGREDGYIRALTTLANVMGDFETVKPEERRDWYDAMLKSALDEEPQMVVLYTVWKPNALDGMDEQYIGRTGSSPTGQYAMAWSKETGKTTKRLSTDIDNVMERITGPNAFKEHISEPVLRKINGIDKYTLRMIVPITNNNKNNEEVVGALGC

SEQ ID NO: 101336 - protein, 273 aa, Unknown
  Obtained from environmental sample
  DOMAIN (9)...(273): Glycosyl hydrolases family 38 C-terminal domain
  misc_feature (1)..(273): Xaa is any amino acid
GSKEAAVSGSIRLYNDLGWERKDPANFPADLIKGATAIKASAGNGEEIYPVQCYTSLDGKETAIACPRLPSLGWITLSPAELKQDSPSFAFKGNSLKTPFYEVGFDEAGRIRSLFDIKRGRELVAPGGVLNGLVSAQDVPVQWEAWDIDQDWIRYLTEETRLLSTEVAASGPVCFRIRRKYKIGEASLLSQDTVFYTKSPRIDFETLVDWREKQRLLKVQFDTAIYTTQIRCEVQFGHLLRNTHKNLPQDRARFEICAHKWVSLEEEGGSIAL

SEQ ID NO: 101337 - protein, 106 aa, Unknown
  Obtained from environmental sample
  misc_feature (1)..(106): Xaa is any amino acid
GDAIRDNTGWYDGNSGAMTHAVGKKPPNALGLYDMHGNVEEWCWDRYGGYDAKAVSDPTGPASGTYRVHRGGSWDVDALNLRSAFRYGTDPWDRFIDLGFRLVRNT

SEQ ID NO: 101338 - protein, 69 aa, Unknown
  Obtained from environmental sample
  misc_feature (1)..(69): Xaa is any amino acid
MQREGQVRIPSGCAIFGVLDKSGKRTSGEASIQAISIMHDRSNGLGGGFAAYGIYPEYKDYYALHIFYD

SEQ ID NO: 101339 - protein, 118 aa, Unknown
  Obtained from environmental sample
  misc_feature (1)..(118): Xaa is any amino acid
MNWSGKAINEIYRQANSGGVLLSSMGNPENYPVYFDRLLINASQVTNPSIDPLREPMETRVFLGAKPRDIERDAKGRIINNLPPQLTLSMPIMFSAMSYGSISYNAHESLARAAEELG

SEQ ID NO: 101340 - protein, 178 aa, Unknown
  Obtained from environmental sample
  DOMAIN (24)...(178): BioY family
  misc_feature (1)..(178): Xaa is any amino acid
MNKIKRPERNRFVFAAVFAALIAVSNFFQIPTPIGVPIVLKNMFVVLSGTILGSFYGGFAVLILIAAGLIGIPVFVIPGGIGVFNTPLGGYIIGYFAASLCAGLVCGLPKINERKIRPVPFIRVCIGSLLGFALILTCGSIYMTFLKSMTFKAAFLAGTAPFIIADTIKFALSIPLAL

SEQ ID NO: 101341 - protein, 234 aa, Unknown
  Obtained from environmental sample
  DOMAIN (60)...(234): DNA methylase
  misc_feature (1)..(234): Xaa is any amino acid
MEKKRAPRNRTITVSDNERDHLREKLFFPNGEKIEPSQILNKTICADLFSVIDLLPREFADLLIIDPPYNLDKDFNGFKFSKTNDDAYLEYLKSWFPKILNTLKPTGSVYICGDWKSTFCLYQIMRDYTVIRNRIIWQREKGRGAKANWKNSAEDIWFGTKSDEYYFNVEAVKQKRKVLAPYKENGKPKDWEETEEGGFRLTYPGNFWDDISVPYWSMPENTDHPTQKPEKLIA

SEQ ID NO: 101342 - protein, 217 aa, Unknown
  Obtained from environmental sample
  misc_feature (1)..(217): Xaa is any amino acid
VSKCANNDYNPATDVCEGGEVQKPICGDKEYDPAIYFCTRSESNPKVVERCGGKGYDIRTKYCEGNEIKEKEIKPCDGFIEETTREHQGKDKKQFCDPRDGTKYVYTNIGNQTWMAENLKYSGENGTMGRCAQGKQENCETYGKLYTLDEMFCKNGCESLQWGVADPRDHKVNIACPPGWHLPSTTELEELWTYSDPNFAPGTEAMGTGKNSSAIKL

SEQ ID NO: 101343 - protein, 243 aa, Unknown
  Obtained from environmental sample
  DOMAIN (1)...(225): D12 class N6 adenine-specific DNA methyltransferase
  misc_feature (1)..(243): Xaa is any amino acid
LHFIPKVFIEPFAGGGIVSLTMANENLADHIVMVEIDDEIAAVWKTIFNGDVDWLINRILSFDMTIENVNYILAFDYVTNEEKAFKTIIKNRTFHGGILAKGSGLIKYGENGKGITSRWYPKTLVKRISHIKQFKNKITFIQANGMEIIRDNLNTDTVFFFDPPYTAGGKRAGNRLYNHHELDHGLLFSLCDNIDYFLMTYDISNEIEILAKRYDFKIKKIPMKNTHNTEMKEYIISKNLEWI

SEQ ID NO: 101344 - protein, 297 aa, Unknown
  Obtained from environmental sample
  DOMAIN (1)...(288): Carbamoyltransferase
  misc_feature (1)..(297): Xaa is any amino acid
MKYFNYAAGNSMYSERKWRKLFGVSPRRPDEENIAQSYMNMALAIQDVTEEIALKLAATAKAVTGSANLVMAGGVALNCVANAKLLNSGLFKNIWVQPAAGDAGGALGAALSAWHIHKDKPRTPKRFSVYLGPCYDDRAISNMAGNNGAPYTEFKDTDELLDKVADLLSEGTVVGWFQGRMEFGPRALGNRSILADPRNPDMQKKLNLQIKFREGFRPFAPSVLSEKASEIFDIDRPSPYMLFVAPVKENRRLPLPPDYDSLPLYERLYCKRSDLPAITHIDFSARVQTVDKDENEM

SEQ ID NO: 101345 - protein, 91 aa, Unknown
  Obtained from environmental sample
  misc_feature (1)..(91): Xaa is any amino acid
MENSTTNHTNQHEQKEILYREESYEINNCIYEVNRKLGVGFLEAVYHEALEIELRRKYIPFVSKQELKILYDGIPLKNKYIADLVCYEKII

SEQ ID NO: 101346 - protein, 93 aa, Unknown
  Obtained from environmental sample
  misc_feature (1)..(93): Xaa is any amino acid
MKKPFVVLVFSIAMFSCVKGRGVAVPMVRISGGTFMMGSPADEPERFGDESPQHQVTVSSFYIGSTEVTQKEYQELMGQTPAVSKVIIFRWNV

SEQ ID NO: 101347 - protein, 94 aa, Unknown
  Obtained from environmental sample
  DOMAIN (23)...(87): FHA domain
  misc_feature (1)..(94): Xaa is any amino acid
MLSISILYPEESRQTLQIPENGLLIGRSPYCDLYLSDEFISARHCKIFFENEDLFIEDQGSTNGTFIDGTPIDKKALLKEGQRIQIGITEMKIV

SEQ ID NO: 101348 - protein, 259 aa, Unknown
  Obtained from environmental sample
  DOMAIN (54)...(171): Nucleoside recognition
  misc_feature (1)..(259): Xaa is any amino acid
MKPSAPAAGKRPAAINAIWLYLIIVSIVAAAYTGTMEDVGKASFEGAKSAVTLALGLIGAMALWLGIMKVAEAAGLMKAITKAIRPVMHWLFPEIPHDHPAMSAMIMNISANMLGLGSAATPMGLKAMAELDKLNPEKGTATDAMCLFLAINTSSVTLLPLGVITIRAAAGAASPGSIIIPGLCASICSTAVAIFMAKFLANRSKAKAAETTTRTAAAENSAPAPEAASEVKTEEPELSPPGVVGKIAAYLSIIAVIAA

SEQ ID NO: 101349 - protein, 289 aa, Unknown
  Obtained from environmental sample
  misc_feature (1)..(289): Xaa is any amino acid
MKAGSRKYGCGHVEILGLNCQFVAAGIHPVTEKEYEWPGESIFEIPASELPLLTDGQIKQIIHQFESLAENRGMAPIPSKTKPDNTARNLLTPYDPDDPLDVLQPIEGYTLADANIDLTSLSPDCGRDEWIRYGMALHHQFRGSKEAFLVWDNWSRKSVAGKYKEGDTEDQWKSFGHSKSWPVTAASVIKAANDAAIPTVSDAELDAIVDAPPAELHDDDGDNVFRKLNWSTGRFTREPPPLPMVVDGFMPGGTVGMLYSMGGAGKSTLALFLAIRIALAGAYDCDFLG

SEQ ID NO: 101350 - protein, 283 aa, Unknown
  Obtained from environmental sample
  DOMAIN (184)...(282): Homoserine dehydrogenase
  misc_feature (1)..(283): Xaa is any amino acid
ISAVITQQDETKALNAIHEAFFLSGVRSVNLFLLGTGLIGGTLLDQIAEHKKILAEDYKIKINLAGVGDFGRMILQPEGLDPKTAKALLLNAAEKKDGTAVLDLAAFVSEMKAMNLPNTCFCDCTASEEVADLYAEILQSSIPVVTPNKRANSASLDYYKTLTGFSRARGIPYLYETTVCAGLPVISTLRDLFLSGDKVRRIEAVLSGTLSYIFNNFDGSKSFSALLREAKNKGFTEPDPRDDLNAVDAARKAVILARECGINMEFSEVEIEPILPLACFKAD

SEQ ID NO: 101351 - protein, 284 aa, Unknown
  Obtained from environmental sample
  misc_feature (1)..(284): Xaa is any amino acid
NTVFSRTNAESNGGGVYVGGGTFTMQDSASVSGNTGIGNINIGGRGGMLNFTRYSNGGGVYVGDGTFTIQDNASVSGNTAANYGGGVYNGGTFTMQGSASVSGNKTSGADGVYVRGGGGGGVYNGGTFTMQDSASVSGNTVSSGYSYGGGGGVWNSGRTFTMQDNATVSGNRTASNGGGVYVEGIYDGGSTFTMQDNASVSGNTATNYNGGGVFVNNGTFTMQDSTSVSGNTSREGGGGVCINSDRYGGTFTMKGGIVSGNTSSSGGRVLVGSRATFAKTGGTI

SEQ ID NO: 101352 - protein, 165 aa, Unknown
  Obtained from environmental sample
  misc_feature (1)..(165): Xaa is any amino acid
MTVRIPPRRFTGTVRIPASKSHTIRQLLIASLADGESEIKYPLDSLDTRSCLCACKTFGAEIAEQRNGNEIVSWKIQGNGGFKKGINSGSKIDVGNSGTTLYLALAVAGLQQEPVVFTGDEQIQKRSAAPLLAALSGLGVNSQSNNGCAPITINGPWKGGKVSLP

SEQ ID NO: 101353 - protein, 118 aa, Unknown
  Obtained from environmental sample
  misc_feature (1)..(118): Xaa is any amino acid
EKFKGDDNRRRFKADSIIIDGFDFSRTDKESIDAVKTFATELGVGVWYSCSVKDEGSQYDKENIPVILNGFIDSIDIVIVLQPKHDHVQLSISKDRDSIISKAMAMKLDPKTLLILES

SEQ ID NO: 101354 - protein, 209 aa, Unknown
  Obtained from environmental sample
  DOMAIN (4)...(108): CoA binding domain
  misc_feature (1)..(209): Xaa is any amino acid
MSIIINENTKLLVQGITGREGNFHTQTMLEYGTNVAAGVTPGKGGQEAVFNVKGKEIRVPVFNTVREAAEKTLCNATVIFVPAKFTPAGVYEAVDAGLPVILTISEHTPVHEMMKCYYAARQKGARLFGPNSFGIISPGKCKAGFMAHKYYTPGPVGVMSRSATNCYETVMMMTALGIGQSTCIGVGGDMIPGSTFVDLLPDFQADNET

SEQ ID NO: 101355 - protein, 290 aa, Unknown
  Obtained from environmental sample
  DOMAIN (1)...(219): Cellulase (glycosyl hydrolase family 5)
  misc_feature (1)..(290): Xaa is any amino acid
VVRAAMGINETWGEGYLTGGKDANKQRVVTVVDAAIAKGIYVIIDWHSHNAHTHTADAKAFFEEMALKYKDVPNVLYEIYNEPTGTTAAAWTGDIKPYAQKVVDAIRAIDPQNVIIIGTPTWCASPEMATASPVDGDNLVYTVHFYSAYAPHKEPLRTKVKTSLNTHNKAVFVSEFGVCMNTGKEPLDLNEATTWLNFLDENKVSWVNWSVTYKNEGASALKSTVRKYDGNWTPDDLTTSGEYIRGKLIAAAQKEDNEWNTSTLVTDLVIPNAQQTGGSAAIAPVSAQSN

SEQ ID NO: 101356 - protein, 73 aa, Unknown
  Obtained from environmental sample
  misc_feature (1)..(73): Xaa is any amino acid
MGTNQHVVPTGKEWAVKGEGNTRYTSVHSTQRDAIEAGRSIARNQESELLIHGTDGRIRDKRSYGNDPYPPKG

SEQ ID NO: 101357 - protein, 100 aa, Unknown
  Obtained from environmental sample
  misc_feature (1)..(100): Xaa is any amino acid
RHETLCRDKAIYLRERIKESIPSIKTYDNATIFNEFAIELPINADKCVETMLTKGFAAGIPIGRYYDFIGADKSLLVAVTEKRTRAEIDAFVDCLREVAG

SEQ ID NO: 101358 - protein, 157 aa, Unknown
  Obtained from environmental sample
  misc_feature (1)..(157): Xaa is any amino acid
MTASVIKNDERFGNDMNAIYDSIVDIKEEHITQIAAISDKELGEGFLKYNDIMDKILDKASHICKAALTDKIVLGFCLSKIVTQSEICDYLRVDRTNLPEYVNRADKIGVLKTIAVSNDVHRHGVGYALTFAACNDLITRGIQTLSSIAWKNGEQIN

SEQ ID NO: 101359 - protein, 150 aa, Unknown
  Obtained from environmental sample
  misc_feature (1)..(150): Xaa is any amino acid
MGLATLLPRRRRHNHGGDSGNGRPNGYRQQVRTESGNNDNNPSVRVNFGAVNRVLRADNLESAQLSCNFGALKVFFDQVEISPSGAEVTLNCSFGGIELFIPKHWRVIDKLNCTLGEVGIDKCFTAPAENAPKLTLAGSVSLGGVDVRYV

SEQ ID NO: 101360 - protein, 133 aa, Unknown
  Obtained from environmental sample
  DOMAIN (1)...(111): Dihydrodipicolinate reductase, N-terminus
  misc_feature (1)..(133): Xaa is any amino acid
MGRLLEAKLHEKGHDVLAAVDPLFAGSGVQASLPIYPSLKDALGGTQGKSLKDADVVIEFSLPNAALENLLFLVNEKIPVVTGTTGWYGKLPEISKAVDSAGSSLLWSSNFSLGVNLFYRIACYTARLTDPLR

SEQ ID NO: 101361 - protein, 300 aa, Unknown
  Obtained from environmental sample
  DOMAIN (124)...(190): His Kinase A (phosphoacceptor) domain
  misc_feature (1)..(300): Xaa is any amino acid
TERHNYIDWGKRNSEYRKMGEVFQLIIENNLNGVEEYFIEQYPYEKAERYCAYDFISGTDNWSVLISAPFAESPLTYMRQMLFICAAIIMGLGVIAALLTANSISAPYEKMTELRTTAEAASVSKTRFLANMSHEMRTPLNAIIGLSELELGSAKLQGESFTNVEKIYTAGMTLLGIINDLLDISKIESGKLLMIPVIYDVPGMINDTVNLNVVRIGSKPVQFRLYVDKSMPSRLKGDELRIKQVFNNLLSNAFKYTDSGFVDWHISSVREGDQIKVVSTIRDTGIGIHKDDQEKLFRDY

SEQ ID NO: 101362 - protein, 296 aa, Unknown
  Obtained from environmental sample
  DOMAIN (2)...(227): tRNA synthetases class I (E and Q), catalytic domain
  misc_feature (1)..(296): Xaa is any amino acid
AGASGQGQAYYCFCSAERIEKVRQEREAAHSSETGYDRLCRTLDPGEAAKRAAGGEPCTIRLKIPLGEITRFYDHLLGEVKWKNDDINPDPVLLKSDGFPTYHLANVVDDHFMEISHVLRAQEWLSSTPLHVSMYKCFGWTPPEYCHLPMVMGQDGKKLSKRHGATSVDEFRKQGYLPEALLNYVALLGASYEEGKELYTPDELAQRFSLEKLNKAPAVFDYKKLEWYNGQYIRMKSDEELARLCLPCAIEAGLFGEPGKEPDARPSSVFTAAMPLVKERLVFLNEVPEKIAYLFK

SEQ ID NO: 101363 - protein, 276 aa, Unknown
  Obtained from environmental sample
  misc_feature (1)..(276): Xaa is any amino acid
MPRYRIVIIDESHNLRNREGRRYRAIAEYLALNNSKVIMLTATPYNKSYLDLSNQLRLFLNENQNLGITPERYIKEIGGNVQFAAKHQVKETSLAAFEKSEYSDDWAELMRLFLVRRTRSFIKANYSKKDEKTGRMYIEFAPNDDGVKEKSFFPDRIPAKVEYSFNKGDNDDQYARLYSADVVSTINELLLPRYGIGQDIYENKTNIKNIKPEEVKIKNNLAKAGKQLRGFARTNLFKRLESSGYSFLLSISRHILRNYLFIGMDVHKASVHMAVF

SEQ ID NO: 101364 - protein, 68 aa, Unknown
  Obtained from environmental sample
  misc_feature (1)..(68): Xaa is any amino acid
MRSDTLIKSDGMRVLAENLGIVEAERFITLVLREPFDYTEWQRNLYGNISVKELYDKVTASETASTLL

SEQ ID NO: 101365 - protein, 281 aa, Unknown
  Obtained from environmental sample
  DOMAIN (1)...(228): NAD dependent epimerase/dehydratase family
  misc_feature (1)..(281): Xaa is any amino acid
KGYTVHGIKRRSSSFNTERVDHLYQDPHEKNKKFVLHYGDLTDTSNLLRIIQEVQPDEIYNLGAQSHVQVSFEVPEYTADTDGIGTLRILEAIRILGMEKKVRFYQASTSELFGKVQEIPQKETTPFYPRSPYAAAKLYAYWIVVNYRESYNMFACNGILFNHESPIRGETFVTRKITRAAARIKLGLQNKLFMGNIDAKRDWGYAGDYVELMWLMLQQEKPDDFVMATGVTTTVRDFITMAFLEVGIVIKWEGKDVHEKGIDQDTGKILVEIDPRYFRPA

SEQ ID NO: 101366 - protein, 208 aa, Unknown
  Obtained from environmental sample
  misc_feature (1)..(208): Xaa is any amino acid
LNDRAFFFQDDALLLPADFPDSEIESGVPRESAENFTNTDIFEVPPLNPESPMINVVSVLQGTALPSGWRSVPVRYLLASLSASGTGRILRACHIARWRNDSRFCGRCGAKNMDVGVNPERRCPACGKPEFPRICPAVIIIITDSENKILLAHNKKFAANVYSHISGFNEAGETLEETVIKGIREEVNIEVKDIEYIKSQPWPFPYSL

SEQ ID NO: 101367 - protein, 283 aa, Unknown
  Obtained from environmental sample
  misc_feature (1)..(283): Xaa is any amino acid
LKDKLTKLKQSVPNFSGLAVEEDAEVPTLLAALKAENLGLILDESARLPKQSPDYQEMARRSFLVTTGGPKGPPLATEYSGRPSGLIDYTNSSAASFWHSLGRENLTSEGQAYFRLLDSDLEDIGPDAWYAGLDEDDVHSHYAWANAYALKWIEGIESRLKATTWRGLGARPIILTRGGTAGLARRSGFLYNGEAQIFSGGFAGLSSFGVRSHLALAGIDYYSADLASTLTTWPVARFFQNYDAWLAKSALTDFPLILPEELLSRAAFQYNLALRESLSPYIY

SEQ ID NO: 101368 - protein, 257 aa, Unknown
  Obtained from environmental sample
  DOMAIN (1)...(257): Putative modulator of DNA gyrase
  misc_feature (1)..(257): Xaa is any amino acid
MNSQNSIGGVSARVYRGGTYGFASSAEYTDESIKKVLTAATSNAAFMNTHVNKGLGPLPTVAPGKVGLKKDYSTDVQQSVLIEFVKALDSLIVERYKNLSSRVVRVNCLDIEKILAVSNGADSHFYQPRSFVYVQMSVETDDKIPVELFIPIGGFGRFGELFSDPALLTEKLDSLYEQLMQKREGVYSSAGLRKCVLGPELAGMLAHEAIGHTVEADIVQGGSIAGNYMDKEVASELVSMVDFAHTAFGKPCPLPVY

SEQ ID NO: 101369 - protein, 60 aa, Unknown
  Obtained from environmental sample
  misc_feature (1)..(60): Xaa is any amino acid
MLLDKIYDLFSNDMGIDLGTAHTLVHVKGQGIVLSEPSVVAVENGSRRILAVGQEASVCL

SEQ ID NO: 101370 - protein, 256 aa, Unknown
  Obtained from environmental sample
  DOMAIN (37)...(191): Phosphoglucomutase/phosphomannomutase, alpha/beta/alpha domain I
  misc_feature (1)..(256): Xaa is any amino acid
MHERAGTVALPEDLIDVDALIDAYYKKVPNPDIPEQAVAFGTSGHRGSAFDTAFNEAHIVAITQAICEYRAAQGTDGPLFIGRDTHALSYPAWVSALEVLAANGVTVLIDSEDSYTPTPAVSHAILVANGATSPEGLRQSGPGLADGIVVTPSHNPPRDGGFKYNPPNGGPADTDATKWIADRANQLLREGYQNIKRVPIEEALKAKTTAKYDFLGNYVDDLPNVIDIEAIKKAGVRIGADPLGGASVHYWQAIAD

SEQ ID NO: 101371 - protein, 234 aa, Unknown
  Obtained from environmental sample
  misc_feature (1)..(234): Xaa is any amino acid
MSKIKDHDRQIYFEKIKPYGKTIDSLLTREKDILVGVRSNPSSAGLLRLSLADEMLNLTSNYIAINGISQSVLKGKNEDALNDARKSLYKSVIYLEEAVSNYVDVPYSDYEEKLATIESFSTSNRYLLTRKMGLTIELLENAYGDNTKWRWSFVELEGRFAAVAKNIIDLRNAVANTDPRSPDYEPALYHLRLAKKLLAQAADRYREKYELSTSRMADFKMGISFLGALRRLHA

SEQ ID NO: 101372 - protein, 143 aa, Unknown
  Obtained from environmental sample
  misc_feature (1)..(143): Xaa is any amino acid
MLASTPFANTEDVYNWLSTFINLEKGRQQWNFNLDVMNRLAEIAGHPEKCAPAFHVAGSKGKGSVTGMIAAILEAAGIKTARYASPHVSDFRERITIGNSFFEEETYVLAGNELMELTKQVKIKNDERLSYFELFTMWFFLCA

SEQ ID NO: 101373 - protein, 284 aa, Unknown
  Obtained from environmental sample
  DOMAIN (99)...(168): RNA polymerase Rpb2, domain 3
  misc_feature (1)..(284): Xaa is any amino acid
MTLTTDDFISVIRYMIGLYNAEEGYSLDDIDHLGNRRIRSVGELVANQISIGISRMLRSVRESFSSREREGVLTPTELINSRTVNSMVAAFFGSSQLSQFMDQINPLSELTNKRRISALGPGGLSRDRAGLEVRDVHHSHYGRLCPIETPEGANIGLINSLATFSIVNRFGFIETPYRIVGLLPFKDNSGKAYEFPEAKWHANIMKSFFGSINQQLLTQTELSENEIKNTRKKFSGRQLELFDMFCNKSFEFDFGNESTIIKNGITIGVYKKGESKPKADGHNR

SEQ ID NO: 101374 - protein, 155 aa, Unknown
  Obtained from environmental sample
  misc_feature (1)..(155): Xaa is any amino acid
GFIYLLNFNKITVAQDNALRMNLRKKGIIYKAVKNRLIREAFKKANIKGLDSYLKGATSIMLGSEEDPMLPAREVVEFHKANPETLIAKGISLDGSSLKGSELENLAKMPGKNEILGQVISLMLSPGANLIALIKGPGSKLAGQIKALEQKLETK

SEQ ID NO: 101375 - protein, 51 aa, Unknown
  Obtained from environmental sample
  misc_feature (1)..(51): Xaa is any amino acid
MSNESNTDGLILLNKPPGLTSFDALRDIKRILGTGKVGHTGTLDKFAEGLL

SEQ ID NO: 101376 - protein, 250 aa, Unknown
  Obtained from environmental sample
  misc_feature (1)..(250): Xaa is any amino acid
GNKTNLSGGGVYIYALRATFNMSGGIISGNSCGTSATSYSGGVHFANTPLTTDTDPDKTASVFRLGGTAVIKDNTKGNGSPSNVYMAGSRYITLGDGTVGIPPPTDGMEVWITKVAEHGLFVKEGAKPPNPPDDPFGDTKYFEADAGSQVYYIDPGQLAMEAGYDISLSTYSLALEEVFDYTTQPEREIMVTNIGGRIGKLTIYLSGVNADNFELDLTRISDAGMNQNEIQKFTVKPKLGLSVGTYSAIV

SEQ ID NO: 101377 - protein, 154 aa, Unknown
  Obtained from environmental sample
  DOMAIN (35)...(112): Bacterial Ig-like domain (group 2)
  misc_feature (1)..(154): Xaa is any amino acid
VKKTFIPIISAFLALAPCTISCGGGGNAPAHAPVAVTGIYLSKSSVKMAVGGKETLYATVTPPDAANKSVTWSSSNSAIAAVSDGIVTALAAGEAVVTATTQDGNRTATCAVTVAGAPIHSGMAPIAAGSSHSLAVKADGSLWGWGSNVYGQLA

SEQ ID NO: 101378 - protein, 206 aa, Unknown
  Obtained from environmental sample
  misc_feature (1)..(206): Xaa is any amino acid
MKYMPRATDAAVAEKLQGLGGLMIVGPKWCGKTSTAQQFANSAIYLDDSEDGQSNVQIASLNPSLLLNGATPRLIDEWQLAPDLFGAARREIDKRGASGQFIFTGSTTPPLAQARHSGAGRFSYIRMYPMSLCESGESNGSISLADLFAGKPDLGTASTLTIERLIFCMLRGGWPGALRMREKAALNVAKEYIYSIENNEWIFRQT

SEQ ID NO: 101379 - protein, 116 aa, Unknown
  Obtained from environmental sample
  DOMAIN (5)...(116): DeoC/LacD family aldolase
  misc_feature (1)..(116): Xaa is any amino acid
MTNEEILSKIDHTLLKMTSSWEEIKVLCDEALIFKTASVCVPPSYVNSIHNEFKNLNICTVIGFPLGYSITAAKILEAENAIRDGANEIDMVINVGDVKNGRFDYTREEVKLIKEA

SEQ ID NO: 101380 - protein, 107 aa, Unknown
  Obtained from environmental sample
  misc_feature (1)..(107): Xaa is any amino acid
TGILFLLALFLSPLFLLIPSVATAPALIFVGFLMLQPVTGIDFTDPTEGIPAFLTIVIMPFAYSIADGIVYGLISYVILKAAARKFKDITIVTWVLFVVFILRFFLK

SEQ ID NO: 101381 - protein, 293 aa, Unknown
  Obtained from environmental sample
  misc_feature (1)..(293): Xaa is any amino acid
DAAYFSKAGYRVTVTDPSFANYSWKPDLSIFDPYPEIHARNIIGEYTGMWLRSHPELNLVSVPELIKDNLIRFCFLKIFPSAFGIFIYDKGDWLKVKVNTLSQLTIDTLNSYTTLYYLPLLTDISDSTDNTYTAIVNDLPHDAALFQYPDYIPQINVTNFGDGIFADEKIYHSSLVSFMFLSKWFKYFQEQGIYDNTRIILASDHGKAVSYEYKDNILLPNNDRLSSYNCLLMVKDFMSSGEINTDSKFMTLADVPSITMNNLIDNPKNPFSNNPVTTDKENGIIITSARVLN

SEQ ID NO: 101382 - protein, 267 aa, Unknown
  Obtained from environmental sample
  misc_feature (1)..(267): Xaa is any amino acid
VRNVIRVRITRFDGTVDRGPHFPLETDPAFKPVIRITDKEAALESGELSVNIKQDQDWNNTFSGGGKFLTGNTVKSTGYMAVKDRGPFVKDELILSVGELIYGLGERFGPLVKNGQTVDIWNADSGTASELAYKNIPFYMTSRGYGIFINDPGNVSLEIGSEKTSRVQFCVSGEALEYFIIYGPEPKTIFERYTAITGRPAMPPEWSFGLWLSTSFTTSYDEKTVMSFINGMEERKIPLSVFHFDCYWMRGFNWCDFTWDKATFPDP

SEQ ID NO: 101383 - protein, 293 aa, Unknown
  Obtained from environmental sample
  DOMAIN (8)...(284): Glycosyl hydrolases family 28
  misc_feature (1)..(293): Xaa is any amino acid
NGQYWWDAVHEKKVSDQLGPKTPEEQALAALNPGYLSHPSGGDGRNVQFLRPPLVQFFNCSKIRLEGITLRNSPFWTLHPVYCTGVVISALSIINPPDAPNTDGVDIDSCEDVLVEKCHVTVGDDGIALKSGSGEDGIRAGKPTRRITVRDCTIENGHGGIVMGSETAGGIREVLAENCLFRGTDRGIRIKTRRGRGGTVQDLEFRKITMENNLCPLAVNMFYRCGASLEDGYFSTSALPVNSTTPSIRNIRISDIKATGCRASAGFIAGLPESPVENISVNRCEFSTKKIAA

SEQ ID NO: 101384 - protein, 286 aa, Unknown
  Obtained from environmental sample
  misc_feature (1)..(286): Xaa is any amino acid
RGLRFFETRYGAIISSYRGNEGNRLIIPGKLGNSVVKVIGPTAFETKNISRMQLPDSLIHIEKRAFNNNQLTSITIPNSVTYIGESAFSKNQLTSVTIPNSITSIENSVYSENQLTSVTIPNSVTSIGEQAFYRNQLTSVNIPNSVTSIDDAAFGNNQLTSVNIPNSVTSIGGAAFYSNKLTSVTIGNRVTSIGVAAFGNNQLTSVNIPNSVTSIGDNAFTNNQVTRVTFESAGISFRTSIDTSFMRENYPPFDGDLCKKYYQKDGGPGTYTTTAPVRDNSVWTKQ

SEQ ID NO: 101385 - protein, 199 aa, Unknown
  Obtained from environmental sample
  misc_feature (1)..(199): Xaa is any amino acid
SIKTAFLICAYLTSVTFQGTIPVKNFDDDAFNSLGDIRDKFYATDKNNGTPGTYTRPDYNSTTWTKSGSATAAPAAAGTPGLEFKLTSDKKGYSVSEGTIGNQDVIIPDTYNNLPVTIVPVLAFRNPMIPSVTIPASVTDIGKSAFSNCTTLRSVTFGGANTRFSDTEFPDGKDLMAKYKAGGAGTYTRSLSGSTWTKK

SEQ ID NO: 101386 - protein, 96 aa, Unknown
  Obtained from environmental sample
  misc_feature (1)..(96): Xaa is any amino acid
MAVNTQLIYKMVDTCGGEFEAKTPYFYSIENGTENEALPFIQKSTKERIVVLGSGPIRIGQGIEFDYACVHCVWTLKSMGYEVIVINTTPKPYRQT

SEQ ID NO: 101387 - protein, 297 aa, Unknown
  Obtained from environmental sample
  DOMAIN (202)...(296): Diaminopimelate epimerase
  misc_feature (1)..(297): Xaa is any amino acid
GRKACALGVPCLTSIDTANALADGLLSGYSEISTELIDINSMREDRLKIPFTKMHTCGNDFIYFNCLKTEIESPESLSVFLSNRHTGIGGDGIVLILPSDTADAKMRMFNVDGSESSMSGNAIRCVAKYLYDNNIVKKHDMQIETKSGIKKLYLSMRNGTVSSVKVDMGRAELRPEKIPVDLKGDCVINKKVTIGGEEYDITCVSMGNPHAVVFCKKIDYLDLSKLGPLFENDPLFPDRVNVEFVKVMDKNYLKVRIWERGSGETQASGTAACAAAVAATLNGYCDKDADIKVRLPG

SEQ ID NO: 101388 - protein, 256 aa, Unknown
  Obtained from environmental sample
  DOMAIN (1)...(253): Glycerate kinase family
  misc_feature (1)..(256): Xaa is any amino acid
IGIGGSATNDGGIGMISALGFNVLDENGKPVGQGGKALGKIALIDASCAYKRLKEVSIRIACDVTNPLLGPNGASAVFGPQKGATPEMVKTLDTGLAKLASAWIKAGLTKDVEQGGDGAAGGAGAALRICLGAKMESGAMLVMRYAGFFDQLNGKGKVKGADLVITGEGMTDSQTAGGKLCSVVARESRKAKVPVALLSGGIAGEQRPLLALFDYAVSISCGQIGLDAMIKDSRRDLSFAAENLIRAIQIGKKLKE

SEQ ID NO: 101389 - protein, 132 aa, Unknown
  Obtained from environmental sample
  misc_feature (1)..(132): Xaa is any amino acid
IYDNGKFAAAGSDNVSSKMAYSSDGVTWTAVADSKLNVGISNLAYGNGRYVISGGSTGDNQMAYSTDGVTWTVFAKPSAFSGAIGEIIYANNMFVGVSQSGRITTSTNGTTWTAVSNSGVSSDLRSEAARSA

SEQ ID NO: 101390 - protein, 292 aa, Unknown
  Obtained from environmental sample
  misc_feature (1)..(292): Xaa is any amino acid
TASAVESGIDPTKDVQEYESVTYVRMSKDFDPIKSALGVADVLVEAFACDIPEKVFRIALNQSKLIINLEYLSAEDWVEEYHLFESLLGSGTARKFFFMPGFRETTGGLIINSKLKALRECGGLDRFAVINGVVGDFGVSIAPDGDTLVGTVFTYERGFDTLISDLVELGRDTLLIVFGEKSRLGMAATLGRLLGVASSCEGWIDCYKDPCQAYKNVRVLYAPFLPQHDYDALLCCTDFNLVRGEDSLARAVLSGKPFVWHAYIHAEKHQRVKAEALLKTMRPYYQESELDG

SEQ ID NO: 101391 - protein, 203 aa, Unknown
  Obtained from environmental sample
  misc_feature (1)..(203): Xaa is any amino acid
LFCALTAGAETTGIPPVTGGTNSAKEMTPLFPAAFFTEYLSALDATDAGRPYWVPTEGEINSPPPSRWESILLNSDILAFYGHPRSRNMGILGRFSKEELNEKLNTLANEYQAVGGRNVLKAFYIIYGTVWPGGDIGIIGESLLKEYIEFALENDMLVFIDHQIGKYTPQDSIRRMFPWLKYPNVHLALDPEWRTTKPMAEIG

SEQ ID NO: 101392 - protein, 270 aa, Unknown
  Obtained from environmental sample
  misc_feature (1)..(270): Xaa is any amino acid
MAEFEKGFATLKSTAYENISEELKSFETEFFADLTRRGNDMDLRIVEWQNSLEKRLSAIDENSETALRKLEQDRAEEMKKNISALDAHLVSELERLKSETGTFEEGILDQMKAAEEMKQKALEANAAKLEEYRRAQDIEFQRLESLADDSRNMDAELRRYMQELIERLKDEFSVYRGEAEELRKAEMENFSSNVMRIEGEMADVEKGLAALKSAAYENISGELKSFENEFFADLTRRNNAIDQRVAEWQADLEKRLSTIGENSETTLREL

SEQ ID NO: 101393 - protein, 294 aa, Unknown
  Obtained from environmental sample
  misc_feature (1)..(294): Xaa is any amino acid
VKGKTFDQYFEFEKNFKTGDTVFSIGNALGEGVVVRNGLVLGTIPEEDSGRWNLLKSSADGNPGNSGGPLVTPDGKVVAVVCALRENILYSVPAEVVLGGSRSVLPYRLKSGVRHLLLANGLDNIFEFQVKLPDTYTSVKKSIFGAYNSYYDKSMETLFKEAPEYLSGPNNVYVLSSSLVSDFPELSFVDPDDDYWTLTNLNKSKKSYPLDDDGMLYHTPVSGFSFYKVKRPLSVSVEKISTDPKYIMDLILRNIRTERTLWGSDKYRILSYGEPSSMGSFKDALGRTWHTAYW

SEQ ID NO: 101394 - protein, 292 aa, Unknown
  Obtained from environmental sample
  DOMAIN (101)...(170): Bacterial Ig-like domain (group 3)
  misc_feature (1)..(292): Xaa is any amino acid
ISKNFTVTINAIELTSIAITTQPAKTEYFIGEALDTTGMVVTAYFNNGTNAATTNYTTESFSSTTSGTKTVTVRVGSKTVTFTVDVRAVADADITAIAVITQPTKKDYIQNETLNLAGMVVSVNYSNDTVSSNYTGYNVTPSNNSVLSTLGIQTITVSANGKTTTTTVNVTVALNSIRINTYPAKLTYTIDQQLVTTGMVVSVNFSDNTSAVTTNYSVSGFDSSTAGAKTITVTVGNRTTTFIVDVTHSFPPMTVLSDNNGFVTLSGGTFDMGGHFDNNGNPMHSVTLSKFA

SEQ ID NO: 101395 - protein, 208 aa, Unknown
  Obtained from environmental sample
  DOMAIN (185)...(208): 4Fe-4S binding domain
  misc_feature (1)..(208): Xaa is any amino acid
VDTVIYYFSSTGNSLETARLIAQKLGNTRLISIPALREQSEVVCEAARVGIVFPVYMFGLPLLVRRFAEKLRVTSAEPYIFAVATCGGSSGLANIQLREILQKNKLDLAAGYTVKMPGNYTPLYGGPEHKKLVKLINEAGGKINQIADRIINREKSLAKGSILFRLLGRMMQKNIRNEIPVADKKFKVKDTCNTCGICERICPAANIY

SEQ ID NO: 101396 - protein, 288 aa, Unknown
  Obtained from environmental sample
  misc_feature (1)..(288): Xaa is any amino acid
DGPAAGDGELLSWSAAAKGREGWFKRLESGRSALLLGDRDAIFNAASPARHSRVLIPLAGDGLLLWESLRRCPEGLSAALVGSEAAREALLRYAAALDQTDQPEIAVLEDGPLPSPQQTGGWFSSPQFDHILLREPWRKGFAHETHTAVFSRLASAAKSLLAPGGCLVLLCSPPLLGQRISRILLDECEGTTYPNSQLAEKLRQAEDAFFAQADSWNWDAAVLSQALESQGFKLKIQTIDQQEERLIGPKDIDAWFDREKSRWGVFMGKALETDDFAQIEAMLRQRIQ

SEQ ID NO: 101397 - protein, 296 aa, Unknown
  Obtained from environmental sample
  DOMAIN (192)...(296): N-acetylmuramoyl-L-alanine amidase
  misc_feature (1)..(296): Xaa is any amino acid
GSITFVQDNLFYKIDTVINLSPYPPIRKESTLYLPAPYLVKVFSAKHPGALGWNAQTSTITVNALKYNVLSVSSGVKQNGTLISIVLADSLAYEFTYYHPNLAVNFGGGKLDPKAVKRGLRAGVVDSAFTLQYDESAQVSFILNQAVEPPYIEYSAKTRTLMISLKPKIEQKKQKPPAASQVPLDASLIRTVVLDPGHGGKDPGAIGPTGAKEKDVVLGIGLELRTMLEKAGFKVFMTRDKDIFIPLGDRTKFANEKKADLFVSIHADAVGGDAKKRSAARGYKVYFLSQAKNEED

SEQ ID NO: 101398 - protein, 152 aa, Unknown
  Obtained from environmental sample
  DOMAIN (27)...(152): TruB family pseudouridylate synthase (N terminal domain)
  misc_feature (1)..(152): Xaa is any amino acid
MNPQTDGLILLHKPSGLTSFDALRDIKRILGTGKVGHTGTLDKFAEGLLLILTGRALKLSKWFTHCDKQYEGTICFGAETDTLDPEGAVIANAPLPSRETVEQVIPQFLGKIEQAPPAYSAIHIDGERASALARRGETPEMQKRPEPLPAEI

SEQ ID NO: 101399 - protein, 144 aa, Unknown
  Obtained from environmental sample
  DOMAIN (2)...(105): ABC transporter
  misc_feature (1)..(144): Xaa is any amino acid
DTGAIRDFSDGLISRYNIEGAAGTNPASSLSGGNLQKLVLAREIDQFRDYFVFSEPTWSLDIIASSFIWSEIAALREKGAAIILISTNLDEILALADRIIVMFRGSAIAEFDNFFDNAIKEKIGRCMQGLLPNNEDENHNESPN

SEQ ID NO: 101400 - protein, 81 aa, Unknown
  Obtained from environmental sample
  misc_feature (1)..(81): Xaa is any amino acid
VKPALETTTDSFSAPAVELCGIYKVYPGSDKKANNNISLELRRGEILCIAGENGAGKTTLMKILDGIETPSEGGIRITGMM

SEQ ID NO: 101401 - protein, 227 aa, Unknown
  Obtained from environmental sample
  misc_feature (1)..(227): Xaa is any amino acid
MKVSKKALTALAVITVITLAGCASKPKVRVVEMENKGTSMNISTPDWIKNYTANGISAVQAQSQFKDKYCIIGEESGVNKQFVLAWADSFSAQQRIGAMLRTTIVSEYQARVQGSAQSSGGATMSSASGEYSQEIDNVINAIVNVSYSGAQREADWWSLRRRYDPDQKDVFSDDYTAYVMYTIPKTELNRQVARALETSVKKDSALYDITIKMAQDILQSGMANWGE

SEQ ID NO: 101402 - protein, 98 aa, Unknown
  Obtained from environmental sample
  misc_feature (1)..(98): Xaa is any amino acid
MDGKDLRQSVPDVHVDVPRLRAGNVGLQVFAAYVPASTDGDKAFAYAGERLDAIDAFARSDDRLALVETVAELRECLKTDKVGVMLAVENGVAIENSL

SEQ ID NO: 101403 - protein, 256 aa, Unknown
  Obtained from environmental sample
  DOMAIN (1)...(256): Protein of unknown function (DUF1343)
  misc_feature (1)..(256): Xaa is any amino acid
KGGVLGVPVCSLYPHNEALTGPNEISRSYEPSGELLEKLDTLIIDIQDVGSRYYTYPSTMFFAMRAAARHKKNFVVLDRPNPIGGREIEGNCHSPELLSLIGLTQVPIRHGFTMGELARFYNGEYRLGCDLEVIPMDGWKRDMFFDETGLPLPRPSPNLPTLDSIVVYNGSCLLAGTNVSDGRGSTLPFNAIGAPWIDPDLLAKELNSIKMAGLCFSPIYYIPFFSKYTGEVVGGVQIHVMEKKAVRPVELEILLI

SEQ ID NO: 101404 - protein, 174 aa, Unknown
  Obtained from environmental sample
  misc_feature (1)..(174): Xaa is any amino acid
MKFRNGYWEIRGGFSQIKPAEFWDVEIRGRELHLFSTAKKVNHWGDTLNTPLLTTIISSPMPDIVHVKTFRHKGIKKFPPEFNLVPDLSGSDETGITIGEKDGLWRFTAGKLAVEIDTKGSFDLCFSREEKKLTTAPGKLSGLFTDTDGEPHMVQYLGFGVGETVYGLGERFTP

SEQ ID NO: 101405 - protein, 266 aa, Unknown
  Obtained from environmental sample
  DOMAIN (69)...(243): von Willebrand factor type A domain
  misc_feature (1)..(266): Xaa is any amino acid
MNERKPPKSAVRIEELINYFDYDYSPPMDGKPFAVHVETGAAPWNTDHLLARIALKGKEFPVNGRPKVNLVFLLDVSGSMDEPNRLPLVISSMKMLVNELKGTDKVAICVYAGAAGTVLPPTSGDNKNMILAALDRLQAGGSTAGGEGIQLAYRLAEENFDPNAVNRVILCTDGDFNVGITNRSDLTDMVAAKAKSGVYLTVLGFGMNNYRDGTLKQLASKGNGNYGYIDTMEEARKILVEQLSGTLITIAQDVKIQVEFNPETVG

SEQ ID NO: 101406 - protein, 278 aa, Unknown
  Obtained from environmental sample
  misc_feature (1)..(278): Xaa is any amino acid
VLAPPDPDCVEAVSIYAELIKKTEIIGLDYSSLTTTLGSHFAKKSSENPITAALMVRLLKDAGASSNSVVAVNASGSFPGFVLSSLSACTAIGIKTFVIASIGASSYGANIPGNTIADMLLEDGVKKLDYVLLAVTPGGSSDRGTELDAEELERVADMLEKLGIPFIRPVNLADAISLRESLFTDSACTLLINIGGNHASSGADTDFALMSGILKPNKKKTYEDAGLIQYFLKTGKPVIQILNVKKLYAAYGLEFDEEGELLTGSEKVYRWKRLPAII

SEQ ID NO: 101407 - protein, 214 aa, Unknown
  Obtained from environmental sample
  DOMAIN (5)...(35): Flagella basal body rod protein
  misc_feature (1)..(214): Xaa is any amino acid
MMRSLFSGVSGLQNHQTRMDVIGNNIANINTTGFKRNRVNFQDILYQQQQGAARPTNEIGGVNPKEVGLGMSIASIDTLHIQGTFQTTGIGTDLAINGQGFFILDNGGNQLYTRAGAFNVDEEGTLVNPANGMKVQGWMAREVEGYIVLDTSRPVTDLTIPIGSKDPARATTEVNFACNLDKRIPEIPENPTGAQVIQGTWSTSINIYDSLAKN

SEQ ID NO: 101408 - protein, 141 aa, Unknown
  Obtained from environmental sample
  misc_feature (1)..(141): Xaa is any amino acid
DRGGDITYHGQGQIVGYPILDLEAFHLSLKQYIFNIEELVIRTLGGYGITAERLQGATGVWIDSDKDTARKICAIGVHASRYVTTHGFALNVNTDLRYYDYINPCGFTNKGVTSMEKELGRKVDVEEVKERLKAQFTKLLN

SEQ ID NO: 101409 - protein, 104 aa, Unknown
  Obtained from environmental sample
  DOMAIN (1)...(95): Protein of unknown function (DUF1026)
  misc_feature (1)..(104): Xaa is any amino acid
ETGRDVSGGPIETWKDGPTIWASVEPLKGTEYWSQRQLPMIEAQVEARIRIRRRNGLSPGDLRVRHGRTVYDVKSVIQDTQNIETQLMVRARALEQGEGQEVNA

SEQ ID NO: 101410 - protein, 254 aa, Unknown
  Obtained from environmental sample
  misc_feature (1)..(254): Xaa is any amino acid
MFNVIPSVGLGVNINLPSGGKRIAGGKLPTDGELAVDTAYKPLYSGVTAMGAGATWTVGIADKKPPAIKIDYPDPADTVSYPAYFSPNNDGKADYLEFPLSITDERYVDNWVWEIRDEAGNVVRTYRNKELRPETYGVRNFFGRLFAVKTQVEVPHNLRWDGIGDSGQMSPDGKYTFTIRAADDSGNAGSTPVYEAVLKNAPPEVTIAPIDDAQRVFSPGGGGSKSTITFVPKGTAEDAWESGIYNTAGEKVRS

SEQ ID NO: 101411 - protein, 287 aa, Unknown
  Obtained from environmental sample
  misc_feature (1)..(287): Xaa is any amino acid
GIPLKELRWDGHGEAGTFAADGEYTYELYAVDQAGNAGRSNTLRFRMSTVDTPVMISSDTRAFSPNGDRVKDTINLNPQIQVKEGIVNYKIEIQDNAERIIRTFDGRGMPPAAISWDGRTAENVQAPEGIYKARLELRYEQGNQPSAVSLPFELDITPPKGSASAPYTAFSPNGRRATIPFSVKTEADDEWEAAIIGANGRQVKTWNWKGAAPEIVWDGKDAAGNAAPDGTYQFTLESTDAAGNSAKYNIPSLALDARIPRLILTASSTAIAPKANQATDLVRFGII

SEQ ID NO: 101412 - protein, 200 aa, Unknown
  Obtained from environmental sample
  DOMAIN (1)...(200): Domain of unknown function (DUF323)
  misc_feature (1)..(200): Xaa is any amino acid
MGKELGTAGSGDTTPVHTVTLTGFSMSKYPVTQEQYQAVMETNPSYFTSAVSGESGTPGKLPVESVSWYDAIVFCNKLSVKDGLTPAYSIGGSTDPSDWGTVPTEPNDPNITTWRTVVIVADSTGYRLPTEAQWEYAAKGGTTQGNFTYAGSNKAGDVAWYKDNSGSKTHEVGKKASNALGLYDMNGNLDEWCWNWYGPY

SEQ ID NO: 101413 - protein, 282 aa, Unknown
  Obtained from environmental sample
  DOMAIN (2)...(282): Dihydrouridine synthase (Dus)
  misc_feature (1)..(282): Xaa is any amino acid
LALAPLHEVTDKAFRIFMRELGGLGMTVSEMVSSEALIRKAAKAEKMLERDGRRPFAVQIVGARPDVMAEAALIALEGGADVIDINMGCPASNVTGGLAGSAMLRDIRLAESVAVAVIKSAKAPVTVKMRVGWDESQKGRGEYLDFLKMFDAVGVSAVTIHPRTRAQQYSGAADWACIGRAVEKGFGYPIIGNGDVLNAADADRMVAETGCQGVMIGRGAMYNPFIFKQIIDRTFAVGPKMRIEAAIRFFEILIRLNEERDALHKIKKFSGYFTKGIPGAAS

SEQ ID NO: 101414 - protein, 151 aa, Unknown
  Obtained from environmental sample
  misc_feature (1)..(151): Xaa is any amino acid
MLVRDGGGRQAATAASTGYDPMDILAVEGVTRLQQGILIVREAVTALPGMRFAVAVSRNRGILAIPLTWDDGAVLAFLETIDNSSLTGRGTNLESLLEAGAGAFQPSHPSNRVILLVSDGEELTGSIRNALSRCNRNDISVTSILTGSDEG

SEQ ID NO: 101415 - protein, 299 aa, Unknown
  Obtained from environmental sample
  DOMAIN (189)...(272): Polyribonucleotide nucleotidyltransferase, RNA binding domain
  misc_feature (1)..(299): Xaa is any amino acid
FPLTVESGEKAYAAGRLPGGYKKREAPPGDDETLKARIIDRPIRPMFPDGVSREVQIIVQVLSSDKNFDADVLGVSAASIAVGLSELPFEEQVAAVRVAVVDGKPVINPTFAQLDVCELDMVVGGTENSVCMVEGGAYEVSEQIMIDAIQAGHQAIKDLCKAQTELVARSAKPKMVLTPKAENENTAKIAEAVKSAIYDELSKTLHTPMVKTEHYPAMAALEEKALASEAVTAIIGEDAALKSLAKAAFKEIERDTMRKMILDEGVRIDGRKTTDIRPIEIQLGVLPRSHGSAIFQRGE

SEQ ID NO: 101416 - protein, 239 aa, Unknown
  Obtained from environmental sample
  DOMAIN (2)...(238): Prismane/CO dehydrogenase family
  misc_feature (1)..(239): Xaa is any amino acid
VVENTALNLKNTALEKGKLKGLGALQRLCKLFGVSGKDDHEKALNVANAVLNDLYKPEYVKMDLVEKMAYPPRFKLWKELGILPGGAKAEVFHGVVKCSTNLNSDPVNMLLDCLKLGISTGIYGLTLTNLLNDVLLGEPELRPAPVGLRVINPDYINIMITGHQHTMFVHLQERLIQPDVVALAKAAGAKGFKLVGCTCVGQDLQLRGAHYTEVFDGHAGNNYTSEAILATGAIDAVLS

SEQ ID NO: 101417 - protein, 130 aa, Unknown
  Obtained from environmental sample
  misc_feature (1)..(130): Xaa is any amino acid
MLRKKISLTAALVCCVIAFALGVSVKFLTAARSDVTWGLLYQTLSIVRSQFVELDVKDDKLIYGSIRGLLRALDDPYTRFVDPEGFAEMQTHLNGSFAGVGMHIGMKDGMVTVIAPIEGTPADRAGLKAA

SEQ ID NO: 101418 - protein, 95 aa, Unknown
  Obtained from environmental sample
  misc_feature (1)..(95): Xaa is any amino acid
DSNTTRNSLAGRAALQHGIPAARNDIFLDGVQTEAALEKRFAEAVALAERYGTVIAICHANRPVTQKMLKKLLKKYNKRVEFVLLPEIIAERTKK

SEQ ID NO: 101419 - protein, 66 aa, Unknown
  Obtained from environmental sample
  misc_feature (1)..(66): Xaa is any amino acid
MAPVTFHELRHTYASTLVNRGCPMAVVAQLLGHANTRVTEQHYAHLAKSTVRDELLRSMPRLGIVG

SEQ ID NO: 101420 - protein, 282 aa, Unknown
  Obtained from environmental sample
  DOMAIN (1)...(47): Regulator of chromosome condensation (RCC1)
  misc_feature (1)..(282): Xaa is any amino acid
GTLWAWGLNYYGQLGLGNTVNRYTPTRVGTLAYWAAVSAGVDHTLALKTDGSLWACGRNNKGQLGLGDSDFNAHPTPTRVGQGANWTAVSANFEHALALRADGSLWAWGNGPLGQLGLGATNGYRNTPTRVGTDADWATVSAGGSHTLALKTDGSLWAWGHNGYGLLGIGTSDYNAHHTPTRVGTDANWAAVSAGYIHTLALRADGSLWAWGSNYYGQLGDGTAWRVFPVLVGGPASGSSSTPVDIDEYATPVGSDGDTWTWEAANSQTVATDGDVEHPASP

SEQ ID NO: 101421 - protein, 250 aa, Unknown
  Obtained from environmental sample
  DOMAIN (1)...(250): Inner membrane protein CreD
  misc_feature (1)..(250): Xaa is any amino acid
MLIPLAMIRGMIDERKWTANSAEEEIMAAWGSHLLEAGPFIVIPGVRTEEVRTKTESSGEKIEQVKHSFNFVITPQKLNIKTDFKTEIRKRGIFSVPLFSSELSLSGAFNFDMALASLSPNEELILAQAELVIVLSSQKGIRRIERALWNNRELFFQPGNRWVILSPGVSRYDYDADAYLRRMNGGIHSSIPDFTAASKFDISIAIQGGQLVRFMPVGQDTHVEISADWASPSFQGSFLPSNSTITDSGL

SEQ ID NO: 101422 - protein, 141 aa, Unknown
  Obtained from environmental sample
  misc_feature (1)..(141): Xaa is any amino acid
TGEKQFSYKGISVLQAVQHIVMFVSGLWQIHAFGEGNTRTTAVFTIKYLRTFGFDVNNDLFANHSWYFRNALVRANYNDFKNNIHANKEYLERFFRNLLLGENVVLENRELLVCADAKDKLQSAKEPDKYISKSKYCTLNC

SEQ ID NO: 101423 - protein, 279 aa, Unknown
  Obtained from environmental sample
  DOMAIN (153)...(279): DEAD/DEAH box helicase
  misc_feature (1)..(279): Xaa is any amino acid
NFCAFPRYKLHGAPDKSERFTIQELNSLQIGDYIVHIDHGVGVFGGLVKQMVNGKPHEFIKLSYQDGDVLFVSVHGLHRISRYKSREGEPPKIYKLGTGVWQKLKNAAKSKVKDIARDLIRLYAKRKEAEGFAFSPDSYLQQELEASFIYEDTPDQLRATQAVKADMEKECPMDRLICGDVGFGKTEVAIRAAFKAVADSKQVAVLVPTTILALQHHKTFCKRLHKFPCRIEYLSRFKTAAEVKKILSDLEHGKIDIIIGTHKLLGSAVKFKDLGLLVV

SEQ ID NO: 101424 - protein, 281 aa, Unknown
  Obtained from environmental sample
  DOMAIN (1)...(105): Pyruvate kinase, barrel domain
  misc_feature (1)..(281): Xaa is any amino acid
MVARGDLGQQIPIEEIPLAQKHIINTSRRAGKPVITATQMLDSMIHNPRPTRAELTDVANAILDGTDAIMLSGETAQGTYPVEAVKTMDKIACVVEQSDEFRTRMRNFHEECHSDVHNPKENLGIIMSKSGVEIATAVKAKAIVTPTRSGNTARIISVFRPDESILAVTTDKRAERIMQLYWGVYTCITPEVGDSDSMIHNTMKVVSETGTAGISDKVVLIAGLPLESPNMINTVRVVIIGTVLTRSNAGGHANPEVIRAQGKIIHAATPDEARKKISHQA

SEQ ID NO: 101425 - protein, 222 aa, Unknown
  Obtained from environmental sample
  misc_feature (1)..(222): Xaa is any amino acid
VDLHVLDIVDSLFTGTIETDKGELESNGSTIIKVPTKFTYKGLFELITALTDENKKENPMYKLNMIAHIPVPKFGDFSFPFEHNDKIPIVRIPDINVATVPKASITYSNSVIPIPTGGKIDFSLNLKNASNVAVILNQLSCTLKINNTPLSLGLTDKPTIGAGATQKIDFSFPLTVSDITNIGLSLLTGNITNFSLTGDSKFGIPDFPLINKLLEHSFTLGN

SEQ ID NO: 101426 - protein, 289 aa, Unknown
  Obtained from environmental sample
  DOMAIN (133)...(284): Flagellar M-ring protein C-terminal
  misc_feature (1)..(289): Xaa is any amino acid
ERNVDLQRAITKTVTDHIKALDDVDNANVTIVFPKDQLFASEQNPVSASVVITPKPGSDIAQNRKKIEGIQKLLKFAVEGLRDENIVITDTTGLVLNDFAGLAEWDRLTLIDRETKMVRQLEAQYRAKILTTLQKTYGEDRVRDLDIKITMDMSQKSVATEEFFPITMNPRTPGLAYDDSVLLQSIPRSTATSKTYWEGTGFNPEGPAGVEGQVPPAYRDMSNLYGKVNQETATVNEEINKRVSQEEKSPEINRVTVSVNIDGTWKLKYDEKRNPVITIDGARERIYTP

SEQ ID NO: 101427 - protein, 261 aa, Unknown
  Obtained from environmental sample
  misc_feature (1)..(261): Xaa is any amino acid
MRWREKWGGRFNDALNGLMADVLPGEGTLFQRHAEWSAQRADKLLLQPKVQAASRKVVKERQRLERYGKALAEDRERHLGAVGLREPAGKLQAELWRLKGANGSVELLDGTTIELPPGMCIEVTVQKWFTQAKKAERGLLRVDALERNRIRQIMELERSTGADAQPQNDAPKKSSPQSKQAGISGHGKKKMEQEKDHKRSDGKGRAFRSQMVEGFEVLIGRGDTDNDTLTFKVASPPDFWLHVASVPGSHVVIRNPDKISE

SEQ ID NO: 101428 - protein, 286 aa, Unknown
  Obtained from environmental sample
  DOMAIN (18)...(99): Cation transporter/ATPase, N-terminus
  misc_feature (1)..(286): Xaa is any amino acid
MNKNNIQAKAPVLSSRAERARKRFLKAAARDGDTLLIQYDNSLAGYDEDDVADQRREHGANKITHQNKDPLVSRLVRAFINPFTIILIVLAVVSAFTDVLIVPPGEADYTAIIIIIAMVTISGLLRFIQELRSNNAAKKLTEMVETTVCVGRKVHDKELGETRSEKKELPLSEVVVGDLVYLAAGDMVPADVRIIQAKDLFVSQAALTGESEPVEKFKGVIDKPGENPLELNNLAFMGTDVISGSAIALVINVGDNTFLGSIAEQLQTKAPPTSFEKGINSVSWVL

SEQ ID NO: 101429 - protein, 240 aa, Unknown
  Obtained from environmental sample
  misc_feature (1)..(240): Xaa is any amino acid
DPILKKAVRLAKRGKYDESIKLLEAEVFQYRDSYGYCHVLGLTCLYAGDFGGAFDYLNRAKNIKFKEPPTLLGLAALFLRREETDRALDLYLDIQDIDPKNKTVKKALKIIRKYGGTDELSTWLAQGKLASLYPSMPKVSISVKPLPIVIAAVVLATAMVVAIGIRNVQVFKRGGLEKSVLEKTERDRPTETGGVYRYILTSDQVIAVYEKARKLFNTYHDEAARRELNRILESNASAAV

SEQ ID NO: 101430 - protein, 267 aa, Unknown
  Obtained from environmental sample
  DOMAIN (1)...(267): tRNA synthetases class I (I, L, M and V)
  misc_feature (1)..(267): Xaa is any amino acid
NAFRTYPGDFVSTTDGTGIVHTAPGFGEDDARVLKNTGIPVICPIDAECKFTEEVSDFAGIFVKNADKGIMEKLKNEGKLFRREQILHAYPHCWRCGHPLIYRAVGSWFVNIEKIKKDMLRANSEILWVPDHIRDGRFGKWLEGARDWAISRNRYWGNPLPIWRCEDCGKIICVGSRKELQELSGTYPEDLHKHFVDNITIPCSCKGVMRRIPEVLDCWFESGAMPYAQSHYPFENKDFFESHFPSDFISEGLDQTRGWFYTLTILA

SEQ ID NO: 101431 - protein, 242 aa, Unknown
  Obtained from environmental sample
  misc_feature (1)..(242): Xaa is any amino acid
ENAKYKEKEIILEPGDILYLYTDGVTEAMNQRKELFGERLLFAALNANKDCAPKELLSAVKREVDNFAEGTEQADDITMLVLKVNDAAVHSEEIPPNAMKKLEIKASFENLDKALDFINTELEQRGCPQDIQGKIEVAVEEIFVNIADYAYAADGGDSPDTGDGGADGAVVIFISVTDKIVIRFEDTGKSYNPLEKPDPDLDKPLMERDIGGLGVFLVKKLMDNVEYSRVGDKNVLVMTKTK

SEQ ID NO: 101432 - protein, 122 aa, Unknown
  Obtained from environmental sample
  misc_feature (1)..(122): Xaa is any amino acid
MSEIMRPIPFPELIQWVRGEYKNHSSVFGVRKEKFFHPSSSVSIEFFGTKIKSPIGPAAGPNSQLAQNILAAFLAGARFMELKTVQTMDGEELRKCVARPCINTVDEGYNVEWSTELTVPQA

SEQ ID NO: 101433 - protein, 208 aa, Unknown
  Obtained from environmental sample
  misc_feature (1)..(208): Xaa is any amino acid
MRRRQVKKTVLLFTFLFTSIFCFIQCSSGEKVSLSDEKDLLSFTIPNKESSVKTDTEGNLAVKIYEPVDITKLIPIVTVSPNAKVSPVSGRIVDFTDPVPYTITAQNGSSITIIVTVEISLSSEKELLSFAIPNKMSIAMADTEGNLTIKIFEPVDISELVPVVKVSPNAVVSPASGTAIDFTNPVLYTITAQDGSAKMVKVTARAAR

SEQ ID NO: 101434 - protein, 78 aa, Unknown
  Obtained from environmental sample
  misc_feature (1)..(78): Xaa is any amino acid
MTAPGANPEKVNHNKPPAYWIHEIFKKGKRRDKYVKPRDAARILSENENNLLLSINKCSELKALVNTILEICGCKDLL

SEQ ID NO: 101435 - protein, 96 aa, Unknown
  Obtained from environmental sample
  DOMAIN (8)...(94): Nucleotidyltransferase domain
  misc_feature (1)..(96): Xaa is any amino acid
MRITEYQKNMIVEAIANVDPNAKVWLFGSRADDSKKGGDIDIAIFSEKIDKDVKQKTQVRRLICDKIGEQKIDIVTTNSGKEAIFRLAVAEGIQLQ

SEQ ID NO: 101436 - protein, 151 aa, Unknown
  Obtained from environmental sample
  misc_feature (1)..(151): Xaa is any amino acid
SDETPGGQTPGGETPGGETPGGQTPGGEQPGGSGFPEEATSVTGLTVDSALVGTWKGDEDAGTIIFTSTGVGTTDTMASGTDGYAFVAAMGQVKSSYGAPTISGGKVTASMMGMAFTLYTYTISGTTLKIYEYDDEEDDEQGDLFFEGTKQ

SEQ ID NO: 101437 - protein, 279 aa, Unknown
  Obtained from environmental sample
  misc_feature (1)..(279): Xaa is any amino acid
MTYFIHAIMIFLGLLAVVPIYFLLLNATRSTEQINSGFVIIPLKDSFFSSSKNIISDWTSDAESGTVRCFDLVMGKTLKEEVNNKTKEIERIAVKKFAENTTPRITIFDDEDQIIVNYNLENNTIIFVKDGQKVKKGETLARHMKSSNVSYNWGILTGRGFQIFQGFGNSAFIAICATVLSIYFSALTAYGLHVYRFRGRLALWTVILIIIMLPSTLSIIGFYQFMALLKLRDSYVPLIIPGIAAAGTVLFLRQYMMSVLSTDLIDAARIDGAGEYRIF

SEQ ID NO: 101438 - protein, 245 aa, Unknown
  Obtained from environmental sample
  DOMAIN (4)...(245): NAD-dependent DNA ligase adenylation domain
  misc_feature (1)..(245): Xaa is any amino acid
MKFLASQVLEHRRRYYILDQPVISDAEYDTLERELRQLEAEYPLLTDPNSPTRRVGAPPLDRFEKARHGVPMLSLDNAYTAEELLAWADKVRRGLPDGAEPSYCAELKVDGLSLSLHYEGRVLVGATTRGDGETGEVVTENARAIADIPLELPSGAPDALEVRGEVFLSRRRWEELNKERDLKGEQRFANPRNAASGTMKLLDSREVAERRLQFMPWQVLDSEDHFGAMRDLAKWGFSTMPANAV

SEQ ID NO: 101439 - protein, 118 aa, Unknown
  Obtained from environmental sample
  misc_feature (1)..(118): Xaa is any amino acid
MPETGSAPSPRPILRSAGVVGLMTLLSRLTGLVVQRMIGSRLGLGDISDAYQVAYRLPNMLRRFTAEGVMTAAFLPTLVDIDAKRGGEEAGRFVSGFMGTLGAILLALCAIGVLCMTP

SEQ ID NO: 101440 - protein, 69 aa, Unknown
  Obtained from environmental sample
  misc_feature (1)..(69): Xaa is any amino acid
RGSPFGTKVPVAIGFGIHTPDQAAQMARMADGVIVGSAIVKIAAEHGDAAGPYIYRYVKEMKETLVYEQ

SEQ ID NO: 101441 - protein, 186 aa, Unknown
  Obtained from environmental sample
  misc_feature (1)..(186): Xaa is any amino acid
LSVLQQNYPNLEYIIIDGGSVDSSVEIIKKYEDKLFYWVSEKDNGMYDAIQKGFEKSTGDIMAWINSDDLYHRKSFFVIAELFSKFTDINWLVGAATQWDEYGRGINIFSSVKFTRYDFLMGHYKWIQQESCFFRRTLWDKAGSYIDKTLRYAGDFELWLRFFRFDKLYVTNAIIGGFRIRSEPSL

SEQ ID NO: 101442 - protein, 285 aa, Unknown
  Obtained from environmental sample
  misc_feature (1)..(285): Xaa is any amino acid
TPNVSDYPDGEYTLSITVSDRIGNINSTQIVNEPFVINRNAPTLSAGKSDDTKGDYGKIADDANITVFTLDGTVLDGDLDTLTISIVSETKTTTITWPTATANSPTLTLISGTYNYTWSWKLDGALYNTLGEGLNTLTVTAKDRQGNENRPPVVFKFTKDNNPPDITITSMNSKSVPYATWANAPDKSAVLSETGSIENAKAAIQGAMEDAVSKIGVSEDAGATYYYEYRIYNAAYMEANKTGAGANITYNKPDWTKITFVTGNPSAPFEPQTTVSWKLPLFRRH

SEQ ID NO: 101443 - protein, 284 aa, Unknown
  Obtained from environmental sample
  misc_feature (1)..(284): Xaa is any amino acid
TYATRAKEILNTVRTTMIDGGRYLMPGQWGGPPDSKDVKNPGYVAPAFYRIFAEYDSTNKSAWMTLVDGSYELIAKSPGYAKGLVPDWCKMDGGTTGGAGYNAYFDGDALYRDAIRVYWRLATDYLWYKEPRAKTLLDKAMAFMEGLGGAEAANFFDMTGKLLPDEDTEILGDGKSVKIERTRREHSHLTVGMWAAAAMGAGGPAMAERYSDELLKFYQPGTDFWGYVKDPDGGTEDTLHNEMYFDQFLAWFGASLLGGAFTNVWDDLRDGVPTGPPEWKTRPI

SEQ ID NO: 101444 - protein, 288 aa, Unknown
  Obtained from environmental sample
  misc_feature (1)..(288): Xaa is any amino acid
VSGQSNFVDVELSVNIEGGGLYSTSGYDFTITGGDINLSTSSARLRFEGSNKLTITGGTFSKTAGTYYNDPIIDAGGREVLITGGKFESKLGNVLNVGGKAVISGTVEMQSDTAMSSVVNIARAATVEIIGGKISNTKGGVAVNIGDATATLSLGGTPEITGAISTKYAGRIATDATFKPGDKKYELLLGGGILDNGSIVVRGGGAHVGSFVYNHPPYTISASGGNIVLNLPATFTAPKYVITGSVENGFLAKRTGRDTVGIGTMSAILDSIRVDAKALPCSVQFGGG

SEQ ID NO: 101445 - protein, 115 aa, Unknown
  Obtained from environmental sample
  DOMAIN (6)...(113): Metallo-beta-lactamase superfamily
  misc_feature (1)..(115): Xaa is any amino acid
LASGSRGNCLWLEESDLAVVVDCGLPAREFLRRAQAAGLDPRRLAALVISHEHRDHLSGVGPLARKLKLPVWANQATRDQAEPITGPLNWEIFTTGDTLTFGLLKIRTLPISHDA

SEQ ID NO: 101446 - protein, 266 aa, Unknown
  Obtained from environmental sample
  DOMAIN (204)...(266): Polyribonucleotide nucleotidyltransferase, RNA binding domain
  misc_feature (1)..(266): Xaa is any amino acid
DPGHGRGFNDKREGLDFVPLTVDYLERFYAVGRIPGNFFRREIGRPSEKETLTSRFIDRPCRPLFNKNWTYETQVIVQAISVDDKYDPDLPAMLGASAALTISDIPFAGPIAGARVVRVDGGLVVNPTQAQLEAADLALIVAGSREAVVMVEGGAREASETDILDAVFLAHKAIGPLLELQLELQKACGQEKRRPPEVVRDEQLIQKVAENYRAPMMEALTTRVKQARQKKIASLKAEAAAALSPEHPSGQSDIHHALHNLEADLL

SEQ ID NO: 101447 - protein, 169 aa, Unknown
  Obtained from environmental sample
  misc_feature (1)..(169): Xaa is any amino acid
MLFDFLFALKRIKVFALVGESGTGKSFRAKLVAQKYGIEHIIDDGLLIKENKILAGHSAKKEKTFLAAVKVALFDEKSHRDEIARKLQSEKIKKILVLGTSDKMVNKIAARLQMPLPRKIIKIEDIASQEEIDKAIRTRRIEGKHVIPVPSIEIKRNYPGISTTRYASQ

SEQ ID NO: 101448 - protein, 296 aa, Unknown
  Obtained from environmental sample
  misc_feature (1)..(296): Xaa is any amino acid
PALEYVPEEHKTAELLDAALENYGCVFEFVPEEYKSPKVCFDAIRKDYTAIKYVPEAYRTKDFYEQAFSLNARVFEYIPKGFITRQMCEEAVQKNHDALQYIPAKHCSEELVFEAIKNNGLLLGDIDDRQKTEQLCIAAVKNDGGALQYVPYRLRSPALCLAAVRRDAIAIQYVPESLKTRELCLAAAADKRYEWTIRYVPEHIRTEDFHAECLSADPLEALEQLVKPMDIPPAQMTEEDLLKAVRNISNALSAIPIEQITFELCVEALLHDVQTDGSELKYVPDKFKTPEFCLNC

SEQ ID NO: 101449 - protein, 203 aa, Unknown
  Obtained from environmental sample
  DOMAIN (2)...(200): Ribosomal RNA adenine dimethylase
  misc_feature (1)..(203): Xaa is any amino acid
FISLLNDFFSANGNFTLIEGDVLKTWHDQTPAQYLFGNLPYNIAATLLADLIVKRRFFRRVVVTVQREVALRMAAGVGTSNYSSFSVLCVSAYRVKPLMVIKSSSFYPQPNVDSQAVLMELRDDAENRMLPSCFHPLLRALFSSRRKTIKNNLAAFLASGGKNSESALAAIFAESGLDGGRRAETLAFEDFTKLAEVVENMGL

SEQ ID NO: 101450 - protein, 288 aa, Unknown
  Obtained from environmental sample
  misc_feature (1)..(288): Xaa is any amino acid
DYTNGEVHLAADAYTHPQPHACFIQSIEDDLVGPNGIMDLWTREARLFKYGSGTGTNYSNIRAEGEPLSGGGRSSGLMSFLRIGDRAAGAIKSGGTTRRAAKMVILDIDHPEIKNFINWKVNEEQKVAALVAGSRMLRDTMQRITAACGLVLDANAADPHTNPQLASVLLDARRQHIPEAWLMRALQLVAEGKGDTEIPVYDTDWNAEGYATVSGQNSNNSVRIPNAFIRALENDAVWPLYARCGAADTSKRAAPKAGELWEDIAYAAWACADPGIQYHTTINEWHTC

SEQ ID NO: 101451 - protein, 134 aa, Unknown
  Obtained from environmental sample
  misc_feature (1)..(134): Xaa is any amino acid
VMYSAVVATVICIGCGGDDGEQTKSLKASDLLNAITGGRGTDTPTAPTDYTLIVNVSPTEGGTVSRDNEQLSYKAGARVTVTAAPGPGYTFLSWSGASNTTDPEVTVIMNGDKTLTAGFKREDDNRPTYDIYST

SEQ ID NO: 101452 - protein, 219 aa, Unknown
  Obtained from environmental sample
  DOMAIN (100)...(134): Gram-negative bacterial tonB protein
  misc_feature (1)..(219): Xaa is any amino acid
MRRGRYIRGQRNKFNPKTRLIGMNTKQLKKSIWPAAVTAVTLTLAPAPVLSQNAPTPAANAESEAVIDLSEEAIDLGEEIEYLDPEGALEKMPVLTQFVEAKYPDSLIKSGIEGSVLLELLVSETGAVDSAAVVRPLHPVLDASALAAARNFKFSPAQANGGEAVAVMLQYEYRFSLRDVITAPKTYVNFNGTIIERGTRRPVADALVVLLFADTLSDT

SEQ ID NO: 101453 - protein, 154 aa, Unknown
  Obtained from environmental sample
  misc_feature (1)..(154): Xaa is any amino acid
MKSRCCFFIAIRYLLGRAHEGGRYLRGAAAGIAVSLIPIIVTLIVADGMIRGIVDRYLELGTGHLQIFGFIDPESLEGIAEKVEELEGVRGAWMERRGMGVLVGKKGKAGASIRAIDPSFWRDAGSLEYLTLVDGTAQAETERDMLLGESLAAS

SEQ ID NO: 101454 - protein, 264 aa, Unknown
  Obtained from environmental sample
  DOMAIN (102)...(264): DNA polymerase family A
  misc_feature (1)..(264): Xaa is any amino acid
MLASYLLDPESRHGLDYLSRRHLGHTPIAYKDLLPDSKKNFSDLRPEEARDYAAEDADLTFRLAGLLRASLKENPALAALYEEVELPLEALLAGMEGAGILLDVPALERLSQELGGQLAVMEKEIFNLAGRPFNIASPRQLADVLFKEQGLSPLKKTAKKTGFSTDDEVLAELALTHPLPRAIREWRSLDKLKSTYTDKLPRTVNPATGRVHTSYNQTQTATGRLSSSEPNLQNIPARGEEGRRLREAFIAPPGFELVPPTIRR

SEQ ID NO: 101455 - protein, 155 aa, Unknown
  Obtained from environmental sample
  DOMAIN (102)...(135): Tetratricopeptide repeat
  misc_feature (1)..(155): Xaa is any amino acid
IRLEPNNAEAYSNRGDAYSDKEDYALAIADLDQAIRLDPNNAKAYSRRALAYWAMGERAIFNPKVLLSNPNTGKTNYDHAIADYTQVIRLLPNNAKAYDDRGAVYAQRGNIYRDKSDYDRAIADFETALRLDPKTDKFSLELTKKWRDTDTFRTP

SEQ ID NO: 101456 - protein, 297 aa, Unknown
  Obtained from environmental sample
  misc_feature (1)..(297): Xaa is any amino acid
CQNRIEKNLKNTAGIQNVSVNYHTGAAAVTYDPAETSFEAISAVIESLGYRTLEENSKNTIPRIVGTLVIILALFMLMQTFSTSSLAAAFPLAQEGMSYGMLLIIGILTGIHCIAMCGGINLSQTLRKSDEIAPNNAYSMLLPSILYNGGRLVSYTMVGIMVGALGSVITVSGRFQGVVQLAAGIFMVIMGINMLGLFPVLRRFIPRMPKIFAAKIDERKTGRGPLVVGFLNGFMPCGPLQAMQLYALSTGSPVRGGIAMFLFCAGTIPLMFALGTASSALSGVKGQIFSRRVMRAG

SEQ ID NO: 101457 - protein, 60 aa, Unknown
  Obtained from environmental sample
  misc_feature (1)..(60): Xaa is any amino acid
FRTTASTLLNERGYRPDLIERQLSHVEKNAVRGAYNRAEFLDERRAMMQNWADYLDALKG

SEQ ID NO: 101458 - protein, 72 aa, Unknown
  Obtained from environmental sample
  misc_feature (1)..(72): Xaa is any amino acid
MAGLYQCSCAIDHFAEHLSYDEFVEASTFAHYATLPGEGGGIFRDPDRAKQQAKLYRDLEAEAYRVCGVTHP

SEQ ID NO: 101459 - protein, 136 aa, Unknown
  Obtained from environmental sample
  misc_feature (1)..(136): Xaa is any amino acid
MINLLVLSYFKYSYFFTDIFNQFFGTAFETTDYLALWTNQLTGSNFDILTIILPVGVSFYTFQTMSYTIDVYRQKVKPIRSIIDFGFYVTFFPPLVAGPIVRAAEFVPQLYRNYQLSMREFSFAVFLIVNGLLKKM

SEQ ID NO: 101460 - protein, 301 aa, Unknown
  Obtained from environmental sample
  misc_feature (1)..(301): Xaa is any amino acid
ERIGFYQIVFSYLNLLQKQVLYSILGYGEDRALSVDEFYEDISKLEYWKINGYSKEIPTEKELNKTLRILLDHNLLYLTRHENDFLYGMKSIPYFTFMFEKEFLGPQSDSGEYLRDIFISLDEQIESALWHDLDVDIIKPLLERMKNKRYTHIHYKYAMFMIDAFRVSSKPEIFSLIEEFLPNNNIKRMSPILSPEATMRHNITALAWLFSRVPDLFEREMVFHSAVEYCNIVVLDWLYARVPALLERTNYNGSTVFHFAAMSDKLVVLDWLYARVPALLERTNNHGDTVFHYAADSGNPV

SEQ ID NO: 101461 - protein, 175 aa, Unknown
  Obtained from environmental sample
  misc_feature (1)..(175): Xaa is any amino acid
IAVKEASARSDKAIAEIHAALDRMEYNFGGVSKRLGDLAEIIVVPKIKMDINKLGGHNFQEAVADKTVVAVVDGVKDPVAEVDMFLFGDGEAMAVEIKAHLKKTKVDTHLRRLRKLRTHENEAGIVGKKLYGAVVGVIVDDEARAHAKKNGLYVIEIREEENKLNIEKPDTCQTW

SEQ ID NO: 101462 - protein, 276 aa, Unknown
  Obtained from environmental sample
  misc_feature (1)..(276): Xaa is any amino acid
TQSFLHSMLGLASAALKDRDVDRYGRNHNNTLQTDGVPDVLYEAKHGSQYVINAYNNAKGDVSKMILSVGGFGPDHQWWGQPEMQDRMSYERGGPVRDARNEVGANILGNFAAGLALTAKNYAIFDKKFADTSIAIAKKMYEYAKTHQTATQTPAYNGNSIVNDKMAFAAMALAYATGDKKYLQEFCYDKTIGGKAQADAANHNALYQGGWVTNVDPVFSKQTANTDWASPHMAVKWGFFRLILKDKAMCSTLGIDSTERIKLIGKTIYQMIFDVT

SEQ ID NO: 101463 - protein, 293 aa, Unknown
  Obtained from environmental sample
  DOMAIN (88)...(280): Phage integrase family
  misc_feature (1)..(293): Xaa is any amino acid
AKCCLVRVNLYWVPHFQGKKIGEITRQNLKDFSVSIAKEYPNLSPSTLRQIMLVGVTAFRWAFANELIHADPTIGLTGYSTKAKKRSVLSPKEAEELFKLDWKDKRSMLINLVAMTTGLRIGEILALKAENIGEKYLTVEYSYSPIDGLKSTKTDEERVVPIIPEIRDAMLGRAKLNPHGNGYVFWGDKKSRPCSPYTPIKELRRMLFLIHAGENPTDEKKKEVEEYWKKRNVVFHSWRHFYAARMTDKLDARKVMLATGHKTESVFKGYSDHALDSDLNDVAVTTGEVFMDI

SEQ ID NO: 101464 - protein, 88 aa, Unknown
  Obtained from environmental sample
  misc_feature (1)..(88): Xaa is any amino acid
MNIGDYAVKRPVTIVILYALAMGIAVTMVLNLAVDLYPSTARPVLSIFTRFPGSGPADVEKNVTEPLERALSTSVGLVNMTSNSQFET

SEQ ID NO: 101465 - protein, 275 aa, Unknown
  Obtained from environmental sample
  DOMAIN (186)...(253): Elongation factor Tu domain 2
  misc_feature (1)..(275): Xaa is any amino acid
MDRTGADFFRAIEMMESRLGARPLLIQIPIGSEDSFHGVVDLVNMQALTFGEDDKGFKVTHGEIPANLKEMADKYRERLVETVAETSEDLLEKYLGGEALTIDEINNGIRKGCIELAFTPVCCGSAFKNKGVQPLLDAIVSYMPSPIDIPPIEGVDSNGEQTSRRADDAEPFSALVFKIMADPFVGSLCFIRVYSGVLSSGSVVFNMNKGRRERIGRLLQMHANKREEISEVRTGDIAAVVGFKDALTGQTICDEASPVALESMEFPDPVIQVAI

SEQ ID NO: 101466 - protein, 153 aa, Unknown
  Obtained from environmental sample
  misc_feature (1)..(153): Xaa is any amino acid
MTNPAVYWLIGALILFFLIILLVLNLLRRSRGIGRGLEDLVKERTGALAFETSKLQAVIDSVPDIMFCKDTDYKYTQCNATFEQFLGVKESEIIGKSDKDGEWFHPDDMKMVHEKEKIVISENRILVFEERIHSPITGKEKFFETVKAPIRQN

SEQ ID NO: 101467 - protein, 233 aa, Unknown
  Obtained from environmental sample
  misc_feature (1)..(233): Xaa is any amino acid
LPDSIGNLSNLTQLTIENTAIEKLPDSIGNLSSLKELKLACNEKLTSLPDSIGNLTNLAILNIQYSAIEKLPDSIGKLSSLKELWLFYNNKLTYLPDSIGNLKDLTDFFLSGSAVKVIPDSIGYLQNLTELSLSGSKIEKLPDSIGNLEKLAKLYLDHIKNLRSLPDSVGNLKNLAALNLCGTGLLTQPDTLANCASLEYIDISDTAITSLPGFLTAIKTVIQTTKLIPQSGA

SEQ ID NO: 101468 - protein, 266 aa, Unknown
  Obtained from environmental sample
  DOMAIN (185)...(212): NAD-dependent DNA ligase C4 zinc finger domain
  misc_feature (1)..(266): Xaa is any amino acid
SFAAYFLLSSDPDRSVSVHDNAEFLAELGFPVVERSGVLSGVGEIMSLCGGWESKRHALPFPVDGVVIKVDSFEQQERLGSTSKSPRWVIAYKYAPERAATVVEGVDWSVGRTGVVTPVARLRPVLLGGTVVKNASLHNYDEIKRLGLRESDTVEVEKGGEIIPKVIRVCAEERFAGSAPYEPPLTCPSCGSLLAKLEDEAAIRCINRSCSAQLAASIEHFVSRAAMDVRGMGPAVVKQLLDGALIRDAADLYGLTVEKRADAWNA

SEQ ID NO: 101469 - protein, 266 aa, Unknown
  Obtained from environmental sample
  DOMAIN (14)...(265): Bacterial extracellular solute-binding proteins, family 5 Middle
  misc_feature (1)..(266): Xaa is any amino acid
MYEGLLRRNGVTLEMEPNIAERWETSDSGLVWTFFIRPGVQWSDGAPLSAYDVEFTFNDLIYNTDIVPNSSRDTFSPEGKRFAVKALDSARVEFTLPFPFAPFLHSMGTEILPKHKFADVVARKAFATALSINTPPNDMVVNGPFLLESYLSSQKVVFKKNPRYWKKDEDGKSLPYLDRLVYMIVSDLNAQLLTFLRGETDYLAAKGEDFPELKKAEAATGAFTVHRLGPTAGSNFVVFNQNLTVDTSTNRTYVDPMKLSWFRNDN

SEQ ID NO: 101470 - protein, 270 aa, Unknown
  Obtained from environmental sample
  DOMAIN (97)...(178): Bacterial Ig-like domain (group 2)
  misc_feature (1)..(270): Xaa is any amino acid
DPPGGPADSGCSIGTDLSLIIGQTKELAVRNAGIIEVEWSSSDETVVSITKDGMPISRMIAQAEVVLTAIKKGPATITATALDGSGKKASIKVTVKEAYDVEISGGDLTLQLGGTAELSARALPDNPPGDVKMKWESSNPDVVEIDAETGVVKAISPGDALITATTQDGRTGSIKVTISEEEPVKLESISISCELPSLEVGDIVRVFTDATPAEAGNQNVFWESSNPEVATIDPKTGLLTAISEGEVVITAKSQENSGISDSITIIIVEP

SEQ ID NO: 101471 - protein, 285 aa, Unknown
  Obtained from environmental sample
  DOMAIN (1)...(195): NAD-dependent DNA ligase adenylation domain
  misc_feature (1)..(285): Xaa is any amino acid
MRKFLAQYKLDGASLELQYDKGVLVRAVTRGDGITGDDITANAKRMTGVPEKLDLPFSGGVRGEVVMPRETWRKKYPSKANCRNAANGIMRRKDGCGCEDLKVITYDATASDDDGYFKDEEQKIEWLSKRGFETAVTEVCRSAGDVVSYRDKVAKTRDSLPFDIDGIVIKDIDIDMADLRRARPEKQIAFKFELETAFSILRQVEWSETGATYTPIGIVDPVRLAGTTVQRANLNNPGMIRSLGLQIGSVVSVVKRGEIIPKIEGLAPEGALPQETAVTLEPIEF

SEQ ID NO: 101472 - protein, 267 aa, Unknown
  Obtained from environmental sample
  DOMAIN (1)...(234): Protein of unknown function (DUF1016)
  misc_feature (1)..(267): Xaa is any amino acid
FATVFSNINIIADFLPFVSWSHFCEIMRIKDEQARLHYAKDAAERQLGIRELRQQIARKPFERQEIANMQLTEYSKVPFNMFKDPYLLDTLGLKDNFLESDLENAILLELEKFILEFGSGFAFMERQKRIIIDDDDFKIDLLFFHRDLRRLIAIELKTGKFKPQYKGQMELYLKWLDRYERKEGENAPVGLILCTEASRNQIELLELDKAGIAVAEYWTNLPPKNLLEKKITEILTEAKERLERRTLLLNATFNNTNYSIKGDETNE

SEQ ID NO: 101473 - protein, 154 aa, Unknown
  Obtained from environmental sample
  DOMAIN (3)...(87): Phage integrase, N-terminal SAM-like domain
  misc_feature (1)..(154): Xaa is any amino acid
MNFKTFKAFLQLEKSLSKHTIEAYLHDVALLQTYSEMQQNSRNIERFQSKDIHHFLVYLTELGLSAHSQARIISGLKAYYRFLMMEHIIEQSPMDLIDAPKLGRTLPDTLSLAEIEQLIHHIDLSKPEGPRNRAIIETLYGCGLRVSELVELKV

SEQ ID NO: 101474 - protein, 157 aa, Unknown
  Obtained from environmental sample
  DOMAIN (127)...(143): KWG Leptospira
  misc_feature (1)..(157): Xaa is any amino acid
VRVNAIYDFVQEFDEEFALVELNDKYGLVDKDGNEVIPLIYEFSYGYSEGLIGMMLNGKWGFLDGGGKVVIPFEWDDAEHFSEGLAYVGLDGKCGYIDKTGKVVIPLIYDFAGAFSEGLANVELDGEYGFIDKSGKEVIPLMYDFAQGFPAAKPASC

SEQ ID NO: 101475 - protein, 124 aa, Unknown
  Obtained from environmental sample
  DOMAIN (15)...(123): Toprim domain
  misc_feature (1)..(124): Xaa is any amino acid
MILNKHKGTTIIMAKNLVVVESPAKCKVISKYLGKDYAVKATMGHVIDLPEREFGVDIDKGFKPKYTISKGKSRVLRELKEEAAKAEKIYLAPDPDREGEAIAWHVANNIAAEGATVQRVMFNE

SEQ ID NO: 101476 - protein, 204 aa, Unknown
  Obtained from environmental sample
  DOMAIN (1)...(201): Glutamate/Leucine/Phenylalanine/Valine dehydrogenase
  misc_feature (1)..(204): Xaa is any amino acid
RRRSGFGNVGLWTAKLIHELGGKVVGISGFKSCAYNPDGLDIPKLEAWVAETNYIQGFPQAKIFPLEEVLYLDCDVLIPAATEAVITGENADKIKAKYIVEGANGPTTPAAEAILTKKGVTIIPDILANAGGVIVSYFEWVQNGMFFYWDEDEILNRLTRAMIKSFQDVDAIHTEYQGITYRQAAYVLALRRENTARRMRGCYP

SEQ ID NO: 101477 - protein, 182 aa, Unknown
  Obtained from environmental sample
  DOMAIN (22)...(63): RecR protein
  misc_feature (1)..(182): Xaa is any amino acid
LPGIGARTAERLAYHILKSPPQYAKQLAAELAELHAKIRFCSRCGLMTEQDPCAICLSARREQSCVCVVENPGDALRIEATREFRGVYHVLMGVLSPLNRVHPEDLRIRELLDRARTEKITEVILATSPTLEGDTTALFIAEQLKGLPVTVTRIAKGVPIGSDLEYADALTLTSALSGREKL

SEQ ID NO: 101478 - protein, 84 aa, Unknown
  Obtained from environmental sample
  misc_feature (1)..(84): Xaa is any amino acid
MLKPTIESVLILGFIYTFKVFDLVFVMTGGGPVNTTQVLSTYSYKLSFSLFKYSEGAATANILFVILLIASLLYLKVTNTDKQA

SEQ ID NO: 101479 - protein, 287 aa, Unknown
  Obtained from environmental sample
  DOMAIN (1)...(287): Bacterial extracellular solute-binding proteins, family 5 Middle
  misc_feature (1)..(287): Xaa is any amino acid
KSWHQADDLTYVYDVRDDIVFSDKSKMTMEDVLFSFERSKDPDGGTYFSDFFDDVESFSVNGWQFTIKLKNPSAVFKFVPAIGAGRIISKAYYQKHADNFGTATGGIVATGPFIYQKWTSGQEIILKKNLNYWNKEKLAANIIDTLVFKVIPDDTTRVMALRTGDADFSVNLPEDMLDQLSSDQNLNFTNKDSFKLTYLALNTQRAPMNDINARKAISHAMNIPEFQKRIIKDAGTAGTILPFGPALYGENAAKWRQYLNNTPGYTYDLAAAKQYLAKSAYPNGFNC

SEQ ID NO: 101480 - protein, 274 aa, Unknown
  Obtained from environmental sample
  DOMAIN (74)...(274): DEAD/DEAH box helicase
  misc_feature (1)..(274): Xaa is any amino acid
DIAEAGKKATFACRLWIDTTVKGFNREAESTIQNQTPEVKRIGYYQLADAVVDWQKIYDGLSGSKAAVKKYGPLPHQQTAITKTHEYLKTNDRGKLIMACGTGKTFTSLRIAEKETSKNDGLVLFLVPSIALLGQTLREWKAQCARPLHAICICSDAAVSKSGKNNNDDTNQISVTDLCLPASTNIKNITRQVANARNSQKSEGGNVVVFSTYQSIDVISEVQKTFNRAKKDSFLFDLVICDEAHRTTGVTLADQSEAAFVKVHDDKFIKPKSV

SEQ ID NO: 101481 - protein, 291 aa, Unknown
  Obtained from environmental sample
  misc_feature (1)..(291): Xaa is any amino acid
QASDTGNPNSNEWYLDGGAVGTPPVAVGNQVANNNIAGAITQSSSAGQWCAVDFDSSGYPVVAYYDETNATLRLAYAANNAPNPGTAGHWTRRYVLETNHALRRGSGTYVSMAIDHTRKIGGEDTIHLAFYNSTYRTVVYAVGSRTTEFKAYAIDRVVEGGLWTDISVDNTGNPWIVYADTARIGSRDGARIAYKGAFTRELEDPVVKLTPTKQYITGWEAVTMPANFQVNNDRLNIAVWPPVPRYYNGTASTVAANGANGGSPIGGWHAAVGYGSDKYRIGFFFKPTTIP

SEQ ID NO: 101482 - protein, 55 aa, Unknown
  Obtained from environmental sample
  misc_feature (1)..(55): Xaa is any amino acid
MWYEERMAPSGVKVYNPAFDVTDNRLITAFVTEYGIIRPPYTENFKAMFDSIGNR

SEQ ID NO: 101483 - protein, 122 aa, Unknown
  Obtained from environmental sample
  misc_feature (1)..(122): Xaa is any amino acid
MGELKVIRVTCDVKDFLPYDQIEPLQGNLKERSDEQLEKICRSLIKHGWAFPEFIWKNEGHNYCLDGHGRQASIPRLIQKGWEIPLIPVVYIQASSKEEAKELILQCLSQYGVVTKAGMPNY

SEQ ID NO: 101484 - protein, 267 aa, Unknown
  Obtained from environmental sample
  misc_feature (1)..(267): Xaa is any amino acid
TRYMVPFNVNSSVSLSVGDALVELYTPEDSENKLCSAKTNLMGEAYLFPSHDVTGKSITIKVIIAEKKQIQTYDETGKIITIDVVSAEKKYERTLTYDGNSIPIKLDDDSQEISILDLMFVIDTTSSMGDVLSYLKLEYSDVINKIKIANPKYDKINLALLFYRDTGDEYITRFFDFTEDMEEQERNFIKQSAGGGGDFPEAADRALAEAVSKEWRNNAIRLIFHVCDAPPHSDQRSQNTYYNTIKTAAQKGIRVIPIASGGIDLAT

SEQ ID NO: 101485 - protein, 243 aa, Unknown
  Obtained from environmental sample
  misc_feature (1)..(243): Xaa is any amino acid
VCQWNPVSGTTFTVTFDINGGSGTAPSAQTVDADSSITLPNGNGLSKTGYTFGGWNTEASGTGTNYDAGASYTVTDTITLYAKWNPVPGTTFTVTFDINGGSGTAPAAQTVDADSSITLPNGKGLSKTGYTFGGWSTTSSGTGGINYEAGASYTVTGAITLYAKWDAIPGTTFIVTFDGNGATVGTAPSAQTVTANTNITLPGDNGLSKTGYTFGGWNTNASGTGTDYAAGVSYTVTGAITLY

SEQ ID NO: 101486 - protein, 277 aa, Unknown
  Obtained from environmental sample
  misc_feature (1)..(277): Xaa is any amino acid
AAQTAEAVSSIALPGDSGLSKTGYTFGGWNTNAQGTGTDYDAGASYTVNATVTLYAKWNVIITYTVTFESNGATGGTAPAAQTAEAGSSIALPGDNGLSKTGYIFGGWNTNASGTGTNYDAGASYTVNATATLYAKWNVIITYTVTFDSNGATGGTAPAAQMAEAGSSIALPGDSGLSKTGYTFGGWNTNASGTGTNYDAGASYTVNAAATLYAKWNVIITYTVNFDGNGATGGTAPGAQTAAAGSGIALPGDSGLSKTRLHIRRLEHQCKWHGNQL

SEQ ID NO: 101487 - protein, 262 aa, Unknown
  Obtained from environmental sample
  misc_feature (1)..(262): Xaa is any amino acid
AKDAAGNTGVGGPYNIKISPTAGLAETYIAFPAQDMVIHGQTLDIVGTANSRYGLRQVLLSIDDGQYVPLNGLQYWDYHIPSATLPEGKHTLRVKAIDGLGVEGPEEKVDFILDNVLPEIELLTHKPGDIIYGGVTVKGRVNEKNGLKSLELSRDGGLTYKKLRHRGGFTRGDASRYFSYNIPSRNLNDGALVYYIRAVNNTGASVTRPILFFVNNVKPLIDVLSPSEEEDVYGYTQVTGRVISKIGLTQFYFEWPGEVTRK

SEQ ID NO: 101488 - protein, 266 aa, Unknown
  Obtained from environmental sample
  DOMAIN (4)...(266): Phosphofructokinase
  misc_feature (1)..(266): Xaa is any amino acid
MAMKIGILTSGGDCAGLNAVICAFEKAITAMDPKVDIYGILGGYTGLINREYKLLKHEDFSNIFNTGGTILGTSRQPYKKLIQAEGAPKVASMKENYRKMDLDALIILGGQGTHKTAALLSSEGLNVIALPKTIDNDLWGTDFTFGFHSAVSVATECIDRVQTTAASHRRAMIVEIMGNKVGWLTLYAGIGGGADIILIPEIPYDIDKVIKAVESVKKNKGYCVIATAEGAMDNEEATLTKKERYQKRGERGEVTASNRIAKAIEE

SEQ ID NO: 101489 - protein, 250 aa, Unknown
  Obtained from environmental sample
  DOMAIN (1)...(154): Glutamine amidotransferases class-II
  misc_feature (1)..(250): Xaa is any amino acid
VGKIRALENKINGKGDVDDAKPSLDGTIGVSHTRWATHGEPTAANAHPHLSADGKIAVVHNGIIENYATVKKILESEGVKFVSDTDTEVIAHWISRYYEGNLCEAVLEALKSLEGAFGLAVICESEPDVLIGARRGSPLILGVGERESFLASDVSAVVEHTQKIVYLEDDDVVEITRDGFSVRNVSRRPVSREMQEVEADLEIAQKGSFPHFMLKEIFEQPEALRNCTRGRLLLDEGNAKLAGLDNSMRE

SEQ ID NO: 101490 - protein, 176 aa, Unknown
  Obtained from environmental sample
  misc_feature (1)..(176): Xaa is any amino acid
MEDRSLSPYKSCELCPRNCGVDRLAGKAGFCGETAALRLAAALLHFGEEPPLVGKGGSGTIFVSGCNLGCAFCQNYQISQGEEGNGAKRGALGKIVSAEDFASVCAALRDKGAENINIVTGSHAIPAIIEGIRAAREKGARLPVLWNSSAYESPRALELLRDHVDIYLPDLKTLGR

SEQ ID NO: 101491 - protein, 63 aa, Unknown
  Obtained from environmental sample
  misc_feature (1)..(63): Xaa is any amino acid
EAENFIKAEAEKRNVKLGDLMMPLRVAVTGSRVSPPLFGSLRILGAEHSQERIQKALDKLSSA

SEQ ID NO: 101492 - protein, 52 aa, Unknown
  Obtained from environmental sample
  misc_feature (1)..(52): Xaa is any amino acid
GCAYGVFMGPGERIEVTHQAHSRENFAQGALRAARWMAGAKPGKLYTMLDVL

SEQ ID NO: 101493 - protein, 123 aa, Unknown
  Obtained from environmental sample
  misc_feature (1)..(123): Xaa is any amino acid
MIRKLPVNSLRPGMYISDDTQVGLEYPLLYCTAGMLNSTKEIEEIRRGGYTEALVDFELSLKEWRLLYGGSDEAVLSSVFADPPQTAALAPQVELQEELPHAKRLYVQTLRTAQRVMADFKNS

SEQ ID NO: 101494 - protein, 95 aa, Unknown
  Obtained from environmental sample
  misc_feature (1)..(95): Xaa is any amino acid
LAELWVVQGAVRPPWVALPPKVAPLLKVAPLQEAAPLQEAAPLQEAAPLLKAAPLQEAAPLLKVAPLLKVAPESAPESARGPVLVFLFFPAALTL

SEQ ID NO: 101495 - protein, 242 aa, Unknown
  Obtained from environmental sample
  DOMAIN (1)...(242): Acetyl-CoA hydrolase/transferase
  misc_feature (1)..(242): Xaa is any amino acid
MGRSEEIEKKIAAHIAERIPDGACLQLGIGGLPDTVLSMLHGKKDLGIHSELFSDGVVELYEKGIITGSRKKTDVGKLVATCILGTKHVHKFVHDNPDVLMMPVDYTNDPYVIRQNDNVVSVNSCLEVDLFGQVNADSIDGSFFSGIGGQVDFVRGASMSKGGQSFITLPSTAKDGAVSRIVPRLNNLVTTSRHEVRSIVTEYGIADMFGKTLRERAAALINIAHPDFREELSRAAREAKGL

SEQ ID NO: 101496 - protein, 261 aa, Unknown
  Obtained from environmental sample
  misc_feature (1)..(261): Xaa is any amino acid
HIDSPKFYEAGALIPLDELIEKHAPRLKKHYADAWERMKEEDGHVYTLPVWGVVTGRDYGTWYGDSAMWVQKEVLKEFGYPRIKTVDEYFDLLIKYKAKYPTINGMPTIAFTILVYNWRTFPLINPPNFLAGFPNDGRGTVDPVTHEYKVFLGQDISKRWFKKLNEMNALGLIDRSCFVDNYDQYLSKLASGRVLGFHDQAWQFQSAENTLTNQGMNNRTYAPLPIVFDESIRPWYRNRRLPNVGQGISISVKAKDPARII

SEQ ID NO: 101497 - protein, 262 aa, Unknown
  Obtained from environmental sample
  DOMAIN (95)...(258): Binding-protein-dependent transport system inner membrane component
  misc_feature (1)..(262): Xaa is any amino acid
VNITLIFLANWIAQTLGRIEAYMTYYQKAKLENTVFTCVNSGVMLLIMFITLYPFWNTIVVSFNSATDTTRGGITFWPRIFTMQNYRAVFTSGTIYHAFFISVARTVIQTVTGVFLTSMLAYVLSRKEYIFRKPFTLVLILSMYINAGLIPNFLLIKSLGMLNTFWVYIVPGMVSAFNFIVIRTYMLTLPESTIESARIDGCGDFIIFTRIILPLCLPVLATISLFVAVGSWNAWFDTMIYNSGRVNLHTLQYKLMEYLQSS

SEQ ID NO: 101498 - protein, 266 aa, Unknown
  Obtained from environmental sample
  DOMAIN (2)...(265): Protein of unknown function (DUF935)
  misc_feature (1)..(266): Xaa is any amino acid
FGRDGALRLRSSPGDLHGTPVDPYKFLLTQHRASVGNPYGESKFSGCFWPVTFKKGGLKFWAVFLEKFGMPHAVGKAPRGASDKDRNELLRSLNLMVRDACAAIPDDQSIEFLDTNVSGSTDAYERFAAYHDSEISTAILGHSAGATATPGRLGGDDLALQVRTDIIDNDAAMAADTMNTLIRYIYEINPSLGEKRPEFILYDPKDIDKARAERDSMLLNTNKIRLTKKYFVDNYDFGEEDIEVVEDAVQPVQAEFAAAAGRPHGA

SEQ ID NO: 101499 - protein, 274 aa, Unknown
  Obtained from environmental sample
  misc_feature (1)..(274): Xaa is any amino acid
MQFRSTNSSVSSEIKKPLASFKDAILRCLPPDGGLYVPDSTMDIRQLFLYMDEETSFSDLVAAVAPTLLEGGLNPLSASRVAESAFDFEPELIRLDDDYSLLNLCKGPTGIYKDFGISFLAAMLEELHKDSPPALVLAAALADTGISMAHALSGRKGINAVLVYPAKLPTGPLAEPMRGLDPAALPAALPATLAANGGNIIPIQVQGTFGDCQRLVNEAINDRAFADRCRITSANTINPGRLLPQAFYYLYAFIKIKKHISGGLAFSIPCGNFG

SEQ ID NO: 101500 - protein, 280 aa, Unknown
  Obtained from environmental sample
  misc_feature (1)..(280): Xaa is any amino acid
AAVPNTSPYSEGRHLPFYADNSALRLAKMFDGLAFSNSIHESLRQTLLDSGKTIKDLDAVLHHYGGLFKDRREHKTHYYLMLASKEAEKKPHSMDTQFNLMQQALAANMWDLALRSADECLRIGPKVDSHVLYSRAWALQELGKHGDALQQSEALLAHKPEHAPALLLKSISLVQLGDVDLGRRAAQDTIEMLPTFVPPYIYLAHLDIKDGNLDSARKILAEALKIAPSEPKIYDQLLHIELLEGNHLEATKIAERAIKECPGGGDGNWESCVYQYYSQR

SEQ ID NO: 101501 - protein, 218 aa, Unknown
  Obtained from environmental sample
  DOMAIN (4)...(157): Glycosyl transferase family 2
  misc_feature (1)..(218): Xaa is any amino acid
MLISLAMIVKNEEETLAHCLESAKPIVDEMIIVDTGSTDRTIEIAKGFGASVHRFQWCDDYSAARNESLKHCNGEWVLIIDADEAIDPLDYEKIKNACTSPFADAYELIHRHYLFSSLTGVQDAAAVPNKSAYAEGHHLPFYADATAARLVKRFDLLSFVGRVHESFGNSLEANGKTIKLLDAVLHHYGKLLKEREETQTQYYLMLAQRDADADPENL

SEQ ID NO: 101502 - protein, 173 aa, Unknown
  Obtained from environmental sample
  DOMAIN (5)...(35): Flagella basal body rod protein
  misc_feature (1)..(173): Xaa is any amino acid
MMRSLFSGVSGLQNHQTRMDVIGNNIANINTTGFKRNRVNFQDILYQQLQGAARPTAEIGGVNPKEVGLGMSVASIDTIHIQGSFQSTGLGTDLAIDGQGFFILDNAGKQLFTRAGAFSVDEAGILVNPANGMKVQGWMAREVEGYTVLDTSRPVTELTIPIGSKDPARATTE

SEQ ID NO: 101503 - protein, 88 aa, Unknown
  Obtained from environmental sample
  misc_feature (1)..(88): Xaa is any amino acid
VQDKEFIAQMAQFSSLEQMTGMAADFAKLTAMVSGSEASQSLGKNVELLEGENVIQGTVKAVTRGETPMVLVNGSYYNWNQVKKVFEE

SEQ ID NO: 101504 - protein, 88 aa, Unknown
  Obtained from environmental sample
  misc_feature (1)..(88): Xaa is any amino acid
MLEEELVLEDELRAEDELILEEELTTTIEEELGISEDELNSEEELIIEEELRMAEEEISEEEYSSEDEDSTKDEELSEPPILLPSLQA

SEQ ID NO: 101505 - protein, 276 aa, Unknown
  Obtained from environmental sample
  DOMAIN (1)...(165): FGGY family of carbohydrate kinases, N-terminal domain
  misc_feature (1)..(276): Xaa is any amino acid
DCALLDRNGRLLGLPRAYRDPYTSGVQEAYFRLMPREEVYARTGIQLMDFNSLFQLCALQKENSQALQAADALLFMPDALAYLLTGAKSCEYTIASTSQILNPRTRTFDPEMMTAAGLNPSLLQPIASSGATVGCLTDELAAQTGLGKVPVVAVAGHDTAAAVAAVPADNERFAFLSSGTWSLMGLELDTPVITDETFRMNYTNEGGAEGRTLFMKNLTGMWLLEQCRAAWKKEGHAYDYAQLVAMAAQSAPFAHVIDTDHPSFTNPPDMPAAIAE

SEQ ID NO: 101506 - protein, 253 aa, Unknown
  Obtained from environmental sample
  misc_feature (1)..(253): Xaa is any amino acid
VGQENIRPKSIIREMCETWTTFADYVRLYDLQRSEGLLLRHLNGTYKVLARTVPDSVKTDEVREMEGYLHAMLRAVDSSLMDAWEKMQSPGHQPTEVAEPVRQAVDITKDAPKFLAGIRARLFVFLASLAGGHWEEGVDALDAFARREPVDGEGEPWTAERLEGLMARYLKGHNGPLLNPEGRNLRHTYSRPKPDDAGKLLVQQMLVDEDSANDWVLEIEVDLGASREYQEPIMDLNYMGALDKGDTCLQRRF

SEQ ID NO: 101507 - protein, 255 aa, Unknown
  Obtained from environmental sample
  DOMAIN (38)...(250): Respiratory-chain NADH dehydrogenase 51 Kd subunit
  misc_feature (1)..(255): Xaa is any amino acid
MSKLTDLLTESVADTEPNPVDSPNLEGSLSVEHYMRSGGFNALKKAVLMTSEEIIAEIKKAKLLGRGGAAYPAGSKWEHLLHIPETPKYIVCNADEGEPGTFKDRLIMEKLPMKLLEGIIIAGFVFRAKAGYIYVRGEYRKIQKRLLTAIDNLKAAGLLGKNIIRPGFNFDIHVVSGAGAYVCGENSALLNSTEGKVGRPRIKPPHLAEVGLFLQPTLVNNVESFANIPVIVNMGGDAYLAAGHPDSGGSKLICL

SEQ ID NO: 101508 - protein, 276 aa, Unknown
  Obtained from environmental sample
  DOMAIN (67)...(225): DEAD/DEAH box helicase
  misc_feature (1)..(276): Xaa is any amino acid
FLELCKRKEIQGYIESFISQTAAVVSPLVRGKLKIVLTELGCPVQDIAGYVRGEPLEVELNDSFVLRDYQKDAAQVFHASGSERGGSGVIVLPCGSGKTIIGMAVMALVKAHTLILTPSVTAARQWIREILQKTTLSKEQVKEYSGDVKEIGQVTVATYQILTQRKRTSGEFSNFSLFESQKWGLMIYDEVHLLPAPVFRFSADMQATRRLGLTATLVREDHKETEVFSLIGPKKFDIPWRVLEAQGWIAQAKCHEIRVPMDSEQRISYAVAPLRE

SEQ ID NO: 101509 - protein, 219 aa, Unknown
  Obtained from environmental sample
  DOMAIN (62)...(217): Uracil DNA glycosylase superfamily
  misc_feature (1)..(219): Xaa is any amino acid
IANFLDISSDHLSSGYHTAEKEYLFTDDVSKIDTADSIEQIAQEIRVCRNCQLWEKRTNAAPGEGVLQPLVLVIGEGPGEDEDRQGRPFVGRAGQLLDKMLDSIGLSRNTNCFIANVVKCRPPFNRDPYPEETAACAHYLQRQIALLKPKFILVVGRVAAQTLLKKTEPIGKLRGKFTEFEVGEMKIPLIATYHPAALLRDEEKKRPTWEDLKLLHSKF

SEQ ID NO: 101510 - protein, 178 aa, Unknown
  Obtained from environmental sample
  DOMAIN (3)...(178): Uncharacterized BCR, COG1636
  misc_feature (1)..(178): Xaa is any amino acid
MKLLLHCCCAPCSVSCIGSLRAEKIEPHLFWYNPNIHPYTEFKSRRDCLNEFAKNEKLALSLIDEYGLRVFLNEVYSQTDSNSISHPQRCKKCYFMRLEKTASFAAQEGFSAFSTTLLISPYQDHQEIKRLGEEIAEKYRVEFLYRDFRPLFREGQSTARAANMYMQKYCGCVSARKS

SEQ ID NO: 101511 - protein, 172 aa, Unknown
  Obtained from environmental sample
  misc_feature (1)..(172): Xaa is any amino acid
KGIVITKYTGNAVRVVVPSKIEGLPVVEIGERAFAAPTSDTGYRDLTPGDKIVSVYIPDSVTKIGGFVFFYNRALTEVHLPDNITSIPISTFFKCPKLKKVNLPKNLEGIGDSAFSGCGDLTDLIIPSNIKTIRFLNGAGDDNPNNNAFYSCGKLPIKTRQIIQGWGYTSGF

SEQ ID NO: 101512 - protein, 265 aa, Unknown
  Obtained from environmental sample
  DOMAIN (80)...(183): Protein of unknown function DUF58
  misc_feature (1)..(265): Xaa is any amino acid
ITARIVSRRHAKNISIRLEPERIVCEGWTNAVYQGENIFQFPGILVRCRVLLNTKDGRHVTYDFKPENKTGTQPNTFQVKKRGAYFSTYDEFAVFDILGFFRFAYRIPSVDGARLLVSPKAAAEGISVRAKGGEANRQDALSLERTDYLIDHRPYVPGDDPRRINWKLYSHGGELIIRQGEREPPPSSNLTILIDTQYDSLYSSNSGGAAEAVDLLCESALAIINNAGKETSIQIGFTGRSETSGNSLTHAELGFFLSFPAAIPA

SEQ ID NO: 101513 - protein, 263 aa, Unknown
  Obtained from environmental sample
  misc_feature (1)..(263): Xaa is any amino acid
LTVKQMKLPGGKVEDLVIPLDPKGRMMLDWPKKDYNDSYSHISFAEFSLLDEIEAEIEKYSRALAAEDMVLFSQIDSSLISIPVIIGNMTQLLDAARESRNHAMENTSHDSFDAFLEYRNKAYKMLGEVLKDDPIEKIKTISIQLIEMHPNLSDEIEDEADYLISLFNALEVDLSRYQEITEHNTKSLNDKFVIIGRVDTGTTDYGANPFYGKYINVGTHGVVLDTILSKSFIVCLDNVWKIIFMLILVPFFFIVTDKLTPVY

SEQ ID NO: 101514 - protein, 160 aa, Unknown
  Obtained from environmental sample
  misc_feature (1)..(160): Xaa is any amino acid
MTLSGIWELKKIAMRNLARHKVKTILTSAAIMVSVTTFIFMNSWLKGMIIDSRRNIVNYEMGAAKLQTKLYFEKRDEMPSYENFSGWEKYHDALSREGYVSAPRYVFSGTLFSMSGSAPITFYAVEPVFEAETMRYVPFVDFGRYVQSSRDASSDGGNFE

SEQ ID NO: 101515 - protein, 87 aa, Unknown
  Obtained from environmental sample
  DOMAIN (1)...(76): ABC transporter
  misc_feature (1)..(87): Xaa is any amino acid
MSGGQQQRVAIARALVKKPTLILADEPTANLDSKIGREILELMLALNKAEGTTFIFSTHDQMVMDYARRIVRLRDGQVESDEVKGGA

SEQ ID NO: 101516 - protein, 291 aa, Unknown
  Obtained from environmental sample
  misc_feature (1)..(291): Xaa is any amino acid
VGQEGLKDGDLTFVVGHPGSTMRGLTYGQMLHARDVTSPLGIQAYELQRAALLEFGSRDPENKRKVQTQLLNVENGIKASKGYYAGLLDTEAMAEVKAKEDELRAKVEASPKLKELAGNSWSEIDRALASTKDDALMSSLASTMPARPMVLLRSAVAQLETGKAPDPPRGGGLNDPELNQTLLEAWLKELTAKAPKDHPIVTLLDELYKDMGPKDVAKSLLASPYTEDAGRQSLLASGKAALKACPDPAVRLVSAVWTTLDGIQTRRTQSDAIIKDHAARIAKARFEVYGK

SEQ ID NO: 101517 - protein, 194 aa, Unknown
  Obtained from environmental sample
  DOMAIN (5)...(171): KR domain
  misc_feature (1)..(194): Xaa is any amino acid
MQRRWVLITGCSTGIGRALVQVCRDGGWGVVATARRPESLSDLPDGDDIRKIRLDVTDEASIQAAVQAVEGMRLCALVNNAGYGQMGPLEALRAGELRAQFETNVIGLQLVTNAFLPLLRRERPGEARIVHVASVLGRLSIPMAGAYNASKHAVVALAETLRLEIGDRIPVILVEPGSIKSEFRATLKNALGRP

SEQ ID NO: 101518 - protein, 270 aa, Unknown
  Obtained from environmental sample
  misc_feature (1)..(270): Xaa is any amino acid
GQDFDFNSSITEDITLKAKWRIITYNIKYNPNGGIPVPPPTTYNVNSQAIPMPTFNEDRCGYRFDGWFDNPDFSGAAITVLPTGSTGDRTFYAKWTYTPISMLSYTPIEASNKTYDALPVAPIIVSSTTMCPMGIITTLYNDSKIEPIDAGIYQIYASIEDTVRILLGELTISKANAIIDISATVSDKEYDSTTTATITGIKPTTVLYGTDSLTTSDYVASADFDDPNAGVHNVILSVTFLDGPLSQNYNLLVGTIAPISATITKANTVL

SEQ ID NO: 101519 - protein, 289 aa, Unknown
  Obtained from environmental sample
  misc_feature (1)..(289): Xaa is any amino acid
VKTEIEKLREDFRNISSEAKVIKDENPNLKNALYEQVFNEKISVIDNTTKRLDIFFHTETDGEINRLTVIEQYVRSRIKNIKELLSQNNTDIRDEFGSKLDELSALLDKKVTEAREKAARTDIFSSEEREQLNALKNEEITDEQIRAVAKKNNLERFVGLNVLNVIGIFLLFVGAVTAMRYSYLKLPDLFKGIMIFALGGIMLVIGEVLNRKKPNIFSLGISAGGIAILYAALAISFFVLQILGMYPAIAICVLLTVGAFVLSSRYNSQIIAAFALVGGYLPIITLEDN

SEQ ID NO: 101520 - protein, 178 aa, Unknown
  Obtained from environmental sample
  misc_feature (1)..(178): Xaa is any amino acid
MNNIKIGVKLIASFLLVSILATVMGIYMSGQLTELNDQSDYIYKKGAIPLGNLVETLKQTQEMRVQMRDWLSSGTKAKREAVLAKIDAARDIALQNIQEQINTSIKEETRVLLKQLSDACNSYAVEARKFSNTNTEWDPITGSYPRGTPAHIVKIGDDILELTNRAKEVRIGAVRELV

SEQ ID NO: 101521 - protein, 275 aa, Unknown
  Obtained from environmental sample
  misc_feature (1)..(275): Xaa is any amino acid
YWANTQAEQEAINRITTDYTSLLLNNDILAFYGHPRSTIMGILGRFPIEELDKKLTALAADYKAAGGRNIIKAFYIIFGTVWPEGEIGIINSELLTRWIEYARDHNMLVFIDHQIGRYDPVASLKRMLPWLKYPNVHLALDPEWRTTKPMKEIGSVTADEINRAQKEMEDYIIANDIPGERFLVIHQFNWRMIRNRATVKSDFHRVRLVHCADGFGSPRIKRDSYAYNAEAVNMPVKAFKLFYNFGTPGAGYDSPLMSPKDVYALNPRPYIIMYQ

SEQ ID NO: 101522 - protein, 297 aa, Unknown
  Obtained from environmental sample
  DOMAIN (1)...(297): NADH dehydrogenase
  misc_feature (1)..(297): Xaa is any amino acid
AVIGVLAVGIGSAPILIYMDGKVCAHVQCRLGPMRLGWHGVLQTVADVTKLLFKEVYSPKGVDTVIYYLAPMISLTAPFFTLALIPFGAQWQVINLDFAVPAIIAINGLGLFAILLGGWASNNKYSLLSALRGSAQMISYEVSLALIMLFVVMISGSASLNDIIAAQSGTVLDWWIFKLPILGFVAFLVFMCVSTAELNRAPFDIAESEQELTAGFHTEYTGTAFAMFYLTEYINIIGASALGSIFFLGGWQAPIIGIPIVDEKLLLIPDLVWMFAKIYFLIWLYMMFRWTWLRPRV

SEQ ID NO: 101523 - protein, 82 aa, Unknown
  Obtained from environmental sample
  misc_feature (1)..(82): Xaa is any amino acid
MTVHEIAALAGVFIGTVDRVLHKRNRVSTATRAKVESIIEQYQFTPNPIARRIKRNKTYRFCALIPRRDQDAGYLGANHRGH

SEQ ID NO: 101524 - protein, 270 aa, Unknown
  Obtained from environmental sample
  DOMAIN (37)...(119): Fibronectin type III domain
  misc_feature (1)..(270): Xaa is any amino acid
TSLSATISSLENGTTYNVWVRGKNTTGSGTMSSPANAKPVGNMGAVTLTTGGSGDLVISWSAVTGADQYEVYYNTASTIPASPAQIVSTTTATISSLTNGTTYYVWVKPKNANGVGAASTVVSGKPIGTPGSLTVSAGNQQITVSWETVSGVSSYEIYYSSTTTTIPAVASFTVTGLNRTITGLTNGTTYNFWVKAVNATGTGEAGPMASGKPIGNMGTVTLVAGNGQMTASWSTVAGADQYDIYQSSTNSIPALSSQTVTATTATISSL

SEQ ID NO: 101525 - protein, 272 aa, Unknown
  Obtained from environmental sample
  DOMAIN (2)...(85): Fibronectin type III domain
  misc_feature (1)..(272): Xaa is any amino acid
CCSRRSGRPVLTAGNREINVSWQSVELAADYEIWIDTSSNSAQAQKYGGDIEGDITEAVITGLTNETTYYVWIKAKNLKGTSGFSLPANAKPSAFVVLPETPTLPTVIPGSRTLDVSWPPVEGALSYEVWTSQTNNPANAQKHGGDNFVTSTTLTGLVNNITYYIWIKAKNNIGVSELSPMASGTPSAFASIPPVPQSEPIVIAGSGQLTVNWQTAEGANSYEVWAGTSTNPIIATKRGDDVTGLSTVITGLSNGTTYYIWIKAKNTIGVSS

SEQ ID NO: 101526 - protein, 58 aa, Unknown
  Obtained from environmental sample
  misc_feature (1)..(58): Xaa is any amino acid
DELLALAPKHCKVTHCLPAHRGEEITDSVMENMQINVSYEEAENRLHAQKAVLCKLLH

SEQ ID NO: 101527 - protein, 244 aa, Unknown
  Obtained from environmental sample
  misc_feature (1)..(244): Xaa is any amino acid
MQARVFLKLVAEEKSSLSAEGIERVGLALGLTDKEQDFFRLLVPFTHETNNAKKQKLFSEMRQIAALCKNRIIEANLYDYYKEWYHSVIRELAPNVSSESEISKLLVPKIPLSQVKASLALLLKLGLLEKNSNGKYKQTSKHLTTGENISSMAVRKHHENMGILAVSALENISKQERDISGITMGLSKEGFEAIKAELANFRRKIKEIAAQSENEEESVYRINLQLFPLSKSAHKTKEAKNEKV

SEQ ID NO: 101528 - protein, 262 aa, Unknown
  Obtained from environmental sample
  DOMAIN (52)...(168): Histidine kinase-, DNA gyrase B-, and HSP90-like ATPase
  misc_feature (1)..(262): Xaa is any amino acid
KIEAGKLELHVMQYDIASLIHDSVKLNVLRYENKPIEFKLIVNENVPLLLEGDELRIKQILNNILSNAFKYTNEGQIEFELSCEKQENSSINIIVFRVTDTGQGMTTEQVNKLGDKFNRFNMEANRKTEGTGLGMNITMNLIQLMRGDINIESTPGLGSTFIVRLPQESVNDDVIGKEMAENLMKMNLKNTTKIRNAQITQEFMPYGRVLVVDDVETNLYVVRGLMAPYGISVDTAASGFEAIEKIRSGSSYDIIFMDHMMP

SEQ ID NO: 101529 - protein, 172 aa, Unknown
  Obtained from environmental sample
  misc_feature (1)..(172): Xaa is any amino acid
MKAVWGIYPTAWIAVVILLLSAFFLYKRPWGLRLRAAGEHPQALASAGVNVLRIRYIAVLISGALAGIAGACVVLTQDIQYTVTSINGKGFIALAAVSFGRWLPIGILGSSFLFGFSSALAVNIINIPSLRALPSEFFSLLPYLITLLTLVIFSGKDYSPRAVGQPYDKGKG

SEQ ID NO: 101530 - protein, 261 aa, Unknown
  Obtained from environmental sample
  DOMAIN (61)...(94): Tetratricopeptide repeat
  misc_feature (1)..(261): Xaa is any amino acid
ADADYSEHWERAIELYRKGTKTFPNDARFPWALGNLYYGRALFNLAWDEYRKVEALTPYDAPVLIRLARTAGYLNRSAESAALYERALEIEPENIEVTGSLGWMYFKIHRLEDGEKLLLSAVERFGYNSDLSMTLGTIYSDMYRYDDSKYWYNKSIELGEEYKDNEYTSIAWYNLSILESRFYLYDFCMHATDSAIKLYNRASGHLARSELLKHQLKLIEAQRECEIAYETDTSPLSKLRLAHIFQKSNRLEEARLYAQDC

SEQ ID NO: 101531 - protein, 204 aa, Unknown
  Obtained from environmental sample
  misc_feature (1)..(204): Xaa is any amino acid
IADTASRYAKAHFEGDFEADFVTLNPYLGMDSIEPWLKWADKKGKGAFVLMRTSNKGRRDFECLIIEGGLPPLRLFDAVGNKLSELATSRIGAHGYGAFGAVVGADPQSEEERKEAAAIRAGRPNLFFLIPGYGAQGGAASDAALLLREGNGGVVNASRSILKAWQNSHDGKEADNSIAAQAARAAVIEMRDSIRKAAGINTRK

SEQ ID NO: 101532 - protein, 156 aa, Unknown
  Obtained from environmental sample
  DOMAIN (50)...(82): Ankyrin repeat
  misc_feature (1)..(156): Xaa is any amino acid
GRGAELGVKSEQLNNLTPLEDASTRQDSLSEPILAMLIEAQKNKDPELRNIGVSLHLAARYGHVKNVEALVENGANINAKNLEGFTPLHEAAKEGRKPVVEYLLSKKADVNIVDANGYNAMDWAEQYGIGAPFPEVAKLLAKAGSSHTKAWKETKK

SEQ ID NO: 101533 - protein, 97 aa, Unknown
  Obtained from environmental sample
  misc_feature (1)..(97): Xaa is any amino acid
MLERYVSSLKFDSYENFYKNFSVLAPEGFNFAYDVLDELANTHGSDLGLLWCDENGAEASFTFGDLKRLSDKAGNVIKNAGVSERRYRYADFKTSRE

SEQ ID NO: 101534 - protein, 156 aa, Unknown
  Obtained from environmental sample
  misc_feature (1)..(156): Xaa is any amino acid
MDFSKIKKSPFDIKSESSYNAYLSKGFFLMGLKKPKCIAWTEIPNREYHDHIIEARIRLDSMGGYAAAGLTFHIRDDEAYYIVLFSNKGYFRLDVVRDGSPKPLIAWTDIYEFNGKDINLCLITYGTFLIFLVNGKWVGETSDDSYNSGMVGFALA

SEQ ID NO: 101535 - protein, 75 aa, Unknown
  Obtained from environmental sample
  misc_feature (1)..(75): Xaa is any amino acid
MFALLGENAEKNPDLVRRIYDEGHLLINHGYLDKWANGMGEDGFLNNLLMGEAAISKALGRDFYPKLYRPHGGFY

SEQ ID NO: 101536 - protein, 149 aa, Unknown
  Obtained from environmental sample
  misc_feature (1)..(149): Xaa is any amino acid
GCLPFFPGSKKIFDLDQIKPTEQIMAQFYPEIYRCIGCNACTKGCPQGLEVMQYIAYAQRGEWEKCAHASFDCVACGICAARCPAQITHAQVGLLARRLTGKYILPESKHLTRRAAEIENGDYEAALKELMVKPLDELKDLYNQRDIEA

SEQ ID NO: 101537 - protein, 55 aa, Unknown
  Obtained from environmental sample
  misc_feature (1)..(55): Xaa is any amino acid
MKVLCVIPARYHSTRLPGKPLALIGGKPMIEHVYQQARKAKRPEKVIVAADHELV

SEQ ID NO: 101538 - protein, 202 aa, Unknown
  Obtained from environmental sample
  misc_feature (1)..(202): Xaa is any amino acid
QIGYRTAYEIAVEKEKELEAQRFIKLDQNIKELGGDSGKVYTSLIYSDRQRILTRLENLRKIGMCTYDNGAYHLTNQWEENLKANARYNTFLTARSELKFAEPSKLKVYTGEHGTISGKVTKIYKLDDDASDNHAIVVESPDGKTAYFVPLYKAPELINGKDKTRLKEGETVTLKTYESQKGRLTPVIFKKIDSQDFSRRAG

SEQ ID NO: 101539 - protein, 251 aa, Unknown
  Obtained from environmental sample
  DOMAIN (3)...(187): haloacid dehalogenase-like hydrolase
  misc_feature (1)..(251): Xaa is any amino acid
LPTVTDFQAIPGRGIEAKISPLPTPQGGNAAPPVPILIGNRKLMDERGIPLAELEAASDKLAGEGKTPMYVALNGKAAGIVAVADVLKPSSKAAIERLHKMGIEVAMITGDNKMTANAIAKQVGIDRVLAEVLPQDKSAEVKKLQETPVENKHGEQSKHFVAMVGDGINDAPALAQADIGIAIGSGTDVAMESADIVLMRSDLSDVPTAINLSKRTIRTIKQNLFWAFGYNVLGIPIAAGVLYLFGGPLLN

SEQ ID NO: 101540 - protein, 269 aa, Unknown
  Obtained from environmental sample
  DOMAIN (2)...(211): Amidohydrolase family
  misc_feature (1)..(269): Xaa is any amino acid
NAFVPPQKLTEISTACREADLVPVIGLMAEEDYETDRLCKAFDMVWDIDALQTMHLAENEWRVDLIREKYNMTPVEYLARNGFLNDRLIGSHVVCVTDNEIGLLKEAGVKVANTPLCEMKIADGIAPIPEMVRRGVTVGLGTDGPLWNNSSDIFREMKAMALLHTVSKGIRSLSKKGILDMATRGGAAVFGKEAEFGMIKEGMKADMIMIDPDKPHLQPLLLGGNENVISAILFSATGADVTDVFVNGKRLVKDGKLTSVDVKAIIERV

SEQ ID NO: 101541 - protein, 138 aa, Unknown
  Obtained from environmental sample
  misc_feature (1)..(138): Xaa is any amino acid
MWKNTDYAEIGKEIKDTVTKETGIPVSIGIAPNKTLAKMCNKLAKKRGGSAFFDGVCDWNKLNRDEELKNYPVEDIWGVGPSKAVFLKKRGINTALDFKNYPLHKAKKHLTITGFRTVQELNGVRAVEKIEEAPRQVV

SEQ ID NO: 101542 - protein, 269 aa, Unknown
  Obtained from environmental sample
  DOMAIN (164)...(269): MutS domain III
  misc_feature (1)..(269): Xaa is any amino acid
MEDPKLAKGIVKREVVEVISAGTSFSENNLEAKQSAYIMAFFPNTALAIADISTGYFAVGESSITNIESEIARRNPKEILVPSGAEISANIQALINHDKIMLTELPRKQFEAEFCNSVLEKHFRTQNELSNLSISASGALLFYLLEQKKSGLSHIIKIESIPWSDYMALDPATQRNLELTAPLHPEDSNSTLLSVMDFTKTAMGGRTLREWISHPLISIEHILGRLSCVEELVDNPMSIDEIGEALKPIPDMERAMGRVGSSRANARDV

SEQ ID NO: 101543 - protein, 261 aa, Unknown
  Obtained from environmental sample
  misc_feature (1)..(261): Xaa is any amino acid
GNNYSYFEGIVSGEGKSSDVELTTFEYKGASALKHEKALIYQLAESYRQMGITTTTIGVGVGFDLELMRTLAEEGGGSSRFISSREEMKKLFDTEFERMVALVATDLEMSLEFAPGVEILETWGYQNRLEGNRIFYKLPGLHLGDYETILVRYRLSSTQGQAAGGERELARFRVTAKDLLGRPLPPVEQSAGIVLSESAPDGISSGMVLHSGTMLHFAEALKEIGDLYYASQDDLSALSQLERDVGGKEPSAGQRERMETL

SEQ ID NO: 101544 - protein, 262 aa, Unknown
  Obtained from environmental sample
  DOMAIN (80)...(262): RmuC family
  misc_feature (1)..(262): Xaa is any amino acid
AAFVLFVLGVLVGWLVRPRSDMSALKENLDRYRVDNAKLLDENKNLLAENARIRALNQELPKAIELLSSRVLDTTSEKQTKKLDDMMRPFKDQMLRIEKSQTENKVSFEEQIKNLLATSGSLQREASDLTRALRGDKKILGNFGELQLKRILEITGLAEGRDYTCQECVDDEGGRFFTDFVIILPKMRRIVVDSKFTLNSYADYVREADEAKKKDLMKQFLDATKKHIDVLSSKEYQSKVAANNGGNKLDFVVMFMPLNHAY

SEQ ID NO: 101545 - protein, 274 aa, Unknown
  Obtained from environmental sample
  misc_feature (1)..(274): Xaa is any amino acid
NENTSIRIRRSPDGKGPFQIDLVSGNLSLVAGTEGERIVVNIMDRQVHARPGTVLNASTGEDGMAVRVSEGAALFTDTAKKQTRELIATAIINLDSDGMEREEPSVIVTLPSPNARYYKKGTGPLNINFAWDRKNLRSGQVLNLEIAEDRNFSRIVRTVKNLDSTARASLNTGQWYWRLSGENAVLGMGQFTVVNAAGPVLLNPAARKLFRFQTDPPLVHFQWSKVEDVSAYILEVSETSDFKSPRIRRQVGVEYIIESNLGEGTWYWRVIPIF

SEQ ID NO: 101546 - protein, 122 aa, Unknown
  Obtained from environmental sample
  misc_feature (1)..(122): Xaa is any amino acid
MSQKESYTGSMEAVLQARQNNEATFYFERSRLNHLFMEAVKYKLVVVCAGAGYGKTSAVHDFLKKYEATTVWIQLTELDNDRAHFWETLVHAIGQMNQALTKAASEFGFPDTKEKINYFMLL

SEQ ID NO: 101547 - protein, 265 aa, Unknown
  Obtained from environmental sample
  misc_feature (1)..(265): Xaa is any amino acid
DVESLDGFTLIRDSDGWICYAELSADGSEYVSTGVRYTGGARAGAGLRKGLRIGGASVLKKHRGNRDVLGYDELTAPRPAAQRSQSLSKAAAVRRVVGLTLLVDFPDQRSNITQADMNDFCNREGGVNGKNPAGSVYDYYYDVSNGLLEYVNIVSPFIRLDSNLTYYDRGSDYQYVPQFLMHVLNKLKTGGFDISRVTTETIGSGNNRREVALALNILYAGSPKQGWANGLWPHSGTMSGAPSTVTVDGVRFSKYQLSNLGTSGV

SEQ ID NO: 101548 - protein, 103 aa, Unknown
  Obtained from environmental sample
  misc_feature (1)..(103): Xaa is any amino acid
VAKINNNKKALALNNPQINENSLFTHISKIIEKRKNRAGMYANREVTLMYWEIGHYISSVLLGGERAEYGKKILATVSHNLIKRYGSSFELRNLRRMVHFAEL

SEQ ID NO: 101549 - protein, 277 aa, Unknown
  Obtained from environmental sample
  misc_feature (1)..(277): Xaa is any amino acid
MAENLNYDTKTTGSKCYSNSDANCKTYGRLYNWETAMDVCPVGWHLPSSAEWDVLFKFVNPNCTDINNNDNNCAGVGTKLKANSTNWKVNTGTDEIGFSALPGGQYGVSGSFGGVGNNGYWWSASELSSDMAHYRYVTSTSDAPFWGSNKKSSLLSVRCLKGFPKCGDAEYNNATQFCSDNKVYSLCGGNKYEPKTHFCTKSPNNPEIVPLCGKTSYDTRTKYCSNGTTPKDYGSIAYQGKTYKTVEIGTQIWMAENLNYAVEGSKCGNGNGTTLSD

SEQ ID NO: 101550 - protein, 275 aa, Unknown
  Obtained from environmental sample
  misc_feature (1)..(275): Xaa is any amino acid
TSGRVWFYKSYIEGDTDYIWGSSDVCLFEECELVSINHNVGYIFAARVNPVSGGDIPKGYVVLNSSITSLSSGNPYFGRTQSDGTRYDQAAIINTKISGNYNQALWNVSTVAGILDNGEHVGYKVYSLTNVSGTPYDVSKKAARTSVMEEHLYKMEYNGRYAILNRLYVPATGRYKDATVIWDISAYEQAFGASKDESLDNDFNLVIPVSEIKLEGFTLALGQSKNITYEVLPVDANVKRVTWASDNLSVASVDQNGKSNRQPNRRNRKDNRDCY

SEQ ID NO: 101551 - protein, 150 aa, Unknown
  Obtained from environmental sample
  misc_feature (1)..(150): Xaa is any amino acid
MQAFFDGIEDGNEYEEYTEAAGWTQEKYRARLLAVSEAILKMETTETVPDLIGLVEVENQGVLDDLGSGTLSKHAYNWTAFANLPGSSLGVGVLSRHPIKNMIAHSITMEKDTAPRPVLEIRVEPRGKPLVFFICHWKSKLAKSTEDLRR

SEQ ID NO: 101552 - protein, 76 aa, Unknown
  Obtained from environmental sample
  misc_feature (1)..(76): Xaa is any amino acid
MSGNVMEWCWDWLGDYSSEAQTDPVGASSGGARVLRGADWSGYPVGVRLVYRYNDAPSRRSNYNGFRLVRPLENEE

SEQ ID NO: 101553 - protein, 249 aa, Unknown
  Obtained from environmental sample
  DOMAIN (19)...(84): Bacterial Ig-like domain (group 3)
  misc_feature (1)..(249): Xaa is any amino acid
AEYTVTPAEKTLESIAVTTPPTKVQYNLNEDLTLTGMAVTATYSDGSTAAVTDYTVTGYNKATLGNQTVTVTYNGKTAEFTVDVIDPALATVATPTASPVAGTYNAVQGVALTTTTEGAVIHYTLDGTTPTEISPAYNTPLPVTRSLTIKAIAVKGGMNDSGELVAAYTLQALAPTADVAAGTVNKGTEVTLATATEGAEIWYTANGSAPAKNGAGSAKYTAQITINAATTIKAIAVKEGWQDSAVMEA

SEQ ID NO: 101554 - protein, 246 aa, Unknown
  Obtained from environmental sample
  DOMAIN (1)...(201): FAD binding domain
  misc_feature (1)..(246): Xaa is any amino acid
ETVYARTVILATGGAGQLWLHSTNPPDACGEGISIAYRAGAALQDLEFMQFHPTSLYAPQLKKTFLISEAVRGFGGILKNHKGEEFMNGVHPLRSLAPRDIVARAILKEMQNTGKDYMYLDVTHRKAKDIKTHFPNIYAKCLECKIDITKDWIPVVPAAHYMCGGVLVDSFSRTTIKGLYACGEVAATGVHGANRLASNSLLESVVFAIRACEDICKRVESGEWRVESKEYYQLSTLNSQLRKNVS

SEQ ID NO: 101555 - protein, 281 aa, Unknown
  Obtained from environmental sample
  misc_feature (1)..(281): Xaa is any amino acid
MHQPLSLWLWESIEKISDLNALTLLTLIEAILEEAEMVRRKQLSRLKNEAISEMKAQGVEFEERQARLEEMRPPEPENAEWLEASFGEFAKKHPWVCGERVHPQTIVLEMFAECFSFSGYIKQYGLERIEGLLLRHINSAYKVLAHTVPEKYKNEEILEMQDYLREMLQRVDSSLLDEWQRMQNPEFILPEEKEEPLPPFAVSERMVKALVLEFLVAWGKGDFAAAADCLEPSEEFSEKKLAALHKEYIETHKELRLDAEGRSNKHTFMKRKAMLGSSRMC

SEQ ID NO: 101556 - protein, 261 aa, Unknown
  Obtained from environmental sample
  misc_feature (1)..(261): Xaa is any amino acid
MSFESAEIMGYCDIPTPIYIVDIDDPNADPITLDRSFKEHIYEIGMDILGSDATVGCRVSKSYMNKLTGNTEEDYKRYLKQREDNASSPEFYFDFADWFYTHGDKKRALRVLTSIADLLPPRDFQHQALGYRLKEYGEYVSEAFICRQMLNWWPQNPQYRRDYALALADNGNTQVAFDSLLSTLDLVSRIYRGNEEVIVTEKNRLYVKNADFNKSKIDSSVIRDLSADIRVVINWNTVYGNINLNIIDPNGEICHHKHRET

SEQ ID NO: 101557 - protein, 142 aa, Unknown
  Obtained from environmental sample
  misc_feature (1)..(142): Xaa is any amino acid
IRDFSPSPAVEVEQSDKELEKIADNARRALPTFFRNLARPEAGANNFYVKYPLADDGAVEQVWLGDIRVKDGIYYGRIANTPSLHGDRKKDKLITFDPDKITDWMYIQDGKIIGGRSIKYLLEKTPETQLSEDQKKILRMFE

SEQ ID NO: 101558 - protein, 266 aa, Unknown
  Obtained from environmental sample
  misc_feature (1)..(266): Xaa is any amino acid
CRLFAFTNNIDLEQEKQFAAYCVIIGRKRLSRKMLVVYRGTDMTLIGWKESFNMSFIASVPSQKEAVSYLEKISRRFLYPLIIAGHSKGGNLAVYASAFCGKLVRRRITVIYSNDAPGFHKEVIQSNGYQAICPRIRAFIPQSSLVGMLFEHGETPMVIKSTASGPMQHNLCSWEVSYNNLVDAGELTPQSRFIDNIISEWINQIDEGQRQQFIQAIYKILVSCDVESVTDLTDDWKSTAGGIINALRTMDKPTKKLMGKIIGGAV

SEQ ID NO: 101559 - protein, 61 aa, Unknown
  Obtained from environmental sample
  misc_feature (1)..(61): Xaa is any amino acid
VKYSEAVKRLEEILENVDRSNVGIDELADLVKEASDLIKTCRSILTNTERNVQEALEDLEG

SEQ ID NO: 101560 - protein, 271 aa, Unknown
  Obtained from environmental sample
  DOMAIN (49)...(270): Poxvirus D5 protein-like
  misc_feature (1)..(271): Xaa is any amino acid
MREDLAAFAAVRSLMLKTARSAEISDAEKQWRSSIRKPVREINPNPFIVNVRNGLYNVLDGSFREHTTEYYSTVQITANYDATAKCPQFTAFLESILPKSELALMQEIFGYLLIPVNKAQKAFVFVGAPNAGKSTLLSIAQEVLLGADNVSNIPWQGLSDRFNKAELFGKLANIFADLPSKAIDDGGMFKTLTGEDYISAERKNKDPFNYRPYARFLFSCNEIPKNYGDRSEGFYRRLLIMRFDKSVPHEKRDPNLREKISCERDGILMWA

SEQ ID NO: 101561 - protein, 220 aa, Unknown
  Obtained from environmental sample
  DOMAIN (2)...(217): Hsp33 protein
  misc_feature (1)..(220): Xaa is any amino acid
MPDIIIRATGKQAPLRFVLVSIKDAMNEIGTRHEAKGFALEFMADTAVASLLLSSGLKFPGTVSLRMDLSGDFSRAQADSTPQGLLRAMVPQDDLQRMDTDKPFVNPQKLTVIQLNENSQRVKESIVEAPSIQMGVNLTAYLRQSEQTKSAAGILAKASEENPSKLDFAIGFLIEAYPDIKEEDLEVMRGVIRRLPGLKTYYDGREYNMLNLLDELRGPY

SEQ ID NO: 101562 - protein, 227 aa, Unknown
  Obtained from environmental sample
  DOMAIN (102)...(227): Protein of unknown function (DUF1112)
  misc_feature (1)..(227): Xaa is any amino acid
MRDNFRETIKRKTDKDLEIISSDYVFYSEEERLMALNELESRNGLSKELIKTKQAIELSIKIAEEDEEMLKKHKEAAKYKSSNPTLSADTFTKVAHKDKNIEHMTIEGTVKKIGILSIFVLIGFLFTWNLYNTYQDFELMQPYVIGGVLSALIIGLIIVFRKKTAPYLSPIYCVLQGVVLGGLSAFMETIFAGIVIQAVILTFGILFSLLLIYKFRIIRATENFKLI

SEQ ID NO: 101563 - protein, 194 aa, Unknown
  Obtained from environmental sample
  misc_feature (1)..(194): Xaa is any amino acid
DGNFKDEQIKYIAENIEYYANYGDLLKLCTSTTIPTLNRVLAYLTTKTSLNNSKLSITEILPLFETIKLQIQVNEEILLNVLDKLNKDAEEKITETNIKDLVRFPIFFKYSIATKNDLTDHLNKTIVEALSDIPCSVLYQQRYNVNDYWMAIITHLIDSDYLKKLPDNLIELGKKILNDIATSTQNIPDSTNLL

SEQ ID NO: 101564 - protein, 271 aa, Unknown
  Obtained from environmental sample
  misc_feature (1)..(271): Xaa is any amino acid
MLRLEETDQTLSFDDIFVDNKPTKVVLDHFKERFGFEFESLQWKYDGNVLYKIVEQTFEPLISKIAVLFSKYACKIVLLSGRPTSLKALSNLFMMYYATEPNHLKTMHDYRVGQWYPQDERYPFINEDGYFLNPKSIITTGAMIGQLAENGKLEGFSLNLGELKSKLRPTTNYFGMLDRQLDYINTIIGPDKNRATIEIASLTKPVRIGVRQMDIEAYPSRPFYTLDFNESNLEEIAKGRVEDKNDAGAVRDEVERIKDGVLRYRPLKVTI

SEQ ID NO: 101565 - protein, 276 aa, Unknown
  Obtained from environmental sample
  DOMAIN (75)...(172): CarD-like/TRCF domain
  misc_feature (1)..(276): Xaa is any amino acid
DAGQAQGGNPRLRAAPCGGTDSGCRALTLNLSGGVHLKGHKLLVLTEREVFGRRALPPARPQKSRVSAFLSDLRDLKPGDRVVHLDHGIGEFLGFGSLTVAGEEQDVIQLGYADGGRLNVSLERADLVQRYVNPDGAMPPLDKLGGASWAKVKRRARKAIRDMAEELVKLYAKRRLVKGFAFGVDGPEMAEFEASFPFEPTRDQLDAYEAIKADLESSRPMDRLVCGDVGFGKTEVAMRAAAKVALGGKQVAVLCPTTVLCFQHYRTFLDRFAGFP

SEQ ID NO: 101566 - protein, 282 aa, Unknown
  Obtained from environmental sample
  misc_feature (1)..(282): Xaa is any amino acid
AQGGTLEIGRGDDGVVVGVDNAKKLLEELPNTIRLTLGIVPSVELLTEGGKEYISVSVDAGSTPVSFHGRYYLRSGSTTLELDGSQLDSFILRRIGKTWDGITIPSAKVADLDTSAFRIFREKATAYERLQTADLEMSNEALLDSLSLVEGGELTRAAVLLFHSNPEKYVFGAFVKVGYFETGADLIYQDEFHGSLITVADQIVDTIYRKYFKGIISYEGILRVTDYPIPRPALREAIFNAIVHRDYTTGIPIQIKVFPDNVTIYNDGTLPERWTVADLLSK

SEQ ID NO: 101567 - protein, 64 aa, Unknown
  Obtained from environmental sample
  misc_feature (1)..(64): Xaa is any amino acid
VIDLPISADKCVEAMLPKGFAAGIPIGRYYNYTGADKALLVAATEKRTREEIDAFVNDLQEAVG

SEQ ID NO: 101568 - protein, 277 aa, Unknown
  Obtained from environmental sample
  misc_feature (1)..(277): Xaa is any amino acid
GGKYCLTQANAPYYEDFYTDYFVGAQAYWDSTAPGKTPLNFSTVGVRAINDYTLQYTLMEPCPYFMSMMNWVPFYPVYQPFLDKVGDKFGTSNDNLLYCGAYIMETWRPQNTQVYVKNQSYYLANEIHITRMTYTYNAEASTLAPELFKRGEVSGTDISTLILDDWQKDPQTAKVIRPSTAGWYSYFYAFNFEPNFAAEYEPENWKIAVNNLNFRKAVSAALNRVNAMMTESPWDPQGSLIRTVTPPGFCVAGGKDYTQTGDLARISSANPFDVAAA

SEQ ID NO: 101569 - protein, 79 aa, Unknown
  Obtained from environmental sample
  misc_feature (1)..(79): Xaa is any amino acid
MDKTEYKATLQMLVPMIIQVIIEKKDIPVISAINLLYVSKLYEKLEIESTKLWHLSPLALYELLENELQTGKLIFPTEA

SEQ ID NO: 101570 - protein, 287 aa, Unknown
  Obtained from environmental sample
  DOMAIN (12)...(185): Phosphoribosylglycinamide synthetase, ATP-grasp (A) domain
  misc_feature (1)..(287): Xaa is any amino acid
NFAGHADALKYAEKHFGKAKETNPPPLVVKADGLAAGKGVVVAADFAEAKQTLSAFMKEGSLGEAGKSVILEEYLEGLEVSVLAAVSVSPGKKGVIKPFISARDHKRRFEGGRGPNTGGMGAIAPVPDFTAVARNDFDKAILAPTLKGMEAEKLDYRGFIFFGLMVREECCYLLEYNVRLGDPETQAVLPLMDSDLTELCTAILEGKLQSFPLEWKKGAVCAPVAVTEGYPGPYRKDDPIAINHADFERTGAKLFVAGASRGTGGPLGSGLRTHGGRVLSVSALGSD

SEQ ID NO: 101571 - protein, 102 aa, Unknown
  Obtained from environmental sample
  misc_feature (1)..(102): Xaa is any amino acid
AEEHFRKLKKTGTNSFKLTVPWTAIEHEGAGIYDEAYLAYLRKILLIADKEGISVFIEPNKDLQSVPSWAVKDENKDNYIAAFKHAQRRLKNCKAVTGWGDI

SEQ ID NO: 101572 - protein, 285 aa, Unknown
  Obtained from environmental sample
  DOMAIN (111)...(197): FKBP-type peptidyl-prolyl cis-trans isomerase
  misc_feature (1)..(285): Xaa is any amino acid
FRKGKAPASVVEKRFRDRIYQDAKQDLINVHINEVMQAGGFVPVAGIELDGGDLTRGEALNYAFSFEILPEFELPNYEGMEAEQEKTVVEPGEVQQVIDRIRRDRSTLHPVEGSGPPVDGQVAVISFEGFENGTPLNNVKVQNFELPLGERQALEDFEALVKTIPLGEEKEGDISFPVDFINPELAGRTVRMRVCVHAVKERRLPELDQEFAKSMGFDDVDKLRAGITESYRKSRETLYRAATQKALLDSLLKMVDFPLPQSMLDLNVTTLLADMQGRLERQGKN

SEQ ID NO: 101573 - protein, 94 aa, Unknown
  Obtained from environmental sample
  misc_feature (1)..(94): Xaa is any amino acid
MGKKEAKGELVLYQPDGTLKLEVHLENETVWLTQAQMAELFSTTRNNITMHISNIFKEGELEQEVVCKDSLLTTQHGAIEGKTHTKLAKFTIWM

SEQ ID NO: 101574 - protein, 283 aa, Unknown
  Obtained from environmental sample
  DOMAIN (5)...(282): TraG/TraD family
  misc_feature (1)..(283): Xaa is any amino acid
NDTLRFNILDELSPESAYRDASMIADILTSPADGKTDGNSKHWVDTAKDLLTGVILHIKCSNLRDKSLYGCLDFLSQADKGEDKGAALLDGMINSIHCDNKIHEIIANVARRNKSRPDDERGSVFSTAVTALQVFEDPMVRNCSSSSDFCLNDFKVFENPLSLYITVPFPDLDRLSSFIRIIVTFILRKFSQDEVQFGEQKLKHPILFLIDEFPTLGTFTALETMMGILAGYGITFYLICQSPSQIYKLYGEHTAIFDHCKFMMTYAMSDPKGAEMFSKMMGV

SEQ ID NO: 101575 - protein, 289 aa, Unknown
  Obtained from environmental sample
  misc_feature (1)..(289): Xaa is any amino acid
NLTTTGFVLRFGNDVNGYYEYKTRRLDKSIGWNGEGFAINLDDLTKLKIAWFNKYSERNAFIDTAVQTEYGDSLRVYSKTRVAPSLSNVSWIAFGVQSGSNVYFGDVRINGFRATGISDYNGWALRASMKLNWSDFIENSMDFKYTDADFRSMSDDIHKESNARISSGLSSNIKLDKFLPDRFGVQIPLGGEIAASMQRPQIRPNSDIKLNNKRGEADGLSDMVGDFGRIISNSSEKGEITPSEKYEMHGRNRSAYTGYHKNNTSEKVVPRLTADRIGVGYRVIIGILL

SEQ ID NO: 101576 - protein, 118 aa, Unknown
  Obtained from environmental sample
  misc_feature (1)..(118): Xaa is any amino acid
MAKALVIYFSKYGTTKKYAEWIASELNGDVYDIKDVKQNILNNYDTIILGAALYAGQLKGLDIITNNYEEIKNKKTVIFTCGVADYSKEENINAIQKRIADKLSEKIMENIKIFIKGR

SEQ ID NO: 101577 - protein, 162 aa, Unknown
  Obtained from environmental sample
  misc_feature (1)..(162): Xaa is any amino acid
MEKQAVNKRLLGVVVPVGALRSKKGMGVGEFSDLIDFAALCKKMRLGLIQLLPVNDTGFESSPYFSMTAFGLHPLYLRIEELDEFASVENLVKKRIKKARENNEKNSRYSHYKILKEKLEICREIYNANKAQIVKNANSGGLSSWIEQNSWVKEYAVYRRLK

SEQ ID NO: 101578 - protein, 154 aa, Unknown
  Obtained from environmental sample
  misc_feature (1)..(154): Xaa is any amino acid
MKTVYNFSAGPSILPKQATEEAKAAITDFAGTGIGILEMSHRTKPIEGMVAETESLLKELLSIPAGYEILFLGGGASLQFCMVPINLLGANSVADYTDTGLWASKALKEAKKFGKVNVVCSSKDSTYNHIPKTFEQTSGATYLHVTSNNTIYGT

SEQ ID NO: 101579 - protein, 212 aa, Unknown
  Obtained from environmental sample
  misc_feature (1)..(212): Xaa is any amino acid
MKFTDGYWLIKEGIQAHFAACPAEIEQQGDELVVYAPEKPIRHRGDTLNMQLLTVRYSSPMKNVIRVRISHFEGGLDNRPKFQLESEPSFKPSICIQEKEAVMKSGDLSVSVERGDRWNITFLGGGKAITKNLFRSTGYMVNSEKQPYIKDELSLSVGELVYGLGERFGPFITNGQTVDIWNADGGTASEQAYKNIPFYMTNKGYGVFINDP

SEQ ID NO: 101580 - protein, 130 aa, Unknown
  Obtained from environmental sample
  misc_feature (1)..(130): Xaa is any amino acid
MRKLPELDKVSDIRLGQDADFDAWLYNMMTDNNIAYYMNPELIAPPEQIRFMVALEADQVYFPCSDATVKLLMNNDAVELERQYNRAWRILMRLARATCPDRKIRERVLRFCAYRFRQSVKQRTLIPARL

SEQ ID NO: 101581 - protein, 240 aa, Unknown
  Obtained from environmental sample
  DOMAIN (176)...(240): PET112 family, C terminal region
  misc_feature (1)..(240): Xaa is any amino acid
MYPDLPHGYQISQFETPVCGRGRLRIETDAGGKYIGITRIHLENDAGKNLHPAHEDSSYVDLNRCGVPLIEIVSEPDMRGVEEAIAYLKGLYSLVTWLGVCDGNMEEGSFRCDANVSLRKKGADVFGERAELKNLNSFRNVQRAIEYEISRQRDILEDGGTVRRETRLYDAEKNFTQSMRDKEEAHDYRYFPDPDLLPVRITAEQLEEWRARLPELPVARRARFVGQYALKAEEADILCG

SEQ ID NO: 101582 - protein, 231 aa, Unknown
  Obtained from environmental sample
  DOMAIN (1)...(123): Carbamoyl-phosphate synthase L chain, ATP binding domain
  misc_feature (1)..(231): Xaa is any amino acid
AHIISFPVLRDKNGKHIILPEIEGSVQFRFRKLLVESPSPYLSKQSKGKIIAMLPALIDSLGIVGYANVEFLISENDIYLLDVKENIQHFHGVTNLLTGVDVLREQIRLHSGESLLLQKDSIRTEGSVIAVNVDAMDPYSNFSASPGKIERMFVPFGEGIVVQSPFVSGDTVSANYESVLAKIMAYSGTREKAISNMESALANFRIEGISTTLPFLRGVLKHPDFINLKWT

SEQ ID NO: 101583 - protein, 273 aa, Unknown
  Obtained from environmental sample
  DOMAIN (66)...(270): Glycosyl hydrolase family 3 C terminal domain
  misc_feature (1)..(273): Xaa is any amino acid
MLTVAFKKGLVSEEAINTALERLLRTRFKLGMFDPRVSGKYGKLGRKIINCKKHRKLALEAAEKSIVLLKNDYELLPLDSNPKKINVEGPAAANAHTLFGNYYGVSSRFITILEGLGEKVKDKFGINLEYRQGCLMYCENSKSLAIYGEANVADVVIAVMGLDGAIEGEEGDAIASDSNGDRDSIELPPWQLKYLRKIREAGKKIVLILTGGSPIAFPEDIADAIIFAWYPGESGGKAVADIIFGDVVPSGKLPITFPASTSQLPPYKDYSMK

SEQ ID NO: 101584 - protein, 283 aa, Unknown
  Obtained from environmental sample
  misc_feature (1)..(283): Xaa is any amino acid
MHRRLARELERIEKKYDNRMTEQEICELLDKFRYVVPQGGPMTGIGNSYQIASLSNCFVIGTNPAADSYGGIFRVDEEQVQLMKRRGGVGHDLSHIRPSGTPVLNSALNSTGLVPFMQRYSNSTREVAMDGRRGALMLSVSIKHPDAEKFIDAKMESGKVTGANVSVKIDNEFMECVKSGKPYVQQYPIDAAEPKFRYEVDARKLWDKIIHNAWKSAEPGVLFWDTIVQQSVPDCYADLGFRTVSTNPCGEIPLCPYDSCRLVAVNLYSYVKIRLRQRQPSTT

SEQ ID NO: 101585 - protein, 68 aa, Unknown
  Obtained from environmental sample
  DOMAIN (1)...(68): Uncharacterized ACR, COG1430
  misc_feature (1)..(68): Xaa is any amino acid
LFFGENTVIPLSIAFIASDGRITEIKDMQPLDLSAVKSSRSVRYALETPQGWFSRAGVKPGDVVEIDF

SEQ ID NO: 101586 - protein, 50 aa, Unknown
  Obtained from environmental sample
  misc_feature (1)..(50): Xaa is any amino acid
FRGKKLHVQVQNPQGRESGCRKLTVNGVEMSDNYIPASALKTENEVILEM

SEQ ID NO: 101587 - protein, 88 aa, Unknown
  Obtained from environmental sample
  DOMAIN (2)...(86): Response regulator receiver domain
  misc_feature (1)..(88): Xaa is any amino acid
MKTIFMVDDSDTSLSIAKRALENHYRVLTMLSGAKMFSLLEKITPDLIILDIQMPGMDGFETLQILKSKPLYADIPVMFLTSYSDDDI

SEQ ID NO: 101588 - protein, 90 aa, Unknown
  Obtained from environmental sample
  misc_feature (1)..(90): Xaa is any amino acid
SWSEFSSLRADGTGKQKTIKGEQRTKGLEKQAKLYGEYFKVYLEFSDIIERVSFWGVTDDKSWRSAGLPLLFDSDGKAKDAYYKVIESLK

SEQ ID NO: 101589 - protein, 294 aa, Unknown
  Obtained from environmental sample
  DOMAIN (2)...(291): tRNA (Uracil-5-)-methyltransferase
  misc_feature (1)..(294): Xaa is any amino acid
MDCVTRIGKFDYPHDVEVFTANEFGYRIRAQIKVDYVHNAAGFFRKKTNDVVRMDECLLLDKRLNSVLAGLNGGMIRGINTINGIDNNIIDNSGQTKKYVDGVSSVKMLVGDRVASDPVIDGLTNAVTEISVSEIKFLADGGSFFQSNGFLLERLGRWASGLLGGGFCLDLYGGIGFFSLMLADDFEEIVLVENVAGQVRTAERNFAVNKRDHIRAVLADVERGGGLQKAAGGRRPDCVVVDPPRPGLVKAMRKWLIETAPRSILYVSCNPSTFARDAGALLGGGYKLTKRGAV

SEQ ID NO: 101590 - protein, 67 aa, Unknown
  Obtained from environmental sample
  DOMAIN (3)...(48): SpoVT / AbrB like domain
  misc_feature (1)..(67): Xaa is any amino acid
NTVTLSNEYQLIIPKEIIKSIGLEPGSSFEVLSYNNRIELIPISPIKELKGIFRGIDTNIERDDDRV

SEQ ID NO: 101591 - protein, 182 aa, Unknown
  Obtained from environmental sample
  misc_feature (1)..(182): Xaa is any amino acid
MSISFDNLESYLSAQPDNTAATSYLIRLKIGTYNDFYNLRTILNKMPVRYIYLDLSGSTITSIGYKAFDDCTNLTGIIIPNGVTEIEYGAFDGCTNLTAINVDSANTAYSSQDGVLFNKNKTILVQYPRGKTGAYSIPNSVTEIGYSAFYGCDSLTGITIPNNVTSIRRYAFCSCTNLASIT

SEQ ID NO: 101592 - protein, 221 aa, Unknown
  Obtained from environmental sample
  misc_feature (1)..(221): Xaa is any amino acid
VALLDASIIGAMAVSVSTAYAVGDVLSLKHSLHRQPSDARSFFANYAALVLLAAVLVLTPGTPLGLLTNAVQTLAGVLLPSATVLLLLLCNDKAVLGPWVNGRWLNLCTGLIILGLLLLSIILTASVLYPQISDHAIMMTLSGGGVAAAAAAAAMFLLGKEPQRAGDTAARALWRMPPLATLEPPRMTRSTRLWMLLLRGYLNVAGGLILVRIVELASQHA

SEQ ID NO: 101593 - protein, 110 aa, Unknown
  Obtained from environmental sample
  DOMAIN (23)...(109): Glucose inhibited division protein
  misc_feature (1)..(110): Xaa is any amino acid
MSELKSELKKAALEYGIEFSEKQLDDFDCYYQTLIDYNKRINLTAITEPGEAAVKHIIDSLSCLRDDVFKNGAKTLDVGTGAGFPGLALKIFRPDIDLTLMDSLPKRLVF

SEQ ID NO: 101594 - protein, 215 aa, Unknown
  Obtained from environmental sample
  misc_feature (1)..(215): Xaa is any amino acid
MALSDEQAKWLRKVVSGMNIQKVPEELLTEEFYLAVVQNHGNALEYVPEEMKTEAFCLAAVQRHGYLLEHVPEEMKTEAFYLAAVQRNGSALKYVPEALKTGDMCFAAVQQNGCALEYVPEATKTDAICLIAVQQNGSALEYVPEALKTEAICLVAVQKNGSALEYVPEATKTEAICLAAVQRDGRTLEYVLEALKTKALCLLADVQIGRSLKSV

SEQ ID NO: 101595 - protein, 288 aa, Unknown
  Obtained from environmental sample
  misc_feature (1)..(288): Xaa is any amino acid
VSLDKKYSAVFYMLFNLRMQRNDAALKWFVTYQECEQKGSDRRTFLMLFSLMSKTIKESVDENIKSKISAYISSVIVSSSQAEGYCEADIVAKIRNNYTRLCLHEEIEFQLLRKCCGAFDELTANMMLAKNNINILDFILKIISAPVEQKNEFLKNYIDEIIIAPNQTEETVYEEIAYNELVIKLEGDVNAAKARHEAELKRAKNQLNLISEIVGWIYERDNHDISGQVRLNMFTLIKNLQEKAVESYTEGYRSRKKTVLPISINDYSANVDFTREPEETGKVKHIHQ

SEQ ID NO: 101596 - protein, 275 aa, Unknown
  Obtained from environmental sample
  misc_feature (1)..(275): Xaa is any amino acid
LNVSTYNAVVLAKETAESNGWKITAVPKGFVYQSAEHIFNPVKGQNPEMLITLPPAAYLADWTPTIATFAVVEKPSTSIANSDVQNMNAKNVALSWSLRPNVTKYEVYRDGELLGETSGNLIEDYDLKIGQTYEYIVAGYAGTNKILSTSVQATPFVAAAAPGTWRYMNRNSEGGSSETTVTATTGGGSPGGVAGADNKRYEFQVTGDGTLRTFQYRTSTNGTSWSNWTNLPSSPGGSNALTVGSWAGDLNGTKTTINPAAFVSSGTTWNGASGQ

SEQ ID NO: 101597 - protein, 80 aa, Unknown
  Obtained from environmental sample
  misc_feature (1)..(80): Xaa is any amino acid
VEDKVLELEDEYRLNLYTDGINEAENYTKEQYGHQRIYDLMKDCIDKSCKEFVEIILKNVDDFCGKKEMSDDATILVCDL

SEQ ID NO: 101598 - protein, 281 aa, Unknown
  Obtained from environmental sample
  DOMAIN (17)...(116): 5'-3' exonuclease, C-terminal SAM fold
  misc_feature (1)..(281): Xaa is any amino acid
EEEKLLSLKDFEKESGLTPAQWPDMQALLGDAVDNIPGIPGVGPKTATKILQDFPNLEAIRDGFDRLPPKLQEKFRPHLEAMFLYRRLTTLRLDVCGHLKPADLVPAPPNAQELAALCAEYEMPSLRREVEKLLSAGAPSRPAAVAHAREQASLFSVPAAPAPALLAVQAGDLPPCAGKDVAILPSRADGRVEYSAALDGKEWRYAGPLAEFIAWIAPARRIVTPDAKSLLKDSSLWRQRLPLCFDLSLAAYLVNPEERDYSWQRLYSRRPQGPDRGQAGA

SEQ ID NO: 101599 - protein, 73 aa, Unknown
  Obtained from environmental sample
  misc_feature (1)..(73): Xaa is any amino acid
VGLAVPHICRIVFRTSDSRILIPGAILGGAFMASLCDFTARNTLSPRELPLSAVTAIIGAPIVVFLLTRKEKL

SEQ ID NO: 101600 - protein, 74 aa, Unknown
  Obtained from environmental sample
  DOMAIN (2)...(74): S1 RNA binding domain
  misc_feature (1)..(74): Xaa is any amino acid
VAKEEAIDVEGVVREALPNTMFRVELDNQNGHLILAHLSGRMRKHYIRIVPGDRVRIALSPYDLSRGRIIYRER

SEQ ID NO: 101601 - protein, 271 aa, Unknown
  Obtained from environmental sample
  misc_feature (1)..(271): Xaa is any amino acid
GNEALIPEDERVLYRRARERYQSLREASRTLPVTELLTKLWFEEGYRCETLWTESAQVYESLFDLFFSLAAECDAKGKSLADFIEYLEDVMNREEKPDDKDIPGEGEGGVRIMSIHKSKGLEFPVVFIYDCSHAGNIRRSMDLISCHEQYGLILNIPQAEELPLGGSYFRRIMEEDERAKDIAELRRLLYVAMTRAEYKVFLTFTLPKQTVKEKEDWDMAAEEFTNESIRRRLAQLDEKSEGKKDTFLILLAGILHDSPHSICSLEGIPLL

SEQ ID NO: 101602 - protein, 274 aa, Unknown
  Obtained from environmental sample
  DOMAIN (56)...(274): Periplasmic binding protein
  misc_feature (1)..(274): Xaa is any amino acid
ILVLFGTLSACRKNKVSGTEQTAFVFTDSAGREVELPSPIRRITPCGSMAQMYLIPIAPDLFCAITSPYKGADAEFLPSALSSLPAIGQFYGQATFNPEEVAKINPDVIIDIGETKNNIANDMDQISAMTGIPVIHISADLRGTPEAFRILGKLLDREEKGEELAAFCEKILFRAESIMNKVGNGKKSVLYCMGSNGLNVLARNSYHSEIFDWMTDNLALVDNPSSRGSGNESNMEQLFLWNPEVIFFSPGSVYASVKNDPVWREFRAIRGGTY

SEQ ID NO: 101603 - protein, 288 aa, Unknown
  Obtained from environmental sample
  DOMAIN (99)...(222): Phosphoglucomutase/phosphomannomutase, alpha/beta/alpha domain III
  misc_feature (1)..(288): Xaa is any amino acid
EVKIVYTPLHGTGAFHVEGVLGSLGLNVITVPEQREGNGDFPTVAFPNPEEAAALELAVKLGIKEKADVVMATDPDADRFGIAVPAGNRGKEGEYVLVTGNQMGALLADYIFLSLKETEKMPPNPVMVNSIVTTGMQKRVAEHYGAKCLECLTGFKWIADVMAKCEKDKSATVVFGTEESYGYLVENEVRDKDGVSAAAMTAEMTLYWRSKGKSLLDRLEELYQICGFWKEIGISKYFQGPEGPAIMQSIMEEYRKNPPKTLGGIEVERVRDIKNGADGFPPSDVLQF

SEQ ID NO: 101604 - protein, 293 aa, Unknown
  Obtained from environmental sample
  misc_feature (1)..(293): Xaa is any amino acid
GEDWENNKQTIKAINEIKILDPACGSGAFPMGILHKMVEILQKLDPKNEDWRRLQEEKATGELKDAIKIEDQQEREIRLKEISDIFENNKSDYGRKLFLIENCIFGVDIQPIAVQISKLRFFLSLVIEQTPTKDANDNYGIKPLPNLETKFVAANTLIGIEKEGTIFRTAEMIEKENELKQVRHEYFTANDRKKKRLLQGKDKKLRMELAKMLKGLGFGVNAADQIASFDPYDQNNSAGWFDAEWMFGVEQKKDGLNEPLNDGEGYFDIVIGNPPYGAIILNVTKIFSTYYTT

SEQ ID NO: 101605 - protein, 85 aa, Unknown
  Obtained from environmental sample
  misc_feature (1)..(85): Xaa is any amino acid
DEIRAERQDQQSNASEATAAALGNETGADFLLTGTVRTIIDRADNKTVRTYFVNAEMSNIETNQRMWMGQNNEIKKLITRPKVKL

SEQ ID NO: 101606 - protein, 247 aa, Unknown
  Obtained from environmental sample
  DOMAIN (83)...(247): Adenylate and Guanylate cyclase catalytic domain
  misc_feature (1)..(247): Xaa is any amino acid
MLTLTNSGDDFATVHIGTSVKEYFSPLVLENLNVFLSSAAPIIANALRMRQMDIMQKKTRAAFARYVPIDVMDEIIKKSLAQSTQGETRLVAILFSDIRSFTTISENTQAQELVSFLNYYFSKMGDEITAEGGNIDKFIGDAIMAIFGAPKTLDNPAVNGVRAAIRMVKALSRLDTSGITLPKTGFGTGIGVNYGECVVGNIGFQNKQDYTVIGDSVNLASRLEGVTKYYQQSIIVSEYVYDAAKDH

SEQ ID NO: 101607 - protein, 88 aa, Unknown
  Obtained from environmental sample
  misc_feature (1)..(88): Xaa is any amino acid
MVMLENTDGFTIAEKDLLFRGPGQIAGIEQSGYLKLGIADPVRDADALVRARSDAFAVLEADPGFLLPEHRCIAGVLERAQPFAEVGL

SEQ ID NO: 101608 - protein, 88 aa, Unknown
  Obtained from environmental sample
  misc_feature (1)..(88): Xaa is any amino acid
MIGNPTDVKVVDHAVSGDALIGLVMLHNETETPSIGDLYKVGTVAKIVKKINLPDGGVNIFISTLKRFQVKKTLHPADPIIAAVEYLE

SEQ ID NO: 101609 - protein, 302 aa, Unknown
  Obtained from environmental sample
  misc_feature (1)..(302): Xaa is any amino acid
AYQVLPAEPYFEHGEDYPLVDVRELLPPFDSDGWEYSELPAFALVAFARPLSYFSEIFQYDILYPMEGSAPAAGAFCPLENRVIACNINTVAARLPKIFQEEFRRRLGLMDASLLDYYPRLLPYLLKMDRAHVMALDATNHFHLAGINASFPSDIDGELKRYGMRIGKFRPGDNDSYERNRMFVYQHLMELYGFPVVAERRTASALFARKLHRMGENFVLRVLGQSDRTLTTYTHLGGHSYYPLVEKIALCRVDEDLEEAISVIDAGGFFVNPARRVVIIRLTYQQHRFDPRNPRQDRALSV

SEQ ID NO: 101610 - protein, 185 aa, Unknown
  Obtained from environmental sample
  DOMAIN (7)...(61): Helix-turn-helix
  misc_feature (1)..(185): Xaa is any amino acid
MVIGNMIKEIRENAGLSQEQFAEKLAISRQAVSKWERSVSLPDIENIMYISELFNISLDTIVKGDKKMTDKIISDSKSAKLMSKLFIGILVVIAAIVTFIMFFGGTVAYVFDLKAIMIIIIFPLLFQYIMYGNFFLIAFSVYSKTEKESETWKKAEDFFNNYAVVLWLTVILVLSVLFVVMIVFL

SEQ ID NO: 101611 - protein, 183 aa, Unknown
  Obtained from environmental sample
  DOMAIN (2)...(51): TM2 domain
  misc_feature (1)..(183): Xaa is any amino acid
MSKKSKFLAFLFCLFFGVFGVHKFYLGKKKIGILYLCTLGIFGIGWFIDIFTIGKQVYKVNGLSGDNSSNQSNDNRSNKQKRDKKQKNESKQSVDKYLEKKNNGHYSSYGNIRVFGGMLPNSGSIGNIKVFYDEEFPKNSGSHGAQTIYKSSGHLQVFYSPKDYPDFSQKYQFIGKSVDIYQK

SEQ ID NO: 101612 - protein, 55 aa, Unknown
  Obtained from environmental sample
  misc_feature (1)..(55): Xaa is any amino acid
ALSRIFDPFYSTFDAGTGLGLAVSHRIITAHDGLMHVESEEGKGTTVRLRLRAAE

SEQ ID NO: 101613 - protein, 270 aa, Unknown
  Obtained from environmental sample
  misc_feature (1)..(270): Xaa is any amino acid
LLSCPRGSVQKTFHFLSSVKFTVALLVLLMVGLAAGTIVESLRGHGAAVGLVYGSWWFMLLFALMAVNLSMSLARRFPFKGRGGFALVHASLLLIMAGAGITRFCRVEGTLLLWEGQGGAAIVQHGADEKIDSKYELPFVVTLEKFVLDTYPGTNRPSGYASFVQIEDRGGGRSFKSKIWMNHPLKYRGFTLFQSSFVREGDRWATVLAVSKDPGQAVVFIGYFTLLAGLGWMIANVFRASKLPKTPVEPSAKVKHLWVPAILLLPHMLL

SEQ ID NO: 101614 - protein, 121 aa, Unknown
  Obtained from environmental sample
  misc_feature (1)..(121): Xaa is any amino acid
MTGDLSTPLQVQLNNWVRRQAPQVFVRPNISPTRPPTALMVPLRVTQEIRDPLTLSRSLSRIFWQAWLGQQPFSVLEYAHDAQPYEPGRALALGKYKGADLVIGGYITHYFDGGQSGNSSV

SEQ ID NO: 101615 - protein, 142 aa, Unknown
  Obtained from environmental sample
  misc_feature (1)..(142): Xaa is any amino acid
AWNLPQWLRAVPANGDRDVRCRACYALRFRQVARWAEEEGFDAFSSSLLHSPHQAHALIAEEGEKAAQGFGTAFLYRDFRSAWREGILLSKQWGLYRQQYCACVYSEAERYAGELEKACAEASTLRMRRVACPPIDSGGVKE

SEQ ID NO: 101616 - protein, 282 aa, Unknown
  Obtained from environmental sample
  misc_feature (1)..(282): Xaa is any amino acid
DEIRDLIVSTVAKNGGHLSSNLGVVELSIALHRVFNSPEDKIIWDVGHQCYAHKLLTGRYGSFSTLRKAGGIAGFPKKEESPHDAFNTGHASTSISAALGILAAQRLQNKKGHAIAVIGDGALTGGLAYEALSHAGQIGLPLIVILNDNKMSIDRNVGGLSKYLSRLSMKKYYQTFRRNFDAMARRIPFFGEMFFALVLRLKRAVKAVFYTDNFFVDLGFEYVGPIRGHQIKTLIEVLSDARKLGRPVVIHVITRKGKGYGYAEDDPGSYHGVGAFSVDDGI

SEQ ID NO: 101617 - protein, 223 aa, Unknown
  Obtained from environmental sample
  DOMAIN (19)...(220): NADH dehydrogenase
  misc_feature (1)..(223): Xaa is any amino acid
MLEFFTAFISQKPPVEWCITVAKFAFIFIPLIFIALMITLERRGAGFMQDRQGPNRTGIPLFPFLDHIRLFGLVQNGADGLKLFTKELFEPRAAHGFWFKFAPAIPFMVAFLSPAVIPWFGPMVFEWGGNLVQISGSILDLDIGVLWLFAFGSLSVYGTVLGSWASNSKYALLGGMRAGAMMISYEVSMGLALLGMYMLVGSFNLQSIVAWQETHGWGILGQP

SEQ ID NO: 101618 - protein, 296 aa, Unknown
  Obtained from environmental sample
  DOMAIN (44)...(223): Peptidase M16 inactive domain
  misc_feature (1)..(296): Xaa is any amino acid
VVVAELQRGKDSPSSRIFDILLAEALKGTPYEHPVIGFENTIRAFTPQQMRAYITRHYQPRSMLLVVVGKIDPALALAEAARLFGSLKDAAAPTPPQPIEVKKPGRGPVVTVQRGPWNKVYLGLAVPAPAEKDLHSITLDVLAYLLAGDAGAYLPRRYKHEKQLVHAVRAGNMSFERLGMLYIGFELDADKLEAFWQEFCADLASLDAGRFTPEELAAAKLNLEDRIHKTQESLGGLASWKGQLQFFQGGLEAEGNILAFLRQIEMPQVQEAIRARLRPERLAAAVLLPGNVREPD

SEQ ID NO: 101619 - protein, 169 aa, Unknown
  Obtained from environmental sample
  misc_feature (1)..(169): Xaa is any amino acid
MPENWNKSQIAINRPEYLKFLVNWKDEDVIKVISGVRRCGKSKLFEIYRQYLVKSGVSPEQIISVNFEEFDFGDLQNPEQLYAYLKKRVRNKQKYYIFLDEIQNVPNFEKVVDSLFLKKNLDIYITGSNAYFLSGELATLLSGRYVELKMLPLSFKEFASVQKEKNPRL

SEQ ID NO: 101620 - protein, 58 aa, Unknown
  Obtained from environmental sample
  misc_feature (1)..(58): Xaa is any amino acid
MNNNKIQLFENKKVRSVWDAEKGEWFFSVVDVCGALTDQPTHNRARKYWSVLKTRLKS

SEQ ID NO: 101621 - protein, 252 aa, Unknown
  Obtained from environmental sample
  misc_feature (1)..(252): Xaa is any amino acid
ESIDSIVRDFEKLLFPGFLENVCTDRDALRKLTVGKVKKLSLALKCEVEKSLAFSVRYGELNCGHKSCGAAAALVVEEFFEELPRIRVILVQDLDAAVRGDPAAKSSNEVILSYPGFQAIAIHRIAHFFWTRQVPIIPRMMSEIVHGRTGIDIHPGAQIDESFFIDHGTGVVIGETTVIGKNVKLYQGVTLGALSVKKEESNRKRHPTIEDDVTIYANATILGGETIIGSGSIIGGSVWITHSVPPGSRVSQ

SEQ ID NO: 101622 - protein, 260 aa, Unknown
  Obtained from environmental sample
  misc_feature (1)..(260): Xaa is any amino acid
VSPPSNYEVTIESAGTGALGDGDYPAGARVIISAGEAPDSQQFKNWTASDRNLIFADPNRSTTAFTMPSANVTVTAHFEPRSPGNGTGSGGDGDGDSTITGGGDGDRDSTITGGGDRDRDSTITGGGDRDSTITGNGGGDRDSATAKQYYAVTISGNGTDMTGDGNYKAGDTVTITAGTPQTGYMFKNWTSTSNGVTFADSSRAATTFVMPANAVTVTANFEAASTTNPTYKVTVSGAKGATGGGTYTPGMIVHITAGTD

SEQ ID NO: 101623 - protein, 291 aa, Unknown
  Obtained from environmental sample
  misc_feature (1)..(291): Xaa is any amino acid
MREALVDRLSLNPERIQEIIEGINQVIRLDDPVCKIISGWRTPNGLLIQQTAVPLGTVSIIYESRPNVTVDAFSLAYKAGCAILLRGSSAALESNRALVKAIKKGLEESGVPGAVELADSGSRDEVDEILKARGWIDAVLPRGGKELIRRVVDNARVPVIETGEGNCHIYVEPSADIGKALEIIANAKLQKPGACNAMETLLVHRDIAGALLPLIAQRLAGKAELRCDKDSLAAIGPLPADLVVKDAVPEDWATEFLDYIMAIKTVASLDEAINHINAYGTKHSEAILTND

SEQ ID NO: 101624 - protein, 259 aa, Unknown
  Obtained from environmental sample
  DOMAIN (1)...(257): ADP-ribosylglycohydrolase
  misc_feature (1)..(259): Xaa is any amino acid
MLGAIIGDIAGSRFERHPIKTKEFEFFHHKCRFTDDSVLTLAVARAILDARGEAGDAGRLGELAARSLREFGRLYPKAGYGGMFRSWLYDDTMGAYNSFGNGAAMRVSPCGFAAKTLDEAKRLSGLVTEVTHNHPEGLRGAEAAAVCVFLAREGKSKSEIRGYADGYYSMDFTLDGIRDIYSFDVTCRRTVPQAIMAFLESDSFEDAIRNAISLGGDSDTLAAITGGIAGAYYGIPPAIRERGIEFLDERLRAILRDLK

SEQ ID NO: 101625 - protein, 271 aa, Unknown
  Obtained from environmental sample
  DOMAIN (4)...(119): Response regulator receiver domain
  misc_feature (1)..(271): Xaa is any amino acid
MDKRRVLIFEDSETFANLLLEFLNTEGYETQRAKNGFEGIKLVYSFLPELIITAVDMPLFKGCESVRFLKSRPSTRNIPVIMLTFPGETKDKFWGAQAGADIYIEKTPENFEEFSKQIRRLLDENRPIDYERIKKEGEKINDDSLVEMVNNLLDNKLFQATLGSLLAELSSNVSSLEETVKGFFALLNNACRAEMCSIMIKDADDALVVYNANNGRYAEAIAEDFKAITIADFNTRFSDYKVVSKEVHDFFPAGERNERIESYILIPLTSG

SEQ ID NO: 101626 - protein, 250 aa, Unknown
  Obtained from environmental sample
  DOMAIN (1)...(244): Protein of unknown function (DUF1625)
  misc_feature (1)..(250): Xaa is any amino acid
MGGGEETITTYTYAANWVSSPISSSGFADPEYRGKNTVLDNLDTKVKSQTQYASNVTFGAYKLPSFIIRSIRGSVPVDVRTSSDELLAKLGLKIGNQVQIQGNVVYFGKASSNPQIGDVRVTLAKIMPADISIIAKVIGSTFEEYLAPGTGRTFTAVEMGTVGAESMFASAKKSNTFLTWLLRIIGIILIVTSLKMVFAILPTLFKVLPPLGKIVGAGVGLVCSIGGGAWSLAIIAIAWLFYRPLIGIPL

SEQ ID NO: 101627 - protein, 138 aa, Unknown
  Obtained from environmental sample
  DOMAIN (34)...(138): ABC transporter
  misc_feature (1)..(138): Xaa is any amino acid
MELMVEAKNVRKQFKDDAGTFDVLKDATFSVEAGEMVALVGTSGAGKTTLLQILGGLDKCDGGTIAVGGKELDKLAANELAQYRNRRIGFVFQFHHLLPDFTAIENVLIPGLISGKGKQECIARASDLLNIFGCLSGS

SEQ ID NO: 101628 - protein, 156 aa, Unknown
  Obtained from environmental sample
  DOMAIN (3)...(155): MraW methylase family
  misc_feature (1)..(156): Xaa is any amino acid
MMEIAHTPALLEETIQYLAPRGRCEMMIDATMGEGGHSYAFLSRFPDLSIMGIDADPVIQAVARQRLAEFGNRAQFYQGWSQDFFAAYPVGLARPHTVLADLGISLFHYSKSGRGFSFSADAKLDMRLDTSRGSSAAELLMQMSERNIADILYNNA

SEQ ID NO: 101629 - protein, 295 aa, Unknown
  Obtained from environmental sample
  misc_feature (1)..(295): Xaa is any amino acid
MDIAYKGEQRTRSRCGRLDQACAFGSVPVCMHFDGDDITIDKLIIKDYFYWVFADLNAKKNTIKILNDLNKCYPFADTDEEQKVHEALGKINQKIIIRAIEYLQKGDSTKLGKLMSEAQGVFDSMIAPASPAELAAPKLHAFLQDENIKSLTFGGKGVGSQGDGAIQFLAKDEKAQESLCEYLNKNGLTPYKFTLKPCHKIRKAIIPIAGYGTRLYPMTRWIKKEMLPLIDKDGLVKPALLILLEQLNEAGIEEICLVVGSEDDIQYYQNIFKTPIVEEHLNKLPESMRSYEQSI

SEQ ID NO: 101630 - protein, 295 aa, Unknown
  Obtained from environmental sample
  DOMAIN (19)...(66): Regulator of chromosome condensation (RCC1)
  misc_feature (1)..(295): Xaa is any amino acid
RLHPRFSAGEAHSLAIKEDGSLWAWGDNYYGQLGLGDKEDRHVPTQVGTDYDWVSVSAAQGTSMALKSDGSLWGWGLNSQGLLLGDVVVDGYDWDYLPGHETYVLVPTQVGEDNDWAFVSVGSNYTMAIKTDGSLWGWGMDWYGGLGLGVAYTPVPPTRVGEDNDWTAVSVSSDYSMGLKADGSIWVWGNNDHGQLGLGDTEDRYFPTQVGEDSWTAVSTGGFYRSVALMDDGSVWTWGYQWYLGIDVDEDQLVPAQVGMDYDWAVVESGFYRTLAIKTDGSLWVWGGLNDMGGH

SEQ ID NO: 101631 - protein, 131 aa, Unknown
  Obtained from environmental sample
  DOMAIN (9)...(128): Cytidylyltransferase
  misc_feature (1)..(131): Xaa is any amino acid
MSCDLRIGILGGVFDPVHCGHLAVALLAKEHFGLSEVVFVPSGAPPHKSAVVVSPEDRLNMLRLALTGLDWCGVWDGELRRSGYSYTIDTLNELGALHGGAKFYFIIGTDNLPEIAKWRSYEEIISQVTLC

SEQ ID NO: 101632 - protein, 152 aa, Unknown
  Obtained from environmental sample
  DOMAIN (46)...(152): CDP-alcohol phosphatidyltransferase
  misc_feature (1)..(152): Xaa is any amino acid
MKKTALKDRPIGKGIYIIPSLFTCGNMAFGILSIISSIDGHFIQAAWLLIGALACDILDGRIARMTNTTSEFGMQLDSLSDLVSFGVAPGIMMYLLVLNSMGKIGIAIAILYMLCCALRLARFNVLAQSGELYKHFVGLPTPASAGVIISFV

SEQ ID NO: 101633 - protein, 293 aa, Unknown
  Obtained from environmental sample
  DOMAIN (67)...(214): Phosphoribosyl transferase domain
  misc_feature (1)..(293): Xaa is any amino acid
DTPKGAEWMLASESVALDSLSFKLVRDINPGEAVFIDQQGRLWSQDCVSGEAHTPCIFEYVYFARPDSKIDNISVYRARMRMGDRLADKIQRTLPQHDIDVVIPIPDTSRTSALQLAQRLGVKYREGFTKNRYIGRTFIMPGQEQRERSVRRKLNAIDLEFRGKNVLLVDDSIVRGTTSAQIVELAREAGARKVYFASAAPPVRFPNVYGIDMPAPQELVAAGRSEEEVAQLIGADHLIYQDLPDLISACQHEDSRVTEFDTSCFSGHYPTGDITREYLERLKTERSDAAKSR

SEQ ID NO: 101634 - protein, 132 aa, Unknown
  Obtained from environmental sample
  DOMAIN (3)...(132): Colicin V production protein
  misc_feature (1)..(132): Xaa is any amino acid
MNTLDWFVLIAVGISALHGAFRGCIKETTHILAWLLGLFVAWHFGRFLEPALGGYLATETLRMWAARAIVVLVVLAAGAVIGTVVSHHVKPELPEGMDGILGVGIGAARGVMVLGVLVLLGQLLRLDGEAWW

SEQ ID NO: 101635 - protein, 272 aa, Unknown
  Obtained from environmental sample
  misc_feature (1)..(272): Xaa is any amino acid
VDITHGTNYAAVTGLKIGEYSIAKGYQSTLAVTSVTGKKYGDAAFQLATTGGNGSGAVNYTLVSGTAATVTSGGLVTITGAGNIVVTATKASDANYNAVTSAQLTISIAKGDQSTLTMTSVTGKKYGDVAFQLATTGGSGSGAVTYTLVSGSAATVTSDGLVTITGVGDIIVTATKASDANYNAATSAQLTISIAKGDQSTLTVTSVTGKKYGDAAFQLASSGGSGSGAVTYTLVSGTAATATSGGLITIASAGDIVVTATKASDANYNAVT

SEQ ID NO: 101636 - protein, 148 aa, Unknown
  Obtained from environmental sample
  DOMAIN (12)...(143): DNA/RNA non-specific endonuclease
  misc_feature (1)..(148): Xaa is any amino acid
PYKERAEATGVKRPSTTFTQDRDKGVLQRLLLQRGYSLPHHRDYTNSGFDRGHMAPNADFNDTAENALMTFFIANIWPQTPSLNRVDWLKTENETRRLASLYSKVKVIIIVDEFKMEKVGNIAVPSCFKRRVYDLNTGNLIYEINVNQ

SEQ ID NO: 101637 - protein, 133 aa, Unknown
  Obtained from environmental sample
  misc_feature (1)..(133): Xaa is any amino acid
SIRTSFDWISRDEAEVDTYVNDPISGCLCSAGFYRDLAIGLSQIHRPEAMARIRQDMPIYIFSGTADPVGEMGASPTALVNAYRSLGVKDLEFVLYPGARHETLNETNRDEVMNNLLSWICRHAGSGQVTEKE

SEQ ID NO: 101638 - protein, 68 aa, Unknown
  Obtained from environmental sample
  DOMAIN (3)...(63): GTPase of unknown function
  misc_feature (1)..(68): Xaa is any amino acid
MGLTAGIIGLPNVGKSTIFNALCSGSGRAEAANYPFCTIDPNHGIVPVPDERLARITAVIPTDKIVPA

SEQ ID NO: 101639 - protein, 81 aa, Unknown
  Obtained from environmental sample
  misc_feature (1)..(81): Xaa is any amino acid
MDTITVCMGSSCFGKGNSANAEFVTRFIEEHNLSDSVEVSGCLCSNACARGPNIRINDKLISGISEQTLADIIVKELGLQL

SEQ ID NO: 101640 - protein, 260 aa, Unknown
  Obtained from environmental sample
  DOMAIN (2)...(249): Squalene/phytoene synthase
  misc_feature (1)..(260): Xaa is any amino acid
TALPAKKRAALLRALGRALADDAHTDEALRALSLAAPGIQATPAEKELLDNAAALFARLAERNAGSASRAGVLRHASEMAYGMAECVTDDPLGAIQSRADLDRYCHYVAGTVGAMLTELFVAPPPAFSRIFPRKRETIMRANMEAFARGLQLVNIIKDCCKDFAAGRCFIPAEVIRARHPAPNYTTDLAHAEFFSEGNDEKRRAALKPLLAAAAEDLDRAVIYTRALPRRMRRARLFCVLPIALARATLNLLSAPPKPGS

SEQ ID NO: 101641 - protein, 292 aa, Unknown
  Obtained from environmental sample
  misc_feature (1)..(292): Xaa is any amino acid
KVFERGGFDCVIGNPPYIEFKQLDAKLKIHLERCYQSARGKYDIYIPFIEKSIQLLNPNGVSSFIVPSMFTKRDYGRFIRQYITRSASIQAMTYFGDFQVFRGVTVFPLIFFFSKRKTDTAQITVFPAQKNLTHEKVARALNPAPFNISDIAETADIAAAHPGAVSRVYRVRADSFGEDAWIAADDAAAALRKKIENNPGVVKLRDIARHIFVGIASGKDEVFYIHEETRRAYNIEKEILFPILKGRDIHKYRAQWGGAYCVYPYDLADNTVIREKEFQSIYPNAYAYLTEK

SEQ ID NO: 101642 - protein, 87 aa, Unknown
  Obtained from environmental sample
  misc_feature (1)..(87): Xaa is any amino acid
YGPNLKRPHADTIKGSKKLVNLKELRAKTDAHEFRIAFIFDPKRKGILLIGGDKKGKNQKKFYKDLIRNAEQIYAAYLEKCIKEKEK

SEQ ID NO: 101643 - protein, 278 aa, Unknown
  Obtained from environmental sample
  DOMAIN (12)...(168): RNA polymerase Rpb1, domain 3
  misc_feature (1)..(278): Xaa is any amino acid
MECWTLMLSAKNLLNPANGKTIVFPSQDMVLGINFLTRIKPSAKGTDRRYTSTEEAVMAVELKVLDWEAKIKVKAPKKIIWSQVGKEEEHHPGGFIETSAGRLVFNEEMPAEIPFINYEMKDKELRALIEYVFKEKGSWITVRMLDAIKTTGYRYATVFGATIGVDDIVVPKEKPAMIEDANKKVEEIQEHWRQGVITQEERYNRVVEVWSKTNEDLANIMMKTLEADREGFNSVYMMANSGARGSRNQIRQLAGMRGLMAKPSGDIIELPIRSNLKK

SEQ ID NO: 101644 - protein, 142 aa, Unknown
  Obtained from environmental sample
  DOMAIN (8)...(130): PIN domain
  misc_feature (1)..(142): Xaa is any amino acid
MSFMRDKLFIDTNIFVYAYINDDMPKHDLSRELLKGNVLVNEIILSVQILNEFYSVMAKYEYSHDEIKSCLNEIIEQTEIAPLRLDTFKLCLFIKEKYGYSWWDSLVLASALENNCKLVYSEDMQHGQIIENSLRITNPFLV

SEQ ID NO: 101645 - protein, 247 aa, Unknown
  Obtained from environmental sample
  misc_feature (1)..(247): Xaa is any amino acid
MYGSMDYYRDGYTVHTTLNLRHQEAADKFMAEGLARANKEFSRSRGRSNVQAERTYIPIVDLLTLSFNLRGIHSTSAAQNEQRSLSRYTKTINPIVDMAALAFGLQDLKVITTEGFSNLKINTEQNVVEGALISIENQTGYITAIVGGSKYDESNQLIRATQGNIQPGSSFKPLYYSAAIDSRKLTAASLIYDIPIVFYNEDGTPYMPLNFRGEWKGSVLLYDALAQSMNVPSLKVLDKIGFDAAIE

SEQ ID NO: 101646 - protein, 283 aa, Unknown
  Obtained from environmental sample
  misc_feature (1)..(283): Xaa is any amino acid
INQLERTATDLQNRIADFLRQRDNDILYAAGIDISEASYRHFMKYKTGKIIKQRAWKLAIDGKSWIPPAPLEKGPYSLSTNPENDSGYRNRPSDGWETEDRPLYLEMTYIDLAGNETVKVTTSRIVDSHLKNVSNRLNTFVKAETYFGEVKKLKAGEIYVSEVIGEYVGSRLIGMYTPDSAAERGLLFRPAEEAYAGRENPNGRRFKGLIRWATPVVRRGRITGYVTLALDHDHIMEFVDHITPMDERYVEMPSAMEGNYAFIWDYKCRSIAHPRHHSIVGYN

SEQ ID NO: 101647 - protein, 228 aa, Unknown
  Obtained from environmental sample
  DOMAIN (40)...(198): Phosphoglycerate mutase family
  misc_feature (1)..(228): Xaa is any amino acid
TGDERVVLTMNQKEGYEDMLACFQRGGAEECLSDLAKGRRFFLARHGQIRRHEDKVFLGQWDAPLSALGREQAAGIARGLLAFSPKVSRIYSSSLSRAAETARVIAEILKVGDIEYMPEFMEISLGAWDGKLIREIKEMYPAEYERRGNEILTYKFDSKSENFYDLQYRARKGLKKILKQDDSKDFIIVTHAGVIRVALLGLNGRGINPESMAEAEKAGLGSLTVVVK

SEQ ID NO: 101648 - protein, 298 aa, Unknown
  Obtained from environmental sample
  misc_feature (1)..(298): Xaa is any amino acid
ILDMSPYIDKYLPDLKKLLGADPVFTGKDFIYRNADPSTGKIYSIPSYRVALAQRNVFIRKDWCDKLGLPLPTTIEQLHDTLIAFRDKDPGNVGKNRVVPFLTTDVQWGLGTLIRHSVDKNLSERDRWVLSVHERNIMMPGYKEGVRRMNQWYNERLIYQDWPLLKGEDGNNLSKSGVVGGFSGNWDTPWRTDGKLNEDLAINVPGAEYVPIDLDVNNKDMMDKTGLQIFIPAFSKNQIAALQYLNWLAKPENYHFLQVGTEGVNHVLENGVPRVQGRPAGDPWVQNSSLNIDMTMPM

SEQ ID NO: 101649 - protein, 105 aa, Unknown
  Obtained from environmental sample
  misc_feature (1)..(105): Xaa is any amino acid
DEFGLEGPESRVDFILDHLPPQIELINHEVGDIIAGSTTVRGKVTEPVGIQSLEISKDGGETFVPLRHSAGLKKGDPARYFSFSIPSKKLEDGAMVYYIRAINKP

SEQ ID NO: 101650 - protein, 154 aa, Unknown
  Obtained from environmental sample
  DOMAIN (1)...(152): Domain of unknown function (DUF323)
  misc_feature (1)..(154): Xaa is any amino acid
ADSCLSIEGNKVTWNRSANGYRLPTEAEWEYACRAGTQTPFYTGDKLDEAGWYRGNTRNMETLARSPFPVGLKKPNDFGLYDMHGNVLEWCWDFFAPYTAGEQVDPTGPATGDRRVYRGGCWDFEELNCRSAYRFRQHVNFKFFYNGFRVARSL

SEQ ID NO: 101651 - protein, 77 aa, Unknown
  Obtained from environmental sample
  misc_feature (1)..(77): Xaa is any amino acid
MASKKDRINELEALIQRYQASYYNGEAEISDGEFDLLWDELKNLAPQSEVLKKVGSGPDTDGFQKARHLIPMGSQDK

SEQ ID NO: 101652 - protein, 116 aa, Unknown
  Obtained from environmental sample
  misc_feature (1)..(116): Xaa is any amino acid
MLGFAIGASPLGAWIAVRGEPALFPAMLGIILAFWMAGFDIIYASQDMESDKALGLHSIPAKFGIEKSMRISLFCHIVMLLLAVFAGIHWNLGLPWLISFAVIFIALLYMHLLENQ

SEQ ID NO: 101653 - protein, 274 aa, Unknown
  Obtained from environmental sample
  misc_feature (1)..(274): Xaa is any amino acid
LLLATSILLQASQTEVSKLLADIIHDNGTLSEATKAELASGVAFLAENIDNVNANIKRQDSTAKVPTSDDINKIVEKIDGSSSPSGGSSSSGGNIIGLSSSGVSSGGGYSSSSGGVSTPSSSSSVCTAADNTNTKYCSNGTMKQYGSMTDKGGQTYKTVVIGNQTWMAENLNYDIPDNSTDVCYGNEPENCDTYGRLYNWVVATNYGVCPDGWHIPSEADWDALMTAVGGSSTAGTKLKATSGWDSIFEMGENGTDDFGFAALPSGRYGYNEFF

SEQ ID NO: 101654 - protein, 214 aa, Unknown
  Obtained from environmental sample
  misc_feature (1)..(214): Xaa is any amino acid
MIPTIKKTALVHFGFKTNLTAILFGIFFILLLCGIAGCDKNDDGKKDNEGEKTEENNENRITIKNKEFTVNGKRIWINGANTPWNKWNDFGGSYNDAWWDSHFEILSKAGINAVRVWINCNNDQGAVVIDDSGIVSGVSEKHWTDLDKFFITAQKNKIFIMATLLSFDHFKNNGSRPTALKWRAMLQSDEACASFVKNYTIPFVNRTGTIRGSG

SEQ ID NO: 101655 - protein, 54 aa, Unknown
  Obtained from environmental sample
  misc_feature (1)..(54): Xaa is any amino acid
DHGKIASLKRFKDDAREVAAGYECGIGLEGFDDIHVGDMFEAIETIEIARKLNS

SEQ ID NO: 101656 - protein, 107 aa, Unknown
  Obtained from environmental sample
  misc_feature (1)..(107): Xaa is any amino acid
MAKNTQTSLRNLVVYSVYIRNYSEEGTFKALERDLDRIRALGTDILWLLPIHPIGKKNRKGSLGSPYAIQDYRKVNPEYGTYEDFVSLVNKIHGQGMKCIIDVVYNH

SEQ ID NO: 101657 - protein, 286 aa, Unknown
  Obtained from environmental sample
  misc_feature (1)..(286): Xaa is any amino acid
AQNHPVTCELEDPRGRPVINRTYTTSVDGFYALAAATASDAPTGDWTARVRVGGKTFNKNVKIETVMPNRLKIDLDFGANEFIKSGSHKIPLESQWLYGAPASGLKADISVTYSDKETTFNSYTDYSFRDPSRRVSTERQEIWSGSLDGAGKALVTMNFNPGSAVPGKVTTRFLTRVFEPSGAASSEQVSREYSPFSRYVGIKLPKGDAARGMLLTDTDHKAEIVLLDEDGKPFQGNVELDCAIYKIRWRWWWEKGDEESAEFASSLSRSAISQQTVTAANGKATF

SEQ ID NO: 101658 - protein, 281 aa, Unknown
  Obtained from environmental sample
  DOMAIN (1)...(278): DegT/DnrJ/EryC1/StrS aminotransferase family
  misc_feature (1)..(281): Xaa is any amino acid
VPVFVDIREDTLNLDETLLESAITPRTKAVVPVHYAGVGCEMDAIMEIAERHGLHVVEDAAQGVMASYKGRALGSIGCLGALSFHETKNVISGEGGALLVNNPEMTQRAEIIREKGTDRSRFFRGEVDKYTWQEVGSSFLPGELIAAFLYAQFEEAETITAARLASWERYHTLLEDLENAELLRRPIVPEHCRHNAHMYYILLAPGIDRQTVLSCLKSRGVYAVFHYVPLHSSPGGRQYGRVQGNMRNTDSISSRLIRLPLWVGLVPEQQEHVVAALKSAM

SEQ ID NO: 101659 - protein, 261 aa, Unknown
  Obtained from environmental sample
  misc_feature (1)..(261): Xaa is any amino acid
EHQHREIGGDQIEQWEGEKRTLEGQRVERVRKRDQAAAACGELGWTLGGTPQGFAELVGRAREEIEKREDRSKATRDELLLQAGKKKEAEDAFVIARKEVRALESQPSNIPADMLDLRNKIALAIGVSVTALPFAGELIEVKQDESPWQGAIERVLRGFALSLLVDERHYSALSNHINSTNLGQRLVYYRTGRVESWQEKPVPSDSMVFKLNIKDGDYAEWLKAELRQRFNYECVESVQAFRAADRALTREGQVNTAKPVI

SEQ ID NO: 101660 - protein, 289 aa, Unknown
  Obtained from environmental sample
  misc_feature (1)..(289): Xaa is any amino acid
IMAYSCAEQVPLSAAWRQKRLGFTLAEVEQRLSDASQAQRAGLEQFRNRLQDAMDALAGCIDAGITFDALGISALFLDEAHNYKNIPLDTRMQHIRGVNPAGSKKCADMLDRVQAVRDAGGIAVLSTGTPIANSFTDVYTLQQYLQPGALRFLGLDGFDDWANNFAESRDSFEIDVDTQRFRTVTRFARFHNLPELSSLLGQVAEFSSESSSAVPQCVERQDQLVAKTSDLADYLESLCKRVDQVRAGRVPAGTDNMLKITVDGRKAALDLRLVQPQSVAAAPYQLSIF

SEQ ID NO: 101661 - protein, 245 aa, Unknown
  Obtained from environmental sample
  misc_feature (1)..(245): Xaa is any amino acid
MPKVEQRIRRYLNLLEKNACRKIADLEFKTHEKEDARFRFRAVYNAPLSGNPLFLCVTPDEDSLAFIDGRPAGAFDMYHNEIRIDADGKEHTLHVESYSGGCLLERRRAIHSLFYDIRALYETAKIADPNSLRKAQIMKGLSIALNGISLNADGEELEKQAAGAAQTLAPLLALKNGPSAPAVHLVGHARIDHASNIAETGRKAARTFANMLEFIKEYPEFIFLQSQPCQLEIVKKEYPDIFTAV

SEQ ID NO: 101662 - protein, 314 aa, Unknown
  Obtained from environmental sample
  DOMAIN (1)...(314): Periplasmic solute binding protein family
  misc_feature (1)..(314): Xaa is any amino acid
ITFAAVLSAVNAKDKINVTTTIFPPYDFVRQIAKDRVNLSMLLPPGSESHSFEPSPRDIINVQNSDIFIHIGGEGDAWVDRILKSMNTRNKKILALMDTVDVVEEETVEGMEEEQEPVERGRYIARFFAFITGRSQKSQVKEIEYDEHVWTSPRNAILIVQRITNLLCEADSDNASFYRQNASTYIKSLEEIDEEFTKIVAGAKRKTIVFGDRFPFRYFANAYGLNYFAAFPGCSTETEPSVATVAFLINKIRDEKIPVVFHIELSNERMADTISMETGAKKLLSHACHNVSKRDFEAGLGYLDFMRPYAENLR

SEQ ID NO: 101663 - protein, 268 aa, Unknown
  Obtained from environmental sample
  misc_feature (1)..(268): Xaa is any amino acid
GITVLALTDHDTLGGLKEAQSEADALGVRFIPGIEISINWKRAPGVCGLGRGGEMHLLGLGIKAPSPAFLERIAELSRRREERNLIILDNMNALGIEASLDDIRAEAALSPNHAGGNLSIGRPHFANFLVKKRIVRNRDQAFARYLKPGKPLYAPKAGLPFEQAAAIIRESGGIPILAHPMSLYVSWGCLPDLIKVLKSQGLMGIEAWHPIAKAKDCRRLEELGKSLGLYITEGSDFHGTNRLGRSLGFSNKQRQISDAVLEAIPELL

SEQ ID NO: 101664 - protein, 232 aa, Unknown
  Obtained from environmental sample
  misc_feature (1)..(232): Xaa is any amino acid
LILPMKKVCLVVQDKHQDEALAKLREAGIVHLELSKHAPENFGSVMERKTQTENAIGLIRQFKAPKVKPKPQTGSAWERRRDTGPRRGRRTSDLLGVEEQEPYSADAVNAPDRPELVRLMNNLANDRKNLEDRIAFLGREIIRIKAWGEFDPDTLKALVSNGIAIYPYELSPEIFKNIPKDVRYIKVGEDKAAVRLLVLDKEIPDAPSFKLPEKSLSKIETELAELTNKINA

SEQ ID NO: 101665 - protein, 240 aa, Unknown
  Obtained from environmental sample
  DOMAIN (72)...(239): BadF/BadG/BcrA/BcrD ATPase family
  misc_feature (1)..(240): Xaa is any amino acid
MFADQSKSITPQAVLTSLSMYREIVTENTSADTINFFNTETERNAFIARHKILSINKDKIDKKRGETLRVYLGIDAGSTTTKFVLIDEDENVVDCSYSPNKGEPLKVIKQSMLEMYEKYQKAGVNLEVIALGTTGYGELLFDKALGADFHTVETVAHAAAAQKYIPGVSFILDIGGQDMKAINISNDIVTNITVNEACSSGCGSFLETFATNLKIPVDKIAETALTQKIPLVWAAAVTVF

SEQ ID NO: 101666 - protein, 259 aa, Unknown
  Obtained from environmental sample
  misc_feature (1)..(259): Xaa is any amino acid
VNKRPALELPGSHPRPNVKAEDILFFNGLGDAVAKVFGFLRREARVLGPSPAYSTLSSAEAAHSGYEHLTYRLDPQHDWMPDMNDVELKVKYNDSIAGILLINPDNPTGAVYPVEVLLEFVRIARNYGLFIICDETYANIVYGGAKTAALSQIVGDVPALAMRSISKEIPWPGARCGWTEIYNRRADSRFDAYIKSLLDSKRLEVCSTSLPQLCIPDILGDSRYPKHLETRAAMFEKRADEVEKAFANVSGIRIKKPSG

SEQ ID NO: 101667 - protein, 278 aa, Unknown
  Obtained from environmental sample
  misc_feature (1)..(278): Xaa is any amino acid
MGGIIDKTKTKFGKARPWLLWMAGPFALASFLLFAVPRDWSDTGKIIYAFITYNLMSTIVYTAINLSYGVMNAMMTSNLKDRASLNIYRMVGALFMGIAANLVVIPLVRLFGDGTETNPRGWSLTFLALGILSACLFLLCFLGTKERIHTEVKNKNDTSLIKSVPMLFKNKFWVICLCANLISGTTMGSMSASAYFAQYYLGNVEYAGTLNMAMMLPMFIGLPLSGPILNRFGKRNTILAGFSFGVLGYIIPLLNLTSYPLAMVGMLIRGISMAPMMA

SEQ ID NO: 101668 - protein, 193 aa, Unknown
  Obtained from environmental sample
  DOMAIN (3)...(174): Thiamine pyrophosphate enzyme, N-terminal TPP binding domain
  misc_feature (1)..(193): Xaa is any amino acid
MKLSGARISIETLLAHGIDTVFGYPGAAVLALYDELEKSADKIKHILTAHEQGAVHAADGYARVSGKTGVVFATSGPGATNLVTGIANAYLDSVPLLAITGNVALSLLGKDSFQEVDIVGITQPVVKHSFVVHSVDRLEFTLNEAFRVANSGRRGPVLVDIPKSVQSDICEYTGIPPSSEKEPPLSFDIEQIV

SEQ ID NO: 101669 - protein, 258 aa, Unknown
  Obtained from environmental sample
  DOMAIN (141)...(245): Biotin and Thiamin Synthesis associated domain
  misc_feature (1)..(258): Xaa is any amino acid
ERIAATGLRHILMLTGESRRAAPAEYLCGCVSVLREYFSSISIEVYPLTEREYSELVAAGADGLTIYQETYDRAAYASLHEGGPKADFEHRLLAPERGCAAGMRSATVGALLGLAQPLRDAFFSGLHARYIAERHPSVEVSASFPRLRPQAGEFEPNFTVDDRTFVQYMTAFRLFMPSAGITVSTRESAAFRDAILPLGPTKMSAGVSTAVGESSGKTSDAQFEIADGRSVDEMRKNLLSKGFQPVLVDWNYILCREC

SEQ ID NO: 101670 - protein, 153 aa, Unknown
  Obtained from environmental sample
  misc_feature (1)..(153): Xaa is any amino acid
FFGGRKRNENKLWAKIFKNKAVSSLFTLLPAYLLAIMGYQSIWALFGAANQLLAALTLIACTLFFKKTKRVFSILIIPTVIMLAVTYSSLSISIYKKIMLLVNGKFDLAVDGIQAGIAVLLLVLGILVAFACAKKLLEKDELEKETEENYIVE

SEQ ID NO: 101671 - protein, 278 aa, Unknown
  Obtained from environmental sample
  misc_feature (1)..(278): Xaa is any amino acid
VGLGKTITATAVAKMFEDDFNLETLIICPPNLIDMWKDYRHKYQLRAEIKSLGEVQFKLKSERRYRIVIIDESHNLRNRDGKRYRAISEYLALNNSKVIMLTATPYNKSYLDLSNQLRLFLNENQNLGITPERYIKEIGGKIQFEAKHQVNENTLAAFEKSDYSDDWAELMRFFLVRRTRSFIKANYSKKDEKTGRMYIEFAPNDEGVIEKSFFPDRIPAKVEYSFNKEDNDDQYARLYSADVVNIINELLLPRYGIGQDIYENKTNIKNIKQEEEKI

SEQ ID NO: 101672 - protein, 276 aa, Unknown
  Obtained from environmental sample
  DOMAIN (30)...(276): CorA-like Mg2+ transporter protein
  misc_feature (1)..(276): Xaa is any amino acid
MDLSIISYDSTSAQTNHLSNIEELNQYKDDSKISWINISGLKDIDSIKQLGEKFDIHPLSVEDILHTEQPPKVEIFENYRYLSIKTIQREKRFQHRDENKPAALFGKKNDQDMNPDEFLIDQISVVVMKNVLITFQEMHGDTFNDIRKKILGNIGVIRKKGTDYLAYVIIDAVVDEYFLTINHLEEDIENYEERSAKTNDEKFIEEIQDTKKYLSQIKRIISSLKDVINKITHHENFFQADELKPFLQDLNENINHALITVENYREWLSNIMDVNL

SEQ ID NO: 101673 - protein, 282 aa, Unknown
  Obtained from environmental sample
  misc_feature (1)..(282): Xaa is any amino acid
DKARSPKLATRLEAIRALEKLQRLTEKAEQALIDDCLNNPFTTAYISARILGKHSCKKAVPFLRKFVSSSDYMLAGEAMIALAKMKDEEFRPDIEKIIMQTNNPRLKIMGAEALGIFCNAGSLLCLIDILRNAEKQLYLRDETVLAMAEILGTQRKFYPVLVRYAADNSLAVTLGIDEAEAAYEYVTSILSKKKKLLKNNITAVTSAAEGFLNAVKGYVKDSNGAELSRWILELPDNSKSVIKPVLSEAVVDGDLSIYDCLRLLIIHWAAQELRNWAVKGNE

SEQ ID NO: 101674 - protein, 290 aa, Unknown
  Obtained from environmental sample
  misc_feature (1)..(290): Xaa is any amino acid
KLILRLNCANTAYISRKIDNDLLLWTRESNRKPVLLRGARQVGKSSAVRHLAEQFEYFLEINFELNSEARDLFAKGDLSPFKLCQELAAIYQTPIIPGKTLLFFDEIQSSVPAISSLRFFYEEYNELHVIAAGSLLEFAFQEIPSFGVGRIRSMFMYPMSFSEFLIACNHHLLLQTIQKADCKNPLSEPVHKKALELLKKFLIIGGMPEVVSVFVNDNDLLSCQRVLDDLVISLRSDFAKYKKRVSTSQLSVVFDSVTAQMGKKFVYNNISNDYTGRQLKEGMELLIMSG

SEQ ID NO: 101675 - protein, 87 aa, Unknown
  Obtained from environmental sample
  misc_feature (1)..(87): Xaa is any amino acid
DLWYYPNQEITWPSRLPNGMTLTADEATRAGELQASIATFVDEAAIQFITGQRGFNTWDAYVARVNAMGVPELLRIYQAAYDRYLAR

SEQ ID NO: 101676 - protein, 281 aa, Unknown
  Obtained from environmental sample
  DOMAIN (196)...(229): Tetratricopeptide repeat
  misc_feature (1)..(281): Xaa is any amino acid
MVEKVQQVTGLQLIPKKDTTACELPPPPDIPELAEEKSENLADTAETDDTIETAKVTDATEIDKPDMDFQSEESTSEVSIQGISRMFLENPKLASRLGHLLLEAGYPNESVYILKNGVSLSSAPISVLVDLAYGYFYSKRFETAMNELETALGKYPSNVDLLTAKASISGQNPDTSQRSSAESMFKAILKKSPEFAEANYQFGRYIMQRGDFKKSQEYLEKAVKVEPYNSRYLARLGMAEFYLKRDSNAESLYKKGAENKPLRCQHLVQPRRTLPQQSKRK

SEQ ID NO: 101677 - protein, 279 aa, Unknown
  Obtained from environmental sample
  DOMAIN (1)...(106): RNA polymerase Rpb1, domain 1
  misc_feature (1)..(279): Xaa is any amino acid
MILEVIPVLPPELRPLVPLDGGRFATSDLNDLYRRVINRNNRLKKLLELRAPEVIVRNEKRMLQEAADALFENGKRGRLLRGVSNRPLKSLSDALKGKQGRFRQNLLGKRVDYSGRSVIVVGPDLKLHQCGLPKKMALELFKPFIFNRLEHKGHAATIRQAKEMVEQGVPEVWDVLDDVIKNHPVLLNRAPTLHRLGIQAFQPTLVEGKAIRLHPLVCTAFNADFDGDQMAVHIPLSPMAQIEAKVLMMSTQNILNPANGRPNVVPSQDIVLGAYYLTK

SEQ ID NO: 101678 - protein, 266 aa, Unknown
  Obtained from environmental sample
  misc_feature (1)..(266): Xaa is any amino acid
LWGDTVSAATDGGGNFVLACRAADWTVTAEKPGFGASASKRVTLSLGQNRDFGAISLNRNPAALSGVVRNSVGEPMVAARVRVLRDGVLVDELASTPQNGAYVFYLNPGTYTVTAERPGFAMFSRSVFVTGTMSQNITLKEGAVLVSGVITGSAWVAGAGSGGAYVNAPITSARVTFAESGVAAPDTFTVTGDPVFGKFSASLPVGRVYDVTVAAPGFGPSEAGRRLTTDAAGEELSKTYADTLYALASIKGRVTDLPDDLQADVI

SEQ ID NO: 101679 - protein, 72 aa, Unknown
  Obtained from environmental sample
  misc_feature (1)..(72): Xaa is any amino acid
MFSKLIGVLAAVFEFQDKNEARSWFNRLRQKFLDYNGSEWKSERFEKLEAEIAKALSEQSKGIDKAAEKYLA

SEQ ID NO: 101680 - protein, 296 aa, Unknown
  Obtained from environmental sample
  misc_feature (1)..(296): Xaa is any amino acid
KAITALGEYGVKVKVLTGDNDSVTRTVCQSVGLDAGHILLGSDIESMSDEALKKTVDEVDVFAKLSPSQKARIVTALRNDGHTVGFMGDGINDAAAMRAADVGISVDTAVDIAKESANIILLEKDLMVLEEGVIEGRKIYANIIKYIKMTASSNFGNMFSVLAASAFLPFLPMLPIHILVLNLIYDISCVAIPWDNVDSEYLRKPRKWDASSISRFMLWIGPTSSVFDIITYCLLFFIICPRFAGGPYANLDADAKILFMMLFHSGWFVESLWSQTLVIHMIRTPKIPLYRAGPHP

SEQ ID NO: 101681 - protein, 296 aa, Unknown
  Obtained from environmental sample
  misc_feature (1)..(296): Xaa is any amino acid
MNGSSAGTFAVLVSGDPGFFSAASGLAKDLAQYNPRIIPGLSSLSAFFAKLGKPWDQATLMSSHGRDVRVAAGEFIGLVRRNRETFCLAGSNVSFLGEALCETGFGAIAVHVGENLGSDQERIYALDGEALSRGVFPELTVLLAVNEHPDDRVLYGIPDSAFIRAEGIPMTKSAVRSLCLSQLNLGSGDTAWDIGAGTGSVTMEMALAAFRGRIFAVEKEAAAIGLIKENCRRFHVGNITAVQAEAPAVLAELPPPDAVFIGGSGGGENLRGIIAAVRDRNPKARIVATAITIETA

SEQ ID NO: 101682 - protein, 221 aa, Unknown
  Obtained from environmental sample
  DOMAIN (1)...(205): Phosphomethylpyrimidine kinase
  misc_feature (1)..(221): Xaa is any amino acid
DIIEKQIDAIFQDIPPNAIKIGMLSCVQTMTAVAKKLREWKLRIPSQTHSVVIDPVMYAKNGAPLMETEAISTLMKEILPLGDLITPNIPEAEKISGISVKTRDDMREAAKRIHATGCRAVVVKGGHIEGDATDILFDGNAFHEYPSPRIDTKHTHGTGCTFSSAIASNLALGLPVYKAVEDAKAYINTAITHAPGLGKGNGPTHHFYMIYQNYFKEKENG

SEQ ID NO: 101683 - protein, 203 aa, Unknown
  Obtained from environmental sample
  DOMAIN (102)...(203): Glycosyl hydrolase family 20, catalytic domain
  misc_feature (1)..(203): Xaa is any amino acid
MALSIIPKPVSIKYTEGVYKSELETLTGSPPVIKKEGNPLGTGRQNHEAYKLTISKENITLQAESPAGMFNGEQTLRQLVLSEYKSGLLTLPCAEITDYPHFPWRGFMLDCSRYFYSVPFIKKILDAISLHHINRFHWHLTDDQGWRLPVAEYPLLTEIGSRRQDRRFPWINYKCEFYSRKEIKEVVDYAKCRNIEIIPEVDL

SEQ ID NO: 101684 - protein, 145 aa, Unknown
  Obtained from environmental sample
  DOMAIN (19)...(145): Integral membrane protein DUF6
  misc_feature (1)..(145): Xaa is any amino acid
MSLLYNVFMWIIFALLSAFFAALTSILAKIGIQNINSNLATAIRTVVVLIMSWAIVLFTGKQNDIINIGHKNLLFLILSGVATGLSWLCYYRALQIGEASKVIPIDKFSLVIGMVMAFVVLKETITVKTIIGGVFITIGTFVLIF

SEQ ID NO: 101685 - protein, 141 aa, Unknown
  Obtained from environmental sample
  DOMAIN (56)...(141): Ferredoxin-fold anticodon binding domain
  misc_feature (1)..(141): Xaa is any amino acid
WQKIIGSCGELHPIVQNKFDLKFNTFVCEIDLSILESAFLAPVSFKEFSKQMIIERDVSIEAEEAITHAELLSKFKGFNPKYLTSIELMSIYQGDKIAAGKKNLLYRFYYQAPDRTLTDDEINAIHTKLREKIAGAGLVLR

SEQ ID NO: 101686 - protein, 66 aa, Unknown
  Obtained from environmental sample
  misc_feature (1)..(66): Xaa is any amino acid
MDNLKNVLYIFSGLPGSGKTTLAKGIAKLIEAVYIRIDTIEQGIRDLCNFNVQAEGYRLAYRIITD

SEQ ID NO: 101687 - protein, 206 aa, Unknown
  Obtained from environmental sample
  misc_feature (1)..(206): Xaa is any amino acid
TMQDNASVSGNTGGGVYVVGNYGPVGAGTFIMQGGTISGNTASFNGGGVYGDGGFTKTGGTIYGDDADQKLRNTAIGMFGHAVYSGRWRNVTAGPTMNTGSSGFWLNDGDVVTFPSGFANERHRPWVRSNFNNSLTITENTMKSSSSNYVWILQSVSGDRYTLKRADAANTMTLTIRLDGNNLVISGDSGSGENNWNGTWHIVIAG

SEQ ID NO: 101688 - protein, 287 aa, Unknown
  Obtained from environmental sample
  DOMAIN (1)...(71): Bacterial Ig-like domain (group 2)
  misc_feature (1)..(287): Xaa is any amino acid
DAIEVYLGDAAPRLTATVEPANATNKAVTWSSSNENVATVASNGQLTIVDAGTAIITVTTVDQGKTVSCSVEVKEADANTVRVTGVTLNKESASLALGGTETLTATIEPPDATNKTVTWNSSDTSVARVNNGVVTALSGGVTTITVTTRDGGHTAECEITVQVPVNNVILSQISLMMNEGNEITLTATVIPANATNKDVTWKSSDENVATVDDGLVYAAGPGNATITVTTVDGNKTATCAVEVRDLGYIESDGTGTLKSLGKAAEGAQTYYIDFQNGNDANDGKTPL

SEQ ID NO: 101689 - protein, 228 aa, Unknown
  Obtained from environmental sample
  DOMAIN (82)...(172): Histidine kinase
  misc_feature (1)..(228): Xaa is any amino acid
VPANAEFPFKFRQEGRRYRIDRLPLGNGTFALYNQTDITNIAVDDKRILYTVLITVIMSLLAAAGLALTLMKEQYRQQKNTEIALLQTQINPHFLYNTLDSIQWMAKIQNNDTIAGIINRFTSLLRSIAVRTDSGDINSIKIPLAEELLIIEDYSELMSLRYMGSFEVINRIPESFLDCLIPKFTLQPLVENAIIHGITPSGKFGAITLNAAAENGFLNITVEDSGIG

SEQ ID NO: 101690 - protein, 85 aa, Unknown
  Obtained from environmental sample
  misc_feature (1)..(85): Xaa is any amino acid
FGETDSIRCGRCDYCIERKKNELSDVEFDRMTEIIKPLLQWKPAPLEDIRNALAMFSERKVLLFLQWLLDNDKVKQNGDGEYGWR

SEQ ID NO: 101691 - protein, 282 aa, Unknown
  Obtained from environmental sample
  DOMAIN (1)...(203): Calcineurin-like phosphoesterase
  misc_feature (1)..(282): Xaa is any amino acid
NKIIDAKVDFVLVCGDLTKDGELINHNIVAQKLKMFSAAGIPAFVVPGNHDINNPDAVKFNGDTTEPVPSINADDFARIYKDFGFNSAIKRDDDSLSYVTEPIEGLWLLALDACRYRENKPGKHEIVSGKISQRTVDWITSVLREAADRNIPVLAMMHHGAVEHWIGQSKLHPDYLIQDYVNFGNFLASWNVRFIFTGHYHAQDVTRGEYNGKTIHDIETGSLVTAPCPVRYVNIDDNSLNIRTETIVDKLHPGTDFAPNGIAFVKKTVMLENGSVLKKYGV

SEQ ID NO: 101692 - protein, 281 aa, Unknown
  Obtained from environmental sample
  DOMAIN (205)...(274): Helicase conserved C-terminal domain
  misc_feature (1)..(281): Xaa is any amino acid
IGVTQPRRIAAVSVSEFIARQMETPLGGLVGYKMRFEDRTSPQTQIKIMTDGMLLQELKLDPWLSKYNVIVVDEAHERSLNIDFTLGLLKRVLESRRDFKVIISSATINAEVFCEYFGGCPVVKIDAQRFPVTLIYDPPVVADIDANGKAAGSDTAMEALLWKIEKIVTRFIGEKREGDILVFLSGEKAIKDCMNRLALCRVGGKLHLLPLYGRLGKEEQERVFETAPKGKTKVVLSTNIAETSVTIEGITAVIDSGLSKLNWYNPNTYTSSLVEAPISKA

SEQ ID NO: 101693 - protein, 60 aa, Unknown
  Obtained from environmental sample
  misc_feature (1)..(60): Xaa is any amino acid
MKEFKPSHLRNMANYKPIKKTVNVRLDADVIEWLQSAGRGYQTRMNSILREAMLHSGALN

SEQ ID NO: 101694 - protein, 276 aa, Unknown
  Obtained from environmental sample
  DOMAIN (1)...(61): Signal transducing histidine kinase, homodimeric domain
  misc_feature (1)..(276): Xaa is any amino acid
VVKVETQKLDGIIDMVGELVIAQSLITSNPSISLFREQKLNKDLAQVTRITSALQRNAMSLRMVPIAATFHKMNRLVRDLAHKFEKDVRLETVGAETEVDRNMVDSLYDPLVHLVRNSLDHGIETPAERQAAGKPPQGVVRLKAHHQSGNVVIEMQDDGRGLDKAKALKKAQDNGLVPPGKTLSDAAIHALVFQPGFSTADQISEISGRGVGMDVVQQSIEKLRGKVEFTSVFGQGSTLTLWLPLTLAIIDGMIIRVGEHRYILPTVFILESFRPL

SEQ ID NO: 101695 - protein, 267 aa, Unknown
  Obtained from environmental sample
  DOMAIN (1)...(50): CheR methyltransferase, all-alpha domain
  misc_feature (1)..(267): Xaa is any amino acid
ITEFVYKTAGINLLEGKKELVRTRLGKRMRQLQMTDFSTYFKHVMGDNTGEEIIFLLDALATNLTSFFREDQHFTFMANTMLPALEAKCRAKGNRRLRIWSAACSSGEEPYTIGIVILEKNPYFGQGGDCKILATDISTKVLGVAQKGLYGPERMKTVPPMLVTKYFKKTSGEKGSTMYQVVPQLRDLIAFRRLNLMDPLPFKNPLDLIFCRNVMIYFDKATIGRLINKYYQILAPGGYLFIGHSESLSGLSHEFKYVKPCIYQKGE

SEQ ID NO: 101696 - protein, 193 aa, Unknown
  Obtained from environmental sample
  misc_feature (1)..(193): Xaa is any amino acid
MDIRRGAPLELPHVLLLINDEGDALLPALGEMAKKSAPVYNTPLMMDSGSIAGWFLDAQEGQPSPALDFIAGKLDAMHRRSVTRYDGNSSPFLFAVGDGNHSLASAKGIWEEYKQAHPDEPFHPCRYALVEIENIYDPAIQFEPIFRVVFDLGIEEICSILSPLPDFSRRSVDTAKELIRLCATPATANCFGI

SEQ ID NO: 101697 - protein, 79 aa, Unknown
  Obtained from environmental sample
  DOMAIN (1)...(60): Global regulator protein family
  misc_feature (1)..(79): Xaa is any amino acid
MLILSRKVNEKVVIGDDITISIIEIRGDQIRIGIDAPKKVKVFRQEVFDAIKAENKAASESASVIPKVDFHGASRQPIN

SEQ ID NO: 101698 - protein, 147 aa, Unknown
  Obtained from environmental sample
  DOMAIN (36)...(142): NADH ubiquinone oxidoreductase, 20 Kd subunit
  misc_feature (1)..(147): Xaa is any amino acid
ITASDPGPQPGDVIPLFRRSLRLRQVSAAGCNACEADCNVLTTPVFDLGRFGIDFVAGPRHADGIAVTGPVSENMRQATLDTFEAVPDPRLVIAVGTCAISGGLFRDSGECHKGVSMLPVDLYIPGCPPHPWSILDGLLALQGRSLR

SEQ ID NO: 101699 - protein, 281 aa, Unknown
  Obtained from environmental sample
  DOMAIN (146)...(281): Competence protein
  misc_feature (1)..(281): Xaa is any amino acid
VAETPAGSKFRAKVIGADDEEAARALKGKTLQCVSKRPVPPFGTITAQGRYNAPRRAAGPFGFDLREHFAVNNISGSFSVSRITDGDGASIKKISENMGIAGQARNDGNPTNTFSINKIPYLLRSRVHDVINTAQTQEARGIFHAAFLGEKEHLPESLNATFRKAGIIHLLAISGFHAALLYSAVFALLSLLHIPGRPKTLIALAALWGYLFLIGFIPSLFRATVMATLLCVSVTLQRKNHIVHTLGIAGFFWLCLSPHSLFAPGFQLSFAATAGIAMLQP

SEQ ID NO: 101700 - protein, 71 aa, Unknown
  Obtained from environmental sample
  misc_feature (1)..(71): Xaa is any amino acid
MVEWIGYLASILIAISITISNNFYFRILNLVGSACFMVYGLFIGSWPVAIINTYGIGINIFHLIKGRKKDN

SEQ ID NO: 101701 - protein, 254 aa, Unknown
  Obtained from environmental sample
  misc_feature (1)..(254): Xaa is any amino acid
MAKERPFYAIINEVTLCESWAESLKIIKNKYPFVKFLCSSSISPEVHEYFFDHPDPKSKIIVLSEKNESNIKYEQECFGTFNEFKYNIKRGVCEIKGLTKDGKLRNTHIIPNIINGYPVKIIASGAFHHRTEIREINLPDSIEYIGDYAFTYCNNLKNINLPERLAYIGDCAFLGSKSLTTINGGNNITYIGNSAFYGTAWIKNNKKDFIVIGKTLYLYKGKQNEIRIPEGIETIGYYSFANSSITKINSGNVS

SEQ ID NO: 101702 - protein, 157 aa, Unknown
  Obtained from environmental sample
  misc_feature (1)..(157): Xaa is any amino acid
MDKVRSMVLQTSPNFTSPFAGIGKDLNELKTEIVRKSIHFLIALSPLMAAINRPATVLFLMAGTLGYTLMEYLRLNGVKVPVISSLTSMSSRSRDIGHFVMGPVTLGFGALLALLLYPSPVASIAIYALAFGDGFASLVGKFFGKWRPAVLCGKSVE

SEQ ID NO: 101703 - protein, 289 aa, Unknown
  Obtained from environmental sample
  misc_feature (1)..(289): Xaa is any amino acid
GVGYSGLFDAEPSIRGGQPGDMMASLDGFYINNPYFWGGGFSIFDPRMVKSAQLSHGVFSSRYGHTISGLLEITSKEPSPTETEFELGLNTSAANFNLSLPLDGKGGILFMGRVTYYDPVILGAKELSHSIPELEPINYIERAPYIRATTVSGNYRFTDNLVLSATGFFGMDGGGVLYLNQERTAKLKSDTTIDFDYVNYQTFLTSSVSWNPRNDMLLKLTAGAGYEDMQLDGNMLYDIHNKYFTDDFPDAFKQGRDKYEYSQDMIIVESDSKYNIQGRVDYDWKLSDN

SEQ ID NO: 101704 - protein, 233 aa, Unknown
  Obtained from environmental sample
  DOMAIN (174)...(220): Bacterial regulatory helix-turn-helix proteins, AraC family
  misc_feature (1)..(233): Xaa is any amino acid
LEENNDKIKSLAKIMLLCANHLSHINPIQKNIKSINTENAEVPLTRQEKQNIEKYACRLDTERMLFACLRRGDKEEGQKILEKLLDILYTEVSGNFPAFRLKALELAVLLSRAVSDPKDIMDNVSLENTNRCMKKIEECTSFEEIKAILAAITDRMSGMIFSFQGVRHFSALKKAERYIWKNYTRKLSLKEIANASGLSAPYLSMVFKEEMGENLSNYLNRLRVEKAGRYAGN

SEQ ID NO: 101705 - protein, 294 aa, Unknown
  Obtained from environmental sample
  misc_feature (1)..(294): Xaa is any amino acid
DNVYIEYYPLPSRGIAIERSFKINGETPFLGADRLNFQRVWGDADDVRRDNQGNEIRPAQVEKPRWESAFFRDSLGYSPEPYKFYLGAGDNVIRLEGINEPVALRAFCLKAPAPAQSYRQYMAEIDTGKYRNTALNFRLKIQGEDAAYRSDPSLYAIYDRSSGATEQPSVARIKLNMIGGQSWRVAGQWIEWDFYVPEDGMYRFTVKGRQNYNRGYVSNRAVIIDGQIPCTDLAAVPFTYNNKWKLVTLRDGEGDMLFPLEHGQHTFRLQAAMGGMGDMLSVMEESVYRLNGIY

SEQ ID NO: 101706 - protein, 55 aa, Unknown
  Obtained from environmental sample
  misc_feature (1)..(55): Xaa is any amino acid
DGKIRYMPTKDAIVQRFVDPNELSFYEQMDICFGRKPQPYVPVVEKYEARVERFM

SEQ ID NO: 101707 - protein, 211 aa, Unknown
  Obtained from environmental sample
  DOMAIN (17)...(177): Glycosyl transferase family 2
  misc_feature (1)..(211): Xaa is any amino acid
MSHNSHNVDWEKDPFFSVITPVYNPAPEALEAAIRSVENQEFPDWELILVDDASTHDDVLPVLRAAFDRDTRIRVIRRAENGHIVAASNDGLKAARGKYIALLDHDDELMPDALQKFYEAIQTNPEADFLYSDERMVHENGFAVASLKPPWSPERLRGQMYITHLSVFSADLMRQLGGFRPGFDGSQDHDLALRAGEVARQNVHIPHVLYN

SEQ ID NO: 101708 - protein, 276 aa, Unknown
  Obtained from environmental sample
  misc_feature (1)..(276): Xaa is any amino acid
KIENYDKEIVSLGKKLNTIEEHFARENTQTLEKATEEIISAAQSTVADLEEGVRTMEREMEERREAADKYDREMEEKLLHSDKQFEKILLEAIDRAGIRADKAEEAAVAKLRDQAQERLTLIKTSFEEKIKSVQDTIKVKLAEIQEQVKSNREEWKAETSAIETRQKTYSADWKKDMQELNLFAKQQQDIWNKDIEELNLFVKQQQDNWNKEIDVLNVLARQQKEQWNRDMQEFTARAQQQAENLGAAIQKQKEELGEAVKIQKEEWEAVSRDTGR

SEQ ID NO: 101709 - protein, 85 aa, Unknown
  Obtained from environmental sample
  misc_feature (1)..(85): Xaa is any amino acid
MRLVIIPQSIRRLIPPVGNEFILILKDTSLVSMIALIDITKATRSIEGSTRSALVYIPAMILYLIITWAFSFVFHKLEKKYSIYE

SEQ ID NO: 101710 - protein, 139 aa, Unknown
  Obtained from environmental sample
  DOMAIN (1)...(120): Crossover junction endodeoxyribonuclease RuvC
  misc_feature (1)..(139): Xaa is any amino acid
TIKTKAGQPRAERLFFIFNFIRSIIEKYKPAQAAMETLYFGKNVTSAIPVAEARGVISVAIAEKGIPLFELTPNAIKQGVVGSARADKEQVQEMVRIILSLKETPKPDHAADALGAAICAANSASYNESSAKITRGSKG

SEQ ID NO: 101711 - protein, 221 aa, Unknown
  Obtained from environmental sample
  misc_feature (1)..(221): Xaa is any amino acid
MLTGWKNAFFHDSFPWKDEHSFSNGIAINNLMALKLFLDSVHIKFCLLKPYFEKGEDYPLLDARELLPPFDYDGWEYSELPAFAMVAFARHLASFSEIFQYDILHAGEGGTPDNRVIASNTHTIAARLPKIFQEDFRKRFGHIDASMLEYYPLLLPYLLKMDRAHVLAFDAMNRFRLTGINASFPCDIDGELRRYGMRIGKFRPGNNDSYERNRMFVYQHL

SEQ ID NO: 101712 - protein, 164 aa, Unknown
  Obtained from environmental sample
  misc_feature (1)..(164): Xaa is any amino acid
FQEQIIFGYNYFVEFLGPTNYLIIWDKLGNSHNFIFYSDAEIAYTSIHIPVSVFRVQWDGHRMGRETGERKIHPHQKPVELYVKILKKYAKPGWHVLDTHMGSGSSAIACHRLGLGMTACEIDPHYFNAAKKRIDAETRKQELFLPELRKFQESHLFEGLKEAL

SEQ ID NO: 101713 - protein, 97 aa, Unknown
  Obtained from environmental sample
  DOMAIN (13)...(65): Helix-turn-helix
  misc_feature (1)..(97): Xaa is any amino acid
MSISVKEMFPIRLKEAREMRKLTQQELGKKSGCRSIAQFEAGFRLPSAENILKIALALNVTTDNLLGMPNYSGYGQGLTNEQVETINCLVKFWKGAV

SEQ ID NO: 101714 - protein, 84 aa, Unknown
  Obtained from environmental sample
  misc_feature (1)..(84): Xaa is any amino acid
MKEVLWSTSVQHGPSGAAKIFIRAAEVADASPAKEKDLIRNVYASRAKQFKSSTEAVRVAVQQRLRQEQHLALAMTERGSRGRA

SEQ ID NO: 101715 - protein, 79 aa, Unknown
  Obtained from environmental sample
  misc_feature (1)..(79): Xaa is any amino acid
MTSLVIRAVDLVQTAANSDEDGTLYVSATADGADMVRICRNFPVSLYEKWLADDFSLDMYLSEIAAYPCTEEPDEEQDE

SEQ ID NO: 101716 - protein, 88 aa, Unknown
  Obtained from environmental sample
  misc_feature (1)..(88): Xaa is any amino acid
VLDAQARGDAAAVAHEFGDHLFSLVEFGRRKGIKAAAALDAAANRFLDRFARMEALARERGLDFKSLSLDDKDELWEAVKTAETRDPA

SEQ ID NO: 101717 - protein, 274 aa, Unknown
  Obtained from environmental sample
  DOMAIN (1)...(163): ABC transporter
  misc_feature (1)..(274): Xaa is any amino acid
YQAEKGSIKKNGKIIHINGPNDAAKSGIGMVHQHFKLVHNFTVLENIILGAETVKYGVLKFENARNQVIELSRRYKLDIDPDALISDITIGMQQRVEILKMLYRENEILIFDEPTAVLTPQEIEELMHIMKNLVAEGKSILFITHKLDEIKAVADRCTVLRKGKYIGTVDVAAVSKEELSEMMVGRKVNLSVEKAEQQPGETVLKTENLTVKSKTHGKALVNNVSFEVRSGEIVCIAGIDGNGQQELVYAITGMLQLDSGRVFLEGRGNTHNGI

SEQ ID NO: 101718 - protein, 181 aa, Unknown
  Obtained from environmental sample
  misc_feature (1)..(181): Xaa is any amino acid
MGLENKRGALAAQVFLGSPADKGGIRPGDFITHVNGKEARNTQQLQMIVGDLKPGDNAKFTVIRDKQTKEIQVRIETRTDQVASDNKKLWPGLVVVPLNDQLKQNMELDKDAKGLVVVQVVDGSPANVIGIKQGDRITAVNGVAVADIAAFYKVLRENTNTELWFGLLRGDAVVESMKFKR

SEQ ID NO: 101719 - protein, 287 aa, Unknown
  Obtained from environmental sample
  misc_feature (1)..(287): Xaa is any amino acid
MGALPPVNEAQGLLKTPSASMPPVSTPPQPSEDSKTRRVAKFLILIGSVHAAKILSELDPQQVEEISKEITTIQGIGPEEAGAVLAEFKALFSPGNIGYSGISSGGVEAARRILYAAYGPEKGEALLNKSVPDSKENIFDFLEEFNPEQLVFLLKDESPAAAALVLARLPPKVTAETLIKFPAALKPEILKRIAHQNEVSPEVLERVAEAIREKARQLGGSSQDIAIDGMQALAAILKQGDYSLGDRIINELETASPDIGKNLKERIYTLDDVLAVFDRPLVAPAAK

SEQ ID NO: 101720 - protein, 294 aa, Unknown
  Obtained from environmental sample
  misc_feature (1)..(294): Xaa is any amino acid
VSHPYRQQLQKIFPAGVEIYSKEQLLNGQNFQNIVSVQEHLSIFVLSYDSLRAKNKDGRLAYRENEKLKDFPVSGVLPDGADETSLVNAINVLNPIVIVDESHHAAGELSIQMLENFNPRFILDLTATPRENSNIIAFVEASELKRANMVKLPLIVFNRNDKKDVMFDAIQLRAQIERQAEEEEASGGKYIRPIVLFQAQPRIKEDTTTFEKLKELLVESGIPKEQIAIKTAVVNDLKNVKLLSRDCAIRYIITVNALKEGWDCPFAYILATLANKTSTVDVEQIVGRILRQPY

SEQ ID NO: 101721 - protein, 225 aa, Unknown
  Obtained from environmental sample
  misc_feature (1)..(225): Xaa is any amino acid
MRNKLFIAGIIIILIFGIIGMGCDGGGSISGGGGSGGSGGGNGGGNGGGSGGGNGTNGGSGNGDYGDGSGSGGSGSGDNGDDGYDNSGSGGSGSSDNNDNRGGSGIIIIGGSGGSGSRSYYTVKFTVTSSDPAGTPVDITYSYPKNNGYNWSAGSSDMNIVRLKTVTTPWENYVSISSKVIGNGVSLQAQTVDNSQNVTLTARIFIDGKQKRVISGQETVFIDWR

SEQ ID NO: 101722 - protein, 221 aa, Unknown
  Obtained from environmental sample
  DOMAIN (7)...(218): alpha/beta hydrolase fold
  misc_feature (1)..(221): Xaa is any amino acid
GLFFKRYKTLTFDFCGYGKSDLPKGIYSDHEDLKVILDKYNVNKTIIVGCSYGGSVALDFVLEYPEYIKKLVLVTPALNGYKYPLKLIIESIKNFRNVRKNGIEKAVELFMNNKYWSYFVPKENSFKEEFKNIFIENKNFYNGNYSKKLIVKPVAIKRLTEININVLLIGSENDSQFNKDVVKILSENIKGIQVCEIKNSGHLPNMEKREEINKIIEEYIK

SEQ ID NO: 101723 - protein, 252 aa, Unknown
  Obtained from environmental sample
  DOMAIN (2)...(252): DAHP synthetase I family
  misc_feature (1)..(252): Xaa is any amino acid
ADTVLELPGADGKKAIIGGNSFAVIAGPCSVESREQITSIARSVKKAGAAFLRGGAFKPRTSPYSFQGMGCEGLDLMLEARKETGLPIVTELMDLSQLELFEEVDVIQVGARNMQNFALLKELGRSRKPILLKRGLASTLTELLMAAEYIMAGGNEKIVLCERGIRGFDNFARNTLDLALIPALKRKSHLPVIVDPSHATGLAWMVPSMSKAAIAAGADGLIIEVHNDPEHALCDGEQSITPEIFASLMESL

SEQ ID NO: 101724 - protein, 274 aa, Unknown
  Obtained from environmental sample
  misc_feature (1)..(274): Xaa is any amino acid
TLSTLSLSVSAEISASVALSISSSLTLSDNAKITGDTVTVTGSTIVTSSRLTMSGNSTVSATVIGTSSNLYLLENAEISAAVTLNTSSSLSLSDNAKITGATVTVTGSTLTMGGNSAVSAAVTLDASSSLSLSDNAKITGATVTVTGSTLTMGGNSAVSAAVTLDASSRLDLLGSAKVNNLTLNATNAYSKSTVTINTGWTGDNTTLTLNSSGSPSHAWDYWENEEVLSGDGVDADSVGKFTLNSFTTTHKIDASGILVQNVYADAKVTLNRER

SEQ ID NO: 101725 - protein, 92 aa, Unknown
  Obtained from environmental sample
  misc_feature (1)..(92): Xaa is any amino acid
ADGSSEQHAGVLKAFVGRILRGEPLAADGREGIHGLTLSNAMHLSSWLDKTISLPLDDNLFLEELNKRRAQSGLKNGSGAVFETGKSYNSGA

SEQ ID NO: 101726 - protein, 281 aa, Unknown
  Obtained from environmental sample
  misc_feature (1)..(281): Xaa is any amino acid
LVAFRQYFMGNTIYTATVTVTANTGYIFPNNVTAKINSKSANIVGNTGTTVTLSYKFAATLNKAIKEIFVSAQPEHLTYNHGDALDLSGLSVKLTYDDNSTEVVALTDFEGKNIFVDPADGDTLSRSTHNNEFVKISLGKHDAYTNKLQINKANGSEVSTPVVTGNTDNLSLRITSPLGPLSNGQLIEYAISAEEDVPTGNWQTGTTFDRLSENTTYFIFARSKENDDYNTGALSVSASVIFYTVNFPLSVEDITDATAGESLPESITISRGNDETIITRT

SEQ ID NO: 101727 - protein, 85 aa, Unknown
  Obtained from environmental sample
  misc_feature (1)..(85): Xaa is any amino acid
MPIIDKRHDVFISYAHKDNPPPESPITKLVALLKETYRDRYNGEEIDVFFDEDELEPSDLWENKLLESLRQSAVMIVILSSEYYN

SEQ ID NO: 101728 - protein, 225 aa, Unknown
  Obtained from environmental sample
  misc_feature (1)..(225): Xaa is any amino acid
MNKPRMNPLPGSRLAAHVGDSLAFTLEHESVRKPGWRAFLRTNLGRGALARHEVMAKAGRREGESLTFAGASWRDIPMKAEEGIWALDITFTEVGFFRAKAYVVDPVGRQLWPNGSDLGISVLPDNLRSGNTIYCAFPRMFGPTRDKRTAADPSREVLYRQMETDGLTVIPKSGTLRDITPQLDHIICTLGCRILHLLPIGPTPTVTAKMGRFGSPYAIQDLTAI

SEQ ID NO: 101729 - protein, 182 aa, Unknown
  Obtained from environmental sample
  DOMAIN (16)...(131): Histidine kinase-, DNA gyrase B-, and HSP90-like ATPase
  misc_feature (1)..(182): Xaa is any amino acid
VFELDIDEALPLKLFGDELRIKQVCYKLVSNAFKFTSSGSITIRVSCTQEKGSLVWLTIDIKDTGIGINEADLERIFSDYGRRDTSAARKASGTGLGLGIAKPLAELMGGTLTDTSEHGKGSVFTLRLRQKVLSSEQIGPERTENLKNFIYSSDTRERNLQLTRVYLPHAKVLVVDDVTVNL

SEQ ID NO: 101730 - protein, 87 aa, Unknown
  Obtained from environmental sample
  misc_feature (1)..(87): Xaa is any amino acid
MGRPVSLEKFVEICLSLQELGAENINIVTGSHAGPVIAFGIKEARKQGLIIPVLWNSSGYQGADTLEILKDFVDVYLPDLKALDAGI

SEQ ID NO: 101731 - protein, 243 aa, Unknown
  Obtained from environmental sample
  misc_feature (1)..(243): Xaa is any amino acid
DSVDNIDTDNANTVVNIDNTVSADNVNTVVNTDNAVSTDNVNTDVNIDDVVSTDVNTVDTDNTVNTIDTNIDTNVNIDTDNGTDVNTNRPSVKPPIKRSLTKKTTVYAAAALIAVLSASYLTIRIISRPSSPKDNNRSVAAAKFFSTPVNPDTADPAATDVSASVNTPTPVPTAPVNNTKPTNAVNSADVNIIDIDTTDVGITDVNTASVNTINTDTADVNTIDINTKAAHPAAAPAPPVTES

SEQ ID NO: 101732 - protein, 261 aa, Unknown
  Obtained from environmental sample
  misc_feature (1)..(261): Xaa is any amino acid
VGHSANVPEILDAGGVEFYYHCRGDEELEVCNWRAPSGASVLMYRDPNVYNGWIRPRYMIQAPSFCKRNNVSDMLLVYGLGDHGGGPTRLDLERLTDMRSWPLFPTIKFSKYHTYFDTIKPLRNSFPVIDRELNFIFSGCYTAQSRIKAANRLAEAALYESEALAALLPEGKIAPELFEEPWRDVLFNQFHDILPGSGVPDTREHARGLFQETLARANTQKGIACYAFADMVDTSAVNGGRGIKEAESEGGGVGYGVEKEL

SEQ ID NO: 101733 - protein, 187 aa, Unknown
  Obtained from environmental sample
  misc_feature (1)..(187): Xaa is any amino acid
MSDRMHMFVPLIAYIALTLCVALWSRRSASSGSSSFLEEYFIGGRTMGGFVLAMTIVATYTSASSFIGGPGIAYTLGLSWVLLAMIQVPTTFLTLGVFGKRFAIVARRTGAVGITDFLRARYGSDLLVLITSAALIVFFMASMLAQFIGGARLFQAMTGYPYIVGLTIFGLTVILYTTVGGYRAVAL

SEQ ID NO: 101734 - protein, 252 aa, Unknown
  Obtained from environmental sample
  misc_feature (1)..(252): Xaa is any amino acid
GSTKISGGEFESDSSYAVRASNLTITGGSFKSTSGSCAVYTIAGLNVSGGQFVSNKSAVYSNGAFKIVGGEFAAGSGYALRGSGAGEIRGGSFKATDGGMALSVASGNVLVTGGAEFVNNSETYPTIQLSGGSVRLADADVTNNNRISRRAVYIASASSRLVLSGPNSPYVIGSIVSRFAGAIIADSSFNRGVNRYALELTGGACVDGAVAVVGGAAHYNGFDYSDAYHELSTKDGDIVVKLKQGVETPNYV

SEQ ID NO: 101735 - protein, 166 aa, Unknown
  Obtained from environmental sample
  misc_feature (1)..(166): Xaa is any amino acid
MFTWLLRIIGILLVVAAFKLIFKIFPTLFKVLPPLATIVGAGVGLVCSVGGFVWSLVVISLAWLFYRPLVGIPLLAAAVVGIVFLVKKGKEKKASAPAGAGGTAASNAAASSDGWKCACGTVNKGKFCADCGKPKPAGVPQYKCDKCGWEPKDMSKLPKFCPDCGD

SEQ ID NO: 101736 - protein, 91 aa, Unknown
  Obtained from environmental sample
  misc_feature (1)..(91): Xaa is any amino acid
MVSTLALIRKSSLEDSFWLAEYFMDHPHDLMHKACGWMLREAGKKSLDALRAFLESFCARLPRTTLRYAIERMEPVERKKWMGVSRHVRGQ

SEQ ID NO: 101737 - protein, 88 aa, Unknown
  Obtained from environmental sample
  DOMAIN (1)...(88): Hsp20/alpha crystallin family
  misc_feature (1)..(88): Xaa is any amino acid
EKDIELEVLGDVLSIKAQHEHESTNENQEDKKGYYRIERHYGMFQRVLHLPEDANPEAVKAHYKNGVLNISVARKAPLKNEARKITLS

SEQ ID NO: 101738 - protein, 247 aa, Unknown
  Obtained from environmental sample
  DOMAIN (115)...(246): Fic protein family
  misc_feature (1)..(247): Xaa is any amino acid
MICFLFFPFEEWQVKAKQIKKIQRLLSFWRNSQPLNERLQHSIDQSFMIDFNYNSNHIEGNTLTYGQTKLLLLFGKVEGKGLMRDFEEMKAHNVGLEMMKVEALDKKRPLSETFIRELNRTILAGDFYKLSSNREYRYKIHTGVYKTRPNSVITPSGEIFNYASPEETPSMMGDLVKWYNKAEKKDNCNIIELAALFHYRYIRIHPFEDGNGRIARLLVNYILLRHGYPMIVVQTTDRKNYLDALGE

SEQ ID NO: 101739 - protein, 242 aa, Unknown
  Obtained from environmental sample
  misc_feature (1)..(242): Xaa is any amino acid
MVLSGNKEAHAFTVTFDSIENILSGNGQVIPVSSFFNVNRLSDYSVEFYRDFAVPSANGGEAGQFRLIKRYDFKPEEYMFELNVSLDGGYSVRGFNFNGAAYTLAFGPQIGPRFGKLDGRNEFRHYLAYNKKKAKQEKLGVINRNMPPWAAIAGKYFALIGIPYAPQYSVAFSGQAEEGLPAASRLLISRSSWNGSRLDDRYHFYLGPKTTDILNKYYNGSNNFGLHGLQITDAARGQSFLS

SEQ ID NO: 101740 - protein, 164 aa, Unknown
  Obtained from environmental sample
  misc_feature (1)..(164): Xaa is any amino acid
MTLYHGSNNAVETPNLSLSRENLDFGAGFYTTVNKNQAVDFAQKVTARKGQGKPLVSVYDFDLETNKSKLNILRFQGPDRLWLDFVHQNRYRTYAGEIYDLIIGPVANDDVFATLLIYEQGILNVEQTLEALKVKELYSQFVFKTYIALSKLQFASAFNPEDLP

SEQ ID NO: 101741 - protein, 40 aa, Unknown
  Obtained from environmental sample
  misc_feature (1)..(40): Xaa is any amino acid
MNPFDRRLIHTTLNDIADVETKSEGEGLYKQVRVYFRGAR

SEQ ID NO: 101742 - protein, 204 aa, Unknown
  Obtained from environmental sample
  DOMAIN (2)...(157): D-alanyl-D-alanine carboxypeptidase
  misc_feature (1)..(204): Xaa is any amino acid
MLKQETSIAFENFCAEAKKHGYEPKIESGYRSFDRQLLIWNEKVLGKRKVLDKNGKPVNIAELSELELMKTILLWSALPGTSRHEWGTDIDVIDAGAVPEGYEAELTVEESAGVFGKFHKWLDIQIESGNSFGFRRVFLPGIGRVQPEPWHLSYSPKAKEIEQSFAAKNLTERLCENDILLLPQILDSLDWILENHVFCYFYHF

SEQ ID NO: 101743 - protein, 202 aa, Unknown
  Obtained from environmental sample
  misc_feature (1)..(202): Xaa is any amino acid
MGILDSIKKTAADSLKKAAATTVNTAAATSKAAAASSSKAAEAAISKAAALVGSKVADAMINTLTGSPPNATSSPVSAAAAKAAALVGSKAAPKEPDDSSEVSYTESYERGRGTNAMSPAEVEALVEARAREKGMQNANWKHSIVDLMAVLGMNSSLDSRRALAARLNYYGSAADGSAEKNNWLHAELLRILAQTGGEVPWS

SEQ ID NO: 101744 - protein, 286 aa, Unknown
  Obtained from environmental sample
  misc_feature (1)..(286): Xaa is any amino acid
MGTMPHDNGIVFSRIVNTIVGQVVEIPFRGNGWIYMGEIKSQRGIVYNPPTRNDYEGQTFIFTSEETGTYILKFYKQDFIKDYIINDHVQIIVSESPVAGTGRFTMPADRGRVVAQPRWPSPIEETQIRSGTKPNTEPVVTTGPAEPAKAATPAPSSAVSANAASQQRPTAETTAPQRTPATQSANTQDKTPAPSTNIISPVPPSSATSIAQIPPVKAIEPSANENTPAEKKETLSPEAAAQKAKENFDGGKIPEAIALLDQFMLDYPGGSDEIYWLLGQYYEANS

SEQ ID NO: 101745 - protein, 153 aa, Unknown
  Obtained from environmental sample
  DOMAIN (8)...(137): Flagellar protein FliS
  misc_feature (1)..(153): Xaa is any amino acid
MEGTILPYTNAISTYKETRVKTASQGQLVMMLYDEAVKCLDRAMELISLNAGGKKNPGNIEKISKSILKTQEIITELTVSLDFEQGGEIAKSLFSLYTWFNKELFEANIAQDMRRITAVRFQLNELRSAWAEIAAKTSHETVGKSVAGVNIAG

SEQ ID NO: 101746 - protein, 120 aa, Unknown
  Obtained from environmental sample
  DOMAIN (4)...(85): ATP synthase, Delta/Epsilon chain, beta-sandwich domain
  misc_feature (1)..(120): Xaa is any amino acid
MPKEFNIEILTPDRTFFKGPAESVVLTTNYGEMGILYNTLPIVTTLKDGLIRINQKGQWREAYCGSGYVSVRSNTVTVLVDAADWPFEIDEAKARQEIDEAGEKIKKTKSLMNIKGKSAI

SEQ ID NO: 101747 - protein, 47 aa, Unknown
  Obtained from environmental sample
  misc_feature (1)..(47): Xaa is any amino acid
MEGRYVDVKSTVQSFKAILDGEADDLPESAFYMVGDLDEAKSKGTKG

SEQ ID NO: 101748 - protein, 81 aa, Unknown
  Obtained from environmental sample
  misc_feature (1)..(81): Xaa is any amino acid
VSINPLGLKDLLGLKDLSAAQLGLIIEKAFSYKKHFGSLGKIKKSLVEKNILTLFYEPSTRTLTIFSVAAGRLGGRINNVS

SEQ ID NO: 101749 - protein, 75 aa, Unknown
  Obtained from environmental sample
  DOMAIN (1)...(60): Global regulator protein family
  misc_feature (1)..(75): Xaa is any amino acid
MLILSRKVNEKVVIGDDISVTIIEIRGDQVRIGIDAPKKVKVFRQEVFDAIMEQNKAASKSVSVIPQVDFSVKKN

SEQ ID NO: 101750 - protein, 282 aa, Unknown
  Obtained from environmental sample
  DOMAIN (1)...(282): CO dehydrogenase/acetyl-CoA synthase delta subunit
  misc_feature (1)..(282): Xaa is any amino acid
NDSESDADIAAKVKRYEKFQYSRVGLTLRPELVVVKGGARLAEAAKAVVSNSDMSVILYSEDAGALKKAAEALAGKNPLIGPATKANCDAVADVALAAKVPVWLKAANMDEVAELTKKLHDKGLRDIVIDSGARTVKEAFIDSVAIRRAALGGNRDYGFPTIAFPVEITPNLAMQTAIAAALIAKYAGVVVLGEFDGASVFPLLLARLNIFTDPQRPMTMVQDIYPINNPTADSPVLVTTNFSLTYFIVSSEVEGSRVPSWLLIKDSEGLSVLTAGPRASSR

SEQ ID NO: 101751 - protein, 145 aa, Unknown
  Obtained from environmental sample
  DOMAIN (6)...(82): Domain of unknown function DUF
  misc_feature (1)..(145): Xaa is any amino acid
LRFWEIFLIGVGLSMDAFAVSITLGLSAKNPRIIEILIPGFYFGFFQSLMPLIGYFGGTYFARYVQSLEHWVAFVLLGLIGGKMIKDSFSKEEERKDENPFMFTKMLLLVIATSIDALAVGVTFAFFSLNIFTAILIIGLTTFCI

SEQ ID NO: 101752 - protein, 238 aa, Unknown
  Obtained from environmental sample
  misc_feature (1)..(238): Xaa is any amino acid
MNENGAVGTGLYNIAKPELDEVYIANVLAQRQNPEIIPASDLRIVYTPLHGTGSVPVKRALFRAGFQNIFTVPEQDAPDGDFPTVGYPNPEDRKAFALALKKAEATGAHVAIATDPDCDRVGVAVAGGPDGFVLLTGNMSGVLLTDYILSQMKSKGCLPANGAVISTIVSTTMTKAIAASYGAAYYDVLTGFKYIGEKIKEFEQSGEHTYLFGFEESYGCLAGTYARDKDAVVASLLL

SEQ ID NO: 101753 - protein, 263 aa, Unknown
  Obtained from environmental sample
  DOMAIN (209)...(263): Helicase conserved C-terminal domain
  misc_feature (1)..(263): Xaa is any amino acid
MEIAIERIEAELKGQIEKLKSQDRLLEAQRLLQRTRYDIEMMREIGFCSGIENYSLHLAGRTPGSTPHTLMDYFPKDFLIIADESHVSIPQVRGMYEGDRSRKTTLVEFGFRLPSAMDNRPLKFTEFESKIRQMLFVSATPSTYERDHSQLLAEQIIRPTGLLDPEIAVKPVKGQIDDLIGEIAAVTDRHQKTLVTTLTKKMAEDLTTYLRDAGVRVRYLHSDIETLERLEIIRDLRMDVFDVLVGINLLREGLDIPECALVA

SEQ ID NO: 101754 - protein, 241 aa, Unknown
  Obtained from environmental sample
  DOMAIN (5)...(128): 1-deoxy-D-xylulose 5-phosphate reductoisomerase
  misc_feature (1)..(241): Xaa is any amino acid
MCEQVCLLGATGSIGDSALDVIKQHKERFSLHSAAARGNVQKMVGIAKEYPNAKLALFDKTAALELQKITGKPVLAGMEGLLELVSDSACDLVVNGLTGSVGCEPTLKAIESGKKIALANKETLVMAGAIIKQALKKNPEAKITPVDSEHNAIFQCLAGRGEAEVESLVITASGGPFRELPAEKFSEIALKDALNHPVWSMGKKITIDSASMMNKGLEVIEAHFLFGIPYERINVVVHPQS

SEQ ID NO: 101755 - protein, 69 aa, Unknown
  Obtained from environmental sample
  misc_feature (1)..(69): Xaa is any amino acid
KTPYELFILNKTNNKKYPKIRDIDDLPVLANAIEAKVDLLLTGDKDFDDIIIKRPKIMKPRKYIDEYME

SEQ ID NO: 101756 - protein, 69 aa, Unknown
  Obtained from environmental sample
  misc_feature (1)..(69): Xaa is any amino acid
MRKEYDFSNAKPNPYVKKLRKQISIRLDVDTIGYFKKKAEETGIAYQNLINLYLSDCAIHSRNINIVWK

SEQ ID NO: 101757 - protein, 92 aa, Unknown
  Obtained from environmental sample
  DOMAIN (1)...(92): Protein of unknown function (DUF497)
  misc_feature (1)..(92): Xaa is any amino acid
MRIIWDESKNQDNIKKHKVSSEEAETVFFDPNGKLISDPDHSKDEDRFIILGLSKMLRLLVVCHCYRENDETIRILTARKALKKEAKYYGGK

SEQ ID NO: 101758 - protein, 121 aa, Unknown
  Obtained from environmental sample
  misc_feature (1)..(121): Xaa is any amino acid
MNKIRFYRLTVLLCLFALAPVGIMAQNTAAAPQNQTGEGGKDLPRQFRQIVLGMSLDDLKAALIQDSMFNFRGDRDVSFLPAREESLVETGGSSFIKTGVFSTAGRGVVYHGFYPEYRHDG

SEQ ID NO: 101759 - protein, 208 aa, Unknown
  Obtained from environmental sample
  misc_feature (1)..(208): Xaa is any amino acid
MKGAMTKSREPRVENKTGIKTLIFVICYLLFVICGSAVWAGGRGQVETVTAEGDETWRHSFNIKGRGKGTYNYIVNGYDHAGNETVDGPYNIKIDPNSGLPTVKVIYPEDGFVIRQHFNVLGTAGGFFGVEKVFVRLDNTAPVEADGKEYWNKLIEINGVKDGKHALFFRASDTNGTAGPEQRIDFIIDTSPPKIELLSHRIGDTIGK

SEQ ID NO: 101760 - protein, 82 aa, Unknown
  Obtained from environmental sample
  DOMAIN (8)...(75): Phosphopantetheine attachment site
  misc_feature (1)..(82): Xaa is any amino acid
MTREDILHKLQDILSEEFEIEKNAVVPQAKLYQDLELDSIDAVDLLVKMKAFIPGKIDPESFKKAVTIQDVVDLLYPLIQQT

SEQ ID NO: 101761 - protein, 135 aa, Unknown
  Obtained from environmental sample
  misc_feature (1)..(135): Xaa is any amino acid
MGNTESKTEKAKIKVGLVMPISNMPELPKEHWTDVQEILKGFLKEIANYDFECEMVSYSKEVNLIHSNIVKNLYESDLVICDISGLNPNVMLEMGIRLTFDKPIIVIKDKETDCPFDIGPLEYIPYSRDLNYTKM

SEQ ID NO: 101762 - protein, 253 aa, Unknown
  Obtained from environmental sample
  misc_feature (1)..(253): Xaa is any amino acid
VRANWYCTAAIKKDGSLWIWGWNNKGSYDLGALGGAVAPNGRLNVPTQFGTANAWKDVSIGECHMVAIATDGSMWAWGTNYYGQLGDGNPPSGQEGIFTSHPDPVQVGTAKDWAAVACGNNHTLAIKTDGSLWAWGFNFGDALLGIGSDPYPGDYDNWNTPVQVDAAKDWVVVSGGRLSSYGFKSDGSLWAWGYPPGPTYRVPFPVQVDAAKDWVTVSCEMLHALYLKNDGSLWAYGQNWGGQLGDGTQTDRS

SEQ ID NO: 101763 - protein, 94 aa, Unknown
  Obtained from environmental sample
  misc_feature (1)..(94): Xaa is any amino acid
MTDDEDMLRLRITTMFPELNERQRRLYLAAEAKAIGYGGITRVSRISGISRVTINQGLNELGDNTANNDEIVRCRRRGGGRKSAEFKQPGIKRR

SEQ ID NO: 101764 - protein, 293 aa, Unknown
  Obtained from environmental sample
  misc_feature (1)..(293): Xaa is any amino acid
MSGTLVIEPLPMEKTGYVFDGWYKDAAYANVWNFANDKITGDTYLYAKWHPYVYTVKFETDGGEPPTPDDQNIIYGGKAVIPSTPNKEDENDEITYSFSGWYKEAACNNEWNFASDTVTGNITLYAKWGNEEFCTIQFNPNLGELPLAAEKIAKGSKIYEQIPAYSHASDGFAGWYKEQECTTAWDFANDTVLYQETTLWAKWVAPRKTVTFDANGGTPSPAEQYIAKGSNVVIPPPITKTGYGFGGWYKDAACTNEWDFASDTVDDDITLYAKWVPSILYIVTFTTDSTLIT

SEQ ID NO: 101765 - protein, 158 aa, Unknown
  Obtained from environmental sample
  misc_feature (1)..(158): Xaa is any amino acid
LTGTIPSKCSYLIVTTTSTEINATPRANLPAADQEAAFAIDNTNFKIAVLKNQSSALSVANPFTDATLSADYVDMLGTGTANGFETKAATASRPQVPRRISLADSDDNSIDFAQADYRGQSGNNGMANDQLYKFWPRNAAAGAWDPISGLPQVNPAVP

SEQ ID NO: 101766 - protein, 287 aa, Unknown
  Obtained from environmental sample
  misc_feature (1)..(287): Xaa is any amino acid
VATGTILDYHKLAANFTLSAGAKLYIGGTEQISGVTTNNYYQPVTFTVVAPDNVSKTYTVAGSVPAAGSASGSVAGTASFQTQGFGVINITTTDKSLGLPTGTNARKLNVVWNPTGTFTYYSPTGRVISGGTSIKGHGNNSVRGDSIKSYSLKLDAKAGFDYYDYKTGQYITLPEHKRWVLLAHQADTTRIYGSLGFELGRRVLTNMGWQPHADWVYLFLNGDYKGVYILCEERKIDEGRLNILPEASRSTPDGGWIVEFNNLWWYASDAQDTNASYLIFDDLYNFM

SEQ ID NO: 101767 - protein, 186 aa, Unknown
  Obtained from environmental sample
  misc_feature (1)..(186): Xaa is any amino acid
VSEKELEAVLAPGKRYTLLDLVINGKNGNPAIVYQYQKHNISQKIIHVDFLKIEENTPIAVRVPVRLSGIPVGVKNQGGNLSQESRYLKLLAKPSDIPANIELDISEMPNNTTYYAEKLDLGKVSLLSPKRTVIFTISKGREETEAAAAPAAAAAATPAPAAAAAAPAAAAAKKEEAKPKKDAKKK

SEQ ID NO: 101768 - protein, 277 aa, Unknown
  Obtained from environmental sample
  DOMAIN (1)...(80): Response regulator receiver domain
  misc_feature (1)..(277): Xaa is any amino acid
EDALNMTRPGAFDAVVTDFRMTGMDGLQLTARLKALDPSLPVLLVTAFGSLDTAKEAMRLGAFDYLSKPFSPSELVTAVKKSLRTDEKLKAVAIAEAPIILTQDPALAETLALARRAADSRATILIQAESGTGKELFAKLIHSASPRRKGAFVAINCAAIPENLLESEFFGYEKGAFTGATSSKTGRFEQAEGGTIVLDEIGELPLALQGKLLRAIQERTIDRLGGSKPISIDVRIIALTNRDLAQEVKDGRFREDLFYRLNVIPLKLPPLRERKGD

SEQ ID NO: 101769 - protein, 127 aa, Unknown
  Obtained from environmental sample
  misc_feature (1)..(127): Xaa is any amino acid
MSNINRFFSLALMAFFIVSAAAAQDAGGRTSDGGTPRQNRIDVDSIKDITGSEGMDKRSRMLKDIHEAITGGDTSDDIYTVLEYMSKEGLSNKTMRQGKVINDYPPIRREVARELGRMGTSRATYIL

SEQ ID NO: 101770 - protein, 75 aa, Unknown
  Obtained from environmental sample
  DOMAIN (1)...(69): CrcB-like protein
  misc_feature (1)..(75): Xaa is any amino acid
VNIFTHFSIDNKWKLLIITGFLGGYTTFSTYSYETINYFIDGNIKYAIINIMLHNILCLAFVLLGIWLNKIIWEI

SEQ ID NO: 101771 - protein, 166 aa, Unknown
  Obtained from environmental sample
  DOMAIN (28)...(166): ABC transporter
  misc_feature (1)..(166): Xaa is any amino acid
MISLKNVVKRYGRHHYGLNEVTFQIYPGEFVFLTGPSGAGKTTLLRLLFREETATSGDVSVAGHRLNEMPPREVPVLRRKLGVVFQDFKLVQDMTVFENVAFVLKILGAGRNEQRQRSWRALKMVGLQHRLASFPRQLSGGEQQRVAIARALANDPLLLLADEPTG

SEQ ID NO: 101772 - protein, 301 aa, Unknown
  Obtained from environmental sample
  DOMAIN (264)...(289): The GLUG motif
  misc_feature (1)..(301): Xaa is any amino acid
TRNASSAGGIAAVNQSGATVEFCYNTGNVTGTTNAGGIVGSSSSGTTVQNCVSLGVKVTGASVGRVAGSIGGSPVSGNLARIDMKTGASGSEALVTTGAAGNKEGANVSLGTALSTVFNTNWLSSLWNIPTGDLTTGDNLPTLKPNTQTPAPTLPAAYNAPGTAENPFLVTNEAELRKVGTGTDGWTLSAHYRQTQNITLTNNLSVIGTNINKFTGSYDGNEKTISGLTMTRTSVSYFGLFGYIGSDGIVKNVTVTNGSITGTASSYFGGIAGQNEGTIENCSFSGTVNGDTTSDNVRGIV

SEQ ID NO: 101773 - protein, 111 aa, Unknown
  Obtained from environmental sample
  DOMAIN (27)...(110): Protein of unknown function (DUF933)
  misc_feature (1)..(111): Xaa is any amino acid
KNFLQEYGLKESGIELLARQSYKLLGLITYLTSGEKETRAWTIKAGTKAPQAAGVIHTDFEKGFIKADVINYAQLKDLAGLHEAREKGLVRQEGKEYIMQDGDVVLFKFNN

SEQ ID NO: 101774 - protein, 251 aa, Unknown
  Obtained from environmental sample
  misc_feature (1)..(251): Xaa is any amino acid
MLIALEKLRTQWTQKTQQSKQLAEEIARQDVYALFGLAGAKQAARLRQVKVIWGSLPLKAVNPETMQIVRTLGQKNAQIAYVRLICLPEDEAALRDSLHGTGFQEIILPRQKTEYARESRRLRRELDKCRKELAGLKTKISKINKADYARLAVWTDHLLNNAELENYAGGLRATARTSLITGWAPEAQKEQLQNYLNQFSKELYWREVAPDTDETPPVALHNKLSAPLEAVTVLYGLPNNNEFDPSPLIAP

SEQ ID NO: 101775 - protein, 88 aa, Unknown
  Obtained from environmental sample
  misc_feature (1)..(88): Xaa is any amino acid
MNEPVTCIDDRGWIHYLTEQLGEPGGQGIVYRTRAADTAVKLVIDKSSDKEITAEKEVAEYRQKFLGLRLLPVPKEANITLPHTILKE

SEQ ID NO: 101776 - protein, 277 aa, Unknown
  Obtained from environmental sample
  misc_feature (1)..(277): Xaa is any amino acid
MFKIVFFRDRVVEMDTVEIDIKKIKETAGRYERTENPEELAVILRNKCVFSDGKNAWFLIKTGPAGVPDYPDTPEDETEEQPEDARNACAFIIRGKGISMPVGRRKLNETDEIYFAMETDYTDIVNDVSSYYLAREKLVFSETAGPIGLVNAGALRALQILEDSYLKAWDKYAQGEGELLLKKAKKTGIISYTRWEQESAATIRIITKETIPGELSAENDKLELVLKNEIPALNEIPAYLEEENTDMGWNEYAETPEAKSILYKKKYRVIFEIERIG

SEQ ID NO: 101777 - protein, 66 aa, Unknown
  Obtained from environmental sample
  misc_feature (1)..(66): Xaa is any amino acid
KTFNWICLNPEEIDKPWFLAGGITVENIEQAMARNPFCVDVSSGAETDGVKDREKMVALTTIIRKA

SEQ ID NO: 101778 - protein, 150 aa, Unknown
  Obtained from environmental sample
  DOMAIN (31)...(140): Class II vitamin B12-dependent ribonucleotide reductase
  misc_feature (1)..(150): Xaa is any amino acid
MKVQRFFTDCESGPYFDIVWERRKSEIRNLNGKPIFSEDTVIVPAFWSQIASDIIAQKYFRKAGVPKNKIYEWKKWVKTGNNSEDPGNILPEDGAEHDARQVFHRLAYTWLEWGKQNNYFENQEDEKAFYDETCYMLAHQYAAPNSPQWF

SEQ ID NO: 101779 - protein, 106 aa, Unknown
  Obtained from environmental sample
  DOMAIN (3)...(106): SUA5 domain
  misc_feature (1)..(106): Xaa is any amino acid
ESHYAPHVPLVTFSMEDIEKIAYEKESAFLFFDGSARETWISAQKPPKSAIIRVLSETGKILEAASRFFETLHELDNDKILRIFVQLAPQEGLGNAINDRIFHAST

SEQ ID NO: 101780 - protein, 149 aa, Unknown
  Obtained from environmental sample
  misc_feature (1)..(149): Xaa is any amino acid
VALALLAAGTAISVAYLRIDLQIYNDDQSGTAIPSYWSEFSPQALKAANDEKCNAIVNFTASWCTNCKLNKAAVLNSEAAKKLYNDKNVLLLTADITNDNPEAQELLHHLGSRSVPFLAIFPGDAPKNPIIMRDILSKEKFLGELRNLP

SEQ ID NO: 101781 - protein, 257 aa, Unknown
  Obtained from environmental sample
  DOMAIN (48)...(233): ABC transporter
  misc_feature (1)..(257): Xaa is any amino acid
MLKKAGSTEPGKGTGPGERMIKVVVTDLYKSFGKLDVLKGVSMTAHEGDVICVIGPSGSGKSTFLRCLNMLEKPTSGTIMVDDHEMTHKHVNLNKARRHIGMVFQHFNLFPHLTAKQNIMFAPVDLRVMHKKEAEIRAMELLTRVGLADKANVYPWQLSGGQQQRVAIARSLAMDPDVMLFDEPTSALDPEMIGEVLNVIKELAASGMTMIIVTHEMNFAREIAKTVLFMEDGKILEQGSPAEVFSNPTEERTRKFL

SEQ ID NO: 101782 - protein, 248 aa, Unknown
  Obtained from environmental sample
  misc_feature (1)..(248): Xaa is any amino acid
AVPKAALYEISRGGSRLGEYTALGSVEETVFTDASPNKNKYENYYRITAKNNDGGIISQQLASFELKLFGANTLFYDQKYDKIDSIEKEINRIHDTEMLGSIEEEGGRKAEFSSKRYAMYFKPGEYRGFSEFRIGFYTHIAGLGRVPVQTRLFGSVVTPPHLPRNNATCTFWRSIENFQINGGALNWGVSQAAPVRRMKLQVPTQFDWEKGWASGGFLADCYFTADVGSWSQQQWYARNSHFVTAFYG

SEQ ID NO: 101783 - protein, 249 aa, Unknown
  Obtained from environmental sample
  DOMAIN (158)...(224): His Kinase A (phosphoacceptor) domain
  misc_feature (1)..(249): Xaa is any amino acid
VSYARDMREMNAANAKMREADERAQILLDSAPVSCTLFDENNKAIDCNAEALKMLGLIDKDHYLAHYLEYSTEYQLDGRLSADMAVAVTKEALETGYCRFEWTHLDVNDRVVPCEVTLVRVKYRGRFVVAGYARDLREFKAMVKEMQRAEIAEESNKAKSRFLAAMSHEIRTPMNVILGVTEIQLQDELLPPHLREAFMQVYNSSDLLLGIINDILDFSKIEAGRMEFTPAKYRLASLINDAAHLNMMR

SEQ ID NO: 101784 - protein, 168 aa, Unknown
  Obtained from environmental sample
  DOMAIN (37)...(168): ABC transporter
  misc_feature (1)..(168): Xaa is any amino acid
MNKMEHLIVAKDLVREYARGAEKVRALDGVCLYIDSGDIVAITGESGSGKTTLVNIIGCLDNPTSGELCINSRNVFASGSTLTEGELTRIRREIFGYVFQKFFLVPTLTVAENIMLPGVFQPKLEVSGAELTRLMDMLGILTRKNHLPGHLSGGEMQRVAIARALALR

SEQ ID NO: 101785 - protein, 158 aa, Unknown
  Obtained from environmental sample
  DOMAIN (80)...(155): Smr domain
  misc_feature (1)..(158): Xaa is any amino acid
IPEPDDAAELAIGDRVTVLALKKEGIVSAIKGGEVTVAIGSFTTQTAKSGLQRLGKGKKASSVGLRHIAQAHRSSPSITLDIRGLRASDAEEKLRAYLDDAGLAGLEMATIIHGKGTGSLREVSHRVLSKHPFVVSFGFAHPAAGGEGATEVKISPAR

SEQ ID NO: 101786 - protein, 154 aa, Unknown
  Obtained from environmental sample
  misc_feature (1)..(154): Xaa is any amino acid
IADLTRSGVRLLADSELVSLFPELEPACEEDWEREYNDLILSIAAVGGLDEAISFINTHGSGHTDGIITANEEAAREFALRVDSSSVMINASTRFSDGFRYGKGAEIGISTNKIHARGPVGLEGLIIYKYILQGTGHCVADFTNAKAFTHRRLI

SEQ ID NO: 101787 - protein, 75 aa, Unknown
  Obtained from environmental sample
  misc_feature (1)..(75): Xaa is any amino acid
LFPDQNISIWVVDGVMKANVAITVGYSIINRTATVDVGSLMLHYGGGGHTQVGTCQVPYADADRIIQEVLAKISS

SEQ ID NO: 101788 - protein, 138 aa, Unknown
  Obtained from environmental sample
  DOMAIN (2)...(138): Starch synthase catalytic domain
  misc_feature (1)..(138): Xaa is any amino acid
MKVLMVSSEAVPWAKTGGLADMVSALSINLAKLGHEVKIVIPRYYSIDRDKLKLLPGAMGTPMGAGIEEWSAVYYTDMPGTNKKNPVKIYFIDHEIFFGRNGIYGSHADTDFIDNPRRFSFFCRAAFQLCRKIEWYPD

SEQ ID NO: 101789 - protein, 99 aa, Unknown
  Obtained from environmental sample
  misc_feature (1)..(99): Xaa is any amino acid
LKSKFSNLFWGIALLLVAVFVLTNNFIGFDDIGIGKIIISILALAFIVQCIARLHIAPLVIPLAVLYFIYREPLGLPCIQTWKLIVAVVLTFIGLNILL

SEQ ID NO: 101790 - protein, 287 aa, Unknown
  Obtained from environmental sample
  DOMAIN (1)...(287): Serpin (serine protease inhibitor)
  misc_feature (1)..(287): Xaa is any amino acid
GGANDFAFRLGGELLKYSSGSNFVCSPYSVWLPLAALVSATDDQNKAALTEALGASGIAPADINKAASRMLYDLTKIRDKQYESYGSKYYNPLKIANAVFVDKNVTLQKDFAQTFMDYYRGASINVDFSSKDAVDAVNRWASDNTGGLIKDLIKEFDPQTVTAIANAIYFSDRWAWEFDPEKTKEDVFHVKEGENSKASYMLRQGDGQLYYEDAAVQATWLRFKHDGGMYIILPRDKNATELLSSMTNEYFKKIDSGFELAEGKLLLPRFSIENDISDLKDALVSLG

SEQ ID NO: 101791 - protein, 262 aa, Unknown
  Obtained from environmental sample
  DOMAIN (164)...(197): Tetratricopeptide repeat
  misc_feature (1)..(262): Xaa is any amino acid
NLGYLYYTMGDYVRAESYYLEAKTVWEQTLSKNHPNYALSLNNLGTLYQAMGDYAKAEPYYLEAKTVWEQAFGKNHPNYAMSLNNLGALYQVMGDYARAEPYYLEAKTAWEQTLGKNHPNYAMSLNNLGALYQAMGDYARAEPYFLEAKAVYEQALGKNHPDYAMSLNSLGLLYQSMGDYTRAEPYYLEAKAVYEQALGKNHPSYALSLISLGALYQLMGDYARAEPCFLEAKAVYEQALGINHPSYALSLINLGALYQAMG

SEQ ID NO: 101792 - protein, 283 aa, Unknown
  Obtained from environmental sample
  misc_feature (1)..(283): Xaa is any amino acid
VLEAKTVCEQALGINHPNYALSLNSLGLLYYAMGDYARVEPYYLEAKAVWEQALGRNHPHYAMSLSNLGLLYQSIENFEKAEAYNKELCELRINLINQNFSFMSEQQRSLYLKTVSVYFETSYSLSWLHPVETVNGLNYTNTLFTKGLLLRTTNAVRDAIYSSGDDALIGEFEQLGRLRQQISQLQQKENANEAYLHSLETQADTLDKELTRASTAFRDLKADIAMQWQEVRDSLQPGEAAIEFVSFQIYDKKWTDTVQYAALVLRPGMDAPAWVPLCEEEKL

SEQ ID NO: 101793 - protein, 158 aa, Unknown
  Obtained from environmental sample
  DOMAIN (19)...(158): Carbohydrate binding module (family 6)
  misc_feature (1)..(158): Xaa is any amino acid
SIEINGEKLLPRKIVNPIYAERFDDYKGCFLNEKRGSGIPAVFNIYEENHFDYCCAGGWIHFTSLDFGSQKIDHFSAVVQGTQGSCIEIRLDAPDGALAGIIEVPNTGEICSYELNPLSPRRRPVWAYAETMIEKISGIHDLYLILYGKTAVWCFEFK

SEQ ID NO: 101794 - protein, 274 aa, Unknown
  Obtained from environmental sample
  misc_feature (1)..(274): Xaa is any amino acid
VTPPGVSHIFSLWEESDATIRKVIDAEGALMKEAGINAIKVGPDIPRKWVEYMYNKHGIYTIINYDMERWGASANGKYYFPTNYYVPGIRDNIRKKAREIVDRYKDATGVLLYMFGNGNGHGFYFPEHENDPETIAKYGVDPRFRKAKAFFSLLEEVFQLTKAADPYRPVGFLTNDLGWIELVVDDCPSMDYLGVNLGGDWGTNAAGSKFWQDAKEKLNKPIIMGSIGCDAWNSKLNSEDQYYQAMWLTSLWKDIYENAYGNGQSNALGACVDE

SEQ ID NO: 101795 - protein, 265 aa, Unknown
  Obtained from environmental sample
  DOMAIN (8)...(108): Anthranilate synthase component I, N terminal region
  misc_feature (1)..(265): Xaa is any amino acid
LGFDPSSEITCIDGAMKITEPDGTVKSFQTNDPNKHIQEILDQHRSVKIEGLPHFTGGLVGYFAYDYAKYAEPSLKLDSRDEEHFQDIDLMLFDKVIAFDHYRQKIVLIANIGTSDIDAEYGRGVEALMRLKGLIEGCVPERIAQASLKSELKALFTKEEFCAMVDKAKWHIKEGDIFQVVLSNRFEADFDGSLFDAYRVLRTINPSPYMFYFSGSDLEIAGASPETLVKLKDGKLYTFPLAGTRPRGATEEEDAELEKGLLADE

SEQ ID NO: 101796 - protein, 175 aa, Unknown
  Obtained from environmental sample
  misc_feature (1)..(175): Xaa is any amino acid
MGVNIRVNRGKLYLDIFHNGRRKWESLGLTLPADKTQRAEIMRLAEVCKSKREAQILTGEWGMVDPVSGKQTLIEYMNSIAEGKGQNDFTHKAVKHLEGFPGGNISLGSITEKWIEDFQEYLLKETNLSKKTIAHYSGAVRYALRKAARDRIIPRNPAVGVRGISVPESDRVYLT

SEQ ID NO: 101797 - protein, 214 aa, Unknown
  Obtained from environmental sample
  misc_feature (1)..(214): Xaa is any amino acid
SSKPATWEHCALGVDPLSTVNWAIELGSSRLDGTYWIDIRYVSDRAGNEIKIGGNEISIENVAFTIDVAAPTVNISTVNSVDINPAPPAAAPSNIFRAPFSLSGSAFDGNFRYLKVKVDEITPDFEITANPAGSGNYSWTLAAANADWANIFNNSISDGTHTITVTAYDYAGKTGYATYTFVRDKTPPTVELNHISSANNVITENNAMIRVSIN

SEQ ID NO: 101798 - protein, 143 aa, Unknown
  Obtained from environmental sample
  misc_feature (1)..(143): Xaa is any amino acid
QLLESKVTNTIEYVKKVTGENSKLKEKLNSYQKRIEELEVLVQQFKENQGRIEDGILSALDRLNQFEDALESKLSTESKLSTESKLSAESKLSTEDKPSTESKPFIENKPSIESKPVKETKAPEKPADEGKTSDTSKKELDIF

SEQ ID NO: 101799 - protein, 276 aa, Unknown
  Obtained from environmental sample
  DOMAIN (2)...(275): Aminopeptidase I zinc metalloprotease (M18)
  misc_feature (1)..(276): Xaa is any amino acid
CLQENDFAFLDTHYYGGIKKYQWTTIPLAMHGVFVDSKGKKTSVSIGEDDDDPVFTITDLLPHLAQDQMQKKASEVVEGEDLDVLSGSRPYVDEKVKEKVKLRFLSILNEKFGLDEKGFASAEIEFVPAAKARDLGLDRSMIGAYGHDDRSGAYPALRALMEIAAQKEAPEKTVLCYFSDKEEIGSVGNTGAQSWGFENFIAALAGEDDLRRCLSNSSMLSCDVSPAFDPSYSSVYEKRNSSYMGKGLVINKYTGSRGKVGASDANAEYCARVLAV

SEQ ID NO: 101800 - protein, 279 aa, Unknown
  Obtained from environmental sample
  DOMAIN (4)...(278): Peptidase C10 family
  misc_feature (1)..(279): Xaa is any amino acid
LAVILPAVLFFAISAFSAPVSFETAESVARKHLERESMGGKIKRGSVRKTRAVTPYFVFEKESGGFIVVSADDVAVPILGETDSGAFDKGGMPSALVWLLETYERQIEEAVKSGEAQDGETKRLWKRSTQSSNSASAALASYPLRLLSTAWDQGEPYNLKTPIDGNARSATGCVATAIAQIMKYWRHPARGIGASAAYRTVPKDISVPSVSFNTYYNYADMLDDYPTANSGTEVQREAVATLMYHCGVSVKMNYTSDESGALPTNVASALTNISATTPA

SEQ ID NO: 101801 - protein, 283 aa, Unknown
  Obtained from environmental sample
  misc_feature (1)..(283): Xaa is any amino acid
DGNYYFVSAGIGGSWQPYFLIGNDNYRVGPSKSSIRCLKLSTEEEATAAFEKAIGSQFNPKINYGSMTDPRDKKNYKTVKIGEQIWMAENLNFNYGYSMCYEDKEHYCKRDGRLYNWETAKSACPSGWHLPTDEEWAILESTVGGASTAGTKLKAASGWFDSTGKKPLNGTDDFGFSALPAGASSVQVSSNGVRSDIFSKNGSVGLWWTASAKGNDGLYRSISEAKGESAYANKTNLSYSVRCVQGDASAAKQAEKPAAKEQPKKAEQPKQQSANENCSLTFP

SEQ ID NO: 101802 - protein, 70 aa, Unknown
  Obtained from environmental sample
  misc_feature (1)..(70): Xaa is any amino acid
MKEAEELSQYLKKTRFAPEQTQDFYPTPGTMSTVMYHTGLDPRTMKPIYAAKGDKEKCKQKELLHRGNNK

SEQ ID NO: 101803 - protein, 300 aa, Unknown
  Obtained from environmental sample
  DOMAIN (178)...(300): Competence-damaged protein
  misc_feature (1)..(300): Xaa is any amino acid
DQTKEIFAEVIGAPMIEDSQARLDIDSFFLARGRKATENNYKQALIPQGALAIRNPLGTAPGVYWEGPSNYPNCTIVMLPGVPKEMMGMWESNVHPRLSKLSNSSIKTVRLVVCGVGESVLDERIGPIRQRHSQLGWTILAPRSHVEFLIRGEDTQELDAAVGDMKAELGVDLAFTGDGTPESALLGLLVARSDTLALAESATGGVLSSRLAAVPGASRAYIGGAVAYTPKAKIELAGLDKEFIELHGTVGEATTIEMAIRIRERLGATWGLAITGNAGPTVDKNALDDNGSNQVGRCSL

SEQ ID NO: 101804 - protein, 281 aa, Unknown
  Obtained from environmental sample
  DOMAIN (1)...(281): Ammonium Transporter Family
  misc_feature (1)..(281): Xaa is any amino acid
MWVLVAAALVFFMQAGFAMVETGFTRAKNAGNIVMKNVMDFCIGTPTFWLIGFGIMFAGSGPFIGGLDFMVKGNYDSTFPTMAFLIFQTVFCATAATIVSGAMAERTKFSAYCCYSFIISALIYPVSGHWIWGDGWLAQLGFHDFAGSTAVHMVGGIASLVGAKIVGPRIGKYSETGESKAIPGHSLTLGALGVFILWFCWFGFNGGSTVAMTSQDDIVSASSIFVTTNLAAATAAVFTMFITWIRYKKPDVSMTLNGALAGLVAITAGCDAVSPFGAFCI

SEQ ID NO: 101805 - protein, 285 aa, Unknown
  Obtained from environmental sample
  DOMAIN (84)...(285): Glutamine synthetase, catalytic domain
  misc_feature (1)..(285): Xaa is any amino acid
MGDGKIIMEFSGEGLVRGEPDASSFPSGGLRATFEARGYTVWDTTSYAFIKDGTLCIPTAFCSYSGEALDKKTPLLRSMEAINKQALRVLKLFGDTTSKRVLTTVGPEQEYFLIDKNMYLKRPDLIYTGRTLFGSRPPKGQELEDHYFGSLKPRVSAFMKELDEELWKLGVNAKTRHNEVAPAQHELAPIFSTTNIATDHNQLTMELMKSVADRHGLACLLHEKPFAGVNGSGKHNNWSIMTDTGANLLKPGETPHENAQFLIFLAAVIKAVDVYQDLLTVSTAS

SEQ ID NO: 101806 - protein, 129 aa, Unknown
  Obtained from environmental sample
  misc_feature (1)..(129): Xaa is any amino acid
SGFGRGAKIFSGEQWRPFVHVRDAARAFALALAADPAAVSGQVFNIGSNHQNIQFKDLAGLLQRVLPQARVETVPQPPDLRDYHVAFDKVARVLGFRPEFEPEDGLREIAAGLAAGTWGDPDAPRHRNS

SEQ ID NO: 101807 - protein, 271 aa, Unknown
  Obtained from environmental sample
  misc_feature (1)..(271): Xaa is any amino acid
RGEFPHWNAFSFGGMPFFATGAGTLYPLRLMQSLLPVGYAATWRILEIVIVVHILIAGVNMLAYLRFNGRSSASALFGATAFMLGGYVVAHAIHPAIFYIAAWLPLMLLLMEKGVRELKPAYVVIGGLLLGCVMQMGHAQVMFYSVVFMLTYALFLSCLCGLNRSAAAVSKASLLTTYKPVLHRAALSALYFIIAAGLCLVQYLPIFEAGGHTVRSNFTITDASEGSLQFVQLFTALLPKLFGAYTGGDRSVPAFWLTDAFKHGYYNYWES

SEQ ID NO: 101808 - protein, 97 aa, Unknown
  Obtained from environmental sample
  misc_feature (1)..(97): Xaa is any amino acid
MFRIRTMNKISPLGLELFPRDAYEVASDLPNPDAILVRSADLHSITIPDSVIAIARAGAGVNNIPVAQCSDRGVVVFNTPGGNANAVKDWRLPHAAR

SEQ ID NO: 101809 - protein, 201 aa, Unknown
  Obtained from environmental sample
  DOMAIN (76)...(194): Response regulator receiver domain
  misc_feature (1)..(201): Xaa is any amino acid
VTRKIKQDSGNRQSVAIMITGLDWNQIKNEAEQAGVDRCLLKPILSSTIIDCVNDCLGVEDAAESHAVKEGEFLGTTLLFAEDVEINREILLTLLENTGLVIDCAENGKEAVEKMEAAPEKYDVVFMDIQMPIMDGLEATRRIRKLPMCERGKLPIVAMTANVFKDDIESCLAAGMDDHISKPLDIDKVFEKLRQYKRKSD

SEQ ID NO: 101810 - protein, 234 aa, Unknown
  Obtained from environmental sample
  DOMAIN (33)...(223): ABC transporter
  misc_feature (1)..(234): Xaa is any amino acid
MEDNVLSFEQFSFKYRAQTEPTLIDINLKVSRGEKILILGPSGSGKSTLIHCINGIIPHAFKGESSGSLSLMGSDISGMNIFDISKTAGTVLQDTDGQFVGLSAAEDIAFALENDCVPVEEMHRRVTEASRLVDMTAHLGKSPQDLSGGQKQRVSLAGVLVDNVEVLLFDEPLANLDPAAGKDAIELIDELHKKTGKTILIVEHRLEDVLHRPVDRILLIDKGRIKADKKPADI

SEQ ID NO: 101811 - protein, 124 aa, Unknown
  Obtained from environmental sample
  misc_feature (1)..(124): Xaa is any amino acid
DLYTGSLYLALHRALKGAHARFGRNIGGKRILFASYGSGNTMAVFSGVVAEDAYDIISRWKTRNHEFGCTNASLDMYEEWMRQESPAIPLGINAHPSDERLPYTGAFYLKNIREDGYREYGIKS

SEQ ID NO: 101812 - protein, 94 aa, Unknown
  Obtained from environmental sample
  misc_feature (1)..(94): Xaa is any amino acid
MSNNTHNRKAVWTNLKKGQVLESGFVILDIVNLEELNSLGIWAKHEKCGAEVFHVLNDDSENLFSFAFATAPQDNTGAPHILEHTVLCGSERIR

SEQ ID NO: 101813 - protein, 269 aa, Unknown
  Obtained from environmental sample
  DOMAIN (3)...(242): Bacterial extracellular solute-binding protein
  misc_feature (1)..(269): Xaa is any amino acid
FILAGLSLLTLAAPAFAQKGQTTTLELWSIQTDGNGPEIFQRAIARFRKDNPNVRVNLTMIANDAYKQKLAVALASGKAPDCFFSWGGGPMQEFIKNRQIADLTPYMNANNYKAKFLDGAITQATYQGKIWGVPMQNVAVGVIFYNKEIFNKYRLTVPATIRELETVCDTLKKNNIFPFALGNKTQWTGSMYYMALATRRGGIQPFIKAVDGSGTFLDPAFIYAGEKIQEWVRKGYFITGFNGLDWDSGQARSPIYRGGSRHGFYGKLV

SEQ ID NO: 101814 - protein, 253 aa, Unknown
  Obtained from environmental sample
  DOMAIN (69)...(253): Binding-protein-dependent transport system inner membrane component
  misc_feature (1)..(253): Xaa is any amino acid
VKQDSFYNSFFWRLALILAVLWLFITTAPFVSQIMTTFKSQGEFITDGLFSLPKSFYFKNYLTVLRSDFFVYFLNSIIVLFVSLVLLLFLSAFAAYPLSRMQFRLNKPIYSVIVAAMSIPIHITLIPVFLMTIRFNMYDHVYALIGPNVAFNLPISIFIMTSFMKGISKELEEAAEIDGCDRFSTFFRIMFPLSKSGLVTLAIYNGVVIWNEFVFAMVLTQSQDVRTLPLAIWEYQGQYSINTPLIMALLVLS

SEQ ID NO: 101815 - protein, 182 aa, Unknown
  Obtained from environmental sample
  misc_feature (1)..(182): Xaa is any amino acid
MKDLNSLAGSLMELEDKLISCMRCGLCQAVCPVFGATMMEADVTRGKIALLENLAHKMIDDPEAVNDKLGRCLLCGSCQVNCPSGVSIMDIFMKARHIVAAYLGLSPAKKLIFRTLLAKPGLFNTLTRIGLPFQGLVMRKQNNVQGTACAPLLSKLIGERHIPALPAKPLHAVVGALDTPAG

SEQ ID NO: 101816 - protein, 102 aa, Unknown
  Obtained from environmental sample
  misc_feature (1)..(102): Xaa is any amino acid
VNITQYRDNDIDLAGLLNLLLEGAGTIALRLSSLEPERIDERLSSVLAHPGIRPHFHLSVQSGSDAILQGMRRAYKVHTVEKAISLLRSAKNDPFIACDIIT

SEQ ID NO: 101817 - protein, 251 aa, Unknown
  Obtained from environmental sample
  DOMAIN (3)...(233): NAD dependent epimerase/dehydratase family
  misc_feature (1)..(251): Xaa is any amino acid
MKALFIGGSGTISSAISRLVLEQGWELFLLNRGNRNNEISANGKPGKPVEINCDIRADSVETIHRKIKSASGGRPFDVIADFIAFTPEHVEKDFSVFESLCGQYVFISSASAYQKPPSSYLVTESTPLANPYWEYSRNKIACEDFLTAAYRDKGFPVTIVRPSHTYDERQVPLGVHGNNGSWQVIKRMLEGKPVIIHGDGTSLWTMTHNSDFAAGFIGLMANMRAIGEAVQITSDETLDWNQIYRAIAAAL

SEQ ID NO: 101818 - protein, 259 aa, Unknown
  Obtained from environmental sample
  DOMAIN (6)...(257): Glycoprotease family
  misc_feature (1)..(259): Xaa is any amino acid
VEDGWKVLSNVVATQIPFHAPYSGVVPEIASRKHTEWIYGIVQEALNKAGLSPQGIDAVAATNRPGLLGSLIVGLSFAKAFAWARGIPFIAVDHMLAHLYASRLSGGEPLPYGNEPPPYPFLGLLVSGGHTIICRADDFDTVTVLGATIDDAAGEAFDKVAKHYNFGYPGGAVIDRLAKDGDSGAFHFPLPSLHKGSHSYDVSYSGLKNAACNQLELFRVKKGGETRPQDIAASFRTTAVDILLRALFNAAESTGLTTV

SEQ ID NO: 101819 - protein, 297 aa, Unknown
  Obtained from environmental sample
  DOMAIN (190)...(272): Helicase conserved C-terminal domain
  misc_feature (1)..(297): Xaa is any amino acid
NVQLTEKGVTHIESIMGIKGLYGEHSDWVHYILQSVKAHNVFVKDVDYIVRDGEIVIVDENTGRLMEGRRYSEGIHQSIEAKENVQIRRENQTLATITFQNLFRMYKKLSGMTGTAETEATEFLKIYNMPTWVIPTHKPCIRNDMQDQIYKTADAKWKAIIADITERHTKGQPILVGTISVEKSEKLSKMLRIANIPHDVLNAKNHGREAEIIQYAGHKGKVTVATNMAGRGTDIALGPGVVELGGLHVLGTERHESRRIDNQLRGRSGRQGDPGSSQYYLSLDDDLMRIFGGENVK

SEQ ID NO: 101820 - protein, 277 aa, Unknown
  Obtained from environmental sample
  misc_feature (1)..(277): Xaa is any amino acid
EGQVSVAATLLAEGCTVPFIARYRKEKTGGLDEVQVRDIEHKLASARNLETRRIEIIRGIFEQGKLTQALFDNIRKAATLTELEDIYLPYKRKKKTRGMMALERGLEPLAVAMREMQAAPLLAKAAEFVRQDENPELAVPTVEDALQGAMDIIAESISQDPENRARVKAFYVKDGFIIVTGSGKAGKGDEEARKTSVYQMYWDYKEAISLIKDHRILAINRGEREGALDVTIDVDENTAAQMLQQQYTLHNDYHKTAIEDGLKRLLSPAVIREIRGD

SEQ ID NO: 101821 - protein, 265 aa, Unknown
  Obtained from environmental sample
  DOMAIN (76)...(149): S1 RNA binding domain
  misc_feature (1)..(265): Xaa is any amino acid
DAAREIRQALTATTTAGAGGASSGLNSETITMLKEKHGVGETTIRDIVEELQRPGRDPRESCSMPIMRKGIVNFEDLREGMMIIGKIKNVVDFGAFVDLGIKEAALLHVSEMSDSFVKDPLELVKVGDTKEFRIVSLDQDRRRIGLSLRSGKREDAPHHKAGHGPAKAVIVKTASAAKPGKETEKAGARPAPVKSASHKPAPRHEESHSAKMRPESRPDEKRHDEKYQEVKHQGVKRPEAPEAVHHDDGTMYNPFAEAFKKMGLK

SEQ ID NO: 101822 - protein, 233 aa, Unknown
  Obtained from environmental sample
  misc_feature (1)..(233): Xaa is any amino acid
MPLVIQEKSSFFIEVSMQSMIAVYITLTLMAGALLGYVTARVLDKKRMESANDLAKRIIEEARKEAQAQKKEIILQGKDEVLEARRSLEQERKEQDRDIRGKERKIQEHSEKLEEKLENARKKEQELLMVEKEFTRKEKDLSELQQQLNHRLEEQETRLQEIAGLTPEEAKTRLFADIRTRSHHEAARMMRLIECEAKETADRKAKEILATAIQRYAGDYVTEQTVTTVTLPS

SEQ ID NO: 101823 - protein, 147 aa, Unknown
  Obtained from environmental sample
  misc_feature (1)..(147): Xaa is any amino acid
IADILFCRYFGIFSLFTAGVFAGGFKTQKQRNIIMIITVTTLIITLGVPIDTQAWNSSMNMINGYTSMLRLIEAVTFLITTISFFIAAWSRSSHEFVFIGVGSVLAFLGRNILLNTDTWAGLPTGLLLLTAGTWLICTRLHKVYLWL

SEQ ID NO: 101824 - protein, 300 aa, Unknown
  Obtained from environmental sample
  DOMAIN (91)...(298): Nicotinate phosphoribosyltransferase (NAPRTase) family
  misc_feature (1)..(300): Xaa is any amino acid
SFSFSDEDIGYLKSLGMFEDGFTEYLRNFRFSGSVWAMDEGTVIFPQEPLVRIEGSLIECQIIEGMLLNTINFQSLIATKARRVWLASGKGSFMEFGLRRAQGPDGALSASRAAYIGGAVGTSNALAGKTFDIPVMGTMAHSWVMSFPSEEEAFQAYAELYPDKAIFLIDTYDTLKSGVISAINVGKKLKERGKNFGIRLDSGDIQYLSTEVRKLLNNAGLNDATITASNDLDESIIETLVNSGVPVDIWGVGTRLVTGGDDAAFTGVYKMTACEDANGHMIPVMKFSDNPEKTTNPGPK

SEQ ID NO: 101825 - protein, 276 aa, Unknown
  Obtained from environmental sample
  misc_feature (1)..(276): Xaa is any amino acid
KPEPVKDDDFEVKQNKDNTITITGYKGNARNVVIPEKLYGLKVTIIGNDAFFEKELISVVIPDTVITIEDGVYGNSALQDMNVGAFYSNENLIKVTLGKGLKTIGDFAFGNCKIAEITIPDSVTRIGNYSFMQAGLTKVTFGKGLQTIGSGAFQSDYLTPNNNITEIILPASLKEIGSNAFINNKIQELTLGTGLQTIGSSAFLNNKIKKLTLGTGLQTIGQSAFSNNQITELNFSLPSSLTRIETDTFKNNQIQSVTIPNSIISVSAGAFADKPA

SEQ ID NO: 101826 - protein, 60 aa, Unknown
  Obtained from environmental sample
  misc_feature (1)..(60): Xaa is any amino acid
MPSNEVLLDVKNLTVEFGTRHKRFRAVDNVSFHIFKGETFGLVGESGSGKTTIGRSIIRI

SEQ ID NO: 101827 - protein, 281 aa, Unknown
  Obtained from environmental sample
  misc_feature (1)..(281): Xaa is any amino acid
YPVKGVYESPEIESDPFGYMVLSWNTDTPFDTSVKIETRVRVNGAWSKWLLVCTWSSGAEKASAMKSDESGDSIAYVDTDTVTVKGQNGEKADKFACRLTLMTEDENVTPTVRLVTATFKHAPEDQKTKKIPDDVSQNTIDIIDSIEAFTGTLDVKPYSQMIRDPQFSSVICSAVSSCMILDYKGVHILPEMAALGVLDTYYDGYGNWSFNSAFIASFGFESYIEYCAGLDDIKRELMMNNPVICSVRYKRDDSVDGNLPVLSAAPIDRTPGHLIVIVGYE

SEQ ID NO: 101828 - protein, 213 aa, Unknown
  Obtained from environmental sample
  DOMAIN (1)...(177): Methyl-accepting chemotaxis protein (MCP) signaling domain
  misc_feature (1)..(213): Xaa is any amino acid
VVSDVKEIARESEGLMQINSVIENIASQTNLLSMNAAIEAAHAGETGKGFAVVAGEIRKLAESSSEQSKTIVTVLQKIRGSIDKISSSTGSALESFEAIEDGITTVSAQEGNIRGAMEEQGQGSKQILEAIGQLNEITQQVKNSSVEMLEGAREIISEGRNLERATGEITGGMAEMATSAEQINAAVDEVNNISGQNKEIIDNLVVAVSKFKV

SEQ ID NO: 101829 - protein, 243 aa, Unknown
  Obtained from environmental sample
  DOMAIN (45)...(110): Bacterial Ig-like domain (group 3)
  misc_feature (1)..(243): Xaa is any amino acid
MKKNNPAKRLVLLAIVAFAAIGLAITACSEPNAASIDLSFISVTKSPAKTIYAIGDSLKTDGIIVMAAYTDGSKKEVTGYSTSGFDSSTAGLKTVTVTFEGKTTTFNVTVSDKIVATPRANLRTGEYFANQSITLSTTTEGATIRYTLDGTTPTASSAAYSAAISISANTSLRAVAYKDGWTESGVLSADYFLTNMTADKWVDGNLTSISDEQWFKFTATDAYQRVYVMSGALTNTYVRVQVI

SEQ ID NO: 101830 - protein, 55 aa, Unknown
  Obtained from environmental sample
  misc_feature (1)..(55): Xaa is any amino acid
LGGATGATDFGAGGGGGGGGAIGATWAGGGGGAVTTGFVFCIGGGGGTNGAGGAV

SEQ ID NO: 101831 - protein, 155 aa, Unknown
  Obtained from environmental sample
  misc_feature (1)..(155): Xaa is any amino acid
MLGFAIGASPLGAWIAVRGEPALFPFMLGIILAFWMAGFDIIYASQDMESDKALGLHSIPAKFGIVKSMRISLFCHIAMLLLAAFTGVHWNLGLPWLISFAVIFIALLYIHLFRKSNDLDCMNRDFFLANIAISFLVLLGLGTSIFIGDTNAFIP

SEQ ID NO: 101832 - protein, 163 aa, Unknown
  Obtained from environmental sample
  misc_feature (1)..(163): Xaa is any amino acid
MLIQKLHDNWKMRKLPGGRFFPAKVPGSVYNDLLANKQMEDPFYRDNEDKAFALMESDYEYHTEFSVSQKMLNMDKVLLRCEGLDTVTDIFLNDKTVAHTKNMHRIWEFDVSGILKKEKNKLRIIFHSPVKYIQEAHKTNFLDGSRECLNGFPHLRKAHCMFG

SEQ ID NO: 101833 - protein, 155 aa, Unknown
  Obtained from environmental sample
  misc_feature (1)..(155): Xaa is any amino acid
DTDVEDVKVYFSPDGKCDEKIITIINNASSEINVAVYSFNRIPIINALVAADARGVTVRVIVDANEAKDSAQSHATPLLEAANFEFRKKSFPRNTTAMHDKFMIVDKKIVTTGSYNWTTNATENNDENLIIITSKSTAAVYNDEFNRIWNSAAGE

SEQ ID NO: 101834 - protein, 216 aa, Unknown
  Obtained from environmental sample
  misc_feature (1)..(216): Xaa is any amino acid
DPNGQSELAVNIETVTAWRNLEEIFDSPSFAAIKQVTVGRSDLSGSMGLDVDDDEITRIARAIVAAAHARGKRTSIGGQVTTENAPLVQERLRADTINTRHVVVDLAPKGITENIAAALLWEREYYLELNAYFPNRRKFYLDRIASIEERVARGQVHGCTVPRCGMAKSPSNASGNAASERGLKDAQHPPANPEYAGEAECAEQALYPAPQAFALT

SEQ ID NO: 101835 - protein, 302 aa, Unknown
  Obtained from environmental sample
  DOMAIN (1)...(70): Bacterial Ig-like domain (group 2)
  misc_feature (1)..(302): Xaa is any amino acid
NLLALQTGDTERLTATVLPSSATNKTIIWMSSNASVASVSSSGQVTAHSRGTATITAASQEGYKTDTCSVTVANVYVAGHRTVSGKHVATLWTNKQPQSLTSGSYDAVAESVYVTDSYTYVAGYEQNASGKFVAKVWRNGSLYQNLSDGTHDAAAYSICASSGNVYVAGIEYNSQGRPVATLWTNGIAKHLADDTYSSYAYSVTTSGSNVYVAGEYRNSSKQVAVYWENDDLWILGNEASNSVGSGIAVANGRVYVAGTEVTASNMRNAVLWTDGNYRRISDGKAMAIAYGISVSGGDVYVC

SEQ ID NO: 101836 - protein, 64 aa, Unknown
  Obtained from environmental sample
  misc_feature (1)..(64): Xaa is any amino acid
FYSHGINVPKHRNIPMIFYGSGIKEGLNIPSPVNIYDITPTMAALLGLEIPSEWTGRILYEIFK

SEQ ID NO: 101837 - protein, 222 aa, Unknown
  Obtained from environmental sample
  DOMAIN (8)...(218): Putative RNA methylase family UPF0020
  misc_feature (1)..(222): Xaa is any amino acid
AEGDDCSFHIAVSGWKRKFPLYDPFCGSGTILIEAVMYAWDIAPGLGRRFAIQDMPIADSKIEQQVRDEFRAKINFSGADGGRLVRIAGSDEDLRSISIASSNTARLRDIAEGREPQRGIRNADKFLGIDLKVLPMAQAQSPYTDAGFIITNPPYGKRLGDQSAAEETYKNMSGIVSRFPGWKLAVITDHSGFESFYGKKADSCREISNGAIPSFFYQYGVN

SEQ ID NO: 101838 - protein, 159 aa, Unknown
  Obtained from environmental sample
  misc_feature (1)..(159): Xaa is any amino acid
EYPDSLTFGKQSLSVGCPSRTTTGTCGAWWFQGGPKNPNAARKAADSLNTASVKAGWHNFGFTVAGSAEFKYEKNSGDRLLFTGDDDMWMFIDGELVIDLGGTHQPLSDSVKIDDIANKKGWEDGSIHSMNFFYAERQTGGSNLRLRFAISSLSAPRLQ

SEQ ID NO: 101839 - protein, 285 aa, Unknown
  Obtained from environmental sample
  DOMAIN (177)...(214): WD domain, G-beta repeat
  misc_feature (1)..(285): Xaa is any amino acid
VGCVSGREIRTFSGHKKGIRSVAFSPDGKQVLSGSYDQTVKLWDIASGRAIRSFKGSGPVAFSPDGRQVLSGGSSKNTVKLWDIASGREIRTFNGHTEINMSVAFSPDGKQVLSGFFSFGKYNFTVKLWDIVSGQEIGTFSGAHTHRVNSIAFSPDGKQVLSSSFDKTVKLWDTASGREIRTFSRLRNGVASVMFSPDGKQALSGSGDTVKLWDAASGQLIKIFSGHTDWITSVAFSPDGKQILSGSDDRTIKLWDIVSGRGIRTFSRHTDRITSVAFSPDGKQI

SEQ ID NO: 101840 - protein, 284 aa, Unknown
  Obtained from environmental sample
  misc_feature (1)..(284): Xaa is any amino acid
LEREGALENLFLRGKVAYLFERYCAERELTGMLLCVGPGNQEVQDLPGAIDEWVRGTHGETPARRAGKDAALFFVLTKMDMEFEKKAGSPDVKDRWKTRLSASLLDFFGKQHDWPLHWDDAGPFRNLFLLRNPNFKCEAIFEFDAKSETAVRADQRAFVEEVRQAFLGTPEVRAHFAEAERAWEAAMSLNDGGVEYLRRKLRPLCNPQLKREQINTTLAERLDKLRSLLTPFWHTDSKEEERSQKEALSRTLAAICAQIVQAQRFGEFLRLLQVTDRELCDLHF

SEQ ID NO: 101841 - protein, 223 aa, Unknown
  Obtained from environmental sample
  DOMAIN (2)...(212): Iron only hydrogenase large subunit, C-terminal domain
  misc_feature (1)..(223): Xaa is any amino acid
MVIKIAPGEAQAVCAELGLTAGAITIGKIIAGLRQMGFSGVYDASPFEAMSANEEAAELSERIKNSNLLPMISVCSASCAKFVKEFYPDLSDHLSMVKSPEQNFRDYVDSGNDAQKICVSVVPCIAKKYKAQSPKEIVLTVRELARLIRLSGIGLSAIKESTFDQFSGETGGIETKVKNLEVCGLANARQVLDSICSGNNDAAYVRILSCPPGLKQELCVDEK

SEQ ID NO: 101842 - protein, 285 aa, Unknown
  Obtained from environmental sample
  DOMAIN (75)...(247): B3/4 domain
  misc_feature (1)..(285): Xaa is any amino acid
AFDATAGTNLAEALGLNDVILEIDNKSLTNRPDLWGHYGIAREISALYNLPLKECEPFAPQSVPDLEITLEDTQRSPRYIGVKIEGLSIKPSPFKIQSRIWRVGMHPINAIVDITNYVMLAIGQPTHAFDSDNIEGHITVRRAKESEKLLLLNGKELSLSVNDLVIADNEASVGLAGVMGGSKDSVLPKTTKVILEIANFDSIGIRHTAMRYEVRTEAAIRYEKGIDPERCDIALSLAMQMFADFFPKLSITGFSDSYPKHLKSKEIDVSLDWLEKRLRQTHFKR

SEQ ID NO: 101843 - protein, 127 aa, Unknown
  Obtained from environmental sample
  misc_feature (1)..(127): Xaa is any amino acid
RQEKTERKAFVPLHAVAWGIIDDKQLHGYKDPVFPALTKSKTNTNEYLKRWAKKAGIEKNIGWHTARHTFAVLSLESGAEIYTVSKLLGHTDVKTTQVYANATDKMKREAVNALPVIDIEKKRGNDK

SEQ ID NO: 101844 - protein, 283 aa, Unknown
  Obtained from environmental sample
  misc_feature (1)..(283): Xaa is any amino acid
DTLIKQPGEKEIHRAILEAAEMVKTAPALLDVNSLINKLAVKETERAAFKLTRIGKISIKPPEWVARHFLEKDSFCSIYGDSGAGKSFLAIELAACIATGTPFYGLPVKQGPVFYIAGEGNAGVARRLLAWSIMRGVSLERAQLYLSTGAVSLIEPMAMGAVNAAIEKLIREIGNPALVIMDTWSRVLGGDDSSPQDAAAGVSAMDGLRERHGNFAAVVIHHCGNSEKNRSRGWSGLRAAVDMEYRAERGADGILRLECTKAKDSAPIDPMAFQFTEVELPIR

SEQ ID NO: 101845 - protein, 102 aa, Unknown
  Obtained from environmental sample
  misc_feature (1)..(102): Xaa is any amino acid
SAEGQVEGGLLMGMGYALTEDFPVKGGYPKAKYGTLGLLRATEAPQMEIIFVKPKSPPPLAHGAKGVGELAAIPVTPAIAGAYYAKDKKLRTKLPMENTFYK

SEQ ID NO: 101846 - protein, 159 aa, Unknown
  Obtained from environmental sample
  DOMAIN (52)...(159): Glycosyl hydrolases family 25
  misc_feature (1)..(159): Xaa is any amino acid
MKKKTRKTGKVSAVKLLIFSFIIIIIVLGILLSYRKIWIVYPNKNIYSVEGLDVSNHQGNIDWDNIDTKYKFVFVKATEGDTFVDKQFIKNAESVKRTGRILGAYHFFHFNYKGTDQADNFINTAGNIIDLPPVIDFEFSGNPHNYKKEIILEELRNCV

SEQ ID NO: 101847 - protein, 281 aa, Unknown
  Obtained from environmental sample
  misc_feature (1)..(281): Xaa is any amino acid
MRKVDILLYHREQEKFLEELRGLGVVHITSEQPVDSPAAQEMSSNVQRAQRVVGALSKLQKEKGVTTVSVSPTAVPELLSNFESCEAQRDRIDQELATIKKDTIALEPWGNFDPKAIKRLSEAGVKFTFYTAPQKKFAQIDRKELRIEVIAERGTTVYFVVVYRGEAPEVPGAEIVRLPDIGPKEMAAKAVALESERKEVLAKIERMVGSIPSIEKYRNDQLNNLKYEEARLSMTGAADGKILKLSGWVPKQNEAKLVIFLQDYPAYVEFRDPGPDDNVPV

SEQ ID NO: 101848 - protein, 59 aa, Unknown
  Obtained from environmental sample
  misc_feature (1)..(59): Xaa is any amino acid
GLACLVSAIHQGNICANGIAALGGGHNVFGNTLILAVFPELYAILSLVAAILMMGILGK

SEQ ID NO: 101849 - protein, 115 aa, Unknown
  Obtained from environmental sample
  misc_feature (1)..(115): Xaa is any amino acid
TLAPITLGLGALIAISVFPQKQAAAAIYALAFGDSASTLVGKCLGRLRPAFLSGKSLEGSFACFTASVLAAYLVFSDLKTALAVGFASLLIDALPLGEFDNILLPLTAGLTALLW

SEQ ID NO: 101850 - protein, 268 aa, Unknown
  Obtained from environmental sample
  misc_feature (1)..(268): Xaa is any amino acid
LDRNTYHYDRVTTNFENLAFFYFETGEVNYHLWAESELLLSDGLMLLAKHLKYGVFDPVNNEDYYYFIPPKKADDNSFDVFYADKLWPFFQSLVPTSSQYKALQNEYVRRLEKPKNLRTTKYNDTLNILRINMDRWRWSPLFAKNERVVYINIPPFELQVLKADSVLMSSKVCVGIRRPKIYASLYRDYLKNPTTTPKPRHNETPILKSAINYLVLNPEWRVPSTIAKNELLYCIQKDPNFLSRMGYYIYRGNVRIDPSTVNWNAVTP

SEQ ID NO: 101851 - protein, 199 aa, Unknown
  Obtained from environmental sample
  DOMAIN (12)...(114): DnaB-like helicase N terminal domain
  misc_feature (1)..(199): Xaa is any amino acid
MAAAASLSIDRIPPHNDDAEKAVLGAMLIDNSTLPVVIQHLRSDDFYATFNRRIFEAILSLDAAGHRADLLTIKGELEKAGKLDEAGGIDYIAALTNVVPSSANADYYAQIVQDCSLRRGLIQAAGIAGTRAYDETSSPKLILEEIQQRLFSLSDTRRLFSYRKARETIKSTFEYLTMVFKKGEYTGIPSRFEALDKLT

SEQ ID NO: 101852 - protein, 241 aa, Unknown
  Obtained from environmental sample
  misc_feature (1)..(241): Xaa is any amino acid
MRNNLNPRVWECEMGQVGDTFLVNQFLHPYAGANYFASARSNNINFYWSILFSAFGSLSWEALGETDIPAISDAINTTFGGIVLGEVLHRLYIELDKGRIAGKIISSIVSPPDRLTALIRGYGPQEGLSKISGSSFAFGLSWINAKFFDDYEEITSWNTPAAFINFDIVYDNPYTAYSNTPFAQFDLNTSLTVSIQPFYNLTIIADGYLVSWLLADNDADQASNGITLHLDDFITDKGFMD

SEQ ID NO: 101853 - protein, 248 aa, Unknown
  Obtained from environmental sample
  misc_feature (1)..(248): Xaa is any amino acid
IMKDDGLGGLEIDRPAKILIDKDGKRVLEAGGVPDGTMETALMSTLERMLKGKMRDRELPPPVRSALLVQLKEYYKDQDNNINNTCNLSDFAVKYLKGHPLFKDDWDLYARLIRFIGDGGEHEGAYAKFFRGGTKFLNDDIICFDMAGLKEHEELKSVLIPAVISMVMLNVLNNPKKRHRRKFVVMDEAWRELQGGDMAQFMEEMYRTIRKLNGQVTIITQSVDDLLERRVGKRFDEEYVIFLAYRRD

SEQ ID NO: 101854 - protein, 116 aa, Unknown
  Obtained from environmental sample
  misc_feature (1)..(116): Xaa is any amino acid
MKTNNQNPTQYEWGPFPFGDGEINSKNITRRSQSNKEHKENKGEKINENQIGLIIVDTAVNLHKKLGPGLFESVYESILLKLLTQKGLFVQRQVSIPINFQGEYIDEGFRVDLFVT

SEQ ID NO: 101855 - protein, 298 aa, Unknown
  Obtained from environmental sample
  DOMAIN (216)...(289): S1 RNA binding domain
  misc_feature (1)..(298): Xaa is any amino acid
ASDIAREEFPELDLTIRGAISIGRRLQDPLAELVKIDPKSIGVGLYQHDVNQKKLSDTLDEVVSSVVNNVGVNLNTASASLLKYVSGINSSLARKIVQYRDTQGRIASRAALSDIPGMGPKSFEQCAGFLKIPESAEPLDNTWVHPENYPVAREIHATITATAGLSADTINTLKEKHGVGETTIRDIAEELKKPNRDPRDSYPKPIMQKGVVNFEDLYEGMMITGKIKNVVDFGAFVDLGIKETALVHISEMGDHFIKDPLATVKVGDVLEFRIISLDIQRRRIGLSRRGSGTRDQGL

SEQ ID NO: 101856 - protein, 254 aa, Unknown
  Obtained from environmental sample
  misc_feature (1)..(254): Xaa is any amino acid
MPSTGNAPYPVVIRYGDSGADAATMKALGVAVINYTPTDVGGETGGSRSKSGVFYTVNSGSPYNKTGTLAAWAWGVSRIIDVIEADPNKLFDPMRVGVTGCSRYGKGPFAAGALDQRIALTMPVEGGTGGAAIMRGAAKESGAQSPSNAYGEQPWLGDDFQPFSTNPNNLPIDMHSVVGLIAPRGLLILEKPSAADWLASRSGHMSALAGSKVYEALGYGGNITYHSNNNNGSHCAWISEWKTPVEDNINRFLL

SEQ ID NO: 101857 - protein, 284 aa, Unknown
  Obtained from environmental sample
  DOMAIN (187)...(284): LeuA allosteric (dimerisation) domain
  misc_feature (1)..(284): Xaa is any amino acid
EQITAAVLREIALPIGIHCHDDSGCGVANSLAAVRAGAALVQGTINGLGERCGNANLCTIIADLALKMGHDVLPGQKNLAELSEVSRLVSELANMPHDPGFPYVGANAFAHKAGVHVNAVQKYAAAYEHARPELVGNTQRILISEYSGKSSIIAKAREFNLDLEGKDIPNKILELVKDLENNGFQFEGAEASFELLIRQALGQFSPGFELKGFRIITHKIENNDSVNEATIKVVVNGIEEMAVAEGDGPVNALDSALRKVLERFYPILKEMSLADYKVRILNGN

SEQ ID NO: 101858 - protein, 285 aa, Unknown
  Obtained from environmental sample
  DOMAIN (13)...(283): Glycosyl hydrolases family 28
  misc_feature (1)..(285): Xaa is any amino acid
AAINGAINKAYESGGGTVIVPAGRWYSGTIELKSNVEFLIEAGAELICIMDENVLRGFDDFEAAEMLPVSFFIGASGVNNASITGKGVIYGQGELTMIDDHSDGGFDESPLGFTNFRPKLLLFYNCENLLIRDVTLKESASWTLHLAGSRHIRIEGINIQNNDRGANNDGIDPDSCQDVIIMDCNISTGDDAIVIKTGKEISRRFGPCRDIVIMNCILHSRDSAFKIGTETFASIENIVFCNCTARDCSRIVGIWVRDGAEIRDIRIFNIHGSARRYASSTRYPM

SEQ ID NO: 101859 - protein, 152 aa, Unknown
  Obtained from environmental sample
  misc_feature (1)..(152): Xaa is any amino acid
MSPIFIGVIALVLVAAIFLIIKNGASGLSFGGGKSAKDREAMIKEANRRLTQNPNDPEALFMLATAYFDEQNWEKAMPVYENLTEQIAANKNIKGIDNFEVFLRYGLSARKLNMLEQAYKGFSSARTYRMDNFEVNFELGSLELKEKIMKKQ

SEQ ID NO: 101860 - protein, 179 aa, Unknown
  Obtained from environmental sample
  misc_feature (1)..(179): Xaa is any amino acid
MKKTTIMLLLFCMVCFAQRPLDSTSDYTKCLEKYKSISEKVTSGQSQCLQEYQAQQAKIDTEAYTDTFTDSRDGKKYKIVKIGTQTWMAQNLDYKAKGVCYENNSANCAKYGRLYDWNIALKVCPKGWHLPSKGEWDILTATIGDSLTEANTSRLLAAGKIIKMEILAMARTLTALRLC

SEQ ID NO: 101861 - protein, 76 aa, Unknown
  Obtained from environmental sample
  DOMAIN (4)...(70): Transposase
  misc_feature (1)..(76): Xaa is any amino acid
MGKRKEYTKEFKGSAMELYHSSSDKTIKEVAEGLGISPENLRRWLREEEERKTSKLKAFPGRGNPRDEEVAQLRKE

SEQ ID NO: 101862 - protein, 254 aa, Unknown
  Obtained from environmental sample
  DOMAIN (1)...(163): Bacterial DNA polymerase III alpha subunit
  misc_feature (1)..(254): Xaa is any amino acid
VIKHTEDLIRRRGGQYADFSVEKAPEDDALTFRMLSEGKSFAVFQFESDGMQNILKQAKPGSIEDLIALNSLYRPGPMDNIPQFVDSKNGRQKINYPDSSLVDVLKETYGVIVYQEQVMEVARIIAGYSMGQADLLRRAMGKKKKEILDKEKKSFLEGAVKQGYSSSKAAAIYDMLIPFAGYGFNKSHAAGYSVVAYHTAYLKANFPAEFMAANLTNEIRSADKDKLSECIDEARRMGIAIDPPDVNRSDKLFT

SEQ ID NO: 101863 - protein, 286 aa, Unknown
  Obtained from environmental sample
  DOMAIN (26)...(233): ABC transporter
  misc_feature (1)..(286): Xaa is any amino acid
VSFSEVSRFYGRQDVLAGVTLALSPGERVGLVGRNGAGKTTLIRLLLDLESPDAGTVTRAKGLRTGYLPQELAARRGLSLLELVLDTAEEYRKVEAELALVSEELAQSREAGELLELAERHGHLLQLFEALGGWGKEAEAKKILSGLGFAEADFGRDLGEFSGGWLMRGVLARLLLASPDLLVLDEPTNHLDLDSLLWLENHLKNSASALLLVSHDRVFLNNVAQKIIEIRQGRAQTYAGNYEWFLAEKEQRLATEAAAFENQRERIKQIEKFIERNRVRASTARR

SEQ ID NO: 101864 - protein, 104 aa, Unknown
  Obtained from environmental sample
  DOMAIN (55)...(88): Tetratricopeptide repeat
  misc_feature (1)..(104): Xaa is any amino acid
SDYDRAIADYTQALRLNPNDAGAYNNRGNAHSNKGDYDRAIADYDQALRINPNHALVYNNRGETYRNKGENDKAIADFEAALRINPNDADARQMLEDARRQQGR

SEQ ID NO: 101865 - protein, 89 aa, Unknown
  Obtained from environmental sample
  misc_feature (1)..(89): Xaa is any amino acid
MTTSVIELRGIKREYRMEGKGDSSSTDAVVVRALRGVDFSAEAGEFVSVMGPSGSGKSTLMNILGCLDKPTAGTYTLDGIETSKSDSDT

SEQ ID NO: 101866 - protein, 228 aa, Unknown
  Obtained from environmental sample
  misc_feature (1)..(228): Xaa is any amino acid
MEFNTYRIKEIVDISKYIYDYLIEYNTSIVVPDLGCFSIMHKPSEIKDGVVIPPLKTVKLDSDKTEDDNVFTLYIAKKEDITHDQAIKEVKNFYNYFFLHKLALDGKPVIFEKFGTFSVDNGNIHFEPIPDFFKDNFGLGKTQISSDKPKQSQNVSVPITPKPEPVKPVVSESIPVKPVTPVPEPVKPVTEKPSEPELGIPVPPPPVKPVSAEPVSVKPVDEKTIVAE

SEQ ID NO: 101867 - protein, 62 aa, Unknown
  Obtained from environmental sample
  misc_feature (1)..(62): Xaa is any amino acid
MDIFGKIQQSEGPLGQYRKDAHGYFMFPKLEGEIGAHMTFRGKEMKEKLEAGKYVGDKVRMA

SEQ ID NO: 101868 - protein, 256 aa, Unknown
  Obtained from environmental sample
  DOMAIN (1)...(112): Protein of unknown function (DUF1215)
  misc_feature (1)..(256): Xaa is any amino acid
VIEPPLEITVTTLTKRVVEEIEESWVADVVNPYVNKLIKRYPFDKKGNDAAWSDFEEFFKPKSGILWIYSDKNLSGVIERTSRGWEGVGRSLSLPLPLNDEMARCFSGAERIADNFFKKDGTPKRHEVIFRPIKSSSGEAVLLLGDRLFDFKTGQPVTIGRQQGSEVDEAIVLRLTASDKAQEEMRFTGEWAPVRLFESGKVDKLGNDRYRVNWRLNVRGIYTANITATVQSNTEALFDRGVTENFVVPKRVFKNN

SEQ ID NO: 101869 - protein, 144 aa, Unknown
  Obtained from environmental sample
  DOMAIN (8)...(143): Domain unknown function (DUF388)
  misc_feature (1)..(144): Xaa is any amino acid
MLLIRKYTLFLICCLISLIAATTVFAQQGNGTQFGYGFTGPQVSSGQFGYGFTGPSQTVSVAQAQSSGHRTPVIIKGNIIQAIGGDMYTFRDSSGEIVIRIGPREWQYYGTTISPSDTIEISGEVCNGRGWEPVHVHARFMRKI

SEQ ID NO: 101870 - protein, 282 aa, Unknown
  Obtained from environmental sample
  misc_feature (1)..(282): Xaa is any amino acid
MNGKVEKVYVDYNDTVKTGDVLAELNTDMLKLKREQQQAALIKARANYELELINYQGQETLARKNLISEYELKSSLTTLENLRADLRVAEANLKAIETEINQYAFIASPIDGIVLDRSVNTGDTVMESSNSNSASIFTLAENLREMQIEAMVEQLNVASLYRGQAVRFTLESLRGRVFTGTVENILMVPVVLNNVVSYTVIIGVENSDGILMPGMTCAVNFIVEQRENVLLVPNAALRYQPSTLTTEQIDEMVFNAGLALMDEDQRRTAIETRKQAQNSGQN

SEQ ID NO: 101871 - protein, 134 aa, Unknown
  Obtained from environmental sample
  misc_feature (1)..(134): Xaa is any amino acid
MRDRYIDPVAELGGKLLKVDKPARYTGGEYGIRINKDASFRTLIAFPDLYEIGMGNQALKIIYNRMNTIQDISCDRAFAPAPDFEKLLRENNIPLYGLDTGIALSCLDLLMFTIGYELGLGGLLFMLEASFIPL

SEQ ID NO: 101872 - protein, 87 aa, Unknown
  Obtained from environmental sample
  misc_feature (1)..(87): Xaa is any amino acid
VKYLLDTNIISETRKPNCNPKVKGFLDSLAGEDLYISSITVGEICYGIEKLPAGKKKHELYVWLYSKLPEWFSGRVISLDADVMAEW

SEQ ID NO: 101873 - protein, 71 aa, Unknown
  Obtained from environmental sample
  misc_feature (1)..(71): Xaa is any amino acid
LQKQILSNVKTYVKKGGMLAYSTCTVLKKENGENIRAFLAENAEFKIKFEKQFLPDDKGTEGFYICLLRKD

SEQ ID NO: 101874 - protein, 222 aa, Unknown
  Obtained from environmental sample
  DOMAIN (39)...(199): Glycosyltransferase family 28 C-terminal domain
  misc_feature (1)..(222): Xaa is any amino acid
KPVKRNQVIISGNPVRSAFRSADPEKGRAFLGLGRDERVLLVLGGSQGARELNTLVRGAIADLRLFYTVVHQYGPAQDWDLQRADRYIPLPYIKEEMPHVLAAAELVLGRSGAGTVWESAALGKPMVLIPLCGSGTRGDQVENARFFERQGAALVLLGDEAQPEKLSALISALAEDPSRREAMATAARKIGSLDGSAIISDSLLCGMRGSFRLPSETLQARE

SEQ ID NO: 101875 - protein, 271 aa, Unknown
  Obtained from environmental sample
  misc_feature (1)..(271): Xaa is any amino acid
MLIQQKLDLCKNSLDLFLSHSWNKSILAAIEMSKNPEAIKAIRERDTGKGIRIFTEALGVYGVNYFTITDENGYAICRTHEPEIFGDSLATQANIANGMQGRISTFYEPGNIVMVSVRTGAPVFDDDGSQIGIIVAGIRVDTNETAEDLKEILGADVMVFYGNKEISTTIAKKGKLLEGETVSPEIRKIIYDDKRTFSGTVKVAGTDFTGYYLPILNSQNQVFAAIFVGIPKGDLNREINFMFVQTLLIGVISVFLSIVLLRALRGAIAAS

SEQ ID NO: 101876 - protein, 264 aa, Unknown
  Obtained from environmental sample
  misc_feature (1)..(264): Xaa is any amino acid
GASFIVFNQNLTFDEKTKKTYVDPVKLSWFRNDNFRKAIAYAIDKDNMIRIAMNGLGYPQVSPMTPGEGYFYTGDVSTYPYDPQKALGILEQEGFKRDTDGEKLLRDKDGNAVEFSFVTNSGNTVRLKIAEIIRKDLQELGIKVHFQALEFNALIQKLDNPPFEWDCILLGLTGGDEPHFGRNVWYSGGQLHMWYPRQKKPSTLWEARIDTIYDLGARELDRVKRKELYDEWQRIAADKQPFIYTVLSERIECVSNKFGISILL

SEQ ID NO: 101877 - protein, 262 aa, Unknown
  Obtained from environmental sample
  misc_feature (1)..(262): Xaa is any amino acid
MDLRKPEYKDCTLFLRGKERFASITAMCDASLQIIDGFGELHRKGYSYQDLNDGNFFINPKSGDVLICDNDNVSEAGKNSGIAGKARYMAPEIVAKGKMPDKYTDRFSLAVVLFLLWTKNHPLEGKAAFPVCMTAELDKKIYGENPVFIFDPNDDSNRPVQGINKGAITNWPFLPAYLQEQFKKAFGKEALHDPSKRVIEQEWLRTFIRMRSEIYKCPCGEVYFADPANPNPCPSCKKQNSFAFYLKFSRYNAAVHQRTKLY

SEQ ID NO: 101878 - protein, 46 aa, Unknown
  Obtained from environmental sample
  misc_feature (1)..(46): Xaa is any amino acid
MLERAKPFIKWVGGKSQLLEQFERYYPDELKKGTIKNYVEPFLGGG

SEQ ID NO: 101879 - protein, 260 aa, Unknown
  Obtained from environmental sample
  DOMAIN (18)...(254): haloacid dehalogenase-like hydrolase
  misc_feature (1)..(260): Xaa is any amino acid
MKPIVELTAKEAKGVQYFLMDIDDTLTTQGKLLPSSYSALWKLKDAGLKVIPVTGRPAGWCDLIAREWPVDGVVGENGALAFWEEPGQALEREYHPNAVRNDHSVLEKIKEKAFAEFPALRLAKDQFARLFDIALDFAEEEPVLPLSAAQRIKEIAEEESAVARISSIHVNIWMGSYNKLSMVEYLLARRFGWKPGAEDREVVFVGDSPNDEPMFARFPITCAVSNIERYVDFIKQKPAYVASKECGDGFAEIAGIFLKS

SEQ ID NO: 101880 - protein, 284 aa, Unknown
  Obtained from environmental sample
  misc_feature (1)..(284): Xaa is any amino acid
LVGIKGEFELYTEREAFFNCAFLAALANGNTIIHEVKAMPDFADFASYLRNLGAQVNIKDNQWEIAGTNFKCEKPLDLKWVGDNFPHQKRNQKIIECLLSGVAFHCEEKIAVKDSLIRELLAYGAELQWYQDGPDESDELAKRMAKLQGIKNERKWICDIPPVPALLARDRFIAGDVTQAAYLALAASLISDSDIVVKAVNLDSSRAGIFGAFRRLGAEIDIVARHERGRDVWGDLRIRRAKMLVGRRLGTDVLQTCLDEIPLLAVLACFAEGETILKIPDWAV

SEQ ID NO: 101881 - protein, 89 aa, Unknown
  Obtained from environmental sample
  misc_feature (1)..(89): Xaa is any amino acid
MIESVIAQTYGNWELCLVDGSDVTHKNIMYVCKVYAMNDKRIKYQKLNKNLGISENSNKAIEMSGGDYIGLLDHDDVLHPSALYEIMKV

SEQ ID NO: 101882 - protein, 276 aa, Unknown
  Obtained from environmental sample
  DOMAIN (143)...(264): Polysaccharide deacetylase
  misc_feature (1)..(276): Xaa is any amino acid
VLIEAFNLQIKNILLGINIVLIIIFMSCGKTNAVSPQLPEPPDSFQPSEPPEPPEPPPLETVIQKIKINSSEIKKYLLFDKTGELVIKADIEEKDKKGNTAYFQVLYDMKRAVIENSGEYLITFILKDFETGEFYEDKLLWKPQKDNTGILLSFDDHYYNVWENYFGLFDRYKAKVTFFVTGTYKTNSYFSKTALRRGHDIGYHTLNHLKLADISRQNFFIQTVSQVKYFRNAKIPLVSFAYPYGLYKTWMNNELLKTFKLIRGYNICFHVYDRQA

SEQ ID NO: 101883 - protein, 278 aa, Unknown
  Obtained from environmental sample
  misc_feature (1)..(278): Xaa is any amino acid
LYGIWERLVKIDHEEADLAKTLAEHYEKLAEPYEKQGDLENKEYIKNKENSVDYYKKTLHRYIAKRLFSNVKEIWEKLLSYCPKYIEIDFFLNVQKKIAKNFDELKAGTLLKDVYNICVKRDDIKTAIAVLKLILEYDNDDRQARRDITDCYRKKYAGHSHLEDYIRISSLAQGPRNVKEAVQDFEKHIAFDKGNFVFHRTWGVGRISNVQGDDIIIDFAKQRSHSMSLKMAVNALQTLSNNHIWVLKAMWKKEKLHDKVKNEHEWALKTIINSFDNS

SEQ ID NO: 101884 - protein, 291 aa, Unknown
  Obtained from environmental sample
  misc_feature (1)..(291): Xaa is any amino acid
TSPTKDGFFAKLIRSFKRREAGIDDPTLDDDLDDVIPEPGSGVFELTPADSQPIQESSAEKEHTTEQAPPANVTTDSGVFEFAPVESQPHQEPSAETEHTTEQTTPANTTTDSGVFEFAPVNSQPHQESSAETEHTAEQTTPANTTTDSGVFEFAPVDSQPHQEPSAEKEHTTEQTTPANTTTDSGVFEFAPVDSQPHQESSAEKEHTTEQTTPANTTTDSGVFEFAPADSQPHQEPSAETEHTAEHTTPATVTTDSGVFEFAPADSQPHHESSAEKEHTAEQTHVTMLQT

SEQ ID NO: 101885 - protein, 231 aa, Unknown
  Obtained from environmental sample
  misc_feature (1)..(231): Xaa is any amino acid
MNLKNRYRKRSFLIEEENCLRKYGEYINLEYDINAFDIWKENIEKEFIENENENIFILKEGNTKSMLMRFYQFIDELNIIFNQYSPCKNKCSECCFIHIAVNELEINIIFDFITSNKLKYKKIRPKEILLEDIYNIKYFGKKCPFLKNGICLIYSVRPLVCRKMIVLEEDNSKCKYFTLKEINTMNDDYIIKIISNLIIKKYRKENGQDTSNNSIILSYCDIREILKREYV

SEQ ID NO: 101886 - protein, 249 aa, Unknown
  Obtained from environmental sample
  DOMAIN (80)...(249): Binding-protein-dependent transport system inner membrane component
  misc_feature (1)..(249): Xaa is any amino acid
MEKKINGMTVRLTVTDRIFYTGINAFLVFILVIVAIPMWSTITLSFRPNTFIGSNLRGMFLAPWEWSTAAYRALLGNNGFVNAFGNSLKIFVMGVSTALFLTIPLAYVLSVKSLPGRKALTILILIPYLFNVGLIPSFLVVTRLGLTNNLAAIFLPGAIGTYNCLIMRGFFEGIPEELKESARIDGAQEITVLLRIILPLSKPIIMTIGLYYGVSFWNDFFNAMLYINNNALQPLPILLRNILMASGMN

SEQ ID NO: 101887 - protein, 236 aa, Unknown
  Obtained from environmental sample
  DOMAIN (123)...(234): PAS fold
  misc_feature (1)..(236): Xaa is any amino acid
MLTNYYERTGYKANFVFDFTSESTFGFNRNETILCSIVDKALRLIDTRGISGQWMRRTYDYSAKLARSQRPWLISAAALFFCILVLLFVLFQRNRRAGKELEILVQKRTNELVIQSATLTAAFDATPDLIFCKDLDLRFIRCNKTFENYFNVREADIIGKGNIDGLGLSAKTAEKYKERDLKVINEGRMVVFEEYIPSADGTKQLFETSTVPMTQNGRTVGVLAVAHNITERKEME

SEQ ID NO: 101888 - protein, 268 aa, Unknown
  Obtained from environmental sample
  misc_feature (1)..(268): Xaa is any amino acid
KRGRAWYPDGTPVPGGDFTHPYADEDLAGLRFAQSADVIFVVSPNHKPAKISRYADDDWRHEELTFLPKTPFEDEDEFPTAVYFIQQRLGFAASIAKPLTIWTSQSANFENLASSVPPRDDDGIEATIAGERQTRILWCKSEGKHLVIGTVGGEWLLSPGAGNVITPASHGFNPQSHIGSQPGVDALRAAEGVLFVQRGGGAIRLLGYSYDEEKFKPKDLSILAPHILEGKKISSWAWQLLPYGVVWMSLSDGTLAGLTLLVEHDVIG

SEQ ID NO: 101889 - protein, 156 aa, Unknown
  Obtained from environmental sample
  misc_feature (1)..(156): Xaa is any amino acid
MCYPIVAVAAMAVMAAGSAYMQSEQQRAQMKYQSEVEESKAVAMRQQADIEAQKGVVEQHRQDMERDKISRDYQAQAARNRSLLASGNVDMASGSAADSLLGNAALYSEDVAANRFNRNLADWQTDENVRQAGYQSAMLSSQSSWLSQSAGGMKTR

SEQ ID NO: 101890 - protein, 183 aa, Unknown
  Obtained from environmental sample
  misc_feature (1)..(183): Xaa is any amino acid
MSENTNSATANNAPKEFDIIDGNTLMAQEYEPLQFAIDKILPHGLFIMAGSGKIGKSWLSLDIGVGVATGGSLWDFAAEQGTALYLALEDTYRRLKDRLEKIDAKTLDISRLKLTTASFGISSGLIEQVNNFLAKNPGTNLIIIDTLERIRDTDTDKSIYSCDYRDMTLLREITNRHKLTLLL

SEQ ID NO: 101891 - protein, 264 aa, Unknown
  Obtained from environmental sample
  DOMAIN (1)...(168): MobA/MobL family
  misc_feature (1)..(264): Xaa is any amino acid
EKSERNDNAQLAREIEISLPRELAIEQNIILAREFVRKTFVDKGMCADVCVHDTGKGNPHAHVMLTLRPIKPDGRWGAKSKKEYILDGNGERIKLPSGEYKSRKVNAADWNERGKAEEWRAAWEDAVNAELERHGIDTRVDHRSYERQGIDKLPTVHLGPAASQMERKGIRTERGDINRSVEVTNSRISQQRARIKHAKDWLYAIPLQDAPSMVDMMNRVADTRHFTSRAKSIKNLQTRAKVLCFLQDNNIADRGFDKFAAKVK

SEQ ID NO: 101892 - protein, 121 aa, Unknown
  Obtained from environmental sample
  misc_feature (1)..(121): Xaa is any amino acid
KHGLDTAITLNGDERCILSAFYLARTFKMEPGDTVYFNAIGGKKKYPLKVICHRREEIKTAFGKKKCLVVEPVILGDGLFKAKGKLTIWLTDDEERLPVLMKSEIAIGSIKASLIGVTRQN

SEQ ID NO: 101893 - protein, 151 aa, Unknown
  Obtained from environmental sample
  DOMAIN (1)...(84): Arginyl tRNA synthetase N terminal domain
  misc_feature (1)..(151): Xaa is any amino acid
MFTFENKIAELAEQTTYWTAAEALSLLSIPPDSSHGDWSLPCFNLAKKLRKAPKAIAEELAAKFPAPQGFAKTEAINGYWNFYVDKAAFIKIILDEIKEKGLEFGFAPAKNKTVAIDYSSPNIGKELAFHHLRSTMLGNSLARIHKANGFH

SEQ ID NO: 101894 - protein, 294 aa, Unknown
  Obtained from environmental sample
  DOMAIN (150)...(294): Bacterial DNA polymerase III alpha subunit
  misc_feature (1)..(294): Xaa is any amino acid
VQNETGYSNLMKLVSDMYINQQPPKPVHVTLDNLAGHAEGLICLTGGVSGPIGQALLAGQTELAAEKCAVLEKIFPGKFYIELQRHGLAEEEETEPGFLSLAYERNIPIVATNECFFLSKDKHYAHDIFLCINGGHYYDEENRRRETNEHYFKSPEEMRELFADLPEACDNTIVIAKRCAFKIKKSKPLLPRISGDIDSEEMLMISARAGLEERLQIANVEGEARKQYLDQFIYEVGVITQMGFSDYFLIVADFIDWAKKNGIPVGPGRGSGAGSIVSWALKITDLNPLQFGLL

SEQ ID NO: 101895 - protein, 134 aa, Unknown
  Obtained from environmental sample
  DOMAIN (2)...(129): Putative bacterial lipoprotein (DUF799)
  misc_feature (1)..(134): Xaa is any amino acid
VAEDAHAIAPSRLREIFGADSALYITITSYGVRYVGIASVVEAAASTKLIDLRNGLELWSGRVALAESSKNSKKDSFIEMLISAAFDQISNVLSDRAYDVGKKANHQMLSAGQKKGLLYGPYHSRYKTDLLQDL

SEQ ID NO: 101896 - protein, 126 aa, Unknown
  Obtained from environmental sample
  misc_feature (1)..(126): Xaa is any amino acid
MQAHSIADYIFCIHADIQTDELFEGIWPVPKGVSLNSYAVKGEKTAFIDLFRDWGGAAAQLEEALASIGSDFSSADYLILNHLEPDHTGWLKNFREKNPGAEIISTQKGIDLVKSFYKIDTGLRAV

SEQ ID NO: 101897 - protein, 102 aa, Unknown
  Obtained from environmental sample
  misc_feature (1)..(102): Xaa is any amino acid
GDIEQKVGDIVRDDISRYDTVRIGNQTWITRNLDIQTGNSWCYNNDQSNCDKYGRLYDWSTAMKICPVGWHLPTRQEWQTLVDFAGGNSTAGKKLLPAKFLT

SEQ ID NO: 101898 - protein, 91 aa, Unknown
  Obtained from environmental sample
  DOMAIN (4)...(50): SpoVT / AbrB like domain
  misc_feature (1)..(91): Xaa is any amino acid
MELAKVTSKGQITLPVQIRRKLNLKEGDNVIFMEERGKIFVENPTKSAILEAQEAFAGLADELGLKTEDDVVNLCRKVRTENWEKLHARHG

SEQ ID NO: 101899 - protein, 270 aa, Unknown
  Obtained from environmental sample
  misc_feature (1)..(270): Xaa is any amino acid
MNGGEIILADEPTGALDSKSGSDMLELLHELHTAGHTVILITHDPGVAARAGRIITLHDGEIVSDTASGDTGKPAAGRWRKTPGGAQGATRLPLAAAMALAVRSLKTNRFRTALTLLGIVIGVASVVAMLALGNGAKAKVLASIEAMGSDLITIRPMPRHTRSATAGALRLMDDDVNALKSIPGVLAAVGEDRGSVVSVRYQGADSQTNYIGTGVDKPVVNNWATASGEFFAERDVATSAPVAVLGRTVASNLFSAGTDPIGSYVLIQNV

SEQ ID NO: 101900 - protein, 286 aa, Unknown
  Obtained from environmental sample
  misc_feature (1)..(286): Xaa is any amino acid
VIANHLGGHDQLVIGVYPLLPNETCHFLAVDFDKAAWREDAEAFMTACAAEGIPAALERSRSGNGAHIWIFFDKPVPAVKARKLGLFLMTRTLDRRPEIGMNSFDRFFPNQDTLPKGGLGNLIALPLQKAARENNNSVFLDGAMTPYADQWAFLASVRRVDESVLDMYINKAAARDELLPVVSDPAEAEDEAQPWQRRAAALPKITCPLPEKAEIVLANQIFIAHAGLPPELRKRIMCLASFPNPDFYRAQRMRLSTWDKPRILCCYEFFPEHIGLPAGCLSGLIA

SEQ ID NO: 101901 - protein, 264 aa, Unknown
  Obtained from environmental sample
  misc_feature (1)..(264): Xaa is any amino acid
MSLLIADIINVAGSTQFNVREGLNGNAPSPIPSIGISAIIKLKSGGQRIIGGALPSDGELAVDAAAKPLYRGIWAMGGGATWTVGVADRNPPVITIDYPETAWISPNNDGKADDLEFPISITDERYIMEWVFEISDEYSTPVRVYRNKEIRPETQGVQNFLGRLQAVNTGVEVPQSMRWDGTTESGGIAPDGRYFFTVTAKDDNGNTSTKGPYEVNVDNTPPEINLNPFTGEMNIFAPGSGGGRNTLTITQTGSREDLWEGRYL

SEQ ID NO: 101902 - protein, 71 aa, Unknown
  Obtained from environmental sample
  misc_feature (1)..(71): Xaa is any amino acid
ANIVKIILLGFFTAIFGDLGDLAESAVKRSADVKDSGNMMLGRGGILDSIDSIALAAPVYFLLFNIFFINS

SEQ ID NO: 101903 - protein, 141 aa, Unknown
  Obtained from environmental sample
  misc_feature (1)..(141): Xaa is any amino acid
VCSASGTLSITGGTVSATTGVALLIELSGAVTTVSGTARVTSANTNTAQGTIYLMDSSYGSVTKILLEITGGRVENTSTTTGNAIRNDSNGAVSITGGAVSKAGSSGYAVNNAGEGAVTIKNPPAVTITGNNTGSNITFVP

SEQ ID NO: 101904 - protein, 197 aa, Unknown
  Obtained from environmental sample
  DOMAIN (17)...(102): Rare lipoprotein A (RlpA)-like double-psi beta-barrel
  misc_feature (1)..(197): Xaa is any amino acid
MRRILFTLFVGFLFVVQLAAQSSGFSQNGKVTQELQADGLCIAHPALPLNSQAKVVNIATGKEIDVTVTRRIPASLNRIADLSPGAWRELGLTPNSEVKIYTNAFLRPTGGASGADTGSLQVSQPLNSNHNNAQNNAQNLNVPPPVSANASINIYHVPSIRTENSSNSSSSKLMPWLTTMVFDSKEAREIKESRSIR

SEQ ID NO: 101905 - protein, 101 aa, Unknown
  Obtained from environmental sample
  misc_feature (1)..(101): Xaa is any amino acid
MWFGKLSNRALADLAKQAVRTTGNFNWTFIAILAVVVYIYATEFQRRNFKGIAAGLALYMVHWFYEIVNAVICSATGYALWTVSPQSTSFIILIGVSWELS

SEQ ID NO: 101906 - protein, 291 aa, Unknown
  Obtained from environmental sample
  misc_feature (1)..(291): Xaa is any amino acid
INERVITYMKEVISHNGNTIFHNVSTLNQYKTTFPIEHDLVLPEIMDKVAMRHKLVFLPHEKPFSGVSGSGKRVIWSLFDDNSGNLFETGGTMEEKLLFLTLAVSVIHAAYRHGDLLRAAAASAGNERRLGVNEAPSAIMSVSLGGQLTKIITAIDAGKAEKGKKRDLAEICAALPPKFTNDKTESNRTSPVAFTGTEFEFRMPGGSMNVSTAVTVINTIVADAMKTICDRIKKELNKCKGDKHAAAACESEAKDTDGSGESGGQHGNIGNQAAAAVMNVLSAIIKESKPV

SEQ ID NO: 101907 - protein, 158 aa, Unknown
  Obtained from environmental sample
  misc_feature (1)..(158): Xaa is any amino acid
MKAAQNANPPTFESVWAVLQENAKQQKETDRQMKESAARLDEQLGKLGKRMGEVVEYMVAPNLRKKFRELGYDFPQTHQNSEVSDPTNNIYLEIDVKLENGDKAMLVEVKTKPTTKDVKDHIKRLEKMRKYADLHGDKRTFLGAVAGAVMTDNGKSMH

SEQ ID NO: 101908 - protein, 283 aa, Unknown
  Obtained from environmental sample
  DOMAIN (100)...(281): NAD synthase
  misc_feature (1)..(283): Xaa is any amino acid
MMRGIDALAHLGATPFTLGMHELREQRLAHVASRYHLHLFASNLVGGNGGDVYHGQSLGFGPTGALLGRGRMFEEDCVMINASTGEGTRHPACSSREEQLWGALCLGLRDYVRKSGFAGVLLGLSGGVDSSVVAAIAVDALGEENVFGLLLPSPWTSGESTRYASGLAENLGIKRMELPIAPLMQAYAETLAPAFAAPLKPVYAGRDVTEENIQSRIRGNLLMALANRYGLLLLNTGNKSEAAMGYCTLYGDTAGALSVIGDLPKNRVYKLARWYNERRGSDV

SEQ ID NO: 101909 - protein, 286 aa, Unknown
  Obtained from environmental sample
  misc_feature (1)..(286): Xaa is any amino acid
ASINSSGTINNQVSIASTADIANTAGTSDGIAIYNNGAGAVTTIRGGTVSAINYGRAVFNSGTVNISGGTVVADVLAVENNSTVNISGGMVSALRTAVYSVAGKITVSDDAIITAGYILPENSSCDGCYPTIRNDYNGTLEITGGIVKNTGTYEAVGGSGTATISGGAIFAYGTSVTDVINGTYTADGNSAIIAWDKSANTTTYTASSNTHIFSETPTTATWNGRGGIAYANGANTGFIPIEGVTVNKLTGLENDAPPHFSISAATTQEHTYSLHTLALNKTTTAN

SEQ ID NO: 101910 - protein, 304 aa, Unknown
  Obtained from environmental sample
  misc_feature (1)..(304): Xaa is any amino acid
DKFNRENWAIEGREHILKWEDGKGNLVECPGARLVNIDFWGCDGIYITRMNKLFATTSLSTSWDRNGAFLLPRKKEYMAALWLFCSSENFRVEVRKINQKLSVSEGTFPKVPFDLDHWTKVAAEKYPNGLPKPYSDDPSQWIFHGHPCGSVIWDEQAKKTAHGPLRHDETVLHIALARLLGYRWPAEQDAAMELAEEQREWVNHCNALLQYADDDGIVCLPPLRGERSAEVRLLDLLIAAYGESWQPDTLQQLLKSVGYKGKMLDTWLKEKFFSGHCKLFQNRPFIWHIWDGLRDGFSVLVNYH

SEQ ID NO: 101911 - protein, 279 aa, Unknown
  Obtained from environmental sample
  misc_feature (1)..(279): Xaa is any amino acid
VRYPLDKANRNLLEKTVKEAREIAETAAEASLKQLGVDEARAPAHLSNTEQQLRTKLRTHGRQLGDYRQGTSGAQELCRLVEETAYQHWHRMLFTRFLVENNLLMYPDPVNPVAVTLEECEEMAKDEAAANGWELASRFASQMLPRIFRVESPVLQLTFPPENQQALEKLISGLPKEIFTAQDSLGWVYQFWQTQKKKEINDSEVKIGSRELPAVTQLFTEPYMVSFLLDNSLGAWWASRTLTVDDLKNAQTEDELRKKASLPGVPLDYLRFVKLKTYM

SEQ ID NO: 101912 - protein, 289 aa, Unknown
  Obtained from environmental sample
  DOMAIN (132)...(289): Integrase core domain
  misc_feature (1)..(289): Xaa is any amino acid
TRILEEFCAVCGYNRKYAIRLLNATPRYGKVARGRKPKYTGKRFTQVLQAIWKASDFMCSDRLKAVIPLWLPHYEQTHGNIEDDTKTLLLSVSPATLDRILKPIRSRYGKGLSGTKPGLMLRNQIPVRTSHWNIDSPGYMEADTVAHCGSNLAGEFVWSLTMTDIHTGWTVCRAVWNKSAEGIVVQIVDIERNLPFELLGFDCDNGAEFINHSLMRFLTNRPKPVEFTRSRPYKKNDNAHVEQKNWTHARQLFGYYRVDDPNAVALINDLYATEWSLYQNYYCPSQKLI

SEQ ID NO: 101913 - protein, 315 aa, Unknown
  Obtained from environmental sample
  misc_feature (1)..(315): Xaa is any amino acid
MKSFGKCRSSGATCALLAIDNPEVNTLCIKDGQLVGIENKFGEKGTENATFTGISWYSEKAWEQVAERDIWNCWAKLIKKGENPFVQIADKNSLWIDIGSPKGLMKAVSSKNPDSFTAAGSAGSGRKYYRMECAGHSLILQQSYEGDPDFERFVRYGKLFNTLELPTPEIYAVDEKEKRVVMQDLGSVRLYDATQPMLHYPAVLEKLIVWQEASERAFSLDNELANRIFDENYYLWETSYFAENYLQAHLGYTEIPADLSAFLKDLAKKAIAQPKVLMHRDFQSQNIMIYGENKIAFIDFQGARNGSIYYDVASL

SEQ ID NO: 101914 - protein, 241 aa, Unknown
  Obtained from environmental sample
  DOMAIN (128)...(232): TonB-dependent Receptor Plug Domain
  misc_feature (1)..(241): Xaa is any amino acid
MRFFDTRLGRCATLLALGGGVALYAQGTQTASATVTVVDRSGAPVANARVRLTSPSMMAERTGVTNSSGVFVARLLPPGTYAIEVIKDGFQTTKDVRAIGMDQHYQPRVVLQPVGNTKIEVVASSMTAVDPTDVKTATNYDAGRIDTLPTGRGIDAVAALTPGVVNSNSVGGRLQIRGAMTSGNLFLVDGQNLHDNTYNNLQYPIMDDSIDEMQVITGAISAEYGNVDGGVINTLTKSGGN

SEQ ID NO: 101915 - protein, 223 aa, Unknown
  Obtained from environmental sample
  misc_feature (1)..(223): Xaa is any amino acid
MRNCGLFLLGTLALLVSCHPSGQKIHANDRKVHSVWDDPVNIKLRESYDADRLKEILQSARESIFRVWNDGVMPVLPPPGANEGLAVRLIVNGKDRGCLAWYKNSGDMNLFAAFCAAQALRDSRYEPLRPEEAGDALLELLIFGKWEDMSTPADFIPGSHNLWLADGFDNTILQASLAVQRRYTKKDFLEKICIKADLDKNAWNDNKNLLWRRSPAVGSRSRC

SEQ ID NO: 101916 - protein, 54 aa, Unknown
  Obtained from environmental sample
  misc_feature (1)..(54): Xaa is any amino acid
GIHTPSQAAQMAGIADGVIVGSAIVKIIAEHGGAAGPHIYRYVKEMKEAAGGKK

SEQ ID NO: 101917 - protein, 290 aa, Unknown
  Obtained from environmental sample
  misc_feature (1)..(290): Xaa is any amino acid
IVTRSGNSATKALIDVTKTNVIVTGTSLERSRLSAGSNVAILAKMRNDGTSANDGDEDYELGGLVEVNGASITGVTGAIDAWRVNITGAKNASATAGSGGVYGTPNGTALTAFGENPTYITSSATAGATINSNQAVVVNNAFASIVNSGGVAGAGNAAVYSLKKNITIYNVDSIRTMAGATALLTAQDGQGVNVYSGKVRSGTGYAIRSTGNIVVDKVPKHASDAGAVVGGVQKLDARLGSKRSNVVVSTAATTNAFSAIYADYPASGSVKIGDADVSATATGGASAIYV

SEQ ID NO: 101918 - protein, 113 aa, Unknown
  Obtained from environmental sample
  misc_feature (1)..(113): Xaa is any amino acid
KQNPLLAVLFAISAFSLAGIPPLAGVIGKWMVFASAASVGNYALVGFAAINSVIALYYYLQIVKAAWVNDVDENLPPVQIYVWQKVSLVFLGIAVLFFGIAPWLHSYIFKMAL

SEQ ID NO: 101919 - protein, 270 aa, Unknown
  Obtained from environmental sample
  DOMAIN (2)...(266): Aminotransferase class I and II
  misc_feature (1)..(270): Xaa is any amino acid
RLGTAEGYSGYQDEGLASLREKISSVFYNGKFSIDEIFISDGAKCDIGRLQLLFGAGTKIAVQDPSYPVYVDGSVLTGAAGGWEGGGYAGITYLPCTAENNFFPNLDLIPQNSLIYFCSPNNPTGAAVNRSQLASLVDAAVNKGCKIIFDAAYSEFIRDTSLPKTIYDIEKAHLCAIEVNSFSKPAGFTGVRLGWSVVPKAIKYYDGESVNADWSRIAGTIFNGASNIAQAGGLAALDDEGLKEIRALTDFYLGNAELIRNALRQLGLTA

SEQ ID NO: 101920 - protein, 266 aa, Unknown
  Obtained from environmental sample
  DOMAIN (66)...(265): Glycosyl hydrolase family 3 C terminal domain
  misc_feature (1)..(266): Xaa is any amino acid
MLTVAHKKGLVTEEAINTALERLLRTRFKLGMFDQLKKSRWGKIGREVINCKKHKQLALKAAEKSIVLLKNDKGILPLDSSPKAITVVGPAAANAHTLFGNYYGVSSQFVTILEGLGEKVSDKFGINLEYRQGCLMYSENDKSNAEFGQASPTDVIIAVVGLDGAIEGEEGDAIASNSNGDRTAIELPSWQLNFLRKIRNYLDKLGKPLILVVTGGSPIAIPEDIADAVIFAWYPGEQGGRAVANIIFGDVVPSGKLPITFPASTE

SEQ ID NO: 101921 - protein, 265 aa, Unknown
  Obtained from environmental sample
  misc_feature (1)..(265): Xaa is any amino acid
IISGINDSINSGMNDNDTDGVDNDTNSVFDKENNSIDTNSAIVDNTAKDKSDKREEKFDILTLSMTSAYNLEAETRPLRDLSLNASTGISILNVTFSSSFWFYDEADELTPPTINSYSLDLTSGRLGASGKFWDGDLLELSLTKPGVPASAKQNWDVGLSPSLSYRASRQSASENFVPRKSFNVSSSANINLTNALSVRWNGNYDFSSDRFSHNSFDFYYDLECWEMRFTWRPEKINPGFNFVVNIKKIPDIKWEQKETRSTRVL

SEQ ID NO: 101922 - protein, 56 aa, Unknown
  Obtained from environmental sample
  misc_feature (1)..(56): Xaa is any amino acid
MTYCLDLTRAVVYAGTQEYDKVVMFNPAVNFAAIAVLTFVCLVIGTFFFARSEKNR

SEQ ID NO: 101923 - protein, 228 aa, Unknown
  Obtained from environmental sample
  misc_feature (1)..(228): Xaa is any amino acid
VLVFEYVLILLAAVLLSNLINRFLPMLSAPILQILLGAAISLIPFGAFSFEFHLEPNLFFVLFIAPLIFYTSMTTDKKTMWEMRGAIVSSAVVLVFVMVLAAGPIVHALIPAIPLAAACTLIAALGPTDDVAVAAVGKRAKVPSKIMAILSGESIINDASGIVCFQFAVASVVTGSFSIAGAAWRFALVGMGGILAGLMMTLVKYSIVKWLRSLGIENVTLHLLIGIL

SEQ ID NO: 101924 - protein, 200 aa, Unknown
  Obtained from environmental sample
  DOMAIN (1)...(200): Domain of unknown function (DUF323)
  misc_feature (1)..(200): Xaa is any amino acid
MGSPANTNEARFFPDERPQHQVTVSSFYIGKYEVTQKEYQEVMGTNPSNFKGDNLPVEQVSWYDAVEYCNKRSQKEGLTPAYTRNGDNVTWNRNANGYRLPTEAEWEYACRAGTTTPFNTGNNITTSQANYDGNNPYPNNAKGTYREKTTTVGSFSPNVWGLYDMHGNVFEWCWDWYGAYGSGAQIDPMGADSGAYRMYR

SEQ ID NO: 101925 - protein, 257 aa, Unknown
  Obtained from environmental sample
  DOMAIN (1)...(159): Domain of unknown function (DUF323)
  misc_feature (1)..(257): Xaa is any amino acid
YSRVYINYSIKDPNNRNDDDIYRYFVTWDKSADGYRLPTEAEWEYACRAGTNSAYNNGPSITDSQAVFRSGTALPVGSFLPNQWGLYDMHGNLNEWCWDWYGEYNTGAQTDPSGPVSGKWRVARGGSWLNSKSQHLRSAYRFTWTPTWYGRNMGIRLVRSIIQGQQPQPASTYPNYSLINAERRASGIRWQIGSFAVASSAQNVVTILKNAGIDTSTVLFEPYNNFIRVVIDENLSGTMQILLYQAGFLDAFKRMKY

SEQ ID NO: 101926 - protein, 280 aa, Unknown
  Obtained from environmental sample
  misc_feature (1)..(280): Xaa is any amino acid
VKLSEPDSEPSEESEEKEEPSYQWYSRTTETGEGTPIADEIGESFTPEITAVGNYYYYVIVTVDGKNQSGSAKIEIIDNTFTEAPTQFKIGDERLNYVRGVGGTGSFMFRVGSGDASPDADVEYVDLLMGELGANIFRIMVQDDYENYITNSIQSKNANQFYHDAKKNFFAVIRRANEYGGYVFANPWTAPIWLKANKLLTGGQLEPGGPAAVDYADHLRGFLEWLNKNNAPIFAIGILNEPDFGGRASYEGMGLNGTQSRDWFKTVGNFTHTRVTNRSG

SEQ ID NO: 101927 - protein, 102 aa, Unknown
  Obtained from environmental sample
  DOMAIN (60)...(82): MORN repeat
  misc_feature (1)..(102): Xaa is any amino acid
MEKGKLTFPNGTFYEGEITDGKPNGKGKMTFPDGGVYEGDFVDDVMHGKGKMTHPDGTVYEGDFVDDMMHGKGKVKLTSGNVFEGDFVEDKANGKGKFTYNN

SEQ ID NO: 101928 - protein, 271 aa, Unknown
  Obtained from environmental sample
  DOMAIN (55)...(259): Lon protease (S16) C-terminal proteolytic domain
  misc_feature (1)..(271): Xaa is any amino acid
EIKFTDDALKSIIRYWTMESGVRGLEREIARCIRRVARQAVASVKTNTVSAFRKTIKSDGLEKLLGRRKYKNDVMFREARIGVSCGLAWTETGGATLPVESARFEGSGEVLMTGNLGDVMKESARIALSYLRSVRDSYKYLVKDIGKTDFHIHVPEGAIPKDGPSAGIAIAASLLSTLCQKPPRPGIAMTGELTLTGRVLPIGGLKEKLLAAIRNGLEKVLLPADNRSEWDELDKDITGAINVEFVENAAEAFAILFDKSIKQGKRELGKK

SEQ ID NO: 101929 - protein, 281 aa, Unknown
  Obtained from environmental sample
  DOMAIN (2)...(218): Sigma-54 interaction domain
  misc_feature (1)..(281): Xaa is any amino acid
DIIGTSALIRSIRETVKQAAESDARILITGENGAGKEVIARAIHQCSARSGNPFVDVNCAAIPETLIESELFGHEKGAFTDAVSTRKGRFEMAHGGTLFLDEIGDMSLPAQAKVLRVIQEQKIERLGGEKTIETDVRIIAATNQDLEKACETGRFRQDLFFRLNVIPIHVPPLRERPEDISMLLCHFLNLLNAEITLEADAMELLTSHDWPGNVRELKNLAERIAVMHQGPRITGDDLSKLLNKKSKKPQNTGNQLPEGIMERNYNEAKDSFEKCYLEFQL

SEQ ID NO: 101930 - protein, 281 aa, Unknown
  Obtained from environmental sample
  misc_feature (1)..(281): Xaa is any amino acid
GILAINAGKLAIGDFDNRTGGAASITFIGDSKSSPDTDKHFQSVSVSDGRLDINAGAGRRMTVADGVSVSNSAFMGVTGGGMSLGGTLDVKNITMGAGFTAGNLNAVNTRIDGGAFEIEADAVNIAGTISLAGDDNNLKITAAKDITLGAALSISGINNTLGLGASTVRATSLTQTGQNRIVMFGNAATKSGALRIDNDITLTGMINFGAAGVSGLLIDASANEFRIDAANITAPSGVNVEEHKTLTIVATGTLTTGNRIEHKGILKITARGFSAHEIVNS

SEQ ID NO: 101931 - protein, 293 aa, Unknown
  Obtained from environmental sample
  DOMAIN (16)...(252): Pyridoxal-dependent decarboxylase, pyridoxal binding domain
  misc_feature (1)..(293): Xaa is any amino acid
VQELVQEYGTPVLFLSEGRARESYRNLAAALPGVDLYYAVKSNAQPELISMFDGEGSFFDVCSNGEIDVLKGLGISAERCIHTHPIKRDGDIRYALDYGLNIFVVDNEDELLKFVPYKDSARLLVRMSIQNPGCLVNLSQKFGVAPEKTFDLIKKAHGLGLRILGISFHAGSQNENPLKYIEALEYCKDICGKAALAGINIEVIDIGGGFPISYLTQVLPMAAFCRPIVDYLSRYFANYRIIAEPGRVLSGPTMTLATKVIGRSYRNGAWWYYLDEGLYGSFSGKMFDHADYP

SEQ ID NO: 101932 - protein, 269 aa, Unknown
  Obtained from environmental sample
  DOMAIN (54)...(269): Glycosyl hydrolase family 26
  misc_feature (1)..(269): Xaa is any amino acid
GPPVFTRLKAIGKVRFKSGANTLAIAKSWGYVDIDYIEVGAYVSEPFTIRGSLVTPNPSQNARKIYGFLRDNFQKKVISGVMTNTVTQTDGKYTPNTPDNQAEMAHIKSVSGKLPALMGLDFMHSTGKKADDEWYMGYTNGTLSLAEAFFKRGGIPIYCWHWRDPLKNDEEFYSEKTKFDLTKAFKSSNYTETNFNESSAEYKGIVADIDRITGYLKDLADKGIPVLWRPLHEAAGGWFWWGRDKKPEPCRALYRFMFDRMVRHHGLTT

SEQ ID NO: 101933 - protein, 61 aa, Unknown
  Obtained from environmental sample
  misc_feature (1)..(61): Xaa is any amino acid
MGLERHLRRKINFFQTQNELTVALMEKPDGFTQAILETMLLGLGEIAKLYPKSVRIVDFKG

SEQ ID NO: 101934 - protein, 101 aa, Unknown
  Obtained from environmental sample
  DOMAIN (33)...(82): Sigma-70, region 4
  misc_feature (1)..(101): Xaa is any amino acid
KAYQRALSRNHRQEETGEGLLVKKETSEEVKNALEKLPENLRMVLILKEYADMNYKEIGKTLGISEGNVKVRVFRARERLESLLAEALQANNDLQGGKNVS

SEQ ID NO: 101935 - protein, 282 aa, Unknown
  Obtained from environmental sample
  DOMAIN (172)...(230): Transglutaminase-like superfamily
  misc_feature (1)..(282): Xaa is any amino acid
KPGFKNIKDKRSYTVTYSVDIRVTDASRPNMLYLWIPKPVNSPSQRNVTLVSRTIEPFMENYKGVSLYKLDNLIAGINHSINLSYRVEVYAVGSEIRPLSLKQEATELSAAHTKSSSLIPSDNQQIKAAVNSIVSREQNPYLKAKVIYDWIINNIKISDSAAAKSIVDALEQKRGDPYAAALLYTAMTRAAGIPCIPVAGVLINQNGHTLRHYWAEFWIDGFGWLPVDPAMGAGAVKLTDSARQFDNETEKDLLNFYFGNLDNQRIAFSRGELILSQMKTAA

SEQ ID NO: 101936 - protein, 278 aa, Unknown
  Obtained from environmental sample
  misc_feature (1)..(278): Xaa is any amino acid
GRIVVLQRSRAKIPKGARPQFRLAPNQYTFYSKPVDGSAGKWAAQWYNPQGLVKKTKHTLGTADDAPLVADGVSVLSFYQAQEEATKWFRLAERQARIEAEGGQVIDVDGYTVKDALDFLWESKGRPGAKAKGVKEDKLRADKWIVPDLGNIPLAKLTKRKIEAWLDNMVKTSSAGDADRIRASQVSANRVLAILKKALNDAYREHDSLAEADQIKPCWQRVAQYSGVNVSRVRILSEEDDEEKKILEACPPAFRGVVIAALDTGARYRELTTLQVKC

SEQ ID NO: 101937 - protein, 203 aa, Unknown
  Obtained from environmental sample
  misc_feature (1)..(203): Xaa is any amino acid
VSLHNVLFVVLNTGAYLIKNTTAEKLTEAQNHITYFDSVLTRAKRAHTGKYDWLIVQHHKSTQSVGAHALDEEIQIFKQAGFETLMDKHNVNLVVAGHDHIYVRTKPMKAGKLATSGGTVYLTLPTASYTKFYSETDSLAKKDYVAKYKQYNFCGWPGYGVVKVDGKKISATIYNYNTGTNASYCGDAKGGADVALDSLSLSK

SEQ ID NO: 101938 - protein, 149 aa, Unknown
  Obtained from environmental sample
  misc_feature (1)..(149): Xaa is any amino acid
MINAVGLYNTRLGVLIPYIGLGLPTAVYLGTEYIKSIPDSIIESARIDGAKYLYIFWKIIMPIAAPVAATVVILGITGTWNEFIIINILVSKTELKSLPVGVNQFSGALASDFGKQFSALVIGMTPMVIFYLIFRKQITKGVSAGAVKG

SEQ ID NO: 101939 - protein, 141 aa, Unknown
  Obtained from environmental sample
  DOMAIN (5)...(141): Ribulose-phosphate 3 epimerase family
  misc_feature (1)..(141): Xaa is any amino acid
MGKTIIAPSILAADFADFGGAVKCIGDSGADWVHMDVMDGQFVPNLTFGPKLAEDLRRRSTMFFDVHLMINTPEKIIPAFACADAITFHLEAATHSHRLLQEIRGMGKKAGISIVPSTPAIMLSENMPYADLVLVMTVNPG

SEQ ID NO: 101940 - protein, 287 aa, Unknown
  Obtained from environmental sample
  misc_feature (1)..(287): Xaa is any amino acid
LYHRGEEGDSDGDGYYFSPADLQLLEHLPGLAAAGINAIKIEGRMKSADYVGAVVSAYRLVLDAIDQGDEEKIRSGIAEGQKILRGDFARSKTAYFFDTANADNSVGWLNPAQDGGTGISLGVIEKIQGRAGERRALVSGGEFSAGALPAVGDSIRLHRSDDSERVSHKVQFAEAMPDGFWLSIPDGFEKDDRVYLIQTKAMSKRHKPVIAHNAGTGGRGPGHEKAPALPPFPASAPRKTAKNKSAVFPDGLYIATSRLNDLYIIQSSRPARVMLTLTRKTIDYLLG

SEQ ID NO: 101941 - protein, 175 aa, Unknown
  Obtained from environmental sample
  DOMAIN (8)...(175): Protein of unknown function, DUF258
  misc_feature (1)..(175): Xaa is any amino acid
MKNTETLKGLVIRSSRNIVTAQIESENGVKEIECRIKGKVLKGGDDLYNPIATGDWILIEREKDADTAMILSVEERKNFFSRFNQKGNASQLLAANVDIALCICTPVSPPFRPRFLDRVLLQADIAGIEPLVICNKIDIEYDDIDVDERLEEYSRIGYKVLRISAKTGEGLNELR

SEQ ID NO: 101942 - protein, 75 aa, Unknown
  Obtained from environmental sample
  misc_feature (1)..(75): Xaa is any amino acid
MTQSSLDDSVRRAAAPGAPAPSFDILIIGSGGAGLRAAVAALEANPQAKVCVVSKVMPSRCATCMAEGGINGVTD

SEQ ID NO: 101943 - protein, 296 aa, Unknown
  Obtained from environmental sample
  DOMAIN (26)...(89): Elongation factor Tu domain 2
  misc_feature (1)..(296): Xaa is any amino acid
ADGMKADPDMPAQAIVVEAKKEHGLGPTATILMQEGTLAIGDVFVAGETWGRVRGLINSAGERAKEIKPGEPAVILGIESVPAAGDELRGLENEAQAREVAAFRAQKSRELSGIAKKSSLEDLFVQKNETKKLALPIVLRADVQGSVEAIRGMIGDIETDRVKVDIMSAGVGAITEGDVRLAAASGGIIVAFNVRGDGSVRDLARELSVDIRYHSVVYRISDELREILSGKLAPERKENFIGYADVIALFTVGKGTRVAGCRVSEGVVRRDANVRLLRDNVVVYDGKIGMLKREKD

SEQ ID NO: 101944 - protein, 271 aa, Unknown
  Obtained from environmental sample
  DOMAIN (181)...(230): KH domain
  misc_feature (1)..(271): Xaa is any amino acid
GRQYEEFKDNIGDIISGVVKRNEYGNIFIDINGKAEGFIRGTELIPGERLQVGDRVRALILDVIRSNSQPQIILTRTHPMFMERLFFQEVPEIYEGLIKIRSVARAPGSHAKIAVSTDDPSIDPVGMTVGIKGTRIQPVINECHGEKIDVILYSDDPAPYIVNAISPAKVARIVVDEDTHTAIVVVNEDQQSLAIGRRGQNVRLASQLTGWNIDVMNEQQEQEHRAKETKEKTELFMAGLDIDDMVAKILIGEGFRTIEEIAFVDLSELSG

SEQ ID NO: 101945 - protein, 281 aa, Unknown
  Obtained from environmental sample
  DOMAIN (57)...(90): Tetratricopeptide repeat
  misc_feature (1)..(281): Xaa is any amino acid
GKDYKAVKKALKAAKSLGGDSDLITRFDILCQARTSNDTLSIINLLQNAIRKLGPEPEIMYALAEAYLKVGLLEEALNWFKKTTTLKPDHQSAWLGQIAALEALAASGEAEASGEAYASKEATASEEASATESLASLYVLYLKRWPGNLNIHRDRALFLLRTFEYADAAKELENLLIWEPSNPSLRRILAYAYRKTGRYREAAVFLKALLKKNPRDIAILIEYTGCLGKAGAGKYALELLEKARVLFQGSAKRQETADISFALGVLYYRQSKTEKAFDCFR

SEQ ID NO: 101946 - protein, 286 aa, Unknown
  Obtained from environmental sample
  DOMAIN (1)...(125): MutS domain V
  misc_feature (1)..(286): Xaa is any amino acid
AHITKISAITAFATENSLVLLDELGSGTDPEEGGAIAMAVLDYLIEKNSRMIVTTHHGILKNYGYTRQSVENASVEFDAQTLSPTYKIINGLPGESRAIDIAASNGLDGSIVNSARKYIDEKKSDVSGLIKGLEQKQRELIGIEHKSAMEQNRLKEEKRKADLKELRLKQKETELKRESLGKLQVFLGESRKTLENLVRELKEGEVTREKTLKVKGFLNDLAHNAEMESAALDEEERLVREQFLKARKGGEENDDSESSGVAASSAAKSEIFAPGTEVFVGASKQR

SEQ ID NO: 101947 - protein, 50 aa, Unknown
  Obtained from environmental sample
  misc_feature (1)..(50): Xaa is any amino acid
MGTGKVENSAVSFAAKYGPWALVTGASRGLGAEFARQLAAGGLNLALAAR

SEQ ID NO: 101948 - protein, 249 aa, Unknown
  Obtained from environmental sample
  DOMAIN (85)...(247): MatE
  misc_feature (1)..(249): Xaa is any amino acid
LIVAGTNFILDYVLIFGKFGFPKMGLEGASLAAVLAEVVGLAYYIIIIIRKVDLSKYDLFRFKKPQLDIVRNTFNLSGFTMLQNLVSLIGWFLFFVIIEKTGEWNTTVSGERNLAVCNFVRSYYLLIIVPMWAFGHAVSTLVSNAIGAGQRRYVFQIIRRVSILCAGSMVIIFIVTICFSKEIMSLYTPNDVLINMGINGLWIVALANIIGGVTWTVFTAISATGNTQIALLIETVTTIVYVCVIYVLA

SEQ ID NO: 101949 - protein, 124 aa, Unknown
  Obtained from environmental sample
  DOMAIN (1)...(113): Bacitracin resistance protein BacA
  misc_feature (1)..(124): Xaa is any amino acid
LIIGIFQAIAIPPGISRSGATISGALSRRLDRDFAARFSFLLSIPAILGALVLNLKDLAKNGGAAGGMGAEVIAGTITAAIIGFFAVKIMLKIVKEKSLFGFAVYTAVLGGLILFDQFVTHLVF

SEQ ID NO: 101950 - protein, 281 aa, Unknown
  Obtained from environmental sample
  DOMAIN (1)...(206): Secretory protein of YscJ/FliF family
  misc_feature (1)..(281): Xaa is any amino acid
MRQRGVFLAVIVAIVVGIVMLFRVSATPVLASVIDAPIRDEVALDRIIVRLNKEGVDVSVTPNGIVQVSDPATARRMRAVLISEDLIPANIDPWQVFDRERWTITDLERNVNLQRAHRQMIIDQIKAFDGVDNAIVNIVWPKEELFRSEQNPVSVSVTIIPTPGSDITQNRKKIEGIQKTLKTAIEGLKDENITITDNNSFVLNDFEGMKEFDKQALTERQQKFIFDQERKYRNDVLNTVQSAFSPKRVRALNIKFEYDLRRLAIEEKEIFPIMMKERTPG

SEQ ID NO: 101951 - protein, 288 aa, Unknown
  Obtained from environmental sample
  misc_feature (1)..(288): Xaa is any amino acid
MGNFRQNISALGDSLLSLAQSQLDIDYIIISAVDAKLPVIRENFFTSASHEIRSFLASFFTDYSSLGNVYRRGDNTVEIWILAGRDQSAILKAMIDDTFTPQTNIRVNFKLVAVDALMPAVVAGTGPDAVLTVPQTDPVNYAVRKAALDISQFDDFKETIKEFNRSALVPFEYNGGVYGLPETQTYQVMFYRRDIFQELDIDVPQTWDDVISILPIIQKNNMNVGIPTVASVSVTGSDFSGFLTHLYQRNGTLYTEDGSRTLLNSETAIEAFDAYTKFFTHYKTPTAF

SEQ ID NO: 101952 - protein, 225 aa, Unknown
  Obtained from environmental sample
  DOMAIN (36)...(189): Cyclophilin type peptidyl-prolyl cis-trans isomerase/CLD
  misc_feature (1)..(225): Xaa is any amino acid
MKKKKTKKKVLSVALATCALAAAAPVDGQVNGNGLFAELETSKGVILLQLEFVKAPLTVANFVGLAEGTIKHNRGEGVRFYDGLTFHRVEPRFVIQGGDPNANGTGGPGYQFADEIHPDLKHTSEGILSMANAGPGTNGSQFFITLSATPHLDGRHAVFGKVVKGMDVVKSIAKGDAIKKVNIVRSGKAAKEFKTDQQAFELYARQLAEKKGKAETEQRKRRKRS

SEQ ID NO: 101953 - protein, 155 aa, Unknown
  Obtained from environmental sample
  misc_feature (1)..(155): Xaa is any amino acid
MRFDCINNQFFELSVLGYEFPEITDDEWDSNWLLIHINTVSNEKQRDETDPAITTFELKWLIDWFRNISENKIEKYKWMCFTEPCISFELVNNFDSKIKIIKIHLMAELNPITDAVTDYYIEFNATNEQLKIYAKELEIELNKYPERVKLKSSRL

SEQ ID NO: 101954 - protein, 275 aa, Unknown
  Obtained from environmental sample
  DOMAIN (1)...(275): Aminotransferase class-III
  misc_feature (1)..(275): Xaa is any amino acid
VTLTSRAFYNDCLGTYEKYITEYFGYDKVLPMNTGAEADETALKLARRWGVVKKGIPNDEVKMICCSGNFHGRTITIVSMSDDPDSFANYGPLTPGFIRIPYDDIEALEKALEAEGSKIAGFLVEPIQGEAGVYVPQDGYLKKAYDLCKKHNVLFIADEVQTGIARTGKLLACDHENVRPDVLILGKAISGGVLPISAVLADNDIMLCIKPGEHGSTFGGFPLACKVATAALEVVKEEKLAERAEHLGNVFRNYMREVKSDMISLIRGKGLLTPS

SEQ ID NO: 101955 - protein, 176 aa, Unknown
  Obtained from environmental sample
  DOMAIN (7)...(67): DnaJ domain
  misc_feature (1)..(176): Xaa is any amino acid
MASAVFNPYKVLGVGEDATQDEIKSAFRKKSKECHPDRSDGGESQDFIAAKKAYDILTNREKRDTYDTYGVAIDFGEEARKLAFTIFLDVACRCPKEDPLDIEIKAFVESALLPKYESELKSIAERIGLLETRLSGIVKKPDNDFITERSGIVLDEYARQYKMVLLQMDLHKAALS

SEQ ID NO: 101956 - protein, 260 aa, Unknown
  Obtained from environmental sample
  misc_feature (1)..(260): Xaa is any amino acid
MIKRSQTTVCIAFWLILFGADRVSATGDAVSPVETDPAIRSTLHDHYAVVNPWAARRGVLFLFFPGTKSHAMNYKMICETAADRGFHAISLQYVNDVSANQKCSGSRNLECHENMRREVLFGADFSPHVNVSRSNSAENRLVKLLRYLADQYPLDGWEQYLSAGDVPRWSRILVAGHSQGGGHAALLGKYYSTAGVIMFASMDYNFTQDKAGSWINKRGNTPLEKFFAVAHTLDEVMPITAMRKYWNAFGFKNIGPVINI

SEQ ID NO: 101957 - protein, 116 aa, Unknown
  Obtained from environmental sample
  misc_feature (1)..(116): Xaa is any amino acid
TEAEWEYVCRAGTTSAYITDRTSRYRLITYSVGQLHPNAWGLFDIGNVDEWCWDWYGGYSTEAQINPVGASSGSNRVFRRGGDEAGSIHYRPTKRLYFNPLEGNCYLGFRVVRSLL

SEQ ID NO: 101958 - protein, 159 aa, Unknown
  Obtained from environmental sample
  DOMAIN (12)...(157): short chain dehydrogenase
  misc_feature (1)..(159): Xaa is any amino acid
MKVTELLSLKGKNAVITGAAGLYGRCAAQSLYEAGARVFTGSTNMEKLSAAVEEMRQEGGDVTAFHLDLGSEESILKFHGEVMEKAGKIDILINNSVARPMPGYEADAKLWEESMKVNSTGNFIITRAFGEDMIAQKSGSIINIASMHGMIGPDPFLYE

SEQ ID NO: 101959 - protein, 271 aa, Unknown
  Obtained from environmental sample
  DOMAIN (1)...(271): Prismane/CO dehydrogenase family
  misc_feature (1)..(271): Xaa is any amino acid
MLLDCLKLGISTGIYGLTLTNLLNDVLLGEPELRPAPVGLRVINPDYINIMITGHQHTMFVHLQERLTQPDVVALAKAAGAKGFKLVGCTCVGQDLQLRGAHYTEVFDGHAGNNYTSEAILATGAIDAVLSEFNCTLPGIETVCDELLIKQICIDDVAKKANAELIPFDFANREAQCEKIISKIIAAYKERRPKVKLNLAPEHGNTNTLTGVSEVSLKKFLGDSWKPLIDLIVSGDIKGVAGVVGCSSLVAGGHDVLTVDLVKELIARDII

SEQ ID NO: 101960 - protein, 271 aa, Unknown
  Obtained from environmental sample
  misc_feature (1)..(271): Xaa is any amino acid
MAPMQQPPADNKIYKWIADNLHVTFNWDILVGDKDQKIGVMIAGGEYPDILHVDSTKFYEAGALVPLDDLIDKYAPRLKKHYAEAWEKMKEEDGHVYTLPVWGVVSGRDYVTWYGDSALWAQKEVLKEFGYPKIKTMDEYFDLLIKYKEKYPTINGMPTIAFTILTYNWRAFCLINPPNFLAGFPNDGNGTVDPETHQYKVFLYQDISKRWFKKLNEMNAAGIIDRSCFVDNYDQYLSKIASGRVLGFHDQAWQFQSAEYSLTNQGMHNRT

SEQ ID NO: 101961 - protein, 85 aa, Unknown
  Obtained from environmental sample
  misc_feature (1)..(85): Xaa is any amino acid
DDSLSAVDAETERRILDALLSERGGKTTIIISHRVSTLRYADKVLVLDKGKQTEYGSPAELAAAGGFYSRMATLQQLDTGGNHAY

SEQ ID NO: 101962 - protein, 75 aa, Unknown
  Obtained from environmental sample
  misc_feature (1)..(75): Xaa is any amino acid
NCAEKNLPIYLGEFGVIEATLNKEKGGFVWVSDMLDILKSRNVSFTYHAWVDGSFGVKDRHELESLFRNKFFGRR

SEQ ID NO: 101963 - protein, 140 aa, Unknown
  Obtained from environmental sample
  misc_feature (1)..(140): Xaa is any amino acid
VAAPSANPFGALSPTKAEYVRDKLGEKVDIILDGGATRVGVESTVLDITGNSVKILRHGGTPKEAIEKLIGTVEDGSTPAEGSPSMGSALSVESGFVSPGQSKSHYAPKTPLKVFSREEMINLPYEKGSAFLFFDGCTRD

SEQ ID NO: 101964 - protein, 97 aa, Unknown
  Obtained from environmental sample
  DOMAIN (16)...(68): Clp amino terminal domain
  misc_feature (1)..(97): Xaa is any amino acid
MNYGYSNKFRNVLATARKEALATGSDYVGSEHLLMAMLREGDGVAVEALKNISVDLAALHSRIAKSITANSNEVLQQTAKGTEQEVGLHFSPQAKTL

SEQ ID NO: 101965 - protein, 162 aa, Unknown
  Obtained from environmental sample
  misc_feature (1)..(162): Xaa is any amino acid
MNIPVKVSATDGGIKLHRWLGRHYGDANMILVRRLCRGGEIRINSKRCAPDSVLKAGDLVRIPPILANQRPRPAPRDEGYSLSELEKLRRAIIHDDDDIVVFDKPAGLAAQGGRAVRKSLDKMAVALFPNATPLLVHRLDRETSGVMVVAKNHASAQKLSAD

SEQ ID NO: 101966 - protein, 291 aa, Unknown
  Obtained from environmental sample
  misc_feature (1)..(291): Xaa is any amino acid
RRPLQAANYWYNEAKKNNPDLTEKSERLKSALEGKGAGYPVILVLAPLSGSHSELGNYMVEGILLYADSLKNKVKIQIANDRADPATALSKVKQALYQDSIIAVIGPLLSASAATVAAWMAEKYPYIPVITPTATDDGIADMGKNIFQLNISSARLAYTIADYAMSCLKISEFAIMAPLGDYGSLMADEFQRVVERKGGTIIMTQNYAEGLPDYQNEFKLLRDRKLKLDTRRMNMSKGTSNVSLLPKRETWLEDSTMLFPAIFIPSSNPADAGLMTAQVAFNKLRVGNLLG

SEQ ID NO: 101967 - protein, 87 aa, Unknown
  Obtained from environmental sample
  misc_feature (1)..(87): Xaa is any amino acid
MLEERGHKFVRYADDCNIYVKSARAAERVMEGCIKFLEGKLRLKVNRKKSATGSPTKLKFLGFSLYELKGKIGIRVHEKPLNGSKTG

SEQ ID NO: 101968 - protein, 207 aa, Unknown
  Obtained from environmental sample
  misc_feature (1)..(207): Xaa is any amino acid
MRDHYIIKDDGKWYCTGTSNPVWEGPNPGVRLLVSDDCLHWNHHSWLIDATTLPEDCGYNGRFWAPEIHLIKNRYWLTVNSGKVTKDDPKGMKTHSIWLFKSLQITGPYMLVNGPLTKQYNNDATLFEDDDGQIYLYCSGNGLFQARIDLEKGILLDGIEKFMDKLDIGFPEWIRGGIEGPFVIKQNGIYFMFFSTVDSADMKWGCC

SEQ ID NO: 101969 - protein, 74 aa, Unknown
  Obtained from environmental sample
  misc_feature (1)..(74): Xaa is any amino acid
ETDNSTKEKATFSYSPDGINWQCIGSDLNMLWTMTHFTGARFGLFNYALKTAGGYVDFDYFRVVSNIGVKCPKQ

SEQ ID NO: 101970 - protein, 291 aa, Unknown
  Obtained from environmental sample
  misc_feature (1)..(291): Xaa is any amino acid
MKIFNDNITIFIVWVEGNKRARLAKEEEYRGKLTDEQYLKIKNMVSALKREYEEQEVVVYDARTCILEIDNQVRYKHEPCDDNPEFSDPLFPPMPKEILVLFQYLVNLPPVKITKQRQIEYNPPPPLVHQKGTFIDTRDGKTYKTTKIGEQVWIAENLNYEASGSKCHDNKPANCKKYGRLYNWNTAMKACPSGWHLPSREEWEVLTDTIEAIGGAGTAGKYLKSTSGWNSDNGYNGVKYSGNGEDKYDFSALPGGFGKSDGYFSTGDDGHWWSASGYTDKKTAITFRYLV

SEQ ID NO: 101971 - protein, 52 aa, Unknown
  Obtained from environmental sample
  misc_feature (1)..(52): Xaa is any amino acid
MKIAMLVFPLVCIVVSYLIYRKKYIIDSKFYAKMLSDLRGRGEITSEDDSEK

SEQ ID NO: 101972 - protein, 234 aa, Unknown
  Obtained from environmental sample
  DOMAIN (95)...(234): Alpha amylase, catalytic domain
  misc_feature (1)..(234): Xaa is any amino acid
VKMTLRSKLRDIYAHPVGRDIVDKLLLQTGKPAWLINNGIIGNVTLGAVQRLTRERLTPGFFDALLALLNIEPDVPNDNPAATTPAWWKEAVFYQIYPRSFAQGGLRGILSKLDYLRDLGVDAVWLSPVYDSPNDDNGYDIRDYYKILPEFGNMDDMDALIAGLHERGMKLVMDLVVNHTSDEHPWFQAALRDEHSPYRDFYFFRVSDNGPPNNWTSLFSGSAWNYYQRTKVWA

SEQ ID NO: 101973 - protein, 187 aa, Unknown
  Obtained from environmental sample
  misc_feature (1)..(187): Xaa is any amino acid
GIISDEYSTQNPNQRSDGYKIGDYGPAGGIVFYDKGYTSGGWRYLEVAPANTEFRAQWGAYDKSVSGTSTEIGSGKRNTQMIVDFLKNYGETGSAAQLCANLNFGGYKDWFLPSRDELDLIYKNLVSRNLGNFKTIVDRTNETNNYWSSSQYNGYVSWLQDFSDGFQNYATGLGKGDTFSVRAIRSF

SEQ ID NO: 101974 - protein, 299 aa, Unknown
  Obtained from environmental sample
  misc_feature (1)..(299): Xaa is any amino acid
ADDEVCGLGETSHAVLRRTALRRVADYALKDYTVKGKFDADRFTGTIIEKYYLHDDFRHLIGINHYNNITWFNKEAFESTLLYGKLFYVLEGDSAYISSEQSSDKPAGKPLPWLQRADYIARIIESLQKAEIASGYQLDKLILLLAKEQSAVIAADKKTAAKKATGGKPAAKEPADKKPTDKKAPAEKQTDKKPAVKKVTAEKPAVKKPADKKAPAEKPADKKPVVKKPADKKAPDKKPAAKKPVVKKPADKKTTGGKPAAKKTTVKKAPDKKPADKKSTVKKPVIKKTTGGKPAAKKP

SEQ ID NO: 101975 - protein, 268 aa, Unknown
  Obtained from environmental sample
  DOMAIN (41)...(188): DEAD/DEAH box helicase
  misc_feature (1)..(268): Xaa is any amino acid
LPVGCLDGLLAILEHYQIKPELQNKQNHGQSIEIQFTGELRGDQKDAFQKLTANQMGILSASTAFGKTVVALRIIAERKVNTLILVHRKLLADQWIERMNHFLGIPKKDIGYYSGTKKNRTGIIDIAVMQSIVKRDKVEDWVAEYGQIIVDECHHISAASFERIIRKCPACYRLGLSATVIRKDGQHPIVLMNLGEVRYSNTRNSASLFSQKVFPRLTEFNMPTESNMPPAIQDIFHNLYMNEDRNKLIIQDILDAHREGRECLVLSE

SEQ ID NO: 101976 - protein, 167 aa, Unknown
  Obtained from environmental sample
  DOMAIN (2)...(167): Acetokinase family
  misc_feature (1)..(167): Xaa is any amino acid
MYVLVLNSGSSSVKYQLVSIKDESLASKGLVEKIGTKEAFYSYTIGNGEKQKEIRPILNHEEALSIVFKTLTEHGVIRELAEISAIGHRVVHGGPKFAETVLVTDEVIRDIRDCTELGPLHNPHNLKGIEVCARLIPGVPQLAVFDTAFHQSMPEHAYLYALPYELY

SEQ ID NO: 101977 - protein, 290 aa, Unknown
  Obtained from environmental sample
  DOMAIN (1)...(288): Carbohydrate phosphorylase
  misc_feature (1)..(290): Xaa is any amino acid
VSAVIQDIIRRHKQNGNNIADLGAKTAIHLNGSRCALAIPEMMRLLVDQEGMEWKEAWKMTQSIFSYSSSAVQREHVETWPVYKITQLLPRVMQVIFDINLEHLDLIRARGCNDVDLLRNLSLIEEGEVKRIRFADMAVLGSNSVNGVSAAHTEILKKHLFPNYYSQYPEKFYCKTNGVSHRRWLYCANRPLSALISRPIGDGWVRRPEELSKLEFYAESPEILKGFWNVKSRAKSELCAVLREKVGVALDPAMLFDVNCRPIHTMKRQVLHILYILHSYLKIKKGETLA

SEQ ID NO: 101978 - protein, 307 aa, Unknown
  Obtained from environmental sample
  misc_feature (1)..(307): Xaa is any amino acid
DKFGYWGSQVEGGGEYTFELTGGETISPRTLSYGVSPVTIVIKSEKANDIKTISLSGTGSMFTINDGVTLILENITLEGLSDNTAALVKVNSGGELIMENGSKITGNTNNADGGGVYVNMSGEFTMNGGTISGNNGGGGGGGVYVYTSGEFTMNGGTISGNSATFEGGGVYVQGNGTFFMTNGIIYGNEAASPLNNTAPSHGAALYTRASNAQYGVGGASFESKGILSPTNNTINIVNGELTAATAGQWAGAIDQIKSSGEYVINVVDSFAVAGTTTSTFGSATGIDVTINGKNDAAISLKNDSDGS

SEQ ID NO: 101979 - protein, 278 aa, Unknown
  Obtained from environmental sample
  misc_feature (1)..(278): Xaa is any amino acid
MIITRFTQTGEEVAYNENINQRDSIELAAGYYRVVIKLIKSGGQEIAELREILHIYPNMESVFNPPAITKSLFTSLIYVINGNDDGNGSLRWAIDQAKLRENSTIIIDSSVKTITLTSDSLEIPSRDISLTIEGNGVTITQNSSTGFTLLYVGEANITIRRVHFKNGKASSGGAISTMAHLTLESCIFSGNQADTGGAISSTCGNIYIRGCTFYGNSATQGGAIHYDAASESLYLTGNLFYGNTAPGYPVVHTYSDKVDRVISNGYNVVDVKLEDSGF

SEQ ID NO: 101980 - protein, 289 aa, Unknown
  Obtained from environmental sample
  misc_feature (1)..(289): Xaa is any amino acid
VYDSKYMEIFAITYGNDRFVAVGYGVVTGLVDYSLDGITWTNVSNRWAMADAANGITYVNDKFYIVGDLAQIARLSFPNDTRTWDYNHNLTDAIFNNENIYSIAYGNEKFVAAGRERGMAYSEDGRIWIKIERQNSANIIYDSKIAYGNEKFFIVGGRIMAVSADGLIWDSLNVSNIFTGEISAIFYGNGMFIAGGADGKMAYTSGEKVSSFSGTVTISPSDVTAYTELTATYSGSETVNFQWEKSNNDGSRNKIGTPTTTNPNKFTPTESGSYYVTISREGFIQGKAT

SEQ ID NO: 101981 - protein, 108 aa, Unknown
  Obtained from environmental sample
  DOMAIN (43)...(97): LysM domain
  misc_feature (1)..(108): Xaa is any amino acid
EGYLNVDNIKIFSEVAFYVHDKKYDENPEIKLPYQEPDKPVYYKIKKKDSLWKIASYDFIYGNPNLWKKLYDANKNNLIVDGNPKNSIEPGQVLIIPPVGDETREGTR

SEQ ID NO: 101982 - protein, 158 aa, Unknown
  Obtained from environmental sample
  misc_feature (1)..(158): Xaa is any amino acid
IKAQSVKGSFTLPENLHLTLVFLGETPEDKIPLISSVIDEALNPPVAPFSLVFSTVGCFKHSKKELWWIGTDDNDIHLNILKTIRQRIAENLLSKSVNFDNRPLNPHITLGREIKHTSPIIISEQEIIFPVNRISLMKSERVNGILTYTEIFGLDLAR

SEQ ID NO: 101983 - protein, 69 aa, Unknown
  Obtained from environmental sample
  misc_feature (1)..(69): Xaa is any amino acid
ILIDSVKDLNKDMFCNINSVGISSGASAPEYLVLEIVEWLKKHFIIEKIVEDHVVKEITKFPLPLELEE

SEQ ID NO: 101984 - protein, 118 aa, Unknown
  Obtained from environmental sample
  misc_feature (1)..(118): Xaa is any amino acid
MEGGIRKKRVHFCPTNPETIAILRSEGKKKFSAVRGTKIFHLWPEQGEENTWCACPSCRAFTHSEQYHIAANAIGDALAEDSQDCFISIIERNGEENDIALRPNIFRIDPQGITTLQW

SEQ ID NO: 101985 - protein, 185 aa, Unknown
  Obtained from environmental sample
  DOMAIN (16)...(97): Glutamine synthetase, beta-Grasp domain
  misc_feature (1)..(185): Xaa is any amino acid
VFTTAEEAFKFIQDEDIEFIDVRFVDLPGIWQHFTIPAKQFDEKILTDGLMFDGSSIRGFQAIHESDMKLIPDVTTAFIDPFRIHPTLVMNFSIVDPFTDEPYARDPRTIAKKAEAYLKSTGIADTAYFAPEAEFYLFDNVRYHSGPQESFYHVDSVEGAWNTGREEEGGNLGYKTGFKSGYFPV

SEQ ID NO: 101986 - protein, 116 aa, Unknown
  Obtained from environmental sample
  misc_feature (1)..(116): Xaa is any amino acid
PAFKYEVSLDVIAKAHDSGLVTKSNFILGFGETLDEVLDAMADLVTAGCELLTITQYLRPSPTHYPVQRWVKPQEFNDLQTAALEMGFAGVMSGPLVRSSYRAGRLYQQALENRNA

SEQ ID NO: 101987 - protein, 118 aa, Unknown
  Obtained from environmental sample
  DOMAIN (1)...(118): DAHP synthetase I family
  misc_feature (1)..(118): Xaa is any amino acid
LAAEYIVANGNPNVILCLRGIRTFEDEKFQRYTPDIGAITVLKRESNLPVIFDPSHSVGYRVNVPGVALAAVAAGADGLLIETHNDPANALCDGEQSVTEAQLADIKNKADAIKNLFN

SEQ ID NO: 101988 - protein, 288 aa, Unknown
  Obtained from environmental sample
  DOMAIN (63)...(209): TrkA-N domain
  misc_feature (1)..(288): Xaa is any amino acid
VDYSKLVKYESLVTLVERGDDVILPSGSTVLKSGDHVHILADSNNLPEIYRLAGDNQKPINKIGIAGGGKIGSLIAEGLLNTDSIVNQDDKNLNQPKKSIILSAFSRIFKNKNRRVTIIEQNSALCRELAVRFPSALILNEDISDESFVNEEGLDNLDCLIAANVNEELNIITSIFMKSRGIPRTIALVTGSGHAAMARHLGVDVVIPIQHVMVDSILTKLMGSGIKEVHSLGDGNVELIEIEIGSNAPVIDKPISTFKLSAGGLVLLVSREGESFIPKGNYVFKEGD

SEQ ID NO: 101989 - protein, 69 aa, Unknown
  Obtained from environmental sample
  misc_feature (1)..(69): Xaa is any amino acid
IITYHTEDTILKRFVGAFINPFTIVLFILATVSFFTDVIWAEPGKTDLTAIIIIMTMGVVSGLLRFIQE

SEQ ID NO: 101990 - protein, 212 aa, Unknown
  Obtained from environmental sample
  misc_feature (1)..(212): Xaa is any amino acid
MIKRHILKHLLKVAKYFPAVTILGPRQSGKTTLAKMAFPKLPYTSLENPDVRAFASEDPRSFLAKYPTGAILDEIQRVPSLLSYLQEILDNSKRNGRFVLTGSHQPEIHAEISQSLAGRTGILRLLPLSIAELTSFGIELDRDEYIYNGFMPAVYSKKTPPNLFYSNYYSTYVERDVRQIIQLNNQKSFELFIKLLAGRVGQVVNLNSMAGD

SEQ ID NO: 101991 - protein, 71 aa, Unknown
  Obtained from environmental sample
  misc_feature (1)..(71): Xaa is any amino acid
MVPFDSRTPFTTSGIRVGTAAVTTRGLKEADMPAIVEFIDAVISNIDNESKIAEICKKVNAMMSKRPLFVG

SEQ ID NO: 101992 - protein, 199 aa, Unknown
  Obtained from environmental sample
  DOMAIN (2)...(196): Archaeal ATPase
  misc_feature (1)..(199): Xaa is any amino acid
MKFYNRTNELAELQRIKNLSFNDYSRITVITGRRRIGKTSLIMKSTENEPTVYLFVSRKTEATLCAEYTKVISSALDIFVPNEIMSFRNVFQYLMEIGTQKSFSLIIDEFQEFFNINESIYSDMQNIWDQYRRKTKVNLLLSGSIYSLMNKIFQNSKEPLFGRADHIIKLSPFDTDTLKEIIHDYNPDYKNDDLLALYT

SEQ ID NO: 101993 - protein, 220 aa, Unknown
  Obtained from environmental sample
  misc_feature (1)..(220): Xaa is any amino acid
MYVNNLRQCLPLSIDNFRRLSTINGMNTKNTLEQPAEPAGIEPQVRAFPPGDPAKGRKIPLTVLWVVSTIVFCAIFAIALTPRAKAQARGEQSSINQYISIVRYAFDFIQSHYIEETDPNVLFEGAMTGMINSLGDPYSAFLPEREMKDMNDLTQGSFGGIGLYVSKPGNYLEVSSPIEDTPGWRAGINAGDLIILIDGESTDTLTSDEAVAKLRGRPGT

SEQ ID NO: 101994 - protein, 278 aa, Unknown
  Obtained from environmental sample
  misc_feature (1)..(278): Xaa is any amino acid
MRNNNQAIVRKLARKGLAVNRGGNAFIMLTVLLTTFMLGTIISTGISYMESLEMYRIRLEGTTAYTGLINVSDRQIERIKNLDYVSSYATGYIVADAVDMGYFNGMGTLLVWLDKTNWEVFRKPAFSNIVGQYPQNYDEIMVPAWILANMGITEPKIGMDITIAYQIDANPQQIQTFKLSGYFTSYIRLRTGGNEGIFVSHEFAELSGHTVEKDGNVQIRYVNDKKVKEYNERLAQDLSINVKEIITIAKYNSSSEESIDPLNIIFAVFAVILVIVGF

SEQ ID NO: 101995 - protein, 88 aa, Unknown
  Obtained from environmental sample
  DOMAIN (1)...(84): PTS HPr component phosphorylation site
  misc_feature (1)..(88): Xaa is any amino acid
MTTATITICNRAGIHARPAALLVQATKDFSCNIYIEKGNNRINAKSIMGIITLGAAYGTELKIIAEGEGEEAAVKTLVRLFESKFEEE

SEQ ID NO: 101996 - protein, 282 aa, Unknown
  Obtained from environmental sample
  DOMAIN (83)...(278): Sigma-54 interaction domain
  misc_feature (1)..(282): Xaa is any amino acid
MGGLEALDQIHANWAGLEVVMISGHANIDMAVRAVKGGAFDFLEKPLSLDKVLTVCRNALALRKLREENRKLKKSASLTHKDIVGTSYAINGIRDLVRQAALTDARILITGENGTGKEVVARAIHSGSSRCERPFVGLNCAAIPDTLLESELFGHEKGAFTDAVSSRKGRFEIAGGGTLFLDEIGDMSLSAQAKVLRVIQEQKIERVGGEKTIETDVRLIAASNKDLEKACSQGLFRQDLYFRLNVIPIHLPPLRERKEDITLLLCHFLKEQGIENLRLKTT

SEQ ID NO: 101997 - protein, 88 aa, Unknown
  Obtained from environmental sample
  DOMAIN (24)...(88): DHHA1 domain
  misc_feature (1)..(88): Xaa is any amino acid
MVADTRWESGVLGIVSARITEKYGKPSMIFGVNENVVKGSGRSIEGIDMVKVVDKFSEYCVTFGGHAMAAGLSVAADKYDQFRKEVTD

SEQ ID NO: 101998 - protein, 289 aa, Unknown
  Obtained from environmental sample
  misc_feature (1)..(289): Xaa is any amino acid
VSVKSDYQNVEISQIPYLNVGVRKNSIYFEFLKEMFPNHRHFIEYDTQEEVWNALKQNEVKVIFACNRKLITYTNFYEEAGYKLNLILNYTFDSSFGYNKDAVILKSIIDKALGIININNITNQWMHKTYDYRYKLVESQRPWLTGLSIMLFFIIISISFSLLRSSNTGKRLETLVAERTSELSYKTSQLQMMIDTIPDLMYCKDADLRYTQCNKHFEEFSGIREADIIGKTDAEGTWLSVNTAESMATTERSVIKNVKMHRFEELVSSPISGKVSYFETVKAPLLRDG

SEQ ID NO: 101999 - protein, 55 aa, Unknown
  Obtained from environmental sample
  misc_feature (1)..(55): Xaa is any amino acid
MAFIEKTLSQVLRDKTEANPNHDFLVYADRNLRFTYSEFNRRVDELARGFLAMGL

SEQ ID NO: 102000 - protein, 265 aa, Unknown
  Obtained from environmental sample
  DOMAIN (193)...(263): HAMP domain
  misc_feature (1)..(265): Xaa is any amino acid
MQNLKVAMKLFVGFGITVVLMIVVGVVSVVSLKQVDNNYSFVIDTHGKPLGDAAKIIESLQTLRAEAREAVILTGKKDDLVALNASINRLKSEFDESVKAFEPSVISPENKKKFADARKAYEDGFIPALNELLTRAAKGESQEDLLKILTEKAKPQAKIVSDAMGEVITNKSESLVQTSNEGTALSNKTIAIVFVLLGVSALLAVFFAVYVSNLISGPVKKLSQLIGEWSQGRLQNRLGIHGRMDEIGVMAEAADRWVDTLNDLL

SEQ ID NO: 102001 - protein, 228 aa, Unknown
  Obtained from environmental sample
  DOMAIN (131)...(216): MoeZ/MoeB domain
  misc_feature (1)..(228): Xaa is any amino acid
VGAGALGSPLAMYLAAAGVGVLGLIDDDIVEESNLQRQIVHSVSALGRPKAESARDRILDINPYASVSAFTARLSSANALDLLSGFDVVADGSDNFPTRYLINDACVLLGKPLVFGAVYRFEGHAAVFDARQGGCLRCLFPHPPDPRFAASCGEGGVLGALPGIVGSIQANEVIKLIVGGGRPLIDRFVRLDSWDMRLHEFALKKNPSCPVCGEAPSITSLMDYEAFC

SEQ ID NO: 102002 - protein, 136 aa, Unknown
  Obtained from environmental sample
  misc_feature (1)..(136): Xaa is any amino acid
VREAMLPFLDEEYGNPSSSYDLAYRSQDALLKAHEQAAELVGAKPGEIVMTSCGTESNAAALHAATRMFPGKTHIVTTAVEHASVLHLAEQYGRRGYTAHCLGVDEKGRLDLDRLRELLEREAERIALASVISPTT

SEQ ID NO: 102003 - protein, 139 aa, Unknown
  Obtained from environmental sample
  DOMAIN (1)...(127): tRNA methyl transferase
  misc_feature (1)..(139): Xaa is any amino acid
RAGNELGRHQGYWNFTPGQRKGLGISRGEPLYVLAVDPARNRVVVGARSESASSSCLLEHTHWHIPLRQVRNALTVRLRSSQEPAPATAREENGTIRLIFDQPQHGVAPGQSAVLYDGDIVVGGGIIRAPDARLLREDA

SEQ ID NO: 102004 - protein, 272 aa, Unknown
  Obtained from environmental sample
  DOMAIN (1)...(272): L-lactate permease
  misc_feature (1)..(272): Xaa is any amino acid
VYAAGICLIANTAPVAFGAIGIPIIVGANTSGLDVHHISSIAGRQLPLLSFIVPTWLCVTMCGFKRTLDVVPALLTAGLCFSVSQFVFSNFHGPYLPDIMSAIITIFGMVLLLRVWKPKNVWHFPDEPAGQKNSILTYSTGTVLRAWSPYIILAVMVFVWGLVAFKTLVAPIDGVKFAWPMLNGLVAKTTPIVYYELVGTSKAIYGASFTFNIVSAAGTAILLSGLIASLIMPKYGLGQAVACLFRTCHQLRYPILTIATILGLAYIMNYSG

SEQ ID NO: 102005 - protein, 130 aa, Unknown
  Obtained from environmental sample
  misc_feature (1)..(130): Xaa is any amino acid
MIYKQFKDKKLSYLGMGNMRLPKIEGQGEKIDEAKARTLIEYAYQNGVNYFDTGHRYHAGESETFVGEVLQQYQRDTFYLATKMPGNMMQYKDGAYQFTGGLAHKEPRSPKQVFEDQLEKCRVDYFDFYL

SEQ ID NO: 102006 - protein, 110 aa, Unknown
  Obtained from environmental sample
  misc_feature (1)..(110): Xaa is any amino acid
MKITEEKRIQEDLRKKEIADQEKKKQEDLRQKAKQEKKKQEELRKKEIEEKWRQEEIIKQEKWKKNRKIIIPLIILGIIGFLILIITTGMWLPVLIVSIILIFLYFKFIY

SEQ ID NO: 102007 - protein, 294 aa, Unknown
  Obtained from environmental sample
  DOMAIN (76)...(243): YbaK / prolyl-tRNA synthetases associated domain
  misc_feature (1)..(294): Xaa is any amino acid
TYQDMGRAYRKIFKRCGLSVIPVKADSGAMGGSGSEEFMVESEIGDNTLLLCKKCDYAANVEKAGCKPDFMASSSATTPPYEKIDTPNVKTIEELGAFLKNDDGSPMGSKQFIKTLIYRAVNVELDLSSAPGCKNLERKNLAPDGAKGGVELYPQAFFAVAIRGDLDVNEAKLAAMVKAGEVALAADTDVIRLTNAPVGFAGPVGLTALPVIADHSVTSMNDAVTGALAKDLHYRHVAYGRDFQPWMTGDLRTVKAGDLCPVCGGELYEKKGNELGHIFKLGYKYTRSMNVHYL

SEQ ID NO: 102008 - protein, 201 aa, Unknown
  Obtained from environmental sample
  DOMAIN (11)...(184): MlrC C-terminus
  misc_feature (1)..(201): Xaa is any amino acid
AYVEKGERPVFLSDSGDNPTAGAAGDSTDLLEAILKTIDSTDRLPTPFLYSGFFDAPAAAACVKAGEGAELDITLGGNWDTVNGKKIPLKIKVEKIHRNYGPYKSDLVLVSYRNLLISVTSKHIGFGDEGLLSALGINPADYCLVAVKLGYLEPCFRSIAKRAIMATTRGCSNEVLENIPYKRVRRPIYPLDKDMEWDSKS

SEQ ID NO: 102009 - protein, 50 aa, Unknown
  Obtained from environmental sample
  misc_feature (1)..(50): Xaa is any amino acid
MSDLKIDVKNLDLYYGEFQALKNIFFSIKEQDVAALIGPSGCGKSTLYAC

SEQ ID NO: 102010 - protein, 90 aa, Unknown
  Obtained from environmental sample
  misc_feature (1)..(90): Xaa is any amino acid
MSGSQFAGFIVPVVVILAIVALIIFFYISSAIKLWLQAIFSGCRVGLLSIVFMRLRKVPPKLIVEAKITAVKAGLSLTTDELESHYLAGG

SEQ ID NO: 102011 - protein, 119 aa, Unknown
  Obtained from environmental sample
  misc_feature (1)..(119): Xaa is any amino acid
KNEPLLENAVIIPVPPRPRKIKEAGWDQVDYLVKRLEKYLPQASVNRLLKRGKSKAQKQLNRSQRLENLKGRIQITGNAPNTALIIDDVITTGSTMEVCSNVLKEGGAQKVYGICLFYD

SEQ ID NO: 102012 - protein, 176 aa, Unknown
  Obtained from environmental sample
  misc_feature (1)..(176): Xaa is any amino acid
DDTKNAHKVYPPIRGIEHNNSLWQAVKKGEINLVASDHAPHTAAEKSLPLWDAPAGLCGVETSVPLMLNEVNKGRLTLNDYARLSSEAPARVWDMYPQKGNLSDGADADITIVDMNMKKVITSGELHSKSKTTPYEGMEAQGCPVATIVRGKFVMKDGKLTGIKGHGIHVKPKGLC

SEQ ID NO: 102013 - protein, 300 aa, Unknown
  Obtained from environmental sample
  misc_feature (1)..(300): Xaa is any amino acid
LRPSSSQTEIKTETTSGAGKPSGTTGTASSGTGSTGTSAVSGTSATGTASSGTTETGAASGTNATVTNAAGTSTASETNKSSGTNTVSGANSALDTGSTAVADTSSAEGTSETVSGEMGQVSTGSQDSSVSQTSKSSSGDNGVSVSDNKGTSDYNYNNTNKKKERGESFFASLPFIIIIIFIALVILGLIIYFASRRLGSSPNRVMAKVSSPESRETRFKDHSKDLASYAAGQSRRSTPYEDRPIKHDKEKQSVINPSGPLLLNFFVDDQHTEIGKRNIHSLNSGYSLSIGGRKTDDFLI

SEQ ID NO: 102014 - protein, 165 aa, Unknown
  Obtained from environmental sample
  misc_feature (1)..(165): Xaa is any amino acid
MGHSAICLAKGGTLTSPLLLRRLAIIPTLKCTLRCKLCSNYMTMYDDPPHVPVEEVMRDIDKIFALIDHAEWLQFVGGELFLRRDMGEVYTHCLRHRKKFDKLILIINATVLPDEQDIEALKHYGQHCQVQISDYGKHSRKLTEIVEIFKANDIPFVAKRYYGEA

SEQ ID NO: 102015 - protein, 279 aa, Unknown
  Obtained from environmental sample
  DOMAIN (2)...(279): Fatty acid synthesis protein
  misc_feature (1)..(279): Xaa is any amino acid
MVRLAVDADSGDFGPEAMVRGVVAARLAASEPFAVCLCGDEERIRGVVAEIGGDAERCGFEIEHCTEAISEGDRRSTAWKTKRGASIVRCVALQKEGRADASVSAGDTGVLIGSALFILGCAEGVSRPALAAFVPTPKKPVLIMDVGANIDCRAELLAGFARLGCEYVGRVRGGKAPRAALLNVGSEPHKGPPAVRAAAELLEGCENYIGFIEGNKVFSGEADVVVCDGFVGNALLKACESFYALTSEFLADSKETLEKLSQKISALNPENYGAVPFLG

SEQ ID NO: 102016 - protein, 287 aa, Unknown
  Obtained from environmental sample
  DOMAIN (1)...(143): RNA polymerase beta subunit
  misc_feature (1)..(287): Xaa is any amino acid
SHGDMRLTYDGYSLDESSIKFSELDCKQKGITYAVPLKAKVNLIFQQTGEIRQKDIYMGDIPIMSERGTFIINGAERVVVSQIHRSPGVIFSHEKGVYSSRIIPYRGSWLEFEIDQKRELIYAKVDRKKRILGTIFLRALGYESREEIIKAFYVTETIKIKDDRETREKISGQVLAAPVWIPDETAAQAAEQKNSKTADEHAGMKKLYRAGEKLHQHNVDDILAHGIKSVELIKFVDLKDPTDDKSANFSLDSTMLLNCFEREEIKYTKEDSGSDEPTREEALMAVF

SEQ ID NO: 102017 - protein, 234 aa, Unknown
  Obtained from environmental sample
  DOMAIN (23)...(234): Cytochrome C biogenesis protein transmembrane region
  misc_feature (1)..(234): Xaa is any amino acid
MFSTSSLATAFPTAQTGMGYGMVLIIGLLTSVHCIAMCGGINLSQTLRREQGTGQQSWHGNREQGYSSSLFMPSVLYNAGRVISYTAVGVAVGTIGSVLTISGRFQGAIMLIAGIFMLVMGINMLGLFPALRRFIPRMPAVFTKKLDNHKTNRGPLVVGLLNGFMPCGPLQAMQLYALSTGSPIRGGISMFLFSIGTIPLMFALGAASGILSKGQAFSHKVMRAGAVLVAAMGL

SEQ ID NO: 102018 - protein, 294 aa, Unknown
  Obtained from environmental sample
  DOMAIN (1)...(271): Pyruvate kinase, barrel domain
  misc_feature (1)..(294): Xaa is any amino acid
IGVLPDGALEVKKGDVLILGASPEKGDEYPLLPFDVDGLLKNMAPGDLVVLADGGLQFHVRERRPDGRVNIQAIDAGIITSRKGLALPGKSLALPALTEKDRESLKIGLELGVDAVAVSFVQTAEDIRQAKAALKEHGSRIPVVAKLERQNSVDNLDAILAETDIVMVARGDLGVECPLPALPALQKRIIKACHRASKPVIVATQMLLSMVNSPVPTRAETTDVANAVLDGADCVMLSEETAMGNFPVETVEYMSRIADEAENFLLENRHLPEPDADRGTQEYLAYTACLLAEK

SEQ ID NO: 102019 - protein, 291 aa, Unknown
  Obtained from environmental sample
  misc_feature (1)..(291): Xaa is any amino acid
VINQAVDHFKLISDDSERFYKIPEKNKSGKNDIFKYDEELRQEFFNNIIAFCGERGTGKSSALLSFMEKVKSEKEKEVRIIAHIDPMQLEDNESIIGLVLTRMLQKANRDLENNTRDGKSQVDRNHSYNEFATHISECFELIETLKSRSKHVPEYGSYDEPLIALDRRMKTADLRTKFYELVQEYLKFCNLGDPTDGKMLIISIDDIDLSIEKGYEIVEDIRRYFNVPNVAVAIALHLEQLEHIVAQRFRHEDGVTKLSINSDTLDDPYREMAFKYMEKLLPDRRRLYLPP

SEQ ID NO: 102020 - protein, 94 aa, Unknown
  Obtained from environmental sample
  DOMAIN (43)...(93): Aspartate carbamoyltransferase regulatory chain, metal binding domain
  misc_feature (1)..(94): Xaa is any amino acid
IKITDRYFDDDEINKISLVAPEAQLNMIRDYDVVQKHKVSVPHEVTGIVKCVNPKCITNNEHIITRFYVMENKPVTLKCHYCEKIVEQEQMTVL

SEQ ID NO: 102021 - protein, 243 aa, Unknown
  Obtained from environmental sample
  misc_feature (1)..(243): Xaa is any amino acid
MPQWAGSCWYYLRYLDPHNDTAFAAQDKINYWLPVDLYVGGAEHAVLHLLYSRFWHKVLYDCGLVNTIEPFQRLINQGMILGEDNQKMSKSRGNVINPDDIIKEYGADAMRVYEMFMGPLEVSKPWNTAGLVGVSRFLERLWMIGNREWGSGIGDRGSLETGVMPSNKPPPVPSPQSPVPSLEQLTKLLHRTIKKVTEDTASLNFNTAISQMMIYSGELARLTEIPRGFWEPLIIMISAYAPH

SEQ ID NO: 102022 - protein, 299 aa, Unknown
  Obtained from environmental sample
  DOMAIN (25)...(111): PKD domain
  misc_feature (1)..(299): Xaa is any amino acid
ACTVIVKPEVVVIPNKPPTANAGSNQTVKLEENLTVTLNGSGADEDGTVEGYSWALSADTNPGLADGYSIQNGKTATPTISFTKAGEYIFELTVTDNEGAVSAPSKVKVTVTPADPPAINSITITGAAPEGGKYKYSDTLTLSGNPAAGGYTYAWTCSPDTLTFDKTAAEPTVSGFAKGGSYTFTLTITKGELTSTKSVTVSIAENKPPTASATNPASPVTLSATPITLSGTGADSDGTVKSYAWECTGYTKAAGVGTAKTPAQITGDISNTSNFGGTVALKQAGTYKFVLKVTDNEDA

SEQ ID NO: 102023 - protein, 291 aa, Unknown
  Obtained from environmental sample
  misc_feature (1)..(291): Xaa is any amino acid
MKQCEDLDKTSTEIKSHQTRAEEMRLLEKRRTRGEIALRKIKPLADEVTKATKQYKATMESLEDAKKKADAALKESEAAKKELAGLPPIEDAKDVFDKAKDELKAESINLEKLKTLQKEHEEIEIQRQRLIQSQLEFERLNIEFEKLNGKYISLNKSFLRNQAGIIAAKLVPGEPCPVCGSTEHPTPAKLTDGDVTEAGLESAKAALDRTQDECNQKSKECEGLKNKIETREDRFVGDFKTINPNVNKDTAGDLLKGAVTQTQDSVNELTVKKQKAEKILTELDTKRERAA

SEQ ID NO: 102024 - protein, 307 aa, Unknown
  Obtained from environmental sample
  misc_feature (1)..(307): Xaa is any amino acid
MHRQELIPYLSPVQSPMLCTAVYMKKYEGVNDRIAALSPCIAKSDEFAAAGYVDYNVTLKKLYEHIEAHGIALPKEESGFDHAESSLGCLYSMPGGLRENVEWYLGKILRIDKSEGQGTVYHALDKFAKKRGTNLPTIFDVLNCPEGCNLGTGCAHERDEFDVNAIMDEARQNILQRRSQEDFEALYADYDKRLKLDDFIRQYTPARLAPYTASQEQIDRSFVRLGKETEEEKNFDCSACGSDTCRDMAKKVACGLNIPENCVQKARDEIKKEHGAMIDMSKDNIRDIDGMLTDISAVKELCGEIVG

SEQ ID NO: 102025 - protein, 85 aa, Unknown; identical to SEQ ID NO: 90997
  Obtained from environmental sample
  misc_feature (1)..(85): Xaa is any amino acid

SEQ ID NO: 102026 - protein, 302 aa, Unknown
  Obtained from environmental sample
  misc_feature (1)..(302): Xaa is any amino acid
SGGSGFLSEVQKYFGVNLSNYPSPRDVIINGNYALIIREPGVFSPFERQNRYEPPSSLSEEAVLVRLSSGAAISGYRLVPLDISAASADIPLFVAAVSKRNIYELVPEVSGLNQRSPETRWPLAKEYPEVYLPGTQVFSGDACLKFTNYGGEGSFQIGADVVPGSIQVWRGGIMDANFNYNQSTGEVALKGPAGANELIRITYLKRSAETRLGSIASGIGAVYQKEGNPFSAMAAIGVRWNMTDSSFSEEGVSSPGTVGLSAKTAWDFDNLKAQITAGAALDQNDTTGIYRAAGMEGHETVL

SEQ ID NO: 102027 - protein, 142 aa, Unknown
  Obtained from environmental sample
  DOMAIN (8)...(137): Flagellar protein FliS
  misc_feature (1)..(142): Xaa is any amino acid
MEKAILAYNNAISTYRETRVKTASQGQLVMMLYNEAIKSLDRSLELISLNTGGKKNPGNIEKISKAILKAQEIITELIVSLDFEQGGDIAKSLFSLYTWFNKELFEANIKQDMQRLTAVRNQLSELRSAWAEITATNIPDSV

SEQ ID NO: 102028 - protein, 72 aa, Unknown
  Obtained from environmental sample
  misc_feature (1)..(72): Xaa is any amino acid
MVKNNPLIKPYLKWAGGKRQLLAEIMKYLPENIHDYTYYEPFVGAGAVFFELQPTKAVINDSNGQLILHIPL

SEQ ID NO: 102029 - protein, 104 aa, Unknown
  Obtained from environmental sample
  DOMAIN (7)...(98): FKBP-type peptidyl-prolyl cis-trans isomerase
  misc_feature (1)..(104): Xaa is any amino acid
YEVITKKDGPKPNERDTVRVHYEGKLINGTMFDSSYSRGEPIEFPLSGVIPGWTEGLQLMNVGSKYRFYIPSALGYGSQGAGQQIPPYSTLIFEVELLGIVKEK

SEQ ID NO: 102030 - protein, 180 aa, Unknown
  Obtained from environmental sample
  DOMAIN (10)...(142): Phosphoribosyl transferase domain
  misc_feature (1)..(180): Xaa is any amino acid
VFCEYGRGLRWGGNFDFGKLLCTNFKEHFVGKADNLFGPAYKGIPLCAATAAALHKEYGINASFTYNRKEAKDHGEGGVLVGDTYKEKRRIVIIEDVITAGTSIEETMRTMSAIPNAEIAGLIVAIDRREKLGDGKSALQQVKEKYGIETHSIASIEDILKFAPEEHRESIEKYRLEWGV

SEQ ID NO: 102031 - protein, 263 aa, Unknown
  Obtained from environmental sample
  misc_feature (1)..(263): Xaa is any amino acid
MHQIVQKYINGELAEPMATTLVSGGIPLPTLDLLRALSHAVFSESPLKDAALETLADLPVSILMGAIGGPVESPEPLGLVLVHRSEPDILEAALLNKCLTAEWMERVVPSLHGQFLEMALNNQVLWKLRPTILDALESHPEGSTNLKRRITEFRRDVLRQLDSAGADERMELIDEVEAGTLDTAWAGLPLAAEHSEPKRQEPPAKEKGALTVAQRIARLAVNQKVVLALRGGKEERAILMRDPNRLIQVNVIHNPRITEGEVA

SEQ ID NO: 102032 - protein, 204 aa, Unknown
  Obtained from environmental sample
  misc_feature (1)..(204): Xaa is any amino acid
GTPDRVIHWYDIKLIEKYQGLGYEEMADRTATLLQNPKLRMNTDLVVDGTGVGDAAVELMRKRGLYPTPIIFSGGETPKEHYAEFGSVFKGDQGKINGAKILEYISVPKKDLVDAGKVMIQQGRLRVAPGRWNEDFKTQLSKFKGKVNENTKYTKYEAETEKDHDDLVVVYLMGAWWIFNRKEKGIPEQTADQNATVGWDPADY

SEQ ID NO: 102033 - protein, 66 aa, Unknown
  Obtained from environmental sample
  misc_feature (1)..(66): Xaa is any amino acid
MKIAIDFDGTCVTHEYPQIGKDIGAVPVLKRLVEEGHKLILNTMRSGKELQEAVDWFKIHDIPLYG

SEQ ID NO: 102034 - protein, 177 aa, Unknown
  Obtained from environmental sample
  misc_feature (1)..(177): Xaa is any amino acid
MLFKRTFLVLAGLLIASVSVLWAGDSASFVDLGFSSDGNIYMFAQYGVKSGLLRPWADLFVVDVTRNNYVPESGISYTHDKPIEAGQDGSSALYRVITQNTGLAERLEISYPNQGQPLYIALSGDPAYEGKTITFRDFTSGVFYKANLVETVNGSGKGVRSSFYIKLESVDGDGEVK

SEQ ID NO: 102035 - protein, 293 aa, Unknown
  Obtained from environmental sample
  misc_feature (1)..(293): Xaa is any amino acid
EANTPTGITVTFDKNGGDTDASPTTKTVDESGKTVDALPKEPTKTNFVFMGWNTQADGEGEVFDATTPVTESVTVYAQWESGIEFTVTFDSNNNDQSGAADADPSTKKAIDSKTLSALPTPPTRSHGWGAGMVFDSWNTEADGKGEVFDATTPVTDDITVYAQWKFEFGTELVPNGPNESTLEAPRFTRSTVDQHGSFVGSENPDGSISLRGGAIRYQFPIVTGFDFLEIDYVTENTQTLPFKVIFKQYNSSANYNSTNNSPYKNLEPSGSIRFPIVNAGASNGIAIQYDSND

SEQ ID NO: 102036 - protein, 127 aa, Unknown
  Obtained from environmental sample
  misc_feature (1)..(127): Xaa is any amino acid
MVTSTPGASGSSDSGDSASGNSASGGSASGSNSAGSSDSTSGDPGQYTKYTPASGTAPTTRAQQQFLSSVIPGAIAAQQRYGVPAAVTIAQAIEESNWGTSQLATKDHNLFGIKGTGPAGGTDYPTS

SEQ ID NO: 102037 - protein, 292 aa, Unknown
  Obtained from environmental sample
  misc_feature (1)..(292): Xaa is any amino acid
QQAPGGTGLAAYNLRGTYQLSSGGSWGTIADVGKPVTVTIIWTHTGGTAAATDRNFWIQIGEEKSISTYTANTNLADSATEASAVFKVSGTGDISFGSDDGALRIYYIKIEYEGVDSGVPEVTGVTIAGPTQVASGESITLTASVQGSSGVSQDVTWALFASDGTSSTNAATLTNGTLAAASLNIGDSDVVVKVVATSVADTTKKSPAYTVTIKAPVLAVTVTAAGYKTSITAGDTTASEAPYTLQFKATQNSADVTSTSTWSLKNSANFTTGSAIASSIATISNGGLLTAG

SEQ ID NO: 102038 - protein, 84 aa, Unknown
  Obtained from environmental sample
  misc_feature (1)..(84): Xaa is any amino acid
MKKRTGICMLLACCLLAACIATKRQEEQKVDIGAQTNKLTGGVTFTANSRGNQRLEGSPYGYEMWTQGGNNNKLIWFGPIRAAG

SEQ ID NO: 102039 - protein, 168 aa, Unknown
  Obtained from environmental sample
  DOMAIN (27)...(164): Glycoprotease family
  misc_feature (1)..(168): Xaa is any amino acid
MNLLAIDASCSILSAAVCRDSDYYYTQTEAGIKHSELVMEIINEQMEKADMKPADLNGILCMGGPGSFTGLRIGFSIAKGLALSLSIPFVPVPTLECIAFSAIGLSLPVIQARKDAYFYSLFNDGRRITEDSDGAISQITELIIKNTHKNKNINITGPAAAEIFDTLS

SEQ ID NO: 102040 - protein, 208 aa, Unknown
  Obtained from environmental sample
  misc_feature (1)..(208): Xaa is any amino acid
MRLYSRGQLVFFSIVSCFLTAIIVTGAGILLNKRTPPQNETVQTAAVDEASNETVQIISTVQPENQPRTIEVQSSASYTEDERENISVYERLNSAVVNITTETMAINWFLEPVPQEGGSGSGSIIDTRGYVLTNNHVVRNAYKVYINLADGSQYEGTVAGSDPENDLAVVKFDPPAGTVLKTVPYGDSGNLKVGQKVLAIGNPFALER

SEQ ID NO: 102041 - protein, 138 aa, Unknown
  Obtained from environmental sample
  DOMAIN (1)...(131): Asparaginase
  misc_feature (1)..(138): Xaa is any amino acid
MDNPLLSGTGGVKLDINIRKEVFPLKLTPGINPNIIDEIVLDGYKGIVIEVFGSGGLPAKFHDPVRNAVEKGVSVVAMTQCRNGETDFSHYEVGNNALKAGIIPVSKMTFETAVTKLMWVLGHTTKPEEVEKMMLKDI

SEQ ID NO: 102042 - protein, 240 aa, Unknown
  Obtained from environmental sample
  misc_feature (1)..(240): Xaa is any amino acid
MKTVSVFTVFDAYSEMILRERQIFSVKGLEETAATELCGFCALKCSDYPQFRAAVVLGMPLLLPILDTEPSIWGLEHEKVVAGVLSKAAARVARYITACGETALVLEKNDEQLAELAFKAGLGSIGKNGMLITEQFGPRVMPVAVATSLPLDFKETDKLCLCIQCDGCVTVCPCATDRVNDGKCRAYNASLAADYKNPCFACAKVCPIGADRVLYQSGDMSKYFDARDEINDAERMGWRH

SEQ ID NO: 102043 - protein, 285 aa, Unknown
  Obtained from environmental sample
  misc_feature (1)..(285): Xaa is any amino acid
NMKFIINGPATGQSPDKTPPEGGKGYTCSPVKWSPDDNPFLGNTIYTAEVTVTANHGHTFTPNTTVRINGNYVNADINPDIIILSYTFDETTEKRVSKIQIETQPARLIYTHENTLDLTGLVIKMTYDDSSNESVPFINNHYNITANPANGAKLSHSDNDNKSVVVSYGNDLSADTGKLTVYKGTPQEDDFIINGERHQKKGNVLQLQITPKQGKSAGTFTVNYTTNTTPPTTFKNIDIINAPAGNYTVTFDVGESKDQNWNAATGLSAGILVIYNFTNGCESSE

SEQ ID NO: 102044 - protein, 188 aa, Unknown
  Obtained from environmental sample
  misc_feature (1)..(188): Xaa is any amino acid
RLETIAFENDAAIQARLRPDTPIGAGEWLDIVGLIVPKSEIEQLLADIDCGSINKLDDIAGTFHTMHSNYYNYEWTWAIEKIQKQIGNKIPDITSHDVINFVEMWRDSVIELDLALYNDAKHEFALSSKVGFGVDGNQDDRNRDFEQVRGEFEKNSFVQEVLDHIRRKTELGNELIARMKSITKTHHK

SEQ ID NO: 102045 - protein, 131 aa, Unknown
  Obtained from environmental sample
  misc_feature (1)..(131): Xaa is any amino acid
MPELDLTSFGGVGDGITDNSGAFAIALQTLKEAGGGGLTIGKGVWRTGPLELFSHTTLLLDEGAVISFIPDPERYKPVWTRWEGQECYAMHPCVFADGQENIAITGKGILDGGGRFWWDTLREKRDRDQQT

SEQ ID NO: 102046 - protein, 50 aa, Unknown
  Obtained from environmental sample
  misc_feature (1)..(50): Xaa is any amino acid
MSDKKIRVVIAKPGLDGHDRGAKVIARALRDAGMEIIYTGLRQTPEQIVT

SEQ ID NO: 102047 - protein, 306 aa, Unknown
  Obtained from environmental sample
  misc_feature (1)..(306): Xaa is any amino acid
MKQTVEQLSTSINTIIDSTENLATVLLMDDEIVPRSNILSKALAEKDSYDLGEKVSIRKNIEYLFSRTANFNQFTESIYLTDRDEFIAGAPIIVGSVKNPNTLDWFNEFMESDRRDLWSGLHSTILYGTGSNSNVISYLRKVYNRFNTIVQGVLWVDINERRFYNFYRDLGLSDSARVFILGPQMDIISHSHLASDREELDVNLYKKAFRRSGNYYLDNIEGKTKLIAHTFMDRTEWTIVYSVNMGELMLPYNRLINIYLVVSGFLLILLAAVIIRRSYSISLPLIELMNLMKKAAGGDFKVRAQV

SEQ ID NO: 102048 - protein, 292 aa, Unknown
  Obtained from environmental sample
  DOMAIN (1)...(260): Penicillin binding protein transpeptidase domain
  misc_feature (1)..(292): Xaa is any amino acid
MDSGVISEQSEFICTGVYEKVFSSGEKVKIECADGRAHGRVRPREIIIHSCNVGAALAVDRQNNEMFYQSMLDFGFGKKTGAWVNTETAGLLKETNLWSGRTRQSIAFGQEIAVSALQVMQGASIIANNGMLVPPRLISKITSADGKTATVWENEINAKRQVLRPETTRRMLSYMADTATDIGTGWRASIEDLHLAVKTGTSQYRNPLGGGYSDTDFIASCIALLPAESPSLILYVVIVKPRGETYGGRIAAPAIREGAEQLIDYLGIPRGRNPIVQHPGSIILPKNCFRPL

SEQ ID NO: 102049 - protein, 268 aa, Unknown
  Obtained from environmental sample
  misc_feature (1)..(268): Xaa is any amino acid
MRTLKVYVEDETAQAALLCFNRPWLDKKLVTGEKFNLYGRFYYKYGEIQSSSFEIEDTDSNGGFARIFPVYPLSSGLSQAMLRRFTSRALELYAKNIENELPDIIIEKYNLMEKKNALRAVHFPSGMEELAAAKKTLIYEELFYLEVIVGKRSLERGRRINNTPSKNVQDGFFTPLQSKLVERLPFALTQGQKAAVTEINHDMSGGIPMARLLQGDVGSGKTLVSFLAALKAVEDGGQAAIMAPTELLARQHAQNAGETFGAAGGSHC

SEQ ID NO: 102050 - protein, 292 aa, Unknown
  Obtained from environmental sample
  misc_feature (1)..(292): Xaa is any amino acid
LLSANELQSLLEKGIADRQIKGLAQLNLGQKMQMENRYKAAIYWYNEAKKSDTILTETADRFKSTLEGRGAGNPVILVLVPLTGVNSELGNYMVQGVMLYADSLANKAIIRIADDRAEPSTALRKVKQALVQDSVIAVIGPLLSASAATVAAWMSEKTPHIPLITPTATEDGIARMGKNIFQLNVSTAKLASSIAEYAMNCLQINEFAIMSPNNDYGVLMANEFQRTVERKGGVILAIQNYAEGMPDYQGEFKLLIDRTLIIDKRRSALSKDTKRSVSRKKKRKLEYPAVFI

SEQ ID NO: 102051 - protein, 265 aa, Unknown
  Obtained from environmental sample
  misc_feature (1)..(265): Xaa is any amino acid
MTMAEETENTQKPKAELIKRAPNSAAEKSEQETGEGVARTAQEHGERRKVIVVKKKSSATTPQPQGASGAGGESRRMGPATGNVKRILPKIVAARSQEGDDTEAASASTGANAVTKGKTESKEGRVFSKEKSQAPNREPKAKDEAGSESPSFLIAQRPVAAAGRVGGKYVGPRPAYEESPKPAYQGQRPTGGTGRPGNRPAGKGPGENRPGGFAQNKPYTGALRGSRPQGTPHTGGYGQARTPGSPQKGLQRPGGMRPGSFPPPG

SEQ ID NO: 102052 - protein, 238 aa, Unknown
  Obtained from environmental sample
  DOMAIN (155)...(223): Elongation factor Tu domain 2
  misc_feature (1)..(238): Xaa is any amino acid
KRQELKRFEDSKTIRKITLDNVHDTINEGAIQELKVIIKADVQGSAEALRSSLEKLSTKEIRLHVIQALPGAINEGDVDLSIASNAIIIGFNVRPVPKAKALAEQEKVEIRRYNVIYKAVEEIQQAMEGMLKPETKEEIIATVEVRDTFKTPKFGVVAGCYVLTGNVKRSASIHIVRDDIEIYTGKIGSLRRFKDDVKEVAAGYECGIGLEGFDDVKTGDQFEVFEMIEIARKLKDST

SEQ ID NO: 102053 - protein, 241 aa, Unknown
  Obtained from environmental sample
  DOMAIN (1)...(217): tRNA synthetases class II (D, K and N)
  misc_feature (1)..(241): Xaa is any amino acid
MGHGFYEIETPTFIRSTPEGARDYLVPSRLYPGKFYALPQSPQLYKQILMVSGFDKYFQIARCYRDEDARGDRQPEFTQIDIEMSFVSREDVLALVEGLMGYTFKKTLNCELPSTFKRLSYEDAMELYGTDKPDLRFEMQMKDFSTWVPAGEFQAFKDALASGEAEKAASAAKGVTVSGGGVKALVVPGRIGSRTVEYSRKQIEELEAHARIYKAKGLAWMKVGQGGTLEGGVSKFFASQA

SEQ ID NO: 102054 - protein, 261 aa, Unknown
  Obtained from environmental sample
  misc_feature (1)..(261): Xaa is any amino acid
MLIMKAVIIRLKLPVIKNTYRPAEAAEVKIKVLLNGKAAPNTEVTFMAVDRGVVDLIDYHVPDPAAFFYDPRNFPLGVRGADSRSLLIDPVTYSLSDLQGGDSEDGGKTNDAARLKSRMMNERRDFRSMAVFEPYLLTGADGTATVKFNLPDSLTTYRCTAVAAGLRNFGIKEHDLRVSAPLTAVAALPRKLRWRDTGTVSLILTNLENTAVNAHVSLEGGDNAIIEVDGESSKTVKMLPGVSEEVTFRVAAVGVGEAQLT

SEQ ID NO: 102055 - protein, 270 aa, Unknown
  Obtained from environmental sample
  DOMAIN (140)...(211): HAMP domain
  misc_feature (1)..(270): Xaa is any amino acid
LGVPIIHSASNEVVGSVTCYLTIDGVQPKLEETIKGQEEIVAMSIYTNSGFIMGNLVPDRIGKTLKEAETIYGKYLDQANDAVINGKPFQCRSYSQVLKTDVSIDLMPLNIGGSDITWTIMIASSDEYILKEVKEITTFVIILSAVALVISVLVIYFVLDVTIKPIVHVAETLKDISEGEGDLTRHLDVNSKDEIGDLSHYFNKTLNKIKDLVLLIKREAAGLHNIGDDLASNMTETAAAINEITANIQNIKSRVISQSASVTETNATME

SEQ ID NO: 102056 - protein, 200 aa, Unknown
  Obtained from environmental sample
  DOMAIN (1)...(182): Aminotransferase class IV
  misc_feature (1)..(200): Xaa is any amino acid
VNISTEPYVLIVTTPVSAYFSGGDAAAVVTERIRATPKGTGWIKAASNYTIAALAKHEAIEAGFMECVFLDAEKHKFVEEGSSCNIFFYLKSGEMVTPALGDTILPGITRASIIELAKDQKVKVSERKIAIEEALTETQECFVCGTAAGATPITSITYNKKKVTFNKGKVGDFTANIQKTIKGIQYGLDPDTKGWLKKVL

SEQ ID NO: 102057 - protein, 279 aa, Unknown
  Obtained from environmental sample
  DOMAIN (1)...(127): CO dehydrogenase/acetyl-CoA synthase complex beta subunit
  misc_feature (1)..(279): Xaa is any amino acid
GAYVPECNGVMIVNREYLGETPIGMTFSTLAGSVGGGQQTPGFFGCGKVFLSSRKFLSAEGGFARIVWMPKELKDLLHDDLVRRFNEKGLTGFIDQIADETIALTAENVRAFMEKVKHPALAMEDMAQFAQSEESDAAAAKADVTPAKAVTTGAAEEHVPITGNVDLAAITEQVKASVTKEIITSIIDILSERFLGQAPAAVRTEAQKSPAEPVISASTRISAIKSFALPVESSSSATYTVKLGNAKSEGGTRGRTRVVGGANCMPFHFWEGRDAEQAV

SEQ ID NO: 102058 - protein, 270 aa, Unknown
  Obtained from environmental sample
  misc_feature (1)..(270): Xaa is any amino acid
LRYTVVVLSEGTGATGGGKYLPKDTVTVTAGTPQPDNRFKMWTSADSVKFIPSADSSTVMFIMPARAVTVTAVFESTSPATEKYKVKLVSAGTGATGGGEYPPNKVVTVKAGTPQPGYRFKMWTSVDSITFIPDSSSPNVLFGMPAKDVTVTAVFEPIPVTKKYAVVVKSEGTEATGDSAYAAGDTVKVTAGTPPSGKQFKEWTSSADSVKVAFSPSRNNATVTFIMPDTAVTVTAVFEAIAATAHTITFNPSGGTVTPASGSTDSTDRL

SEQ ID NO: 102059 - protein, 262 aa, Unknown
  Obtained from environmental sample
  DOMAIN (91)...(262): Divergent polysaccharide deacetylase
  misc_feature (1)..(262): Xaa is any amino acid
LQKSESEQPEVVETEILIIPEKPEPQSVEVPTPDVEKKETVSTPNKKQVPPKRLPAVKQTQPVQNNEPVATTVSAVINPKVPVENKGTLVFIIDDAGNNLKELEPFLRIQFPFTIAVLPGLPHSAEAAKRIRESGKEVFLHQPMEAIGGQEPGPGAIYSGMSADEIRAVLSRNIEEIGPIAGMNNHQGSKITMDKEAMQTILAFCNEKGICFIDSRTTADTVVPSVAKQMGIKIAERNVFIDNEQNKNAMLRYISNGLTRAQ

SEQ ID NO: 102060 - protein, 271 aa, Unknown
  Obtained from environmental sample
  DOMAIN (4)...(170): Transglycosylase
  misc_feature (1)..(271): Xaa is any amino acid
VARLQVLDKDGKPIHDFSVERRFWVSLDKIPVELQNAVIATEDRKFYSHWGMDVLRNGSAVFVNIARGKKAQGASTVTQQLARNLYLSSDKTFIRKIREVLTAVQLESSYTKREIMELYLNQVYLGAGVYGMQAAAEHYYSKNVDELTLNECAVLAGTIQLPEYYRPDKPENVERTTVRRNAVLKAMVAAKFIRKDAAKAVMDEPVVANPKIYRPPMAPYFMEMVRKYVSDKYGDELLYNGGLAIHTTLDPAAQDSTEKSAERAVASLQKR

SEQ ID NO: 102061 - protein, 220 aa, Unknown
  Obtained from environmental sample
  DOMAIN (45)...(186): Phosphoglucomutase/phosphomannomutase, alpha/beta/alpha domain I
  misc_feature (1)..(220): Xaa is any amino acid
MDQISLAKKANEYIRLEQDGHFRSQVEKLLKGEDWVEINDRFYTDLEFGTGGLRGVIGGGYNRMNPFTVCRATQGLANYVVKAVPTGASAVIAHDSRNFSDVFALQAALVFCANGIKTYLFTGLRPTPELSFAVRRLGASVGIVVTASHNPPEYNGYKVYWGDGAQVVAPHDKAIIDEVLSVGDAIKTMDKDEAVKAGLLSMIDEVVDRPFIDMVKNCSI

SEQ ID NO: 102062 - protein, 99 aa, Unknown
  Obtained from environmental sample
  misc_feature (1)..(99): Xaa is any amino acid
MMSVKISMSAENAESYYGTDNYYIGSDKPGGYWHGDEEMAESFGLTGSVEPERFSQILRGYDPISGAPVAANAGDKNRCAGSDITFSAPKLASLLALKD

SEQ ID NO: 102063 - protein, 287 aa, Unknown
  Obtained from environmental sample
  misc_feature (1)..(287): Xaa is any amino acid
MTIDSVIKTADKHLEHGKKYCIIVDESSMGGSRTINELLKVTQEYNAKVIFVGDKKQFQPVGAGKFFSDLQQTAVKVTHMKDVIRQKTAQTRNVVKALADKEISEAFNLLAGHSAIFDGTEYKNYIQEIKDSNARQQAVADDYVNCYNAGTDAIVVTATNEDRRSINKIIRETLVNQGKIENIGEFSLLEPQNISDFLSADSFSIGQQVKGLPQLKVGDKSEFGVITDIDRNRNRITVYNPTTQESFPIYTPDYAGKPFSVFNHNEKATLGIGEKIAFLKNAKVSIK

SEQ ID NO: 102064 - protein, 115 aa, Unknown
  Obtained from environmental sample
  DOMAIN (5)...(115): Oxidoreductase family, NAD-binding Rossmann fold
  misc_feature (1)..(115): Xaa is any amino acid
MEKTVGWGIIGLGRIAGEFADSLRLVPGTKVAAAGSRSIEKAKKFTETYGGNPYGSYQEILNDPDVDMVYVATPHPMHEENVIMSVNAGKGVLCEKPFTVTYKSAQRMIEAAKKN

SEQ ID NO: 102065 - protein, 295 aa, Unknown
  Obtained from environmental sample
  DOMAIN (1)...(295): Phosphoglucose isomerase
  misc_feature (1)..(295): Xaa is any amino acid
YTRHDISVRFVSNVDGTDMAETLCHLDPETTLFIISSKTFTTQETMENANSAREWLLSVLKDKEAISKHFVAVSTNKEKVTQFGIKESHMFGFWDWVGGRYSMDSAIGLSLMLAIGPDAFYRMLAGFHAMDVHFRTAPLRSNMPVIMALLGLWYISFFGAETHAVLPYDQYLHRFPAFLQQLMMESNGKRVTLEGAPVDVPTGAIVWGEPGTNGQHSFYQLLHQGTRLVPIDFICFANSLNPIGRHHYMLTANVFAQAEALAFGKTEAEVRAEGTPDALVPHKVFEGNRPSSVLM

SEQ ID NO: 102066 - protein, 291 aa, Unknown
  Obtained from environmental sample
  DOMAIN (40)...(153): DNA mismatch repair protein, C-terminal domain
  misc_feature (1)..(291): Xaa is any amino acid
TLTRLALATPAVRWVVRPARSMELTLPAAQDLKQRIVLLSGERMSRLVPFTDGEAPWRMHGYISPPDLCYRDRNHLYLFVNGRPVRDRLMLSALSSGWDGFFQKGTFPAVVLFLEIPAEAVDVNVHPTKSEVRFREPQRVFPWISRATREAWGAAKGELPSFFAAPSRSFYGGSDAPLEGRPSTTVATDTVAPQQQQGRPYSHYAPYGHQATNREAVKSMWEAFLPISHDRPYETPTATRMAVAEVRDSEAPAQGSIKYLGAFMDTYILAECRTGDASELWIVDQHVAHER

SEQ ID NO: 102067 - protein, 191 aa, Unknown
  Obtained from environmental sample
  DOMAIN (3)...(111): Toprim domain
  misc_feature (1)..(191): Xaa is any amino acid
MAKNLVIVESPAKCKVISKYLGKDYAVKATMGHVIDLPEREFGVDIEKGFKPKYTISKGKSRVLRELKEEAAKAEKIYLAPDPDREGEAIAWHVANNIAAEGATVQRVMFNEITKRAVLAAFDTPREIDMNKVNAQQTRRILDRIVGYQLSPILWRTVFKGLSAGRVQSVALRLICEREDEIKAFVECEYW

SEQ ID NO: 102068 - protein, 202 aa, Unknown
  Obtained from environmental sample
  DOMAIN (31)...(145): MGS-like domain
  misc_feature (1)..(202): Xaa is any amino acid
MSISAKTPAQSGADALIPVKRALISVSDKSGVVEFARALADRGVEIVSTGGTHKLLSESGVPAVAVEAYTGHPEIMDGRVKTLHPKVHGGILAVRDNPTHVKEMGECGIGAVDIVAVNLYPFERTVAGGADIAECVENIDIGGPAMVRSAAKNHAFVTVVVDPADYALIVRELSANGGAVTLDTRRRLAVQAFRHTSAYDAA

SEQ ID NO: 102069 - protein, 293 aa, Unknown
  Obtained from environmental sample
  DOMAIN (1)...(290): Adenylosuccinate synthetase
  misc_feature (1)..(293): Xaa is any amino acid
MVIDPAALFSEIKMLEDRGINITGRILISDRAHIVLPRYIKIDKDRDAARKKPIGTTGRGIGITYSMKSDREGIRIADLAWKDKMAEIEKEDMDFLAPYTEKLLSMSVDLSAYLMHRKYSQVLFEGAQGTLLDIDLGTYPYVSSGMSCAAGAAVGGCVGPRALDKVLGVFKAYSTRVGNGPLPSEFDQKSEDELCRFVRDTGREYGVTTGRPRRCGYLDLVSLRYACFTNSIDSLVMTHLDVYDTFEEIKACIAYSINGKFVEHFPTSIEDLNNAKTGIAVFFRLEKTSVQRA

SEQ ID NO: 102070 - protein, 280 aa, Unknown
  Obtained from environmental sample
  misc_feature (1)..(280): Xaa is any amino acid
RSGLVPAVFQYSGKTTGELKARWNYFSSLARKFFTEANSAQDFTLALRSEFPGEFSDQILSLLYRSEDREEILRDCGVILDAILEKGIYSVPEKELENYNRDVLELIRQTDSRIEQEKIPFWAIVTENYVAASVNSAVAAGSFTPGLSSFANELLRPFLKENVFYSPDDTARRVSDTRAGVEPVMREIKQGKQIIRKGFVVTEEEMEELRALQMSLKGNDLPKTFANLLFLFMLFGLLMFFSGRKIIDRHLTDSETFLVSGISALYIAGSVLIRTFILTL

SEQ ID NO: 102071 - protein, 213 aa, Unknown
  Obtained from environmental sample
  DOMAIN (1)...(211): Domain of unknown function (DUF323)
  misc_feature (1)..(213): Xaa is any amino acid
ENNKNPESNARDGWKTLPVEFVSWYDTLVFCNKLSIKENLKPVYSINGSVNPDDWGDPPERRRNSAWDAVRMDREANGYRLPTEAEWEYAARGGAESRNFIYAGSNVAAEVAWYEPSKDGKINGNVHGVGNKQPNELGLYDMSGNVMEWCWDWLDKYPSTAQNNPVGPATGNLKIIRGGSWSTREAFCVVQARYKNDPQTHAINLGFRVARNK

SEQ ID NO: 102072 - protein, 78 aa, Unknown
  Obtained from environmental sample
  misc_feature (1)..(78): Xaa is any amino acid
EYRGEMDVIGNFMRERCVQKQGATVRARELFRVYQEWCDENNEMATSERMFGLRMKELGMVQKRTAEARYWQDVAVQG

SEQ ID NO: 102073 - protein, 265 aa, Unknown
  Obtained from environmental sample
  misc_feature (1)..(265): Xaa is any amino acid
GRKFDPSTVQYSKLLPVYYYAGDLAPAANAVKEIYIIKVIKKLLIIIPATVLAIFLLLLVTPVLFKGKILEITKRELNRMLTAEVDFSDVKLSFIRNFPNAYVALEDLTVIGTGEFEGETLVEFKSLSVTVDIMSVIKMDNIRVKSVLLDNPQISAHITENGSANWNIMKPKEEEVTPPDGVPPAEVPSAGVSPDKITPAQDASATTLRIALNKFEIRNASISFRDDSSKMTATANELNFFLHGDMTMDNVDLDMKLDIADVNFR

SEQ ID NO: 102074 - protein, 56 aa, Unknown
  Obtained from environmental sample
  misc_feature (1)..(56): Xaa is any amino acid
MEYIEKTLGEVLREKARLQPDHDFLVYADRDLRFTYAEFDKRVDSFAKGLLSMGLK

SEQ ID NO: 102075 - protein, 78 aa, Unknown
  Obtained from environmental sample
  misc_feature (1)..(78): Xaa is any amino acid
MTKEEIAGVIDGYSNQILGKGGIDNELYTKYEVKRGLRDVSGKGVLVGLTEISEIVSYIIEDGDYIPCEGKLFYRGIN

SEQ ID NO: 102076 - protein, 86 aa, Unknown
  Obtained from environmental sample
  misc_feature (1)..(86): Xaa is any amino acid
ELAPHAIGKLRKIYKGVSANIDFYSGFVYSMLDLPEEIFTPLFAVARISGWGAHRIEELVNAGKIIRPAYKSVAKQRNYTSMQERG

SEQ ID NO: 102077 - protein, 276 aa, Unknown
  Obtained from environmental sample
  misc_feature (1)..(276): Xaa is any amino acid
EQAIDERLALLYKLKRKYCETAVGAPGAAGDAVSVEDAMLAYRAAAETEIEALSNIEENRENLKAGIAALEKEVASRAAALRQKRTAAAGVLGQRISEILKRLGMPNARFSPSVTARTQQAQDGRPTVVCGPWGAEEIEFLISANTGEPLKDLSRIASGGELSRIMLAIKTVLSAADSVEVLIFDEIDSGIGGEVALAVGEYLEKIGERRQIFCVTHLASIAVRAGNHFKVEKRTEEGRTFTGIGPLSADGRRKEIARMLSGDGGEAALAHADDLM

SEQ ID NO: 102078 - protein, 261 aa, Unknown
  Obtained from environmental sample
  misc_feature (1)..(261): Xaa is any amino acid
MIAIMAVVAIGITVIQLKQTSNISLKLSLRGLNYLAGEQARYWQGREESYIKQLTGIAEIMSEFEMLPAKDRRNQYDNMLKAVLNNNPDFIRISSIWKPNALDGMDSLYIGRPGSSPTGQYAMTWGRDTGTIEIKPNLVIDEINAWINGPNALKVRVENPAPFKNNGKDTFIIRVGVPITGSAGGEAVGHLCVLLDIAPMQTGIENAIKSHEEISAMVIYSGNGMIMGHWVPERVGKMLTDADTIYGNYMQEADKAVREGK

SEQ ID NO: 102079 - protein, 116 aa, Unknown
  Obtained from environmental sample
  DOMAIN (11)...(100): Cyclic nucleotide-binding domain
  misc_feature (1)..(116): Xaa is any amino acid
MSDTSFVEQSKVHLKEGDLVFKKGEMAEQMFVVLSGKVRLYLGDSPSGDWSEEFSNGDFFGEGSLLEARPRYVTAVAMEDTELISISRGTFMRMIRQSPEISVKMMQRLTQRNREL

SEQ ID NO: 102080 - protein, 59 aa, Unknown; identical to SEQ ID NO: 91204
  Obtained from environmental sample
  DOMAIN (3)...(59): SecE/Sec61-gamma subunits of protein translocation complex
  misc_feature (1)..(59): Xaa is any amino acid

SEQ ID NO: 102081 - protein, 290 aa, Unknown
  Obtained from environmental sample
  DOMAIN (9)...(145): ABC transporter
  misc_feature (1)..(290): Xaa is any amino acid
TVIAGYAKLYAVQKEREAIYAKEDFSEADGLRASELEADFAELGGWEAEAQAGQLLSGLGLDEEDHGRLMAELDESKKVRVLLAQALFGNPDILLLDEPTNGLDLESISWLEGFLMDFPNTVIVVSHDRHFLNAVCTNVCDIDYGRITPYSGNYDFWYQMSQILQRQARDQLKKREDKARELKEFIQRFASNASKSRQATSRKKVLEKLDLDNVPVTSRKFPYVGFKPDREIGNNVLRAEKLNFSFEGTTLLKDFSLLVNRGDKIAFVGIEHASKSALFDILAGEKKPES

SEQ ID NO: 102082 - protein, 261 aa, Unknown
  Obtained from environmental sample
  DOMAIN (3)...(244): Iron only hydrogenase large subunit, C-terminal domain
  misc_feature (1)..(261): Xaa is any amino acid
DDADRFMDDLKQGEKTIAVAAPAVASFFPDQFLNLNGWLKSLGVEAVFDVSLGAELTVITYLDYVKEKNPRTVIAQPCPAIVSFIELKCPELLPYLAPADSPILHTIKMVKEYYPQYKNHKTAVISPCIAKRREYDETGLGDYNVTMIALKKILDDRKINLSSFPKTEYTGVTAERAAGFPIPGGLLDTAERFEPGIRRRTRKIEGVHSIYPYLEEISKILNTKVKLPLLIDCLNCEKGCMWRPRHGKRREIYGHTEDPVL

SEQ ID NO: 102083 - protein, 291 aa, Unknown
  Obtained from environmental sample
  DOMAIN (148)...(289): Methyl-accepting chemotaxis protein (MCP) signaling domain
  misc_feature (1)..(291): Xaa is any amino acid
DVYNHHGQCHCTCLASVAAIVLSRNISRPIVKVAETLKDISEGEGDLTRIITADSKDEIGDLARYFNQTLAKIRNLVVSIKKEAVNLSEVGTDLSVNMSNTASATNQITANIRNIKGQVINQSASLTETNATMKQVVANIDKLNNHIEDQSDYVTQASSAIEEIAANINSVTSTLVHNADNVKALKDASEIGRIGLQQVASYIQEIARDSEGILEINSVMENIASQTNLLSMNAAIEAAHAGEAGKGFAVVANEIRKLAESSSKQSKTIGTVLKNIKESIDKISKSLVPLV

SEQ ID NO: 102084 - protein, 78 aa, Unknown
  Obtained from environmental sample
  misc_feature (1)..(78): Xaa is any amino acid
TPGVRRFIPDGIDSGEVINYFREFAPLAGKCSFGLSCSHRTECGCKIMEAVNAGVIHEDRYESFLRIIDDLEGKDNGD

SEQ ID NO: 102085 - protein, 227 aa, Unknown
  Obtained from environmental sample
  misc_feature (1)..(227): Xaa is any amino acid
MEISKESIKEKTQNLLEYPQIMEKVAFMSVSEEAALIIKNSSPVYDDSIEKTKSMVHAIYTLLKTRNDEPRLGLPTIGFLVPKIETQGAVLDIDEILAIGLFIERADEFTKWINKDRNEAKEQPTEGKDELFSILDNLPVCSPVSVEIFKIIDREGNLRDLPALRAIRKRISSLEKELNSAVSRYSASDDYKRMLQSPLPSQRDGRAVLAVKVKYRGRIPGILHEVS

SEQ ID NO: 102086 - protein, 201 aa, Unknown
  Obtained from environmental sample
  misc_feature (1)..(201): Xaa is any amino acid
VKISQAGSFVVQARVYPELFRFGADAAVSAPVALESKRLNLSIWPPLATTAEGIPLEMDVATGAVLVRERLAPDQVIDYMINARQKSQWEKFFLYLDLESLLTQDGPRQRQWIREGEEGRKRMVDQFRQELKNPSTDGISVIPTDYLIEETKYNNTGGTVTVLQKFRNALYTEVKRYTYDVRFKDNVWVITGYTVTNLGTE

SEQ ID NO: 102087 - protein, 296 aa, Unknown
  Obtained from environmental sample
  misc_feature (1)..(296): Xaa is any amino acid
ITFNATGLGTASGGFSLSGTTLTLSNHTWDSSVNGTYTKDSGSGGGGDIAVTFNSVTQNGSSSSTTTQLTLTFSQAITGLTASDISLSGVSGVSKGTLSGSGSTYTLPISGFTSGGSLNVSVSKTGYNISDSQKTVTIYFSPIPVSFNSISANGSSTETTTQLTLTFSQAITGLTANDIYFIGVSPSVTKGTLSGSGPTYTLPITVTTGGTLTVEVDKLGYTINEPQKTVTIFYYTPPIPVTFYNVSANGSDSSATTQLTLTFSQRITGLSADDIALSGVSDVTKGTLSGSGPTYT

SEQ ID NO: 102088 - protein, 110 aa, Unknown
  Obtained from environmental sample
  DOMAIN (45)...(110): ParB-like nuclease domain
  misc_feature (1)..(110): Xaa is any amino acid
VAAIKRGLGKGLSALLPDENSAVQADKQTSFEKKGEGIKERTGEIFVAPEKLKANPNQPRKVFNEDELVELADSIRQQGIIQPIIAEDAGDGTYTIIAGERRARAARIAG

SEQ ID NO: 102089 - protein, 90 aa, Unknown
  Obtained from environmental sample
  DOMAIN (2)...(89): Chaperonin 10 Kd subunit
  misc_feature (1)..(90): Xaa is any amino acid
MKVKPLGDRVMVKLEKSETKSTGGIIIPDTAQEKTQQGTVVEVGPGTEKDPVCVKVGQKVMYDKYAGTQIKVSGEEHLILKMADIIAVVE

SEQ ID NO: 102090 - protein, 77 aa, Unknown
  Obtained from environmental sample
  misc_feature (1)..(77): Xaa is any amino acid
LKETINLEAEIAGFGKMNLIEHRVLRNEDLNACNTINKENVKPVIQTGGTLEGGAGGMWLKLSLPPASWNVIRLKLL

SEQ ID NO: 102091 - protein, 237 aa, Unknown
  Obtained from environmental sample
  misc_feature (1)..(237): Xaa is any amino acid
MVANDAYKQKLAVALASGKAPDCYFSWGGGPMQEFIRNNQIIDLTSYMNANNYKNRFLDGAIAQMTYQGKIWGVPVNNVAVGTFFYNKEIFNKYKLAVPTTIRELETVCDTLKRNNVFPFALANKTQWTGSIYYMALATRRGGTQPFQKAVDGSGTFMDPAFIYAGEKIQDWVKKGYFITGFNGLDWDAGQARAPLYRGEAAMVLMGSWFNMQARNENPVFHSKMGIFKFPRDEQGT

SEQ ID NO: 102092 - protein, 45 aa, Unknown
  Obtained from environmental sample
  misc_feature (1)..(45): Xaa is any amino acid
ATYMYKTSFIRFNMGYGATIASGMFILITLTALIVVNTLNKKAEV

SEQ ID NO: 102093 - protein, 269 aa, Unknown
  Obtained from environmental sample
  misc_feature (1)..(269): Xaa is any amino acid
SLKNTFARLKEAQAWLAQENAQAKNKALSSLATTIFRNRTMILAANNRDVDNARAKGMKESLIDRLLLTEQRIEDIVEGIEIVIKQDDPVGKLRAGWTLPNGLFVEQVSVPMGVAAIIYESRPNVTVDCAALAYKAGCSILLRGSSSALESNRALVSAIKMGLEAGGGIPDAVALSDHAKPGNHDDVDEILAARGWIDVVLPRGGRELIQRVVQNARIPVIETGEGNCHIYVEPSANLDNAVEIIANAKLQKPGACNAVETLLIHRGVL

SEQ ID NO: 102094 - protein, 185 aa, Unknown
  Obtained from environmental sample
  DOMAIN (6)...(185): Probable transposase
  misc_feature (1)..(185): Xaa is any amino acid
MLVAHRIALEPNNAQAAHFARACGVARFAYNWALAKWKEMYEAWKQDNSLPKPDQMSLRRTLNAIKRTEFPWMLDVTKCAPQNAIIQLGRAFQNFFAKRAKHPRFRKKGVHDRFTMSNDQFTVKGKRIKIPNLGWVRMAEELRFTGKIMSATISRTADRWFASITVEVQKLDLPKAENQGEAGVT

SEQ ID NO: 102095 - protein, 249 aa, Unknown
  Obtained from environmental sample
  misc_feature (1)..(249): Xaa is any amino acid
VADNQDRPSIWAISLNTEAYMDGQYSMLVRTTDGYNVQSFTNAIINIDNTPPVIDLVSPKNGSPAGRTLEVNGQVYDNLKVKVISILVSDTNNPDSFLVVEPPIEAVIQQTLDIRSYRDGDYALTVTVEDFAGNQTVVIRNVRFVKAKAASEIAIISPMSGVTHTGKAVISGRISGAVVPDNVELMLGRRKLADVEVNKYGVFRYELPDFYVLEDEGVGVSASFQTPSGEWVVSHESLLRVEAYRPVLD

SEQ ID NO: 102096 - protein, 229 aa, Unknown
  Obtained from environmental sample
  misc_feature (1)..(229): Xaa is any amino acid
MQFSSKTLQQMLQQSVKEHSERTCFSYVDGQVITYAELGRKTYEVQQLLSSLSIQPGDKVAILSQNMPNWGVAYLAIVSMGAVVVPLLPDFSAVEIENVLNHSDTKALFVSERLSSKLNAICTPNVETYIAMETLAVTNTRVQVQPSQSAAYVVKPSDLASIIYTSGTTGKSKGVMLTHHNLCSQLQMIYSLEQVSRDDVFLSLLPLSHTFENSLGLLTPVSCGASVYY

SEQ ID NO: 102097 - protein, 93 aa, Unknown
  Obtained from environmental sample
  misc_feature (1)..(93): Xaa is any amino acid
MNLFYTPDISGETYMLSEEESKHCMVLRLTEGDTLHLVDGRGNLYTAIITNAHSKRYEVRVTEVQRELGKRPYHLHLAIAPTKNIERYEWFWK

SEQ ID NO: 102098 - protein, 262 aa, Unknown
  Obtained from environmental sample
  DOMAIN (2)...(262): tRNA synthetases class II (D, K and N)
  misc_feature (1)..(262): Xaa is any amino acid
LRPRTNKYGAAFRIRSEAAYAIHDFFRSEHFHYVHTPLLTGADCEGAGEMFRVTALPPGATGAADDFFPKECRLTVSGQLEAEALALGLGRVYTFGPTFRAENSHTPRHAAEFWMIEPEMAFADIFDDMNLAEGLVRHVITHVLGHCAEDLDLFNRFVDTELVARLEGMIREPFARMPYAEAIDALRTSGKNFEFSVLYGIDLQTEHERYLAEELHKKPVIVYDYPKDIKAFYMRLNDDLENVAAMDVLAPRIGELIGGSQR

SEQ ID NO: 102099 - protein, 265 aa, Unknown
  Obtained from environmental sample
  DOMAIN (89)...(263): Trypsin
  misc_feature (1)..(265): Xaa is any amino acid
IFKFPKSGDKIEIDIAPETASENLVQTSNRNSGNEDFFNEIYETGVNTRLLQRNAADLSAYTEEERQNITIYEQLNAGVVNITTETVAINWFLEPVPQAGGSGSGSIINTRGYVLTNNHVIENANKVFINLADGSQFEGTVVGTDPENDIAVLKFEPPRGMELKVIPFGSSDNLLVGQRVLAIGNPFALERTLTVGIISGLGRPIQNSANHIIKNMIQTDASINPGNSGGPLLNTQGQMIGINTMIYSPSGGSVGIGFAVPVNTA

SEQ ID NO: 102100 - protein, 199 aa, Unknown
  Obtained from environmental sample
  DOMAIN (1)...(199): Calcineurin-like phosphoesterase
  misc_feature (1)..(199): Xaa is any amino acid
MKIYAISDLHLSGENVTKPMDIFGSYTTGYVEELTKNWEATVEEGDVILIAGDISWAMYLKDAKPDLDFIGKLKGIKVLIRGNHDYWWQGISKVRAALPEGVSVLQNDCIRFDGAVVCGTRGWTVPEPSVEASAEDVRLYNREIGRMSLSLKNAAAKRRDGDVLIVMMHYPPVNSTLEDSGFTALFGEYKVNKAVYGHL

SEQ ID NO: 102101 - protein, 176 aa, Unknown
  Obtained from environmental sample
  DOMAIN (12)...(176): Homocysteine S-methyltransferase
  misc_feature (1)..(176): Xaa is any amino acid
MSKLMQTIRDRVLLLDGGFGTQIFLKKPSADDFGGQKHEGCIDYLSERRPEWVKDIHAAYFDAGADAVETNTFGANPLVLGEFGLADRAEGLNALSAKLAREVANSYDTPRFVIGSAGPGTKLVTLGHVSHAELFQSYLVQMKGLIKGGVDAILIETCQDLGQMKTAIRAAKAAMA

SEQ ID NO: 102102 - protein, 294 aa, Unknown
  Obtained from environmental sample
  DOMAIN (17)...(138): B12 binding domain
  misc_feature (1)..(294): Xaa is any amino acid
MTRLEPHIAKGSHQKKGRLLLATVKGDVHDIGKNLVEIIMSNNGFEVENLGIKQPIEDILAAFNARPADAIGLSGLLVKSTVAMKEYLGYMRQKGHRVPVILGGAALTKDYVETVCREEYQCDAVYYASDAFDGLMHMEKIISGTAPTAHPSAGGSQSADGSEISDSRDSGPSFDLSPEGQSTWVSREHVAPTPPFWGAKEIAPPMKDAMSLLSDNSVLQNRWAFKKGMMTDDQFKAVLTEKAGPLLEEWKGRLLSEKLVEPKAIYGFFPANATGNSLKVFGPDRKAIWPHSTP

SEQ ID NO: 102103 - protein, 91 aa, Unknown
  Obtained from environmental sample
  misc_feature (1)..(91): Xaa is any amino acid
IERAWLDKYVENGFVDSFRVLHPTQKDAYTWWSNRSGARENNVGWRIDYAFVDEALKNCIVNASIHPEVMISDHCPISIELDVPFPPIVAD

SEQ ID NO: 102104 - protein, 241 aa, Unknown
  Obtained from environmental sample
  DOMAIN (103)...(231): Trypsin
  misc_feature (1)..(241): Xaa is any amino acid
MKIKCSNLSPICFAIAGVILFACSLGSATPSSSSTTQPADTPAQTQLAPRAASPNLEAFRYELADLADALVPTVVSIQTEATIKMNDFGGFFGDDFFDQFFNFGPRQQRQPRERKQQGQGSGVIVNSTGQILTNNHVVAGADQITVTLPDKREFKAKVVGTDSLTDIAVIQIEGDVKDLPAASLGNSDALRVGEWVIAIGNPFGLSQTVTKGIVSAKGVHGRGITSYENFIQTGCRNKPRQ

SEQ ID NO: 102105 - protein, 105 aa, Unknown
  Obtained from environmental sample
  DOMAIN (4)...(105): CutA1 divalent ion tolerance protein
  misc_feature (1)..(105): Xaa is any amino acid
MKDYVLAYITAKDKPQALSIGRTLVEERLAACVNVIDNMTSIYRWEGEINEDSEAVLIAKTSAEKFEALTERVKQLHTYTCPCVVLIPIIGGNQGYLEWLGESVG

SEQ ID NO: 102106 - protein, 269 aa, Unknown
  Obtained from environmental sample
  DOMAIN (1)...(269): DNA gyrase/topoisomerase IV, subunit A
  misc_feature (1)..(269): Xaa is any amino acid
ATKKCARIVGDTMGKFHPHGDLALYDALVRMAQDFSLRYPLLEGQGNFGSLAPDGAAAMRYTEAKLSRFGEEMLHDLDKETVDFIPNFSEEEMEPTVLPTVVPNLLVNGSSGIAVGMATNMAPHNLGEVCDAVCALIDNPEISIDELMKFVQGPDFPTGGIIFGRKGIKDACKTGRGKILVRGRFTVESSKSDKETIVFNEIPYGVYIKPLLERIGVLVRDKVIDGIASFNDESGKDEPVRIVFELKKGAILKVVLNQLFSNTQLQSTF

SEQ ID NO: 102107 - protein, 88 aa, Unknown
  Obtained from environmental sample
  misc_feature (1)..(88): Xaa is any amino acid
MNAYITEVLNGLKARNPWETEFIQAAEEVLESIAPLIERDPKYKAQKILERIIEPERCVIFRVPWMDDRGEYRVSRGYRVQFNSAIGP

SEQ ID NO: 102108 - protein, 79 aa, Unknown
  Obtained from environmental sample
  DOMAIN (1)...(79): PTS HPr component phosphorylation site
  misc_feature (1)..(79): Xaa is any amino acid
MTEQMVTIINRAGIHARPAAVLVQSAKDFSSNIYFEKDNDRINAKSIMGILTLAATYGTELKIIADGEDEEEAVQSIAR

SEQ ID NO: 102109 - protein, 301 aa, Unknown
  Obtained from environmental sample
  DOMAIN (71)...(296): TonB dependent receptor
  misc_feature (1)..(301): Xaa is any amino acid
DTYEVMHAKEIIISGGIEYSGQPFKIPLTIKAGFGFDTLTPLEYWSKDNEFAQMINSGYFITKTRDMLLYTWQAGLFYQFNENHEGRLTYARKNHFPTMSQRYSTRFGTTLPNSNLGPEQANHVELGYRGSFFDELLRVYAAAYYSIIRGKMATVEIPNPEHPSSLVDYTLNLDSTSFYGFELVPELYVNDYFSMGMSFSTISYTINHREDGGKYLPYYPPLTLNGYMVINPWLKEISVIPRCEYVGIRYGDMLGDEKLTEYFLLHLKIKIDIGSNVSVSATVNNILDTFYELRRFRRRKD

SEQ ID NO: 102110 - protein, 262 aa, Unknown
  Obtained from environmental sample
  DOMAIN (1)...(147): Glycosyl hydrolases family 38 N-terminal domain
  misc_feature (1)..(262): Xaa is any amino acid
VDRSSLNIDFSPDTFGHSANIPEINAYGGVKYLYHCRGFEERQVLFRWKSPSGTEILAHCEPYWYNSGITPHIGMGVTELASLCGGLKTSLIVYGVGDHGGGPTRRDVEQIIEMRDWPVFPTIKFGTFHEYFKAAETVRDKVPVIDREINFIFSGCYTTQSRIKLGNRHGEAALLDAETLDAFSGLLTGKRYSRKQYIEAWQNLLFTHFHDIITGSCVRDTREHAMGLYANVMALTQTMREKAALSIAEQIDTSSIQTMIRK

SEQ ID NO: 102111 - protein, 180 aa, Unknown
  Obtained from environmental sample
  DOMAIN (1)...(153): Exonuclease
  misc_feature (1)..(180): Xaa is any amino acid
IDFETAKKSQESACSVGLVKFLDGKAIDTYYSLICPPNLYIRPDFTMIHGLTVDDVRDAPRFNAIWDSDIKPFIGDLPLAAHNASFDMGVLSAVLDWYELEIPALPYFCTCNLSRRTWPHLKSHALTSLAKYFDIVYDAHNALDDAMTCGKLVIMSAEKFGCTSVDDLLSSTGLRLGRLG

SEQ ID NO: 102112 - protein, 300 aa, Unknown
  Obtained from environmental sample
  misc_feature (1)..(300): Xaa is any amino acid
FVFLTVAQAQEMAAKFDVIYPAETSLLGYENGGGPSGDGGWDGDQRIQILVYDIGYSTSGTTLGYFWSKDMWYDRSNPRSNEAEIFYLNGNPDVFKGFGAEALYSTLIHEFQHMINYSQKSSKGKASASWYNEMLSMMAEDVISPLIGINSSHSRHPIKSRISRFLTNYNLAGITEWGPNGNTLDSYSIAYAFGAYLLRNYGGADLLKEILANNFTNIDSITAALQTVAGSGLNFEEALRHFGEAMIFSSPIPPGIQSFDKTVTKTISGYTYTAAKFNIWTDFGSTKLKIFGANEQAVMR

SEQ ID NO: 102113 - protein, 269 aa, Unknown
  Obtained from environmental sample
  DOMAIN (1)...(105): Domain of unknown function DUF21
  misc_feature (1)..(269): Xaa is any amino acid
MLFIGLFGAKGVGIASVVVTVLVLVFGEISPKTLAKESPELTALRCAPLLRFFIVIFSPLNYLASAWRNIIVKIFPPGADRQITEDELLTFVEEVRQEGGINKREEQMIRQAIEFDDMTAAEIMTPRMDLAAVAETDTAGHIETLFEDTGFSRLPVYRENIDNITGIILLKDFHREVIIKGKSPSEIIKPVVLVTKTMKIPRLLQTLKEKQSHMAVLVDEFGGTLGIVTVEDILEELVGEIWDEHDRVVEPVKHNADGSFSALAVCSFR

SEQ ID NO: 102114 - protein, 77 aa, Unknown
  Obtained from environmental sample
  misc_feature (1)..(77): Xaa is any amino acid
MQHEMLTHKIIGCAMKVHSVLGNGFQEVIYQRALEIEMQLASLNFAREMEMPIFYRDIQIGTRRVDFFIENLIMVEL

SEQ ID NO: 102115 - protein, 136 aa, Unknown
  Obtained from environmental sample
  misc_feature (1)..(136): Xaa is any amino acid
IARRIESIQVSTNEAVKVIDDVSGIITKINHSVKSISTHVGEQTKASNEIANNVAQANAGAKRVASSIAEVAKNSHNIAHNANEAANGAGNISQSVNSIAQDAKNSAQGAKQTNENADELARIANDLKDVLNQFKV

SEQ ID NO: 102116 - protein, 74 aa, Unknown
  Obtained from environmental sample
  misc_feature (1)..(74): Xaa is any amino acid
GSETGSSVTDVIETARKVTGRPIPARVVGRRPGDSAKLYASSALARELLGWQARHSDMETLIKTSWEAYKEHQK

SEQ ID NO: 102117 - protein, 195 aa, Unknown
  Obtained from environmental sample
  misc_feature (1)..(195): Xaa is any amino acid
MKEKIFSWIDNASPLAVELQTGLTKWPAISPDSGGEGELEKCVFLEAWLKAQGITQLERYDAPDERAKGGVRPNLIATIPGETKNCLWIISHTDVVPPGEISLWNTDPWTVVEANDPPGHRVIGRGVEDNQQGLTSSVLAALALVKLGLRPRRTIKLLFAADEETGSVLGIGWLLENHSHLFQKDDIALIPDAGD

SEQ ID NO: 102118 - protein, 286 aa, Unknown
  Obtained from environmental sample
  misc_feature (1)..(286): Xaa is any amino acid
KNDNGEEESYDIDPKLKIVEGFTCENFPKVDGSTSAEPLNILIACKLLGIRHQWVKKEFDGSWGIKPILKSENNIQKFEKLIKTSQTHQSIINVIDKKADITISARKMSPDEKNYADASGVTLIETPIALDALVIIINPDNPITSLTIKQIQDIYTEKIKYWYEVAEDDIDWGPFDNFFQQAEILPYVRNQNSGSQELMESLVMKDLDIKIAETSDEVVIQTMQGAFEKVTSEVSSICYTVYYYKEFILKDAPTKGIAIEGIYPKKETLSNKSYPLTAEVYAVIRS

SEQ ID NO: 102119 - protein, 262 aa, Unknown
  Obtained from environmental sample
  DOMAIN (198)...(262): 5'-3' exonuclease, C-terminal SAM fold
  misc_feature (1)..(262): Xaa is any amino acid
MSLPPLYLIDAYGLIYRSYFAFLTNPLRNSSGKNVSALFGFSRTVISLLEDGAPLADKEGKLKNKLEKPLRLAAVFDSRTPTFRHQMYPEYKANRQKAPDDLHEQVPLVEEFLSALGIKSVKIEGFEADDIIAALAEKCRSEKRQCYILSSDKDLLQLVGGGIFELRPSKINRSGGNSGSEPAWELIGPDEVKTEWGVEPEKVLDLLSLTGDSSDNVPGVKGIGEKTAVKLMARYGSLDEIYKNIAAIEGATGRKMSEGKES

SEQ ID NO: 102120 - protein, 282 aa, Unknown
  Obtained from environmental sample
  DOMAIN (76)...(274): Adenylate and Guanylate cyclase catalytic domain
  misc_feature (1)..(282): Xaa is any amino acid
GGSVFRVEVEYQDETGNLAHTFNQMIGELDNAYGQIKRYAFEAVLAGKKEERIRQIFQKYVPKDVIERFFASPEKMLVGDNRKLSILFSDIRSFTTISEGMAPDDLVNSLNRYFSGQVDIIYNRKGIVDKYIGDAIMAFWGAPEKHDDDALQSVLAGLEMIDALSGFNANQRKLGKPEFHIGIGINYGEVTVGNIGSERKMDYTVIGDSVNLASRMEGLTKIYHSELLITEFVYTELQTILKNAPNAPRLYFRTLDTVAVKGKTKGVKIYTVKRSLNAAEAS

SEQ ID NO: 102121 - protein, 96 aa, Unknown
  Obtained from environmental sample
  misc_feature (1)..(96): Xaa is any amino acid
RRLFTKFTNGQVQIGAGDFTFFVKNGYLIENGKLTQPIKDVNIIGNGPKALADITMVSNNLKIDAGAWTCGKDGQGMPVTQGLPSVLIKQLTVGGE

SEQ ID NO: 102122 - protein, 182 aa, Unknown
  Obtained from environmental sample
  misc_feature (1)..(182): Xaa is any amino acid
MDKELAKWAMQYAIDKGCSDARVSVYSRTGNSFEYRDTQVDKLEQSNENGMTIQLFVDGKYASYSTNRLNQKELERYISKGVEATRYLAKDEFRKLPQSALYYKGDGKGLDTYDRETDKISVDDKMALIKDTTAEIYGTDQRLISVSAGYEDDKSSSYMVASNGFEGESDSTQFSIFASASM

SEQ ID NO: 102123 - protein, 280 aa, Unknown
  Obtained from environmental sample
  misc_feature (1)..(280): Xaa is any amino acid
MVNAQMPTIATQPQSGTVTAGATHYLTIAATSPDGGTLSYQWYNGVNGSPISGATNANYAPETATPGTYYYYVTITNTIYDNGDGGVKTATVTSNTAILTVENVTTINAQAPPIISHPQSGTVTAGATHYLTVAATSTDGGALSYQWYNGSNNSPISGATYASYAPETATPGTYYYYVVITNTIYDNGDGGIKTATVTSNMATLTVNVDPTATFEVTFNVVGSNGKLTATVEGSQITSGAAVASGKDAVFTATPNSGYRVKEWKNGITTGNGTNTTYTLS

SEQ ID NO: 102124 - protein, 260 aa, Unknown
  Obtained from environmental sample
  DOMAIN (24)...(77): HNH endonuclease
  misc_feature (1)..(260): Xaa is any amino acid
LQISTEDIKKYKLWEELASEGINRRCPYCGRTISAQQLMSGAVEIEHILPYSRTLLNTRDNLTVAHRECNQAKKNQSPFEAFGKSPKGFDWDQIMELTAKLPFKKRRKFFPDSMVRFHEEEGGFLDKQLTDTAYLSKASKDYLSAICESNAIWVSPGKLTAMLRGFWGFNTLLNRGHDTWYKNRSDHRHHALDALVIGLCDRRIIADAARLNSGKGYKEVNAPTCPIKREDLEERLKSIIVSYKQDHGKEGKLYAETAMS

SEQ ID NO: 102125 - protein, 175 aa, Unknown
  Obtained from environmental sample
  DOMAIN (11)...(174): Pyruvate ferredoxin/flavodoxin oxidoreductase
  misc_feature (1)..(175): Xaa is any amino acid
MTFNCMIAGVGGQGTVLASKLIAAAAMKVGFNVRTTETIGMAQRGGSVVSHVRIGDDIFSPLIPLGRADTLIAFEPGEAVRQLPFLSGQGILVVCDSIIKPAGTGAPSGYEASVMIDYLKANVKKLTVIDGRRITEHNAQTLNTAMLGAAAQSGVFPFDADTLKDIIPRMLPQRF

SEQ ID NO: 102126 - protein, 100 aa, Unknown
  Obtained from environmental sample
  misc_feature (1)..(100): Xaa is any amino acid
YGQITPIIINKKNVLIAGGRRIEAAKLLGWENINAVIIDRTGELEQLELELEENKYRKDFNEAEVAEAAKKIYKLKHPSFFRRIINAIVRFFKKFFRIKD

SEQ ID NO: 102127 - protein, 236 aa, Unknown
  Obtained from environmental sample
  DOMAIN (34)...(115): Bacterial Ig-like domain (group 2)
  misc_feature (1)..(236): Xaa is any amino acid
MKKNRVVVLTAICVLLAACSSDSVEKSKGAAYVAVQGINFADENILANQGDIVELSEEIIFTPKNASNKRIMWSSGNKEVATVDEDGTVVCIKEGTVTINARADDNITKRTSVKIVVQPFGVPPDTDTDPDPDVFVSGVSITGISVFTNQQKAIPVTVLPANAGNKTLDWSSSNDAVATVNTSGIVTGKTEGSVTITAVSKDGSNKSGTCTVTVSAPSATATVNIIKAQGSRAARA

SEQ ID NO: 102128 - protein, 82 aa, Unknown
  Obtained from environmental sample
  misc_feature (1)..(82): Xaa is any amino acid
KRRSFYCTKTDLIIGVTGIVFANAMHGEISPKMAAAVSSSPAHKILLPVDKCNVTIVGVDNKPIQAYINEITAILKTNSKEK

SEQ ID NO: 102129 - protein, 205 aa, Unknown
  Obtained from environmental sample
  misc_feature (1)..(205): Xaa is any amino acid
LEETSLIFQKHEKLKQYLRELGSVAIAFSGGVDSTFLLKTAHDILGERTIAVTARSCSFPERELKEAVSFCESENIRHIICDSEELDIEGFAKNPVNRCYLCKNELFTKIWAVAREHGIENVAEGSNMDDNGDYRPGLTAVFEQGVKSPLRYAQLTKEEIRFLSKNIGLSTWNKQSFACLSSRFPYGETITPEKLGMIDKAEQLL

SEQ ID NO: 102130 - protein, 117 aa, Unknown
  Obtained from environmental sample
  DOMAIN (28)...(117): Bacterial flagellin N-terminus
  misc_feature (1)..(117): Xaa is any amino acid
MLSLRTNLMALNANRNLATNYALLSDTVRRISSGLRVGRAADDVAGLAIRELMRADIASMHQGIRNCSDAISLLQVADGALQIVDEKLIRMKELALQAATGTYNSTQRLMINNEYQQ

SEQ ID NO: 102131 - protein, 288 aa, Unknown
  Obtained from environmental sample
  DOMAIN (109)...(193): Bacterial Ig-like domain (group 2)
  misc_feature (1)..(288): Xaa is any amino acid
KATSQADTSKSDEATVNVTSAPVVTVSVSPQTASLQTGGAQQFTATVTGTSNTAVTWSVPAGHGTITQGGVYTAPSTAGTYKVKATSQADTSKSDEATVTVTSSSSNVPVTGVVLNKTSTTLTLTVGDTDTLTAVIEPSNATNKNVTWSSSNTAIAAVSGSGLSATVTAKAAGGPVNITVTTEDGGKTATCVVNVSTFAPMSATFTAIAASNDHSVAIEEDGSLWAWGHNREGQLGDGTTDEGKNRPVQVGNGTGGWVAVSTKYDHSVALKTDGSLWAWGPNNYGQLG

SEQ ID NO: 102132 - protein, 112 aa, Unknown
  Obtained from environmental sample
  misc_feature (1)..(112): Xaa is any amino acid
MWELLYNPVFNRVEFEAFRTQAGLNTLVMTPQKWIEATGGVGVAFKAWCHSGTYVHKEIAYEFASWVSVEFKLYLVKEFDRLKNEEFQRQSLEWSLRYLRFAPSKKQYQPNG

SEQ ID NO: 102133 - protein, 266 aa, Unknown
  Obtained from environmental sample
  DOMAIN (8)...(266): Pyridoxal-phosphate dependent enzyme
  misc_feature (1)..(266): Xaa is any amino acid
MIKAAGKLTDLIGNTPLLKASNFLDGAAAKADIYFKLEYFNPLGSVKDRIALAMINEAEKEGRLKPGDTIIEPTSGNTGIGIAFVAAVKGYKTILTLPETMSVERRTLLKALGATIVLTPGADGMKGAVRRAEEISAQTGGVILQQFENPANPAVHQKTTAEEIWNDTEGNVDIFIAGVGTGGTVTGVGAYLKEKKPGVKIIAVEPFESPVLSGGTPGPHKIQGIGAGFVPKVFKREVIDEVYTVKGTEAIETSRELGRKESLLVG

SEQ ID NO: 102134 - protein, 262 aa, Unknown
  Obtained from environmental sample
  misc_feature (1)..(262): Xaa is any amino acid
MLARSSADYRVTPGDVYTLTYAAGTTPVSYIIVVDSSYRIRVSNLGIVNGAGKTFMQLKSEVETTVANNYPLSGVQLVLTQPAVFRVYVNGEVASAEEVPAWGLSRLSSLVGKNISDNAASTGNNISDNTASTGRNPSNNAASTGRNLSNSAVSGLIGLTDYTSIRDISIKSTNGQTRVYDLFKAQRYGDIGQDPYLRPGDVITFNRIKRVVTINGAIERPGAYQLLDGENIKELIEIYGRGFTPIADKTRLEMVRLISSKD

SEQ ID NO: 102135 - protein, 288 aa, Unknown
  Obtained from environmental sample
  DOMAIN (1)...(183): Xylose isomerase-like TIM barrel
  misc_feature (1)..(288): Xaa is any amino acid
FTLVAKAKKLQKATGVKLLWGTANVFSHPRFMNGAATNPEFGVVALAATQVRAAIDATIELGGQGYTFWGGREGYMSLLNTDIKREKENLARFLIMARDYARKHGFKGDFYIEPKPMEPTKHQYDFDTETVIGFLRHWGLDKDFRMNIEANHAELAGHEFAHELETAAVSGFFGSVDANRGDIQNGWDTDQFPNNYYETAMAMYTILKIGGFTKGGLNFDSKIRRNSVDPTDLFVAHIEGMDAFAVGLEIAHRMIEDGKIPTFVKKRYASFNTGDGAKFSKGQMKLDE

SEQ ID NO: 102136 - protein, 299 aa, Unknown
  Obtained from environmental sample
  misc_feature (1)..(299): Xaa is any amino acid
DPLADEVTRDFLGSQFSLEYADAAGVGMTLYSSINSVALGIYGYELVDNAIEVHYSIGDIARGFIIPPAAPEQRMLKFLEKMDQDDRRKVEASYRLYDINNLRTSDDKSALLASYPDLSRTKLYVLRDNAQDYMKEMMEEFFAMAGYTYDDYYEDSSNYTSSGGAEKPAFNITLRYTLDGKSMLLGVPFDKIAYRPSFPITQLTLLPFMGAGGINDKGYMLVPDGSGALINFNNGKQNQMAYNNSVYGWDEAMPRLGNAIINDNRAPFAAFGVQKNGSALLCVIENGSSYAEVRADVAG

SEQ ID NO: 102137 - protein, 216 aa, Unknown
  Obtained from environmental sample
  DOMAIN (17)...(100): GIY-YIG catalytic domain
  misc_feature (1)..(216): Xaa is any amino acid
MSTQQQLLADTSRFPETPGVYLMKDADGGLLYVGKAVNLRSRVRSYFISDHADRAQIPGMLRLLDHIDLIVTNTEAEALILEANLIRKHKPKYNIELRDDKHYPYLKVTVDEPFPRLLVVRRVEHDGAKYYGPYTDVGTMRRMADFAKRIFLLRNCNKNMPLKRAVRPCINHSMKRCSAPCAAKIDADAYRRNVGDLERFLKGKRTDLTKELEGRM

SEQ ID NO: 102138 - protein, 211 aa, Unknown
  Obtained from environmental sample
  DOMAIN (8)...(191): Peptidase family M50
  misc_feature (1)..(211): Xaa is any amino acid
MITPDFIIRIPAILLALTLHELSHAWTAYKLGDPTARNQGRLTLNPLVHLDLLGTIMLLTGLFGWAKPVPVDPYNLRNPKRDLMLISAAGPLSNIIQALCCGFIIRAIMAFDPVGGQELFNAPATKYLMSFLIWAFMINSGLAFFNLLPLYPLDGSKILAWFLPDKHVESYMRATRYAMPLIFGLVIIGALTKIPILSMILNPIFEPVHTP

SEQ ID NO: 102139 - protein, 174 aa, Unknown
  Obtained from environmental sample
  DOMAIN (35)...(174): ABC transporter
  misc_feature (1)..(174): Xaa is any amino acid
MDILTVENITKVYRRGFRAVRVNAVTGVSFALAENRITGFVGPNGAGKTTTIKMAMGLVRPSAGRITLRGVDARLPAARRGVAYVSEQPYFYKHLTVGETIDFSARLIGVKRSSVGAERKRVLGAVELTGREGSKVRSLSKGLQQRLNMACGLLGDPKLLIFDEPMSGFWTRRR

SEQ ID NO: 102140 - protein, 278 aa, Unknown
  Obtained from environmental sample
  DOMAIN (45)...(200): Exonuclease
  misc_feature (1)..(278): Xaa is any amino acid
EANKFIKSLDKDDPFKVIYGVEGYIVDDLREIAVGAGEQTLADEFVVFDIETTGFSPIKDRIIEIGAVKVKNGEVIDNFSAYINPKRPIPYEITKLTGITDEMVLDAPEIDVVLPQFLDFVKDSVLVAHNANFDVRFIEQNCRYQDIEASFISVDTVALARVLLPTLSKYKLNLVAKALNISLLNHHRAVDDAKATAEIFLKFVEMLKDRGITDLKGINTLGILDPNSIRKMRTNHIIILAKNDIGKFNLYQLISKSHVNYFGRFPRIPKSELVSTEK

SEQ ID NO: 102141 - protein, 66 aa, Unknown
  Obtained from environmental sample
  misc_feature (1)..(66): Xaa is any amino acid
ADIPLDIKVAVMGCVVNGPGEAREADIGIAGGKGEGLLFKKGQIIKKVKEEELLDSLRQELLAWNK

SEQ ID NO: 102142 - protein, 82 aa, Unknown
  Obtained from environmental sample
  misc_feature (1)..(82): Xaa is any amino acid
MPVIEMKGIKREYRMETRGKKSKDKEEAVVVRALRGVDFSAEEGEFVSVMGPSGSGKSTLMNIIGCLDKPTAGTYTLDGMKL

SEQ ID NO: 102143 - protein, 302 aa, Unknown
  Obtained from environmental sample
  DOMAIN (95)...(293): 60Kd inner membrane protein
  misc_feature (1)..(302): Xaa is any amino acid
SWRSEAALGAEPIKEKRNEKDPGTYALTISDNMTTDSIALNFSILPLHWKEIGSMGEGYEKIIVSGWEWCGADKWFVWLCGLLLQILNAFYSIIPNYGIAIILLTILVKVVTTPLALKQLRSTRSMMALKPELDAIRAKNRGDMRAQQQEIMALYAKHGVSPFSGLSGCLPMLLQMPIFIGLFVVLGRAIELREAPFFGWISDLSKSDVIWSGISIPYIMPEGIAILPFLMVVSTWFQTKQTITDPNQKMMVWMMPAMMFVFSAVMPSGLVLYWTISNLWGIAQYFVINPQPAVLGKAKGKI

SEQ ID NO: 102144 - protein, 153 aa, Unknown
  Obtained from environmental sample
  misc_feature (1)..(153): Xaa is any amino acid
MLVAIAVAGVAFAAGFFWRITVDRRYRRDQEEQLSREAERILKEAKSEAELQKKTAILEAKDEWFRAKTEFEKEAAKTREQIRQEQQRVREADLEIKKQRDHISKRESEFAARESFLNSKEKTLRTKDNELSRLITQQNDRLEQISQMTQEEA

SEQ ID NO: 102145 - protein, 280 aa, Unknown
  Obtained from environmental sample
  DOMAIN (199)...(226): NHL repeat
  misc_feature (1)..(280): Xaa is any amino acid
LEFTPITRFAYNEAILAFERSLSFRPGVSIILDWLGKAYYRSGFEDTALRQWRSAMDIYGRNSGAGMLLGSRIETIANRRFLLPVANDGVRYVEAGRYPGRYGEIVLYRQPSSVLPNKDGSVWVIAYGSNEIVKVDVNGMVKDRKRGPLNGFDRPYDMARGIDGRLYLSEYRGGRVSVLKNNGDWLFYIGSKGIKDGQLVGPQNLTIDEDGYLYVVDYGNGRICKYDPDGVFIVSFGARSAFFPGILSPTGIAAVNGKVYVADNARKAIFMFDINGSYIG

SEQ ID NO: 102146 - protein, 271 aa, Unknown
  Obtained from environmental sample
  DOMAIN (65)...(218): ExsB
  misc_feature (1)..(271): Xaa is any amino acid
DKSFPLNSYDLCCRAGEAVLNTVNGLTVDIHNPQDVIRIEIREKAYIYAGSAKGLGGLPVGSAGRGVLLLSGGIDSPVAGFLMAARGMNIDAVHFHAYPYTSNEAKQKAVRLAEIVSSYCPGIRLFILNFTQIQMRIKESSDSQWLTVLLRMAMMETAEKAALKIKSKCLITGESLSQVASQTIENLTCTQSRIKLPVLRPLIGMNKESIIREARRIGTYEISIQPFVDCCTLFSPVHPVLYGDPEQANTLYEKLTLAPLIDEALANCEII

SEQ ID NO: 102147 - protein, 53 aa, Unknown
  Obtained from environmental sample
  misc_feature (1)..(53): Xaa is any amino acid
IDAALARIEDGTYGICKVTGEPIDVERLEEVLVAKYSVKGKEILERQKRKEGV

SEQ ID NO: 102148 - protein, 134 aa, Unknown
  Obtained from environmental sample
  DOMAIN (31)...(127): Type III restriction enzyme, res subunit
  misc_feature (1)..(134): Xaa is any amino acid
MFLFEKLDANRETGSLSDNVPDCISGNLNPYFELRPYQNKAFSNFIFYFENDRLRTNPTQVLYHMATGSGKTLIMAGLILYLYRKGYRNFLFFVHLDNIIKKTKDNFLNQSSTKYLFAPEIIIDGEHIPIREVD

SEQ ID NO: 102149 - protein, 273 aa, Unknown
  Obtained from environmental sample
  misc_feature (1)..(273): Xaa is any amino acid
VDIGKIEGILPKKYQSPREIYHVNDRIKSLIAEVREDSSGLQIILSRTHTEFVRAIFELEVPEIYDKTVEIHKIVREPGFRTKLAVFSNREDVDPVGACVGLKGVRIQAVIKELEGEKIDILKYDPDPRRFIKNALSPAEVRDVIILDEGKHQALAVVSDSMLSLAIGKQGLNVRLANRLVDWNIDVKTESQFAEMDIAAESRRAVSELFGDTDSYEDEISRIGELPNVDARVAQVLLDNGIDLIEDFLGISQEELEAKGLSSAELEGLRKLI

SEQ ID NO: 102150 - protein, 282 aa, Unknown
  Obtained from environmental sample
  misc_feature (1)..(282): Xaa is any amino acid
RPVTCALEPHVHPKTLIGAPAAELVKVTKKLAKDVDALGLNYHEDLFKDYSAAIDRPIIATECYDYYSGTAVNYEDITTKNPWAYVLENDNVLGQFIWAGIDYLGESAWPAKGWTGSVLDICGFRKPNAWFRKSIWSDEPVVYLAFHDQNVKPDYCRGRWSFPPLSSHLNHDHFKRRTVTAVIFSNCETVSLWINGKKLGSRAPGDFANNIIEWTFEYAEGEIKTAGYRNGKEVCNYCLKTAGEAKNIRLVPDKTTIAPSDVAHIEVNITDKNGILCPNEEV

SEQ ID NO: 102151 - protein, 193 aa, Unknown
  Obtained from environmental sample
  DOMAIN (4)...(186): ATP synthase A chain
  misc_feature (1)..(193): Xaa is any amino acid
KNPRRTPGAFGTGVEFLNDFAKNQFGPFAKQLGPYMGSLFLFLLVANIIPVLSPLPLKAFGRVFIPPFEIRPPTRDINVTAALAAVSIILVLVCGFAARGFTGWFKKLLHPIPFMLPFNIMEYGTRLISLALRLFGNILGGYVLMCMIEGLLPVALPVILSLYFDFFDGLIQAAIFVFLTSLYIGEAVKINEE

SEQ ID NO: 102152 - protein, 72 aa, Unknown
  Obtained from environmental sample
  DOMAIN (6)...(72): ATP synthase subunit C
  misc_feature (1)..(72): Xaa is any amino acid
MDLQVLIAIGAGIAVFTGVGAGIGIGIATSGFLQAISRQPEASGKMTPMFFVGVALAESTAIYGLVISILLI

SEQ ID NO: 102153 - protein, 291 aa, Unknown
  Obtained from environmental sample
  DOMAIN (2)...(291): TCP-1/cpn60 chaperonin family
  misc_feature (1)..(291): Xaa is any amino acid
CNNQASVKVNGKEHITQVATISANNDLEIGKMLADAMEKVGNDGVITLEESKTADTTIDVVEGMQFDRGYLTPYFVTNSEAMEVQLENPSILLYDKKISTMKDLLPILEQIAKSGKSLLIIAEDVDGEALATLIINKMRGTLKVAAVKAPGFGDRRKAMLEDIAILTGGQLVSEETGAKLEDVPLSVLGQAKSVTIDKDNTTIVEGGGKSADIKARIGQIKKQIEDTTSDYDREKLQERLAKLSGGVAVIKVGADTEVAMKEKKDRFDDALHATRAAIEEGIVAGGGVAFI

SEQ ID NO: 102154 - protein, 105 aa, Unknown
  Obtained from environmental sample
  DOMAIN (1)...(96): Protein of unknown function (DUF327)
  misc_feature (1)..(105): Xaa is any amino acid
AVHSAGSDLIDRPFHDEILRYKKAVRDFVHYVVDNAFTVEKSQTRRKGKTKIHVQIQIIDKKLDELAAAILSGQVSQLEMVSKIGEIRGLLVDLTISGVIRERDE

SEQ ID NO: 102155 - protein, 275 aa, Unknown
  Obtained from environmental sample
  DOMAIN (2)...(149): von Willebrand factor type A domain
  misc_feature (1)..(275): Xaa is any amino acid
MLVEELNGADKVAICVYAGAAGTVLPPTSIDNKNVIMSALNKLKSGGSTAGGAGIQLAYNLAEQNFNPQAINRVILCTDGDFNVGITNRGDLIDLITQKAKTGVYLTVLGFGMDNFQDGTLKQLASKGNGNYGYIDTIEEARKILVNQLSGTLITIAEDVKIQVEFNPANVGAYRLIGYENRVMRDEDFNNDAEDAGDIGARHTVTAFYEIIPPGTEAGALPRRDPLKYAPPTAPPPADYKPEYPDELLTVKIRYKLPGESVSNLISFPVGTASI

SEQ ID NO: 102156 - protein, 302 aa, Unknown
  Obtained from environmental sample
  misc_feature (1)..(302): Xaa is any amino acid
TKRVVNNTAKAPEAFTNVNAQLAVHRASSVSSGDINASVGSGGAKAADAFPAVNRGFVPTQQPQQSQQPSMQTGGVGAGSGTNGINANSNIKPMDNSVGMGINVRGINASGINSTDNPNIRGETGVGVNARNINAQNISTSVITPTDNQNIRSDAGIGINNKQVAVDNFRGNNNSIGVGVNANINTKPTDNSVGMGINVRGINADGVNFTDNPNMRGDVGMGVNARNINAQSIGTSGINPADNQNMRGDIGVGINSRQGAVDSSRGVIINATGAASSVDVPAIKESCLSVVDTLKSSAAPIL

SEQ ID NO: 102157 - protein, 231 aa, Unknown
  Obtained from environmental sample
  DOMAIN (1)...(231): Cys/Met metabolism PLP-dependent enzyme
  misc_feature (1)..(231): Xaa is any amino acid
VSEPTAGYTYTRVQNPTRKALETKLASLENAKYGMVFSSGLAAETTVLLSLHHPGDHIIALDDLFGGTSRLFNQVFSKYDFKVSYVDATDAVNVEKAVTPASKAIWIETPSNPLLKVADIKAISKIARKHNLILIVDNTFLSPYFQKPLDLGADIVVHSATKYIGGHSDVLGGAVLVNDDALYERLKYHQGAVGATLPPFDCYLALRGIKTLPLRMEQHQKNALTVARYWK

SEQ ID NO: 102158 - protein, 242 aa, Unknown
  Obtained from environmental sample
  DOMAIN (1)...(242): Cys/Met metabolism PLP-dependent enzyme
  misc_feature (1)..(242): Xaa is any amino acid
MNPTWEVFERRMATLENGAAALATASGASAITYAILNIAKSGDHIISDKQLYGGTYNLFANTLRDLGVEVTFVDGSTATSFESAVRGNTKAMFLETIGNPNASIVDIEAVVAIAHSHGIPVIVDNTFATPYLLRPIDYGVDIVVHSATKFIGGHGTSIGGVIVDSGRFDWARNDKFPGLSRPNPNYHDLVFTDAVGKLAYIIKARTTLLRDTGASLSPFNAFLFLQGLETLSFRLEHHLGNT

SEQ ID NO: 102159 - protein, 195 aa, Unknown
  Obtained from environmental sample
  DOMAIN (33)...(195): ABC transporter
  misc_feature (1)..(195): Xaa is any amino acid
MNAGNKIFELSEVCFAYRKKEVLKNINMEIAAGENLGIVGESGSGKTTLLFLLLHLAKARSGSVRFCGQPLSEMAGKTLKNFRTKVQPVFQDPFLSLDPAQKIESIIGEPLVSLGLTKTREERKERIRQVLEKVGLEEDAMSCHPVEFSGGQRQRIAIARALVTNPEVLIADEAVSALDIITKIEILKLLHELKE

SEQ ID NO: 102160 - protein, 219 aa, Unknown
  Obtained from environmental sample
  DOMAIN (106)...(218): D-isomer specific 2-hydroxyacid dehydrogenase, NAD binding domain
  misc_feature (1)..(219): Xaa is any amino acid
MWKIVVVGPIHEEGMKLLRARSDFAVDVLSDLSPEGIAKGVAGAHGISIRTQQLTKEILAQAPELRIVSRHGVGFDNVDVAYLSSRKIPMALAVDSNFTAVAEHTLMMMLCIAKDAFACDEAVRQGNFEFRHKGTLLDLMEKHVLIMGLGRIGRRVADLCLAFGMRVSAYDPYVPQSPAPGITMVTDFRSVLPSLDFLSLHMPATTDSAGIIGTKELAM

SEQ ID NO: 102161 - protein, 291 aa, Unknown
  Obtained from environmental sample
  DOMAIN (12)...(291): Sodium/hydrogen exchanger family
  misc_feature (1)..(291): Xaa is any amino acid
MHDVPPLVVDLAIALGTAAVITLLFRRLKLPVIFGYLLAGLVVGPYVPLPVRANAENVQVMSELGIILIMFGIGLEFSVRKVVKSGPTALLMATLQAGFVIMSGLALGRTLGWSTTEAIFMGCAMVATSTVVIVKLFETMRPSAVLKEIVFAVTILHDLFAIILMTVLVTVTKVGVKGIEPMGLVWTIVKFVLFLVGVILIGRLFVPKFLRKLADHESGESLVIASVGFCFCAAILAVASGFSLAIGAFAAGMLAAESGRSKTIDKLMMPIRDVFTSLFFVGVGMMLVPSA

SEQ ID NO: 102162 - protein, 100 aa, Unknown
  Obtained from environmental sample
  misc_feature (1)..(100): Xaa is any amino acid
LGGDLGWTEKGLLLSAIEDAALALAPDEVSDVIETDKDYILVQLIAKETAGSKPFEAVKAQIMDKLREPKAKNALQLYLQAQRLRANIRYMVPKEQIIKG

SEQ ID NO: 102163 - protein, 79 aa, Unknown
  Obtained from environmental sample
  misc_feature (1)..(79): Xaa is any amino acid
MRRAAELAHKKDLTVIKVSKPEQDMRFDIPVIGLSTVENMIACGATALVIDAGRTLVFDKEAVVRQADKHGIAIVAFAQ

SEQ ID NO: 102164 - protein, 155 aa, Unknown
  Obtained from environmental sample
  misc_feature (1)..(155): Xaa is any amino acid
MNKIQYDNAGRELMQTIEIERLKLEASINSEIAIARRMADSPLIRRHFLDPEDEDIKQITLEEIAGYRRAFAGNNVFWISDTDKKYYFNDEYVYTINPSDESSWWYNSIMENPTPYIFNVNFDIGIKKTMLWINAPVFDNNQKPAGIVGTGINLS

SEQ ID NO: 102165 - protein, 167 aa, Unknown
  Obtained from environmental sample
  misc_feature (1)..(167): Xaa is any amino acid
MRENSGQKFDDITRRILEAFTGKDALVSVTVVVLGFLVATLLLFIIKKNPGGMYKAILQVISGLSENRNGVWSWNPRYIGEWFVSSIPLILCGLSMGFAARAGLFNIGAEGQYIAGLTAAQLVACYFPPVPVLHWVMAVLAALSAGALWGGIVGFFKARFKVSEVVA

SEQ ID NO: 102166 - protein, 159 aa, Unknown
  Obtained from environmental sample
  DOMAIN (50)...(156): Response regulator receiver domain
  misc_feature (1)..(159): Xaa is any amino acid
MKNMNVFSGIVLNEEYEMVSVLHIPTVIKMAKRVNISEYKRISNSEKNRKSVLVVDDSLPIREIEKEVLLSKGYVVDTAADGAEALNAAKSKHYDLICTDLNMPVMDGFSLIMNLKNDESLKSIPIIVISSKDDKENQERAFKLGASNYIIKNSFNNYN

SEQ ID NO: 102167 - protein, 283 aa, Unknown
  Obtained from environmental sample
  misc_feature (1)..(283): Xaa is any amino acid
MNVDIIRTGIDFGIAFLCVLSLILIRSKMPLRLVPLFPVTIFGLYCLYLLYTGHLNLWAAVWIFSFPLIVIFLCQIVVGIVESSITLAGIIFLLFAPFTPLAQQEFTIRIRFVIGYILITGLAIVYEYISIKKDQKEKILIAELAHERNVIQTMKDNINQGIFMMDSELKILPLYSKPLISILSYHDSELAGKNFLDILASSLDIKQLQTMKGYFSMIFTKAKKTRVLESANPISEFEYRIEDQMKTLATKFHLIEQPDAEPVIIGIIQDITREKEYERDLQA

SEQ ID NO: 102168 - protein, 164 aa, Unknown
  Obtained from environmental sample
  misc_feature (1)..(164): Xaa is any amino acid
MYMGRDAMGSVRSVTAGTGALEGRYEYDAFGQPYKGDLTGGMNLGYASKPYDTVTGLYNYGYRDYKPQAARFTTVDPIRDGNNWFAYVNNDPVNWVDLWGLDIMRSTYTQGSGKITTVYIPTKSDGSMELENAKTYKFDATNNVTTNLNMTMHKTGTQVDTGYG

SEQ ID NO: 102169 - protein, 240 aa, Unknown
  Obtained from environmental sample
  DOMAIN (2)...(174): Pyridine nucleotide-disulphide oxidoreductase
  misc_feature (1)..(240): Xaa is any amino acid
MKYVIIGNSAAGIGAVEGIRQVDKEGEITIIANEPHHTYSRPLISYLLLGKVTEEKMKYRSDGFYSENRVSMLHAVVTGVDTGKQQVILSNDDRIPYNKLLVATGSQPFVPPFEGLDSVAEKVTFMSLDDARKLGGMINKNKRVLIIGAGLIGLKCAEGISGKAALITVLDLAPRILSSILDDDGAKTVQSHLESKGIKFRLAASTKKFEGNTAVLDNGDRIDFDVLVLAVGVRPNTALL

SEQ ID NO: 102170 - protein, 223 aa, Unknown
  Obtained from environmental sample
  DOMAIN (78)...(212): MotA/TolQ/ExbB proton channel family
  misc_feature (1)..(223): Xaa is any amino acid
MNGAEISILSMFLHSDPVVQVVMVLLFLASLASWVVILEKTVLLRRVGRDIRLFQEAAGSPNCQLFREAAGGQDLNFYACPGFTRDIAKAGLVECRDRLGGESRADFRARVESIMRVALAGHLERLERRVLFLATVGASSPFIGLFGTVWGIMHSFIGIAASGETTLAVVAPGIAEALFATAMGLVAAIPAVIGFNKISNAHKKMAREALGGLSLLGNQLARR

SEQ ID NO: 102171 - protein, 287 aa, Unknown
  Obtained from environmental sample
  DOMAIN (153)...(282): Predicted permease
  misc_feature (1)..(287): Xaa is any amino acid
MEQRKRPSITVNDYNRIRGAEMPSVAAVGATSSTSAIAYYGAKKYEGAYITGVTANYNTIADIDMEEGLGRWFTEPEEDSTKYVAVIGGNVREEFFGQQDPIGRTILVAGLPFRVIGALKKEGQSFGGGDSNDSNIFIPFSVFRRNFLRPWWDIQILVKAKSLDLMDAAQDEVRAYLRAMRHTPFRAPDPFGILSKDFIMGFFNQITATIFSFFILITGVSLFVGGIVVMNIMLVSVAQRTQEIGIRRAIGASRGDVMRQFLLEATMLSVAGGILGFLLGARHCAKH

SEQ ID NO: 102172 - protein, 279 aa, Unknown
  Obtained from environmental sample
  misc_feature (1)..(279): Xaa is any amino acid
VGNLEPNDTREETYDADGKHILPGIIDAHVHFRDPGLTEKEDFESGSIAAAFGGVTFVADMPNVLPPTSTAERFLEKIQIAKEKSYVDFGLFALLVNDNINEMEELKKAGALGYKVFLGTSTGDIASPLLGVLIKQMTKSAALGLRIGFHAENSEINMHFTSMLKNSVGEKEGILLSKARPIISEVLAIQTVISLAEYTGAKVHIHHVTSKDGCLLIANAKQKGLGITTETCPHYLLLDSNTAHKVYPPIREEIHRVSLWDALNNKTIDMIASDHAPHL

SEQ ID NO: 102173 - protein, 71 aa, Unknown
  Obtained from environmental sample
  misc_feature (1)..(71): Xaa is any amino acid
SRGIEVTPDVMGKLEKAVEGAEGKGAKDSLVIVKDLAFIVNIPNRTIITAMDGESIKDNIFTNIDSTVIAS

SEQ ID NO: 102174 - protein, 77 aa, Unknown
  Obtained from environmental sample
  misc_feature (1)..(77): Xaa is any amino acid
MMCVNPYKILGLPVPKIAVGESADFSVICPNKKWEVDAKNFFSKCSNSAFLGKEFSAMPVMTIVGGKIMFERDDFNA

SEQ ID NO: 102175 - protein, 217 aa, Unknown
  Obtained from environmental sample
  DOMAIN (80)...(215): Histidine kinase-, DNA gyrase B-, and HSP90-like ATPase
  misc_feature (1)..(217): Xaa is any amino acid
AGKKAAAEKPSSKKIPEEKASPKKTPAKLEEKKAPTLVRSLPQSGARGVYDESKITTLSSLEHIRLRTGMYIGRLGDGSNPDDGIYVLLKEIIDNGIDEFIMGNGSQIEIVIKDGTAKVRDYGRGIPLGKLVECVSVINTGAKYNDDVFQFSVGLNGVGTKAVNALSSHFRVVAIRDGEFAEAVFQRGELVSEKKGRLKEKQKNGTYVEFTPDAEIF

SEQ ID NO: 102176 - protein, 60 aa, Unknown
  Obtained from environmental sample
  misc_feature (1)..(60): Xaa is any amino acid
MKAAILTNEYPPNIYGGAGIHVDFLTRELKNLCEVSVHCFADFSPRPFGEFEDPEVQENP

SEQ ID NO: 102177 - protein, 211 aa, Unknown
  Obtained from environmental sample
  DOMAIN (1)...(211): chorismate binding enzyme
  misc_feature (1)..(211): Xaa is any amino acid
MVERARKYIYEGDIFQVVLSNRLEADIEGSLYETYSILRKTNPSPYMFYFSSSDIEIAGASPETLVKLQDGILHTFPLAGSRPRGKTPQEDEALEKDLLADPKELSEHNMLVDLGRNDLGKISKFGTVEVERYKTIERFSHIMHIGSTVRGEILPDKNALDAIDAVLPAGTLSGAPNIRACEIINELENNKRGIYGGAIGYMDFSGNMDTC

SEQ ID NO: 102178 - protein, 77 aa, Unknown
  Obtained from environmental sample
  misc_feature (1)..(77): Xaa is any amino acid
NVCKSHWSPWLSTGGTGDFLAGLVAARYAQNKSNPLKAACEAVWLHGSAADRLGKGPLMVRDLGPSLADLLREMRGA

SEQ ID NO: 102179 - protein, 265 aa, Unknown
  Obtained from environmental sample
  DOMAIN (137)...(255): Response regulator receiver domain
  misc_feature (1)..(265): Xaa is any amino acid
EEGGASIGTVDINTDSGVSTGAGVDDDADGAVADDGAAADAPVAAEAVPDELDAYGEDAEYQETLAVPLESVNEENDADDDTPLPDEEPAKPVGPVRKIIELPVENPFINGKLADHGKKTTTHQRRRLPETVKMKDRRVILAEDVAINRDLIAMYFDGSGVKFEFAVNGREVCEKFERDPSSYSLILMDIQMPEMDGYEVSRKIRAMDVDWAKQIPIIAMTGNDQKEDIDRCFEAGMDDHIPKPIDMEVLQDKVFDILTLNAESY

SEQ ID NO: 102180 - protein, 68 aa, Unknown
  Obtained from environmental sample
  misc_feature (1)..(68): Xaa is any amino acid
GEQTVDSLEKQLEKVMDTLASKGVDKKLITEQAMITPSCGTGSLATGDAEKVFSLLSELTKRMKGKYA

SEQ ID NO: 102181 - protein, 253 aa, Unknown
  Obtained from environmental sample
  misc_feature (1)..(253): Xaa is any amino acid
KLISAALLCFIAWFMCRVSLAMPGNSLAKDKITFASAAGLLILPTCMTPAVFWFAGSFTFLWAMAALLLCVMPVAFQALGIAYRPWLYVLSVAATPIAASQEQAAAATLALLVCLNVFLLAQKKWHFKAALPIVPAAITGYFLFSSPGARLRSAVEAESSFPAFLEMSAPEKLLAGASNYFAYAFYLSVPVMTVFLLLLYQNIWQCAPGRKTRRILTAHGVCWGVLCLGGNACALLARRANPDMLFERNVYAA

SEQ ID NO: 102182 - protein, 293 aa, Unknown
  Obtained from environmental sample
  DOMAIN (20)...(293): Hsp90 protein
  misc_feature (1)..(293): Xaa is any amino acid
GTLITLHIKKDEEGGESFSRYLDEDEIRALVKKYSDYIKYPIKLSGETVNTMKPIWKRPKAEVTQDEYDGFYSGAFHDFEKPLRRMHISAEGSLEYKALLYIPSHAPYGYYTKEYEKGLALYTNGVLVTDCNKELLPDYFGFVKGLVDTELTLNISRETIQQNRRLKQIASFLEKKIKSELEDMLKNDRDTYVKFFESLGVQLKYGIYENFGVNKETLQDLIIFRSVKDDKFITLNEYVAAMKHGQKYIYYACGKSADGIRALPTTERVLDSGYDVLCMTDEIDEFTLRALHN

SEQ ID NO: 102183 - protein, 241 aa, Unknown
  Obtained from environmental sample
  DOMAIN (22)...(224): RecF/RecN/SMC N terminal domain
  misc_feature (1)..(241): Xaa is any amino acid
MLIEVKSLAFTYGAKTAFEKVALKDISFSIGEGESVGIVGATGSGKSTLIQHINGLIKLKSGKISVFDIDLTARKPNLKLLRQGIGMLFQYPEYQLFAETVLEDVMFGPLNFGFSKEDARAAAIEAVRLVGLDEGVLNKSPLELSGGQKRRAAIAGALSYRPKILILDEPTAGLDPSGKTEILELVHSLRASGSVQTVITVSHNMDEIARYCDRVLVLRDGELLYDTTPTEFFYDKNPYEL

SEQ ID NO: 102184 - protein, 279 aa, Unknown
  Obtained from environmental sample
  DOMAIN (1)...(279): EPSP synthase (3-phosphoshikimate 1-carboxyvinyltransferase)
  misc_feature (1)..(279): Xaa is any amino acid
LAGGNAVSTGNASLRKRPMRPLLNALEQLGAVVNVEVAEQDLPFVIHGPLKGGRATVDGISSQFVSSLLFAAPLMPKDTHITVHNLHEQPYVEMTLWWLAGQEIEIEYSKELTSYKVRGGQSYKPIDTVIPADFSSAVFAAAAAAIGGAPIELCGLDFSDTQGDKEVFRHLETMGATVERSSDTVIVTGGNLNGTIIDLNRTPDALPALAVAAAAAVGETVFTNVAQARIKETDRIAVMVEELGKMGISVKELPDGMVVRGGKLTGAKVNSHKDHRVAM

SEQ ID NO: 102185 - protein, 240 aa, Unknown
  Obtained from environmental sample
  DOMAIN (1)...(71): Oxidoreductase family, NAD-binding Rossmann fold
  misc_feature (1)..(240): Xaa is any amino acid
MFDNETKIPADQRMDFVTIVTPNHYHFEPAMMALERGFHVVIDKPITFSLDEAKKLKAKVEETGLVLALTHTYSGYPAVKDAKARIARGDIGQIRKVYVEYPQGWLSQRIELEGGNNAGWRTDPKRSGKAGAMGDIGTHAWHLAEYITGLKVTELCADLKAFVPGRPIDDDGAALLRYENGATGVLIATHVAVGEANAIHIRIYGEKGGIEWRQMEPNILWLKWSDRPTEIIDIGGNAKM

SEQ ID NO: 102186 - protein, 289 aa, Unknown
  Obtained from environmental sample
  DOMAIN (2)...(165): Type I 3-dehydroquinase
  misc_feature (1)..(289): Xaa is any amino acid
RRDVDGGYFNSGEGARLKLLANGLAYANADSRLNFAYVDIEEDFNAPSLEEAARTFGTRIIRSCHDLDGTIDDISAKIKSMKRAGDEIVKVAVSVKSTHDVLNVFRASSTFIKQDKILICMGHYGIYSRILAERFGSFLTYSSALSENVIPGAPGQMDVRELSELYHFKKITKDTKIYGVVGNPLKSSVSPWFFNTIFNLENADCVYVPFPVTDINDFMDLADGLEIQGLSITVPYKEEVLPYIEEKSAIVQSIGACNTMYRNRRGDAWYGDNTDYAGFTTSLLNFRQE

SEQ ID NO: 102187 - protein, 247 aa, Unknown
  Obtained from environmental sample
  DOMAIN (6)...(232): tRNA synthetases class II (D, K and N)
  misc_feature (1)..(247): Xaa is any amino acid
MLVFAMEIGMKGLGYISVQEDSSLKGPIVKFLSAGKQDKLKKDLCLEKSDTLFFIADAPDRVNSLAGQIRTALGSQLNLIKKDSFEFCFIVDFPMYGVSEETSASREAAASEEAGKVEFTHNPFSMPQGGLEALETKSPLDILAWQYDIVCNGVELSSGAVRNHLPEVMAKAFEIAGYTQADIEKKFPALYNALHYGAPPHAGMAPGIDRIVMLLAGEENIREVVAFPMNSAAQDLLMGAPCEVTEQ

SEQ ID NO: 102188 - protein, 136 aa, Unknown
  Obtained from environmental sample
  misc_feature (1)..(136): Xaa is any amino acid
TRQGTGAAPSIEVWRKNGADAERLTPEALARSGDVVQLRYIVPTSCYGAVMSVDGRGALTVHLSGDFGKAAPLTSGRPIALSDAYQLDDAPLFETFYLVTAKDNFDIESVKRSLLDESGRRYLPEDGVVTAFTLRK

SEQ ID NO: 102189 - protein, 66 aa, Unknown
  Obtained from environmental sample
  misc_feature (1)..(66): Xaa is any amino acid
MEALLGREIQPAQFEQLVLQIIGYREVLLVERFNAGLAQLLFQFSNAPVLDYLAALVAVERLPAAN

SEQ ID NO: 102190 - protein, 229 aa, Unknown
  Obtained from environmental sample
  DOMAIN (6)...(53): Regulator of chromosome condensation (RCC1)
  misc_feature (1)..(229): Xaa is any amino acid
MAIRANGSLWAWGRNNHGQLGDGSNDDRLKPVQVGAGKDWKSVAPGLFHTVAIKANGSLWAWGWNHDGQLGNGTNTDQNAPVQVGADKDWSAVAAGECHTLALKANGSLWAWGSNDSGQLGDGTTTNRWEPVQVGEEGEWMAISANGSCSIAIKADRSLWMWGADDWYLVEFDRRTCKDRNAPIQVDADTNWKSVSAGTDHTVALKADGSLWAWGSNEKGQLGDGTNAN

SEQ ID NO: 102191 - protein, 283 aa, Unknown
  Obtained from environmental sample
  misc_feature (1)..(283): Xaa is any amino acid
VAYYEAVGGEGDSGAGSIQENNEPFRIVDYGPRDVLPSEIKKPSIFVVFSQPVVPLAKLGDPIKEDAGYFKIQPPLKGVYRWYGTRLLSFEPESESLPQQEYKITVSDKIKSLGGKSLEGEKSFSFETEQLSVLEWRLGSGDEWVNTWDADPLAAKEISIIFSYPVNLGEIAKWIEVTNISGQSYPFTLSRLPKINENYYYRAEQYKAEQGVLLKLRDTLPTNIDVFLRITAGARSEAGWLGTKEDQFFTFHTLRPFRLENVSARSAVSPRTEEGDTIPIYLN

SEQ ID NO: 102192 - protein, 136 aa, Unknown
  Obtained from environmental sample
  DOMAIN (3)...(105): Cytidine and deoxycytidylate deaminase zinc-binding region
  misc_feature (1)..(136): Xaa is any amino acid
MALGREEQFMRMVIDAAVQNVHSGLGGPFAAMIVRGDEVIAAGTNQVTTANDPTAHAEICAIRAACAKLGSFQLSGCEVYTSCEPCPMCLGALYWARPDHIYFAATRQDAAASGFEDSFIYDEVAHEVGKRNIPSS

SEQ ID NO: 102193 - protein, 139 aa, Unknown
  Obtained from environmental sample
  DOMAIN (7)...(139): Phosphate acetyl/butaryl transferase
  misc_feature (1)..(139): Xaa is any amino acid
MHATHDKWFKTFRERAKGLKRHIVLPEGVDDRTIQAASVILKEGIAKITILGDPKDMVSRAAGLGASVEGATLRNPADDPDTSTFANAFFEARKHKGMTQEKALETMRSPLYFGGMMVKTGQADGFVAGALNTTGETVR

SEQ ID NO: 102194 - protein, 164 aa, Unknown
  Obtained from environmental sample
  DOMAIN (65)...(162): LytTr DNA-binding domain
  misc_feature (1)..(164): Xaa is any amino acid
ALRAFDVHAVDYLLKPFGSERFEEALTRVKARLSQGRASRIQAAELSNTAKSDWPLDRIVVKDGNKVTLIPLASLDYIQAQDDYVLLKTAEKGHLKQQTLASIEQRLDPGHFLRIHRSFIIQLDRLTRLEQTETDSWVAVLQNGARLPVSKSGYARLKEVMGKG

SEQ ID NO: 102195 - protein, 219 aa, Unknown
  Obtained from environmental sample
  DOMAIN (19)...(219): E1-E2 ATPase
  misc_feature (1)..(219): Xaa is any amino acid
MGIATLGAFAINQPAEAVGVMLFYKIGEYFQDIAVDRSKRSITALMNLRPDYANLKKDGAIVRVSPDTLRAGDVIIAKPGEKIPLDGIVLEGSSMLDTSALTGESVPRRARPGDAVLSGCLNQNGVLTIEVQKTFGESAVAKIISLMENAVNKKAKTENFITRFAKYYTPAVVGCALLLAAVVPLFFGGDWREWLQRGLVFLVISCPCALVLSIPLSFF

SEQ ID NO: 102196 - protein, 275 aa, Unknown
  Obtained from environmental sample
  misc_feature (1)..(275): Xaa is any amino acid
MSFAHDQLLDLFDDVFSGREDTPENREDLETMAAALKGTSTDFALRTLQECRQACGGQGFLTENRFTSLRQDLDIYATFEGDNIVLLQLVAKRLVGDYAKALGKQVKSPEGVARFVVERAVDTVLHRTPLKKGVQNVSHLVSGGRLDEGVQHELLTDRVAAKVVAAALALRPAQNASPEKAHEIFGTQQVALIDLARSQADLIRWQAFTDALNKIEDEGTRRIMRRVRDLFGLSVIERDLAWYLMEGRISAALGKAVVARVDELLRSLRPHALDL

SEQ ID NO: 102197 - protein, 231 aa, Unknown
  Obtained from environmental sample
  misc_feature (1)..(231): Xaa is any amino acid
MFLLFRIFPVVFLRVLAFPVGFFYFLFSKNARAFSKRFLKKAEPFIENPDTKKKCRSPFAPLRHIVSFSLALVEKLQSWGGKYRFGNIHFQADDISGLMADLESKKGVFVITSHLGNTELLRGLINLDRTGVSRKVPVTAIVDLGVTKNFNRMIKELNSKYDMGIIAASEIGAHTAPFLEECLSLGGIVTIAGDRTSGGKTEKSLAIPFLGEEALFSQGSFYLAALMRAPV

SEQ ID NO: 102198 - protein, 80 aa, Unknown
  Obtained from environmental sample
  misc_feature (1)..(80): Xaa is any amino acid
MASRRKGRILAFQALYSWDIQFRQTGDASIPDGLLDFSWDDGDAPLDEKSAAFPRLLVSGTVTHIADVDSMIQKHLKTGI

SEQ ID NO: 102199 - protein, 176 aa, Unknown
  Obtained from environmental sample
  misc_feature (1)..(176): Xaa is any amino acid
MEAHAKKIVEFLKTRDVRFIIPVYQRNYDWTTKHCVRLLKDILDVGNNEKSKAHFIGSIVYVHDGTYTTTSIKELTIIDGQQRLTTITLIYLALYYLAKSMGKKERADTIKETYLMSKDEETENEELKLCPTDNNDRALKSLLQDDGHADFTSYSNLIVNFDYFKTSITEENYEKV

SEQ ID NO: 102200 - protein, 73 aa, Unknown
  Obtained from environmental sample
  misc_feature (1)..(73): Xaa is any amino acid
MASKGKVAVALSGGVDSSVVAALLLKDGWEVVGATLNFHTAGFGDQGIVAQAAQAARQLGIEHFVIDCVGEFE

SEQ ID NO: 102201 - protein, 76 aa, Unknown
  Obtained from environmental sample
  DOMAIN (8)...(63): Protein of unknown function (DUF433)
  misc_feature (1)..(76): Xaa is any amino acid
MHELRTHIIVDPEIRFGKPCIKGTRITVGDILQWLSGGMTEQEIIEDYPELQKAHIKAALKCDSASRHPFCKSSLY

SEQ ID NO: 102202 - protein, 219 aa, Unknown
  Obtained from environmental sample
  DOMAIN (67)...(136): HAMP domain
  misc_feature (1)..(219): Xaa is any amino acid
MEALKEEYYAHFMSGQPIGDIFFMHDGAWAVADAPVYNSKGEISGSFEIGLDMTSHQISNAKLKRQVAFIAVIICLVILFALSILISVVVKQLSAVAGVLHNIANGNHTARVHYKARDELGMVSRGLNSMAEELQNQFTHINRLNESTTRFVPFQFMEHLGVSDITKLKLGDNVQRDITVLFFDIRAFSINSEMMTAQDNFLFINQVLSITGPIIREHN

SEQ ID NO: 102203 - protein, 283 aa, Unknown
  Obtained from environmental sample
  misc_feature (1)..(283): Xaa is any amino acid
YKTIKIGNQVWMAENLNFEAKGSKCYDDAPDNCQKYGRLYDWKTAMSACPGGWHLPDTKEWLALVDFAGGDNESAGNKLKAKSGWYENGNGTDNYGFSALPGGNVSSDEGFRSVGTGGVWWSSTEHDGDGAVFMQICYDSSAGCARWGGIGKYALFSVRCLQDDADYYAAKAAEAKARLDAEEEEAKAKIRAAEDMAAAEAIAGRGFKTVNIGGHVWMAENLNIVLPISNCYDGHPDNCKKYGRLYDWKTAMEVCPNGWRLPSDKEWQALVDSAGGSKKAGKF

SEQ ID NO: 102204 - protein, 80 aa, Unknown
  Obtained from environmental sample
  misc_feature (1)..(80): Xaa is any amino acid
AESGWENNGNATDDYGFSALPGGFRYYTVGIFGDNIGFWWTATERSSDDAYYRATGPGDDRVLDSRENKNNGYSVRCVED

SEQ ID NO: 102205 - protein, 300 aa, Unknown
  Obtained from environmental sample
  misc_feature (1)..(300): Xaa is any amino acid
RQQIDQYAAPIKAEEQARKDYYQALRDKYSDYPWLKDQDYDFLDAAQTIINNPGFDGDPELERDRIFAASIYANTLNQPMDVAYQNLDVFHEQWTGKKFVKKTGVKAVIDSFGVSYYSQLLNHYAKEYHDSGQDPEVLKDLQDVTRKLDKLRDNVPKIWQDEYVRQGGWADIGAFLRSITTSAAENALPMGIAIGAGALASTGIGFIAEAFALPAGLTGILTTGASMAAVSETTASQTVGLEYLDLINQGIPDDIAWTNANISAQIQGAIESLGGGVVSGTTKKIIGAATPSIAEKAIAK

SEQ ID NO: 102206 - protein, 255 aa, Unknown
  Obtained from environmental sample
  DOMAIN (1)...(239): Putative modulator of DNA gyrase
  misc_feature (1)..(255): Xaa is any amino acid
DILKSIDMALTNARYAEADKDLAIPPRKIIKPRPLRNYSAAAAKLTLTQLAALAKKTEAAAYAYDRRIDATESALAFTAVGETRLVNTNGADIRQKKTFCGVSLEIAAKDGGKMEAAYAYKHAVAPSQISPLKIGRLAAERAVRMLSAVPAQTGKYDLVLIPSVARDFLSVLSQLFSAENILRGKSLLRGKLGRKIASSRLTLRDDPFLPGAGGSYLYDGEGSPARPRVLVRNGLLRDFYYDYCTARKCGQKRRR

SEQ ID NO: 102207 - protein, 286 aa, Unknown
  Obtained from environmental sample
  misc_feature (1)..(286): Xaa is any amino acid
ETERTIKTFKEKWDISKIEKLAVAGNTTMQHLFLNVDPSGMGELPFTPVFLEERSMKGEALSLSVEEVIVLPSIAAFIGADITAGLTVLDILNIPGASFFIDIGTNGEMALCNQGTLYCCSTAAGPAFEGAEISCGVGGIKGAISGVKLAEDKTAGLSVTTIGNAPPVGICGSGLVDAVAVMLKQGIIDETGSMDTPNNEFNLADGVSLTGRDIRQFQLAKSAILSGIKILCKNAGLSPSEIKNVFVAGGFGFYIHKQNAVNAGIFPGEFLDQLSVCGNLSLQGAE

SEQ ID NO: 102208 - protein, 281 aa, Unknown
  Obtained from environmental sample
  DOMAIN (156)...(274): Response regulator receiver domain
  misc_feature (1)..(281): Xaa is any amino acid
IDEAIPKTIVADDQRLAQVVTNLLSNAVKFTPEEGSIVLNASLIGEENGVCTIQILVSDTGIGISEEQQKKLFTSFQQAESNTTRKYGGTGLGLAISKSIVEMMGGKIGIRSEIGKGSVFTFTIQAPKGSYTKDVPDAGDVIDTGTADVTGIFAGHHVLLAEDVELNREIVRAFLEPTQLSIDCAENGAEAVRMFSEAPEKYSLIFMDVQMPEMDGYEATRHIRAMDIHKAKTIPIIAMTANVFKEDIEKCEAAGMDGHIGKPLDFEELLIKLRGYLLQNP

SEQ ID NO: 102209 - protein, 63 aa, Unknown
  Obtained from environmental sample
  misc_feature (1)..(63): Xaa is any amino acid
LKNLKQKLDVCKAIAFATIKEYLVYRSHMMVSLFVGPVYFIVQYFIWTAVYGGGAPHSGTGVI

SEQ ID NO: 102210 - protein, 260 aa, Unknown
  Obtained from environmental sample
  misc_feature (1)..(260): Xaa is any amino acid
MTYYSPGWKRKRETRDAYWERKTRGLMMFVKDAVEAASNKGVDSPFRGLHRDESGILREAATGRKAAILILHAGASYMTDGGPEGAASADSPSDMIDAFINRDYFKYYKDSLKLDSAGINVIGAEGKTLTIDEVMMCAETSNQDGLNWGIQGILVNQLARQLGIPDLFSTSSGVSAVGAFCIMDFAGYSAGQGFIPPYPSAWVRAFMGWDKPYTVRAGEKYGVKALTSVIDREDGKDDVGGIIGNDTTILLIPLKYNEYY

SEQ ID NO: 102211 - protein, 263 aa, Unknown
  Obtained from environmental sample
  misc_feature (1)..(263): Xaa is any amino acid
MKESEPSILYQLDTSEGFELFASKVHTIIEREGLEAFYVFDCLSDLLKSWCSDMMVGNFFRITCPFLYQLDTIAYFALIRGAHTHGTIARIRETTQLLMDVYNVDGKFYIHPLKVWERYSPTMFFPHLIEGGEAVSITSSADTATLFSRVSRSSQPRDYWNITMDHARTILGGDNNSQEGMKKLLIGWIIGKEARITELAVKHFTLGDILDIAEREIGTGFIGGKSVGMLLARKILEKESGDAARNQFEPHDSYYLGSDIFYT

SEQ ID NO: 102212 - protein, 280 aa, Unknown
  Obtained from environmental sample
  misc_feature (1)..(280): Xaa is any amino acid
SIDSKAELTITVSPGYLVYNTSGGTLTVSGGEIKSTGGGLSRAVVNAGGTIIVSGGTISTTTGYALYTARGNITVSSGAITVTGTSSNAYGIYDDGSAIINISGGTVSGSYMAIYSYQGATLTISGGTVSTTTGSAVYQQLSGTTTITGGTVSATTGDAIYNQSGTVNISGGTVSATTGRAVNNPYSNRITVSQASPSTPTLITSANTNAVQGTIHMAYLISNPTELRLEITGGTISNTSTAANGNAIHNDSSCTISMSGGTVSTTATSGRAINNNRAGA

SEQ ID NO: 102213 - protein, 246 aa, Unknown
  Obtained from environmental sample
  misc_feature (1)..(246): Xaa is any amino acid
MRISPKIDMIPIVHGAEMFAREVRRLCSENKYDCIAVDISPVFQDDLAEAVDELPLISALIAYRQEIYGGLDNAYGSVGIDVDKEDDEDDDLPFCYYIPIDPCDAMIEGVRQARQRRVPFRCVGTPTLRPPIPMLSMPDEYSVEKIGFDAYSLLCRKAVKDMFQGGEIGVVNNDNDQLRSQLKSIFTLCGETINTDMNIVADNLHKLCRQYDNILAIVHISRFDAVMMRLNDESIRRNDTDAASVE

SEQ ID NO: 102214 - protein, 278 aa, Unknown
  Obtained from environmental sample
  misc_feature (1)..(278): Xaa is any amino acid
DTVTEAVTLYAKWTGTPPAAVTITFNTDGGSLVASVTNPYDAALPASYFGNGTNVPSKAGYRFVGWKNGALDVTASAKFTQDADLTAQWVWRVTVKFELGGFKIYDEDDTLTETIPNTGTPPPEVEIDNDTALGGRLPTAPEFEDYIFAGWFNNNSQYNSTAKIIIAPPLGEFTLTARWADENTVYTQNPAIHPGNHFVEVYPDATTTVRVNEAFNIVGLFSNVERNAGILSAKWYRATTPTGEGTVVGEQEGDSHELTLRYMGGTETAAGEFYYWVE

SEQ ID NO: 102215 - protein, 267 aa, Unknown
  Obtained from environmental sample
  misc_feature (1)..(267): Xaa is any amino acid
MGLLQAIWDAQPSGGQKFFNLDLSDCAMTQEVLNLRGPDRGGGVTSGNDTPKGRIVSITLPTAAKRIQSSTGTSAAFNFFTNLQSVTGTEIITIDQNAFSGRTSLTSINFPKVVTIGASAFQNTRLVTVDLPEATTFTGDSVFQQITTLTTVNLPKATTFTNGSNFAGSTFNGCTALTSVSLPKATGFAGSTFNGCTALTTVDLPEATTFGGFTFNGCTALTTVNLPKVTSFNGAQTFQNTGGTALTITMGSSAPYIGINSFQGITA

SEQ ID NO: 102216 - protein, 292 aa, Unknown
  Obtained from environmental sample
  misc_feature (1)..(292): Xaa is any amino acid
IASPGPSLDAAVNAVSLLGKTRERFTLLALAPALRPLLERGIRPDFAASTDGGWANGLHLAGLEESGIPLLFPLFCYAGVARGWQGPLIPFTYGTPVENFFLDARDVIPVPESPTVALFAVFAARRLGAERIIFAGQDFASVSCKGHARGYRFDADAQARSTRIAPIEKYLDSTFRRHDERHAQWRTDSKMFAYSEAFLREVSKSPDFFVLDSGTRSPHLAALPPARLARQVSGRGGAYEFTLSPPAIAYDRLESLYTACLRLENGAAHSVFEDPALRDFFAFARPLAYHHY

SEQ ID NO: 102217 - protein, 275 aa, Unknown
  Obtained from environmental sample
  misc_feature (1)..(275): Xaa is any amino acid
MYFKPGEYKGFTEFRIGFYTHIAGLGRVPVQTRLFGSVVTPPHLANNNATCTFWRSIENFQINGGALNWGVSQAAPVRRMNLKVPAQFDWEKGWASGGFLADCYFTAEVGSWSQQQWYARNSHFVTAFYGVNWNKVIQGSTGKIDDDNWVSGGCVTKEDTTPVIREKPFLYMDSGEYRVFVPALRKDAKGVSWTDADMGPGYSLDLVKDFYIALAGLDTADTINAALADGKHIFFTPGRYELSAPLRVVKAGTVVLGTGYATLIPGPKNRRGALL

SEQ ID NO: 102218 - protein, 98 aa, Unknown
  Obtained from environmental sample
  misc_feature (1)..(98): Xaa is any amino acid
MKSDIKEVLTDNTTAFEEIVAIIERSREKAFHAVNRELIEMHWEIGRYISEKVTASNWGKSVVQEFSRFIQSHFVGIKGFSTPNIWRMKQFYETLCWK

SEQ ID NO: 102219 - protein, 273 aa, Unknown
  Obtained from environmental sample
  DOMAIN (90)...(162): PDZ domain (Also known as DHR or GLGF)
  misc_feature (1)..(273): Xaa is any amino acid
LAALLLSSLWGVGFQIQTLGNKIILASELTPGEVFPADTAGFMTGDKILEIDGNKISYFHEIQENIAANPNKPLPITVERDGKIIQLQVTPSLEKSSGAGKIGVAFWADPVIESVKEGSPAEKAGLKQGDIITSANGQPLRNSFDLRKVLDQEPGSLVLEYQRNGTEGQAVFNTEDIGEEIGISWALINYHTPALSFPKAVVKGVNESFKTLALSIKSLRLLFMGIDLTQAVSGPVRITYMMGDMAAKGGLRSFVELIALISIALCMMNLLPL

SEQ ID NO: 102220 - protein, 74 aa, Unknown
  Obtained from environmental sample
  misc_feature (1)..(74): Xaa is any amino acid
MSKIIADTVTGYSIYNKKAENLKKNNPLKSLYPPFPVKKYDIIYADPPWHYNGKMQYDLTCKKVNNPHFKKTYL

SEQ ID NO: 102221 - protein, 72 aa, Unknown
  Obtained from environmental sample
  misc_feature (1)..(72): Xaa is any amino acid
MPLGVIVVASVAGLFLALPVIAVAARAPWIHFASHITTPASVDALRLSVEAGVWTTAISVVCGVPIALVPRA

SEQ ID NO: 102222 - protein, 271 aa, Unknown
  Obtained from environmental sample
  DOMAIN (133)...(211): Bacterial Ig-like domain (group 2)
  misc_feature (1)..(271): Xaa is any amino acid
VTNSGVVTLVKVGSATITATKAADDTYAQATASYTLTITKATGATLSGNPTVASYTSTTITVNTVTAPTNGQTVEYAANTTTTAPTTGWTDSTTITGLTNGSSYYVYARAKSNDNYNAGTAIRSTATRKLELKTDSIAFANTNNESKVYASGNFTKAITNTGSGSGAITYASSDTGVATVTNSGVVTLVKAGTATITATKAADDEYAQATASYTLTITKATGATLSGNPTVASNTSTTITVNTVTAPSNGQTVEYAANTTTTAPTTGWTDS

SEQ ID NO: 102223 - protein, 286 aa, Unknown
  Obtained from environmental sample
  DOMAIN (152)...(230): Bacterial Ig-like domain (group 2)
  misc_feature (1)..(286): Xaa is any amino acid
TGTGSGAITYASSDTSVATVTNSGVVTLVKVGTATITATKAADDEYAQATASYNLTVTKANGATLSGNVTVASSTSTTITVNTVTAPSNGQTVEYAANTTTTAPTSNWTDSTTITGLTNGSSYYVFARAKTNDNYNVGTAIRSNATTKLQLKTDAIAFANTNNENKVYGSGNFTKAITNTGSGTGAITYASSDTSVATVTNSGVVTLVKAGSATITATKAADDEYAQATASYTLTITKATGGTISGNVTVASKTATSITATAATITSPNTGSQTVEYAAATVNTST

SEQ ID NO: 102224 - protein, 182 aa, Unknown
  Obtained from environmental sample
  misc_feature (1)..(182): Xaa is any amino acid
MYSFIEFLITSISANIVYMAIPLILLSVVVSAVHLDKKGVPVILVALFAGIIFGGDGLKLWQFSDMNLTNKLANLALVFVLFHGGFCTKKENLKQVALPAIGLASWGVVLTAIFTFVCLHFLLGWDRNLSILLSVIISSTDAAAIFSILRKQSLKSKLSSTIEIESAANDPMAVLLTLIAVQ

SEQ ID NO: 102225 - protein, 266 aa, Unknown
  Obtained from environmental sample
  misc_feature (1)..(266): Xaa is any amino acid
EVIKHAVCPVSLSAPVIVTGAGPGLEDALMAVRDGAGQSPPFILAAASSAAALEAQRLSRDMVISTDGGNWARLHLYERFRGKRFSCGHAPSLPLAAALTAALPSQCEAMPILPIADGSRWQALILNELKIPFISLPQRGTVGASSLDLAMALTSGEIFIAGMDLANRDIQTHARPYSFDYLMEEKAGRQAPFYSQTFGRSSLLKAGGSYAVYAGWFEKQLASYPGRLFSLGRNNPVFNSLKTTSFLPEAINTRRPSFYKTVTVNN

SEQ ID NO: 102226 - protein, 162 aa, Unknown
  Obtained from environmental sample
  misc_feature (1)..(162): Xaa is any amino acid
LDPLELDSSESGELDIGIPETDIPGIEEELEIPVDLPDFADEEPESNSADTEFNADLSLIPEGFVVEADDFQPKIEEPKGEVISVEDLDEEDLLDKVEEVQPAGNDSVAIDSIPTHLKKELKAVLSYMDHLLEALPDSQIEEFAQSEYFDTYKKLFKELGLV

SEQ ID NO: 102227 - protein, 229 aa, Unknown
  Obtained from environmental sample
  DOMAIN (13)...(229): Histidinol dehydrogenase
  misc_feature (1)..(229): Xaa is any amino acid
VKIIQSGDFDSYWKTETKRSDDTGTEKTVKKIIAQVRVCGDAAVRKFASKFDKSSPQKLEVPLAEAKNALNQLRENDRALVEAMELAALHIKRFSDKQREQFADFEFEMEPGLVTGQRIIPVQRAAIYIPGGRFPLFSSVLMCMIPAFCAGVEEVILSSPPTQDGLPDKKILAAAMIASQIGIHADLRRGSFCDAKTPAKAIETAASMPPNNKNVRIFAMGGAQAIAAL

SEQ ID NO: 102228 - protein, 66 aa, Unknown
  Obtained from environmental sample
  misc_feature (1)..(66): Xaa is any amino acid
AESNLFFIKRPGIKGADFFAALREKGILVRHFNKDKIKDYLRVSMGTDEDMDTFFDACKEIIRREA

SEQ ID NO: 102229 - protein, 143 aa, Unknown
  Obtained from environmental sample
  DOMAIN (73)...(143): DHH family
  misc_feature (1)..(143): Xaa is any amino acid
LREKITLRSVDRDAVAELAAELNVPAAAATILVGRGLTTFDQCKAFFRPNTDSFLDPFLFADMEKAAARIMAAIASGEKILVYGDYDVDGVTATALLMRVLRRLEADCEYYLPNRLTEGYGISETGIRRAAEIGAALIISGTA

SEQ ID NO: 102230 - protein, 292 aa, Unknown
  Obtained from environmental sample
  DOMAIN (4)...(173): Transglycosylase
  misc_feature (1)..(292): Xaa is any amino acid
VLWFSALDRKGNTLRVFPAADGVKREWLPIDEIPDGVLRIFVRAEDARFYLHPGIDPAAVVASALRNMRAGRIVSGASTITMQLARLLKPRSHGWRGKLPEALDALRLEARLSKKQILELWINGIPFGGNIEGLAAASRARFGRTANGLDDARAVLLAVIPRRPGLYDPARSESAAINAALALAKRCRLNLNEAALTEAAAEAEPGKLADEKTPFHAPHFTDRIAAASAKAEGIRQPVHTTLDLDLQLYAEQRLASELTLLANNRVGNGAVLAIDNANGEVLVYIGSVSWFD

SEQ ID NO: 102231 - protein, 241 aa, Unknown
  Obtained from environmental sample
  misc_feature (1)..(241): Xaa is any amino acid
MGCSTMIASSMTTDSYIRDIVNHPAFKGFGERMLSCDDNSAYYNTRITDVASLMPYHQNVNPAVVVNALNYMINEAQSGKTIFYDFYTERQKKADPAKENTGLFFFRGKPGAPFAIVCPGGGFAYLGSLHEGFPLALEISKKGYNAFVIRYQIGGERFACEDLAAAIAYIFTNSQTLGVNVENYSLWGGSAGGRMVAQLSSYGTAFYGERDCPKPAVAVLFYADSSDFTVYNPPTFAVLGA

SEQ ID NO: 102232 - protein, 217 aa, Unknown
  Obtained from environmental sample
  DOMAIN (148)...(212): DHHA1 domain
  misc_feature (1)..(217): Xaa is any amino acid
VFIIDHHELSQFHFSGICDSTAASTCELAVELAVAMGVTIESQAAFAAYTGMVHDTGSFAYQKTNPRSFRAAITLLDLGVSPTDVYQELHENTALRSLLLQKRAFASLEIHSGGQAASQMLRLEDFTETGAVNDDSDGFVNVPLRVREIMVSVLVKESRKGKVKCSMRSKGDIDVSKIAHDFGGGGHVNAAGFNSDLNIDQTLAVALTKINGCLGKK

SEQ ID NO: 102233 - protein, 279 aa, Unknown
  Obtained from environmental sample
  DOMAIN (191)...(279): EAL domain
  misc_feature (1)..(279): Xaa is any amino acid
NYVGTFADSAGRMSQSFSKHYYDSMTKLPNRLLLQDRLEFMINHARRNNQLMSLLLLDIDRFKMINDTFGYEAGDALLRTTAERLVTCVRDVDVVFRSGDDEFAIILEEIARPEDAAKVARRVLDSCAEPLQIGGRDIYATICIGISIFPTDGDGKVQILQNAEAAMRRAKEIGLNSFEHYKPNMNARALERLSLESDLRNAVGNAQLCAFYQPQVEIKSGRITGAEALLRWRHPDLGMVQPGQFIPIAEDTGLILSIGEWVLRTACIEARKSQEGGNP

SEQ ID NO: 102234 - protein, 92 aa, Unknown
  Obtained from environmental sample
  misc_feature (1)..(92): Xaa is any amino acid
TDSHVRLLYSMLGLVNGGGILLYFPVDTGYAVLRMDSNGHDQRRGFIGLEAGEASFNNFHLSPEGILSALLADEWKVKVVWWRMDGFMGMRN

SEQ ID NO: 102235 - protein, 186 aa, Unknown
  Obtained from environmental sample
  DOMAIN (29)...(184): YjeF-related protein N-terminus
  misc_feature (1)..(186): Xaa is any amino acid
MKPVRCNEGGVLVSAEGARALDAEASSEWGLEPSALVEAAGRACAAVFSKEFLKGRHCINSFTVLAGSGNNAADALVMLRALILGGYTSASDCQVFASRLEAGRLEADNKTPLSQALLSIQKLGVQTREWDPLEAQSALCKTDFIIDGITGTGLNSPLRGAALEMAEAVNRYIDKVNNANFKRNRL

SEQ ID NO: 102236 - protein, 265 aa, Unknown
  Obtained from environmental sample
  misc_feature (1)..(265): Xaa is any amino acid
LAKLFAEAPSCQKCGNHAGALLAYKRIHRQFPDFADAWTNASVLLIDMGRLEEGVAAAERVISLDGGNQASFYMLAEGHYRLADFEDSARHLEEAYGNYAKVFELNPRHVPTILRMADICSAALFYDKALELSRLALQYEPENAYAHFCSGKTNMVTMDYAGAEADFRRALELNANIAEAHQCLNFILLMAGRYREGWRHLRASGLGFLGANWHDFGKPRWMGEPLGGRTLLVYGQSGVCGYGDNIQFARFFKYIKERHDCRIVL

SEQ ID NO: 102237 - protein, 276 aa, Unknown
  Obtained from environmental sample
  DOMAIN (9)...(42): Tetratricopeptide repeat
  misc_feature (1)..(276): Xaa is any amino acid
VLEIAPDHVPALTNLAAIRANCGDFEEAIRLHDRAVSLDPSNSALVGRRGHAKVQVLDMEGAEADLKRALELNAGNEDAGLALVHVWLRTYRYSDAWRYFKVRQHLTELSINARGFGKPFWKGGAIGNATLLVYSERGFGDTIQFSRFLPQAKAMSGARVLLSVFGPLARFMDGVLGADAVVLQDEPLPAFDYVAPITELPVILEIDPYSLASPTRVNIDQSPAPELDRQGFKIGLVWAGSPKHPADAERSIPARLLDALADVPGGDNIVWCGLQV

SEQ ID NO: 102238 - protein, 290 aa, Unknown
  Obtained from environmental sample
  misc_feature (1)..(290): Xaa is any amino acid
VLNINPYLVDASNIFIENRSKPLCDVPEIGIGNKPIDGGNYLFTDEERKAFLKLEHDAKKWFKKWIGSDEFINGYFRYCLWLGDCPPDVLRKMPECMKRVNAVRKYRLASKSAGTRELAKMPCRFHVENMPSNMYLAIPETSSEKREYIPMGFIAPNILSSNAIKIIPDATLYHFGILTSNVHNAWTRAVCGRLKSDYRYSKDIVYNNFPWPTVTSVQEAAIERLAQAVLDARAKFPDSSLADLYDPLTMPPALRKTHHALDRAVMKLYKFDSDMSEVEIVAELMVKYPD

SEQ ID NO: 102239 - protein, 76 aa, Unknown
  Obtained from environmental sample
  misc_feature (1)..(76): Xaa is any amino acid
LDKARWSAIESLQGVEYFDRNTIFAYLLKLLILERRSAMQPETGFSEYKSLYASIMDGVNVFDGVQTGVSPAGESK

SEQ ID NO: 102240 - protein, 310 aa, Unknown
  Obtained from environmental sample
  DOMAIN (140)...(176): Sel1 repeat
  misc_feature (1)..(310): Xaa is any amino acid
MYYHGSDGVEEDEEQALVWYRKAAEQGYAHAQYRMGDLYYFGLCGVEDDDAEAVRWFVKAAGQGHAEAQRCLGEMHYYGIGGLEEDEAEAVSWFRKAAGQGDAEAQYRLAEMYHRGAGGLKEDEAEALAWCRKSADQGCPDALYQLGCLYEEGGAGLEADEMEAAAWFGLAAARGHVSAQYRLAEMYYFGDCGLAEDEGQARRLYRQAAREGHAGAQFRLAELYEAGAGGLEEDDVAAAGWYRLSAEQGHAGAQFELGEIYHYGTDSIDPDGEEAVLWYERSAEQGHADAQYELAGMYEIGEGGLEESDE

SEQ ID NO: 102241 - protein, 90 aa, Unknown
  Obtained from environmental sample
  misc_feature (1)..(90): Xaa is any amino acid
VSYFTADKALRIASAGPLLGNRLPENPAYECQVSCVDWYGNTRPIFYQGRIFPLIGRELAEGRIEAGRMDELVRLDLTAKPGVAAARPES

SEQ ID NO: 102242 - protein, 232 aa, Unknown
  Obtained from environmental sample
  DOMAIN (82)...(172): ParB-like nuclease domain
  misc_feature (1)..(232): Xaa is any amino acid
MARRIGLGRGLDALLDNNDDEPQPAPSSSGKKTTGISLQETVIHETTILQSDSLQETEQQAITLQATALQATALPTASQGTVQLPPDKLVPNPGQPRKNFNETELQELADSIKTYGIIQPVIAADAGDGTYIIIAGERRTRAAVLAGLDTIPVIIRDYTDQKRLEVSLVENIQRTDLNPIEEASAYKNLMDFSGLSQDELALRVGKNRSTVANALRLLNLPVEFKKALKKAN

SEQ ID NO: 102243 - protein, 284 aa, Unknown
  Obtained from environmental sample
  misc_feature (1)..(284): Xaa is any amino acid
ESFGNLKSLKTFNLEKGYDETLDEDPEKTKKDLFEDIQKDDIIRFPESFGGLSSLEELHISGNIAPLPESFGKLRSLKKLNLCFEVFKENHHKGTSWGGRAYVVNEFRALPESFGGLASLECFSIDGGNIKTLPDSFGNLGALKTLCIENSQLESLPDSFGNLGNLESLNINNGLNRYDEEEKQNAPLDLPAAIGKLSKLKELDIDAALQPIPDWLGGLTSLTKLIITSHTITVLPDSICNLPSLAEFFINCEKLAALPENIGNLKNLTGLFIDSQALTTLPDQ

SEQ ID NO: 102244 - protein, 201 aa, Unknown
  Obtained from environmental sample
  misc_feature (1)..(201): Xaa is any amino acid
AFLALVMLWSMDNELLELIASGNVAYELARPLSLYSFWFSRVLAFRIARSALRCFPIFIVAFLLPGSWGFHLPRDLQAFALFIPSLVLAAFIATALSMIICLLTFVSLNPYGARLFVGVAGEFLMGGIIPIPFMPPLLQRITTLLPFRYTADFPFRVYSGHIVGSEALLGLIVQLFWFLALIGLGLWGFRAALKRLVIQGG

SEQ ID NO: 102245 - protein, 201 aa, Unknown
  Obtained from environmental sample
  DOMAIN (1)...(196): Bacterial sodium:citrate symporter
  misc_feature (1)..(201): Xaa is any amino acid
MMVHGADAEAMKLDPEYQNAREAVNLAQMGTGLFIATSFFAFGIIINKFVPDIHGYAWMIISVALVKAFGLLPQKFEICCYQWFQFVMRNLTGVLLVGIGAAYTDLHQIAQAFSGEYVLLVFVTVIGAILGAGIIGRLVGFFPIDSAITAGLCMANMGGTGDVAVLSAADRMELMPFAQISSRIGGAFMLILATILLQFLR

SEQ ID NO: 102246 - protein, 89 aa, Unknown
  Obtained from environmental sample
  misc_feature (1)..(89): Xaa is any amino acid
MKRVYVNEKWCLGCHLCEYYCAFAGTNEKDMARALKDIKINPKITIEKKDGISFAIACRHCDEPLCVKGCITGALSVPMALSPLTKRNA

SEQ ID NO: 102247 - protein, 124 aa, Unknown
  Obtained from environmental sample
  misc_feature (1)..(124): Xaa is any amino acid
MNQLETSAKLHIQDQIRQEKYDLVWSYMSDFENANNPNIENKKSIQMWESISKYKSSENVLMLGSKIMEKGIRANDALHIACAIDSQCEYFITTDAGLTNKKIEEIKIINPIDFVRKMEERNEN

SEQ ID NO: 102248 - protein, 70 aa, Unknown
  Obtained from environmental sample
  misc_feature (1)..(70): Xaa is any amino acid
MRTETVLKAEAIDLLLRTFGVLETERFITSIKNNNFDYTEWHKDLWKEKSIVEIHNMATEFEKVKNNYIS

SEQ ID NO: 102249 - protein, 302 aa, Unknown
  Obtained from environmental sample
  misc_feature (1)..(302): Xaa is any amino acid
NKITVQVKSALGGSMNRHQNTHPERNNRFFGCSAAIFITAFIFVFAGCSSPDESGITKQTPTASDYNIKGLGLRIFNGESQQVKITPKAGKSTGNIKVYYNGLITEPNNIGSYTVTFDVTAAPGWNAVNGLYAGSMTISEVKDAILLISDVWAEGNIATLDREQWFKFFATETTQKEITQYIHFDPGTVNSVEVQLYDTADPTREEKAFLDRYILYTSLTLAPGKEYYIKVTGNASGKYKIGFNDKIIPPSIALPNKDEITPLIADNWANGEIAASDKEQWFKFTAAAAAQYIHFDSGTWIM

SEQ ID NO: 102250 - protein, 292 aa, Unknown
  Obtained from environmental sample
  DOMAIN (3)...(292): 4-alpha-glucanotransferase
  misc_feature (1)..(292): Xaa is any amino acid
KIQDKAAAINKEFGQETRFPYEKVLRAKMSLLREIYKENESAIEKKAGPKSSLGAWIKDNPWIKPFAVYRRLKEAHEEKSWKEWKDHRDVTPEEIEAMWEDPKLRGDHLFWAWLQEALDTQFGAAAKAVAEAGIVLEGDLPILMNDDSCDVWAHKEIFDQELSAGAPPDMYSPEGQNWGFPLHNWAEQEKDNFAWWKQRLAVAGKYYQAYRIDHVLGFFRIWASSPRDYSSALGRYIPYTPITNSDLKKLGFDKGRIKWISLPHIPTNELLDAMRANHINEADIPAATKKIF

SEQ ID NO: 102251 - protein, 299 aa, Unknown
  Obtained from environmental sample
  DOMAIN (125)...(297): RNA polymerase Rpb1, domain 5
  misc_feature (1)..(299): Xaa is any amino acid
GFFCGIAEMVIPAEKQTLLDDATKKANEIRDLYDQGAVTDGERYNQIIDLWSRTTSDVAQKQWDLLSRDKDGFNPLFMMADSGARGSREQIKQLSGMRGLMQKPTRKIGEHEVIENPITSCFRDGLNSLEYFISTHGARKGLSDTALKTADAGYLTRRLVDVAQNLVITEEDCCEIKITAERISVEHYENIKDTSEALSLFTKRLSGYVAANDISHPETKEVLVKRGEFLEKEILRKLMFIELKFINAINYEHLRKKMLGTTLEKAVHGEDGKTVVSANSIINDSKLMEMIKTGVKAPI

SEQ ID NO: 102252 - protein, 192 aa, Unknown
  Obtained from environmental sample
  DOMAIN (50)...(172): Peptidase family M23
  misc_feature (1)..(192): Xaa is any amino acid
MNEKTNIRKSVVIGGLICVNSLFAQQLDFRSPLNIPLELSASFAELRANAFHTGLDFKTQQKEGLPIYAVADGTLSRVVVSSVGYGKALYISHANGMMSVYAHLSEFIPIIENVVKERQYAKKSFELDIFPDEPLIFKKGELIGYSGNTGSSGGPHLHFELRNKNGTTVLNPAFLGYAVKDDIPTTISALAI

SEQ ID NO: 102253 - protein, 264 aa, Unknown
  Obtained from environmental sample
  DOMAIN (1)...(64): S1 RNA binding domain
  misc_feature (1)..(264): Xaa is any amino acid
MGEIVSGIVQRRDKGGWIINLGRTEALLPKDEQIPREHYKRGDRVQALIIDVRKEGRGPQVLISRAHRDYMAALFRREVPEVDDSTVQIMGVARDPGSRAKVAVLSRERDVDPVGACVGVRGSRIQNIVQELRGERIDIVVWNPEIAAYARNALAPAMVSRIIVDEEENLLEVIVPDDQLTNAIGRKGQNVKLAAKLLGWKIDIFTETRYNEANAIGRGLEQVASVAEVSIENLLAAGYSSLDKLRAAGDEELEHALNISRVRI

SEQ ID NO: 102254 - protein, 263 aa, Unknown
  Obtained from environmental sample
  DOMAIN (198)...(263): Histidine kinase
  misc_feature (1)..(263): Xaa is any amino acid
LLQLKDFSGCKYLYALAPKKETIWQFIIDGSAKPEDVENFSVIGTEEDTSSYDSAFKKAWYSGKTEHGNLTKQEGWGYLISFYIPIINSNGVTVGIAACDYDGEDLHNTIISNIWRQLIIGCISVVICILLVFIISYPIQKLTKVVAEIGAGNLDTVIEGSYNNEYNIIKDSVNSMVEEIKKYIEIKLQIERKLTQSRIYIVLSQIQPHFLYNSLTVISRLCDKDPAEAKKATINFSNYLRANMNLLESLTPIPFENELHHTI

SEQ ID NO: 102255 - protein, 252 aa, Unknown
  Obtained from environmental sample
  DOMAIN (1)...(180): Formyl transferase
  misc_feature (1)..(252): Xaa is any amino acid
LRVLFAGSPAIAVPSLEAVYRQDGIELSGVLTNPDSPKGRHGTPQPTEVAEAAQKLNVSVLKPLKLDASVREQIGLLKPDILVSFAYGRIFGPKFLALFPLGGINIHPSLLPKYRGPSPIQAAILNRDTETGITVQALALEMDQGDILSTEQIPLSGRETAGSLSELAAQKGAQMLTEVLIKIANGTVTRTAHNHGEASYCKLISRDDGLIDWNFSAAQIEAKIRAFDPWPLCTTNHNGRELFILEAGIFKG

SEQ ID NO: 102256 - protein, 276 aa, Unknown
  Obtained from environmental sample
  misc_feature (1)..(276): Xaa is any amino acid
MPDYVPAGSVQARILQEARVQEATAFDQYSKGEYQTSLISFETALNLLISIDNQEEIAFVRHNKANVLIALKNLADAETELELSLKANRSFLRKDGSLEYPLRVAANLASKGTIYEERGELEKAFSHYSDALEMLQKNRGFASSIAQQHNNCGYILLKQKKFEEANVQFQFALSRAKSVYAHSEVGAAYNGIGKCQTAMNRMDLALNAFANALTAYKAAESPEDIAISLKALSATYEALGDTEKAIEHAERAYNINRILKLDTRWRQDLDDLIRLH

SEQ ID NO: 102257 - protein, 216 aa, Unknown
  Obtained from environmental sample
  DOMAIN (104)...(209): Peptidase family M23
  misc_feature (1)..(216): Xaa is any amino acid
SEKGDIVHVFKDGESLTQISRFAIGKYNSLVSTEAMVKKYLKDNDLSLDSKIKAGDTIRLKLPTFNNPQHKTMQGAWNFFTGLLNDSLAYITELYNPHQTATARRHDGIDVAGRKGTRILAPFSGIAWTMEDERGGLMIAIAREKDLLVFMHCEQRFYLNGQAVMEGDPVASVGSSGHTTGPHVHVTAGKIAKNGERNIGGLRYNVLNPFEWHKEI

SEQ ID NO: 102258 - protein, 166 aa, Unknown
  Obtained from environmental sample
  misc_feature (1)..(166): Xaa is any amino acid
MSDIISELVGDDRSSLEKKERVNRARKDFGFFCQYYLPDYFFTDPADYQKILYNVADTRSLSEDTSNSLKPFINERYHSLLKPTEKLARAMFVEPREHGKTVRWSFAYVLWSIVTGKNRYTLLIGPSGDAARENLINIKIELEEDELLLNDFTDLKCNVWRDDRIE

SEQ ID NO: 102259 - protein, 287 aa, Unknown
  Obtained from environmental sample
  misc_feature (1)..(287): Xaa is any amino acid
EDDIIKLNKTSPELRAPAHMVSVALPIETRYTELTDRIFDLIAKKKALWAQIPAKGSELSVTARNLLRDLYDRQKNSVRLAESDPTGFHAIMGATEMGADILEQVMSLRRDIWQAIAIVQSGDGIEEMQKFTGSVKDLQAAVETLRPFFVAAEKKEMLDNMLFGLTEYGGVLNEFIKTCVELNQLNAARSQLRLSLSREIEVATGIVTDRVREFSRANIHTVTRTLSIVSWSTIIGVVLSLLITFFIARSISRPLNRIVGLAQRAGQGDLTIEKEDFGYDARDEMGC

SEQ ID NO: 102260 - protein, 300 aa, Unknown
  Obtained from environmental sample
  DOMAIN (23)...(299): Methyl-accepting chemotaxis protein (MCP) signaling domain
  misc_feature (1)..(300): Xaa is any amino acid
GGELSDGAHDLSAIAEATNASMEEVRATITQVTTASEANGTALEQSNAGIEEMSAGANTMAKSATDSAAFISQTTEASNKAVQTVHNVIEGMRDVDKNAKESEAKIRQLVSSVDNVSSFVSVITGIADQTNLLALNAAIEAARAGEVGRGFAVVAEEVRKLAEESARAAQNVNGIIQELQTGAHESIGATTEAGRLLTSTLDHAEHALRELNDALSQMQKANDSIQNIAAVAEEQAASSKEMASSLDSATKASAEVVGIILGINRSADTTTRVMEGVAKHAESMAIHSHTLSELLSTFQL

SEQ ID NO: 102261 - protein, 139 aa, Unknown
  Obtained from environmental sample
  misc_feature (1)..(139): Xaa is any amino acid
MTVLIDTNVILDVLLKRERFMWKSSNVLLLSEKEIIDGYVTASSITDIFYITNKTYKDKRKSMGLLKELLKTIRIAAVSGEEIYRAIELDWNDFEDAVQYTAGEQLHADYIITRDTGGYINSSITVITPSEFLDLIENS

SEQ ID NO: 102262 - protein, 148 aa, Unknown
  Obtained from environmental sample
  misc_feature (1)..(148): Xaa is any amino acid
VDKEGGPEADGPQAEAPPGGHGGAGGLQKKTAELTAANPGVPVFFFDEARFGLRPAFGRRWAQKGERPVAVVRTGYLNFYAYSAVCPATGEDFTLRLSRVNTDVMNVFLSEMAAFLGGRECILVMDRAGWHVSKDLRVPPNIRMALLP

SEQ ID NO: 102263 - protein, 292 aa, Unknown
  Obtained from environmental sample
  misc_feature (1)..(292): Xaa is any amino acid
VAAGKAEEAGVNPIYGIRVDELVMRDGKVCGVKAGDDELEADVVILADGSNSILGEKLGMVRRFTPSTIAVGAKEILELPREVIQQRFNLGDNDGMAWLSAGYASAGMFGGGLIYTNLDTVSVGVVAGLHGIEKSKKTVPEMLDDFKAHPAVAPYLKDAKLVEYSGHTVPEGGLKMIPKIVGNGVLIVGDAAGMCINVGYTVRGMDLAVASGEAAANAVIEAHKAGNFSESTLSKYQKNLDNSFVMKDLKLYKRLPGFLEHTKRIFSGYPEMVEGIMLDMFTMDGRPQKALM

SEQ ID NO: 102264 - protein, 285 aa, Unknown
  Obtained from environmental sample
  DOMAIN (1)...(109): DEAD/DEAH box helicase
  misc_feature (1)..(285): Xaa is any amino acid
DPASGLNLKIATYDGDTPESLRVSARDTGRIIISNPDMLHTGILPNHPKWIKFFSQLKFVVIDEAHAYRGVLGSHVANVIRRLRRVAAFYGARPQFILCSATIGNPRELAEALIGLPVTLVDKNGAPRGEKRIVLYNPPLVDTVQGIRRSAVTESRRWMIALLRAGIKTIMFAHSRVKTEVAASYVNEDLANIFTDNFCIRVEPYRGGLLPNERREIEKGLRDGTIQGVVSTNALELGIDIGGLDASVVAGFPGSFNSFWQQAGRAGRRGGTSVSVFVATASPID

SEQ ID NO: 102265 - protein, 244 aa, Unknown
  Obtained from environmental sample
  DOMAIN (5)...(151): short chain dehydrogenase
  misc_feature (1)..(244): Xaa is any amino acid
NCFYSGCKPEGAQKLADAINSEEGRTAAIAIKVNVCDEASVEAMFRAIAETSGGLDLCVSNAGVLKAGSVLEQPLDDFKFVTDINYTGFFIICKHAGRFLRTQHYTAPDWKTDIVQINSKSGLEGSNKNGAYAGGKFGGLGLVESFALELVEYNIKVNAICPGNFLDGPLWSDPEKGLFVQYLKTGKVKGAQTIADVRAFYESRVPMKRGCTGKDLARALFYIVEQEYETGQAIPVTGGQVMLH

SEQ ID NO: 102266 - protein, 278 aa, Unknown
  Obtained from environmental sample
  DOMAIN (1)...(278): tRNA synthetases class I (K)
  misc_feature (1)..(278): Xaa is any amino acid
DKFRDEDHKIQGEWWPVSVFCEKCNRDETNIDGWDGQWGLSYTCELCGNKETVDLRKTGAVKLVWRVDWPMRWEYEKVDFEPAGKDHHSQGGSFDTARHVCKDVYGWDAPVTFRYDFIGIKGTPGKMSSSKGKVIDLPDVLRVYTPEIARYLFAGTKPNVEFTISFDLDVIKIYEDYDKTERIAWKIESAKDEGTYQWEKRIYELSQVATDSAGKPAMPSVKPYQVPFRHFCNLIQIADGDVEKALAGLGREAVPPEPEQLPALRRRAVCAKYWGRNA

SEQ ID NO: 102267 - protein, 58 aa, Unknown
  Obtained from environmental sample
  misc_feature (1)..(58): Xaa is any amino acid
MIKNISVVCYKSKKLANGESPLMICLYGEGSRAYKSLGISINPKHWDFQKNEVKKDVP

SEQ ID NO: 102268 - protein, 92 aa, Unknown
  Obtained from environmental sample
  misc_feature (1)..(92): Xaa is any amino acid
MKKNVKKKSLFDDIKTLIEQSKQQISVAVNSTMTMLYWRVGNRIKTEILQNKRAEYGKEVVKQLADDLTRQYGNGWSEKQVEALSPLCRNFS

SEQ ID NO: 102269 - protein, 282 aa, Unknown
  Obtained from environmental sample
  DOMAIN (118)...(187): RNA polymerase Rpb2, domain 3
  misc_feature (1)..(282): Xaa is any amino acid
NSKVYGNSEQPFAVPSADTMTLTKEDFISVIRYMIGLYNGEEGYSLDDIDHLGNRRIRSVGELVANQISIGITRILRSVRENFSSKERDGVLTPTDLINSRTVNSMVAAFFGSSQLSQFMDQINPLSELTNKRRISALGPGGLSRDRAGLEVRDVHHSHYGRLCPIETPEGANIGLINSLATFSIVNHFGFIETPYRIVGLLPFQDDAGKDYEFPESKWYAGIMKSFFGDSNQQLLTQTEIGKNDVKIAREKLSGKQLEHFDLFCNKSFEFDFGDSITIIKM

SEQ ID NO: 102270 - protein, 221 aa, Unknown
  Obtained from environmental sample
  DOMAIN (2)...(198): Thiamine biosynthesis protein (ThiI)
  misc_feature (1)..(221): Xaa is any amino acid
VGTAGRGLLLLSGGIDSPVAGYLMASRGMALDAVYFHAFPYTSEKALEKTIKLAEILGRYARGIRLFVIGFTPIQARIKEKAPEPWRTILLRMAMMDCAEKLAISERDKCLISGESLSQVASQTIENITCVQHRLKLPVLRPLIGTNKEDIIAMGEAIGTYKTSILPYEDCCVLFSPPHPVLRGDPIEAGKLYEGLSAEPLIEEALKARKLSNVSFFHKTS

SEQ ID NO: 102271 - protein, 237 aa, Unknown
  Obtained from environmental sample
  misc_feature (1)..(237): Xaa is any amino acid
MLDKSVQDALEGKGADGSADAEFLIPPVEHIEIRPNVIYRLCAEKKVIHLGCADHLQLIDARINGGCHIHRQLSYVAAECLGIDINEEAVTRLHRRGISNVIAEDITKPGISAIADKYWDWIVMADMLEYIHNPVQFLRDIDAAYGKNIGGLIITVPNAFGQLLYGLPHSGKETVNCDQCYWFTPYTLCKVVHTAGYTVEDFIMCSYENPTHVIRSISPTLKQKPIFLNTIALTARK

SEQ ID NO: 102272 - protein, 288 aa, Unknown
  Obtained from environmental sample
  misc_feature (1)..(288): Xaa is any amino acid
IKSPRYFTKRGYSERRIYDILVVAHKIIRLHEEQGTERCDMDIVTNHIKSYEIRYQNGEIGKSALGAHKGIVEYIVQICETGKINENRRSPITDFSNEFESILSDILGRTDKWSSKTCREYYNHARTFFRWLNQQGHVDLNCVDAEIVRRYLTHCSSKMTGGSLTNTRRALKETLTFMSEDGLLSAEMQRLFLFSIPIVKKIQPFIPQDDIAAVLNVIDRTTPVGKRDYAMILLAAVTGLRSIDIRELSLASIEWSCGEIRVIQEKTGNALALPLTTDAGKALREYIK

SEQ ID NO: 102273 - protein, 51 aa, Unknown
  Obtained from environmental sample
  misc_feature (1)..(51): Xaa is any amino acid
IAQLVELEKVETPMYVTVSLNEAFVESGDFAKTTLHDGDNVEFLYFMGGGW

SEQ ID NO: 102274 - protein, 210 aa, Unknown
  Obtained from environmental sample
  DOMAIN (2)...(209): CobQ/CobB/MinD/ParA nucleotide binding domain
  misc_feature (1)..(210): Xaa is any amino acid
MKIAISGKGGVGKTTLAAVLARLYAQEGKKVLAVDVDPDANLGLALGFSGEEIAAIVPIAKMKDLIEERTGASGGGKFFKINPRVDDIPDRYAKEKNGVKFLVMGTVETGGGGCVCPEHVMVKQLLSHLVIARDEVVIMDMEAGLEHLGRGTASMMDRFIVVVEPGSRSVQTFHRVKQLASDLGERKCRPLRTRYAARKTRIISKALFRM

SEQ ID NO: 102275 - protein, 300 aa, Unknown
  Obtained from environmental sample
  misc_feature (1)..(300): Xaa is any amino acid
GSPKTVQIYSITPVTFTGVTANGSSSQTTTQIELTFDKAITGLSASNITLSGVTGVTKGTLSGSGPKYTLPISGFTAGGTLNVVVSSPPDYYVSGTPKDVTIYYATNVTFNGVSADGGTSQTTTTLTLTFSQAIPGLSADDITLTGVTGVNKGTLTASGATYTLPISGFTSGGTLNVEVAKSGFNISGSPKTVTVYYATAVAFNSVTANGSTSQTTTQLTLTFDKAITGLSASNITLSGVSGVSRGTLSGSGTTYTLRISGFTAGGTLTVTVVSPAGYNVSGSPKTVTIYVKPVITIGTQ

SEQ ID NO: 102276 - protein, 244 aa, Unknown
  Obtained from environmental sample
  misc_feature (1)..(244): Xaa is any amino acid
MLLKYFKFVSFCIIAAFSQIVFAQVHSADTNFIDKKGRKQGPWKKIDLDKLSYTGQFKDDRPYGQFRYFDKYNRTATILDYFRNGYAAKVTHFHPNGKLRATGFYLEQLRDSVWQIYDTVERLVKREHYLNGMLHGLSELFDNEGHCIETQEWYRDLRNGRWWQKTEKGTQSTIYKFNLSHGVYEAHYANEKLNIKGQYEEGLKEGTWYFYHDDGLLDRVIQFKHNQLVKKQVALNVKGKDILM

SEQ ID NO: 102277 - protein, 274 aa, Unknown
  Obtained from environmental sample
  DOMAIN (2)...(139): ABC transporter
  misc_feature (1)..(274): Xaa is any amino acid
SPQQRHTGYLFQNYALFPNMTVRQNILCGLYNEKAKAKREYTFQKMIELMQLRGLEKLKLAQLSGGQQQRVALARILAGNPSLLMLDEPFSALDSHLREQVQTETQGLLREYGKESILVTHSQDEAYQMCDNIALIDSGKLIAYKETKKLFISPGSRRAALLTGCKNIVDVQKTGEHSVYVPAWNVQFTTAEPVRDDLCAIGIRAHHFDTEATQNRHPVRIIDEMESPFEYKIQFRYESQLPESQNIWWHTPKGKGVERSPSALGVVGDEIMLL

SEQ ID NO: 102278 - protein, 156 aa, Unknown
  Obtained from environmental sample
  misc_feature (1)..(156): Xaa is any amino acid
MKNIIFLFAGIVFSAALPAQTTPPEPYGAIPTKHQMEWQKLEYYMFIHFGPNTFNDVEWGDGKENPKSFNPTNLDCRQWAATAKAAGMKGIIITAKHHDGFCLWPSRYSTHTVRESAWKNGTGDVLRELSEACREYGLKFGVYLSPWDQNHPSYGT

SEQ ID NO: 102279 - protein, 310 aa, Unknown
  Obtained from environmental sample
  DOMAIN (3)...(228): NeuB family
  misc_feature (1)..(310): Xaa is any amino acid
TDVFDFAFKLQLRDPSIIHPDFTGRMDISQIKRFTETRLREEDFTALKDEIERQGFISMCTPFDEPSVDAMLRMGFQVFKVASCSFGDWPLMEAFGKVDKPIILSTACADEKTLDAVVSFFRNRNKSFSIMHCVSAYPTESRGLAAGQIRYLKGRYPDVPVGFSTHEAPDNHTSIFMAVGAGAEIFEKHVGIPTDKYKINDYSCTPEQIGSWLAAAREAYEMYGTESGRMGFTESAVKGMGAFTRGAFAKKAIKKGDVFGAKDLFLAIPNVDNQIMAFNLSKYASFTAQSDIAANAPVLRGGVTVKNSRD

SEQ ID NO: 102280 - protein, 265 aa, Unknown
  Obtained from environmental sample
  misc_feature (1)..(265): Xaa is any amino acid
LISENPARNFWEACQAVLLYQLLLSYEQTMPAPAFGRFDQYTWPFLKKELEGGTMTMERAQELVDAFFLKSNCYYEGGYGKMAETAGIGNTYQHTTINGCIPATGEEATNPVTFMVLETIGRLRLHDPTVSMRVSSKTSDELWNCALETSKLVGGLPLFQNDDVIIPGLQRELNFTLEDARDYSIIGCQEIVGSGCDFPAPNGVGAAHASLYYGVIFSMAINNGVNPKNGRQAPIQTGYLYDMNSIEEVKEAYKKLSDYLLKWYV

SEQ ID NO: 102281 - protein, 289 aa, Unknown
  Obtained from environmental sample
  misc_feature (1)..(289): Xaa is any amino acid
DQAARIGTRQGQERYISEHIRNTSGFLSSELDLAHVRTFVIVGSDAAIAAAHVGSTLNKNCWIIERDAFNEFVKKVQNYSVEECTEQLRLPFWEAKTFIPGITINKLLLDRTGSAQVVVPRISIREGILIDLAQGIDPAMQEDFFSQIFASAVNLGRKYHIDESHCRHVASLCMSLFDSLVREHGMNRRERMLLEVAAMVHEIGMYIRAAAHNLHGQYIIANSEIFGLRREELDIIGNVIRYHRGPSPSRTDIDYIALQREERILVLKMVSILRVADALDRGHSQQVKI

SEQ ID NO: 102282 - protein, 68 aa, Unknown
  Obtained from environmental sample
  misc_feature (1)..(68): Xaa is any amino acid
SVGVGDSGGVVGVGDSGGVVGVGDSGGVVGVGDSGGVVDVGDSGGVVDVGGWPEPVLPGFGPAFQAPH

SEQ ID NO: 102283 - protein, 172 aa, Unknown
  Obtained from environmental sample
  misc_feature (1)..(172): Xaa is any amino acid
MRFTLTSNTLIQFDGAVDEPISNAAAVLRRDIEKILDVSQACANVIHIERPCLDIPEEGWLIEVTSAEITVRYNGSLGCVYALLFISGQFLGVSPFWFWNDSQFLKRPEIDVPLGTWRSPEYVVRYRGWFVNDEVLIDNWPGGQGDEHWRMVFEALLRCGGNITIPGNDGNS

SEQ ID NO: 102284 - protein, 73 aa, Unknown
  Obtained from environmental sample
  DOMAIN (6)...(73): ATP synthase alpha/beta family, beta-barrel domain
  misc_feature (1)..(73): Xaa is any amino acid
MNKGYITQIIGPVVDVRFEQGQIPLILNALKVKTSGDGLDRVVTLEVLQHIGDNRVRCVAMSAAEGLSRGLEA

SEQ ID NO: 102285 - protein, 212 aa, Unknown
  Obtained from environmental sample
  DOMAIN (1)...(180): Protein of unknown function (DUF1625)
  misc_feature (1)..(212): Xaa is any amino acid
VEANISDGDLAAWNNRITQRAKSVGYKTDSNATLAYVQGNVVYFGKSPSSPQIGDVRITLAKVPPANISIIARVIGPTFERYLAPNGRTFTSVAMGTVSAEIMIESAKKANSAFTWLLRIIGIILVVMAIKMIFKILPTLFKVLPPLATIVGAGVTLVCSVGGFAWSLVVISLAWLFYRPLVGIPMLIIAVAGIWFLKKKAKEKAALAPAGA

SEQ ID NO: 102286 - protein, 283 aa, Unknown
  Obtained from environmental sample
  DOMAIN (114)...(235): Domain of unknown function DUF147
  misc_feature (1)..(283): Xaa is any amino acid
MEWFQSINSVYDFIRPVLDVAILSFLLYKAYELLVKTQAVQLVKGASFVALVYGCAVLFKLSTLQWLLQSLAPGLFIAIAIVFQPELRRIFIRLGQGELFRPDSKPRLGSLEAVVTAAEILSREKRGMLVVFARRTNIRSIIDTGTRLNADISSSLIVTVFEFDTPLHDGAMIIQNNRIIATGCFLPLSEQQDIKKSFGTRHRAALGVSEQTDVVTLIVSEETGAISLSFDGRIYYDLSPIEVTRKLKELLDRGSWRGEPDMAVPEIKAGGLLGGSGRRRSRS

SEQ ID NO: 102287 - protein, 276 aa, Unknown
  Obtained from environmental sample
  DOMAIN (1)...(262): Glutamine synthetase, catalytic domain
  misc_feature (1)..(276): Xaa is any amino acid
VCGIEQEFFLVDTGWYNNRADLALTGRTLVGAQPPIEHFGECANPIKERVLNYMHDVYTEALRLGIPVTACHNEAAPNQYEFAATHERSSLAVDHNLLLTDIMERVARRHNLVCLLHEKPFAGVNGSGKHVSWSLSDDDGANLLNPGGTAEDNLVFLTLLTSVIHAAHRHGDLLRASAASAGNERRLGAGEAPPAIMSLFLGEQLTKFVAAIGSGKAEKGKKRDPADIGADLPKFAHDAADRNRTSPLAFTGAKFEFRMLGASMNAATAVTVINAI

SEQ ID NO: 102288 - protein, 281 aa, Unknown
  Obtained from environmental sample
  misc_feature (1)..(281): Xaa is any amino acid
MDIGTNAETETLTLDATYLNLQEPPDAGYSASRHYKDGAFRTIFKVREWFVALYNAINGTNYTVKDVTMETTLDDPLFVGCRNDVSFLIGAKLVVFMEHQSTVNRNIALRMLVYATRTYEKIIDWKKIYGEQAMKIPRPEFYVIYNGTAKVPPVQKVRLSELFEDADDVNTNNLPFSLDLEVTIYNINMDCNPELLSQCEPLSEYQTFVELVRRFNNKTKNLDAAMGMALEECAKRGILTKYISKPISEVKKMFLWEVDEATVHEVWKDDGRMEKSPENSP

SEQ ID NO: 102289 - protein, 234 aa, Unknown
  Obtained from environmental sample
  DOMAIN (43)...(234): Phage integrase family
  misc_feature (1)..(234): Xaa is any amino acid
KDGKTEIISYQNTYANTVLKTFSLMLGEAVRRGLLAVNPCEKVQKLKNDRKKLEILTVEEVRKLYPKNYTEVWGDRKIAYAANRLASLTGMRIGEILGLRGEYVFDDYIMVCGQYGEKGYKPFTKTKENRNIPLMPEMIGLLKGLMKNNGQGFVFSDNGGAKPLSDDCVSRAFRAALAKIGINEAEIKRRGLTLHGWRHFLNTELQRQGLTIQQVQSVTGHKTDRMSEWYCHLD

SEQ ID NO: 102290 - protein, 254 aa, Unknown
  Obtained from environmental sample
  misc_feature (1)..(254): Xaa is any amino acid
LKRSENAIAKRQEVGRGLRLCVNQEGDRQDIDVCGETLVHELNKLTVIASESYSDFVSELQKKISEDLYERPVKASIEYFTDKSFYVENDFHTLSVSEATVVYNYLVRNDYIDDNGVITSVYRNAVKNEQLAPLRDDLAPFTKGIHTLVQAIFEPDVLKDMIVNGHETKFKANPFNDNFYKQEFQDLWKAINKRYAYTVEFNSLELIKKTITALNKNLRVTELQYVLTEGVQTGAEFKVSHTQTRALKHTHGSF

SEQ ID NO: 102291 - protein, 283 aa, Unknown
  Obtained from environmental sample
  DOMAIN (17)...(99): Fibronectin type III domain
  misc_feature (1)..(283): Xaa is any amino acid
GATGLNAGTLIIADGTPSTPSNVSIILKTATSLEIGWTSVPRATSYKVFYMTAGMEELTLAGTVTTNSFTHSGLTLNIDDIYYYYVIAVSDKYGESDYSDFKSIVIDKPVAPNSVRATAESAKNINLQWSVVSGATEYKVFYNTTNSSSGSNEISGTYTSASASLTGFSANKTYYFWVKAVNPFGESDLSPSGSAKTPMESNYNLGLYVYESLQPSQTSNGTGWIGLRWNSISYSSVNGIIKFYIYRSAGAPNNFQLVDSSITSIYLDRNLPPNTTYYYYVTF

SEQ ID NO: 102292 - protein, 167 aa, Unknown
  Obtained from environmental sample
  DOMAIN (112)...(145): Tetratricopeptide repeat
  misc_feature (1)..(167): Xaa is any amino acid
EAIRLDPSIARVYYNRGFAYASKGDPDQAIADYDEAIRLDPSIARVYYNRGFAYASKGDPDQAIADYDEAIRLDPAFVRAYFDRGFVYSKKRDPDRAIADFTEVLRLDPSIARAYHLRGLAYILKYDLGRGIADLTEAVRLVPNNATYKDALERARAVASGLGAEEQ

SEQ ID NO: 102293 - protein, 103 aa, Unknown
  Obtained from environmental sample
  DOMAIN (18)...(102): DEAD/DEAH box helicase
  misc_feature (1)..(103): Xaa is any amino acid
MEDKYRILKELFGYDSFRPGQEEAIDGILSGRDTLAVMPTGAGKSLCYQIPALLLPGMTIVISPLISLMKDQVSALREAGCPAAYLNSSLSTQEYFQAIGEIK

SEQ ID NO: 102294 - protein, 222 aa, Unknown
  Obtained from environmental sample
  misc_feature (1)..(222): Xaa is any amino acid
VEVYKIYGREPGPTVMIMGGIQGDEPGGFLSADHYADVSLKRGNLIVLPRANFKSIASFNRGAEGDMNRKFRGDLGDDPDRDIVALIKSLIQESDLFLNLHDGSGYYRPTYESELANPKRYGQSIIADAESYLHEPTGRVIPLARYAEEVIARVNREIDEPLQLFHFFNTRTGAADSPYQEQRRSASYYALTQAGIPAYGIETSKQLPSLELKVHQHNLAVN

SEQ ID NO: 102295 - protein, 255 aa, Unknown
  Obtained from environmental sample
  DOMAIN (1)...(252): BPG-independent PGAM N-terminus (iPGM_N)
  misc_feature (1)..(255): Xaa is any amino acid
MTHWREKGVALHMLGLLQDEGVHAHQEHLFKFLRRARAENPAGTIFVHPFLDGRDTPPRSSPGFLAKLKLVIEEVGGVKIGTMMGRYYAMDRSRDWNLTDRAYRALVEAEGRPFTEPLAAVERSWAEDKTPDNFDMVDEYIPPLVCEGYPGLAEGDAVIHTNFRQDRAIQLTQAFLDPAYPGHPPRRPRVKYLGLTRYYDELTEYLLGPMGGDEGLPRLLGEVLAEGGIRQLRLAETQKFRHVTSFFNGKSTHPF

SEQ ID NO: 102296 - protein, 236 aa, Unknown
  Obtained from environmental sample
  DOMAIN (145)...(235): Alpha-L-arabinofuranosidase C-terminus
  misc_feature (1)..(236): Xaa is any amino acid
MADLRKKNGRADPWKVRYWGVGNENWGCGGNMTPEFYADNYRRYATYARTYGDAKLYKIACGSNGEDFNWTRVLMEKAGRYMNGLSLHNYTVTCDWSHKGSATEFVETEWLLTMRKAGRMEELVQKHSKIMDEYDPEKKVGMIIDEWGTWFDVEPGTNPGFLYQQNTVRDALVAGIHFNIFNNHAERIHMTNIAQTINVLQSVILTEGPNMVLTPTYHVFDMYKVHQNAVKLPVYV

SEQ ID NO: 102297 - protein, 72 aa, Unknown
  Obtained from environmental sample
  misc_feature (1)..(72): Xaa is any amino acid
MHWMWFHICKTDTVIELSAGISLSAAEINRKHKLPMADSIIYATSLHYSTIVFSCDKHFKDFPGIRYFPKIK

SEQ ID NO: 102298 - protein, 68 aa, Unknown
  Obtained from environmental sample
  misc_feature (1)..(68): Xaa is any amino acid
MNIIDSSCWLEYLMDTEIGAAVAPVIENPDELIVPPITLYEVYKKLLAEKGEEYALDVVSYMQNRYSN

SEQ ID NO: 102299 - protein, 248 aa, Unknown
  Obtained from environmental sample
  DOMAIN (54)...(248): BadF/BadG/BcrA/BcrD ATPase family
  misc_feature (1)..(248): Xaa is any amino acid
MYREIVTGNAEKLNQVFFASRGEREAFLERHKPLNIKHDPAALNLSDKTLRVYLGIDAGSTTTKFVLIDENENVIDSFYGPNKGEPLKIVKQALLDIHKKYSDSGINLEVIALGTTGYGELLFDKALGADFHTVETVAHTAAAQKYVPGVTFILDIGGQDMKAINISNDIVTNITVNEACSSGCGSFLETFAETLHIPVDKIAEAAFNANNPARLGSRCTVFMNSTIITEQKNGKQADDIMAGLCRSI

SEQ ID NO: 102300 - protein, 248 aa, Unknown
  Obtained from environmental sample
  misc_feature (1)..(248): Xaa is any amino acid
MRETFNISQNVCRAAISQGEKALEEFNKILVGTGKKIIEETEKKGGFAVVISGRHYQYDELVNHNLSKYFTNIGIPVLTVDSLPNLGKIPLQKSRLDITNNNHARLLSGAIFTAEHPALEYVDIFSFGCGHDALYTDEIIRIMKEISGKSPLILKMDESDIAGPLRIRVRSFIETVMIRRKKETFNTKPLGDPYPVKFVREDRNVKTLLVPNVSRAFCLMLTSCIANEGILTEPLPMGGADAIAMGKR

SEQ ID NO: 102301 - protein, 79 aa, Unknown
  Obtained from environmental sample
  misc_feature (1)..(79): Xaa is any amino acid
LALQVQALKLKPYYIGVISSRKKAETVTAKQLLEQGFSQEEINNIHAPIGINIKGDAPAEVAVSIAAELIQVRSNRCSI

SEQ ID NO: 102302 - protein, 270 aa, Unknown
  Obtained from environmental sample
  misc_feature (1)..(270): Xaa is any amino acid
KEEDDIIIENKINAEDQENQLIRYHNYKPYAKLLYLTLFGDDPTEKSIGKDKNISYEKINYKYDIIKWLELCKKESVDNPILRETLTQYILLVRQLTGQARSKEMSEEILSLITKSEDDIKAAVAIKQAVDSIDQKIRELFEKNIFDKLNYHNASYLKNRDWYCISLPIKNGKYHLFIRYDWRAIYVDIDEKNKNAETNDKEALFNVFSELPGITGGNKWPINNSQWGISESAYSEFSDVIGDLYKYKLYKEYLEKPENVVQKIKDIETN

SEQ ID NO: 102303 - protein, 194 aa, Unknown
  Obtained from environmental sample
  misc_feature (1)..(194): Xaa is any amino acid
MNKSSENFNKNEDPFKPVADTLSTYLNDLICNPSSASLDIENLPEAFGDFCKGLQYFANAVYETSTLAKELASGNLHCALPSSGNEIAAPLKILHSSLSHLEWQTQQVAKGDYNQRISYMGDFSAAFNNMVEQLEHRRKIILDEKTKFEMYMHLILVNSPNPILLFDNNGKLAYASDSYFRHNKKCENDKILGK

SEQ ID NO: 102304 - protein, 281 aa, Unknown
  Obtained from environmental sample
  misc_feature (1)..(281): Xaa is any amino acid
MEMVTYHTIAIGFIALSLIIPKKETSYSKVFIGAKTGALIVSSYLLQGIIGLLISIGLAYTIRPELFKAAGILLPMGFGQGPGQANNVGSTYEALGFSGGQAFGLSIAAMGFLVACIVGVIYLNILKRKNLLRKVDETAARQTSNLDDYESKNEIPVSESIDKFSIQVALVFVVYLATWLLSFGITRILQASNAGLAKSLIPIIWGFNFIFGSLLAVLLRGIIRLFRNTGFMTHQYQNNYLLARIAGYSFDLMIVTGICTINFEKLSGLWLPFFLMCAAGT

SEQ ID NO: 102305 - protein, 199 aa, Unknown
  Obtained from environmental sample
  misc_feature (1)..(199): Xaa is any amino acid
MKLLKNLLKSPMFVIGASLFLLTLLIALVGPFFYKITMARVGAQYDAPSAKFILGMDDLGRDYVSLLLLGLRSSLFVGFLAGVIATTIGTLIGIYGGFRGGVVDDILNMVTNLFVVIPSFVVLILISASFSEGRSLTLIGVIIGMTTWTWSARAVRAQSAALKSKDHISLAKLNGDNTLRVLLVHILPYIFSYVFMVFI

SEQ ID NO: 102306 - protein, 268 aa, Unknown
  Obtained from environmental sample
  DOMAIN (1)...(268): Phosphate acetyl/butaryl transferase
  misc_feature (1)..(268): Xaa is any amino acid
ILKHRDVADVILLGDTGRIGQKISHFGLDLDGVTILQPENSPHFKDYVATYAELRKQKGITLEQARDRMLDETYFGTMMVYKDHADGMVSGSINTTAHTIIPAFEFIKTRPGVSVVSGSFLMCLKDRVLVFADCAVNPNPTAQQLAEIAISTAATAKAFGIEPRVAMLSYSTGSSGKGQDVDAVIEATRIAKQMAPDLALEGPLQYDAAIDPGVAKTKLPNSRVAGQATVFIFPDLNTGNNTYKAVQRAAGAVAIGPVLQGLNKPVND

SEQ ID NO: 102307 - protein, 276 aa, Unknown
  Obtained from environmental sample
  DOMAIN (53)...(163): Region found in RelA / SpoT proteins
  misc_feature (1)..(276): Xaa is any amino acid
EELSFGILEPDSYENLRGAVQSKMQSNDTMAKDIQRTLESLLAANGVKAKVHGRIKGLYAIWRIMGAQKNEIGNIYDWLTYHIVCQDRSSCYVALGIVHALYKPIPGKIKDYISLPKVNGYQSIHTSALMASGDSFDVHIRTSDMHEQAGRGIIARWTYKDGRIANRHELNQSAFLRWIMELNQDADDSHDLVANLKGELLSKQIQVFTPKGELRSIPEGSTPIDFAFSIHTKVGHQCVGAKVNGRLVQLKYQLKNGDRVEIITRPDHVPGRDWLS

SEQ ID NO: 102308 - protein, 257 aa, Unknown
  Obtained from environmental sample
  DOMAIN (3)...(257): FemAB family
  misc_feature (1)..(257): Xaa is any amino acid
LGFGFSFAYAPWGGIPDFFTADERSKALLELAKKLKQFLSKDTAFIRFEPPWHYNDGDENIKNELTMLHSVGFQKAAATVQPPDTVIINLAPSHEEMLASMKPKWRYNVSLAEKKGVKVNVCGAQDIEIFYNLLKETSARDGIAVHGINYYRTLFEVCESQNKKDQFIRLYTAEHEGDIIAAIVVLFRGKDATYLYGASSNEKRNLMSPYALQWKAMKDAKEAGCINYDLFGIPPNEDPNHPMAGLYRFKTGFGGQI

SEQ ID NO: 102309 - protein, 270 aa, Unknown
  Obtained from environmental sample
  DOMAIN (146)...(182): WD domain, G-beta repeat
  misc_feature (1)..(270): Xaa is any amino acid
DNPLKLWDVVSGREIRTFPGKYSTPTFSLDGKQFLLRGYPEKTIELWDVASGREIRTFSGRIRDNNFVVFSSDGTKVLSDFGDKMMMLWDLTNGRENRTFSGFSGPIISAAFSRDGKQAISYSGYTEYGEVDIPHYTIKLWDVASGREIRTFSDVDYDSSVAISPDGKQILSSSYNKIKLWDTASGWELKTFSGHTNRVRSVAFSPDGKQIVSGSKDNTVKLWDTASGRELRTFSRGSAYVAFNPDGKQILSCFDDDIVTLWDVASGREL

SEQ ID NO: 102310 - protein, 273 aa, Unknown
  Obtained from environmental sample
  DOMAIN (46)...(202): Radical SAM superfamily
  misc_feature (1)..(273): Xaa is any amino acid
MDNVERKNLEAERRQKLKEEKPLVYNKIINYDDKFKKGECIAIIDFAFSDICNMKCKHCSSSSFFKKDRVMTIKDIENLSAQADELGLAQFNISGGEPLIFPELDDIIRALQPDKFHLSMSTNGILLDKNKAKHLKKAGLDKVKISLDSIDPLLHEENRDKKGVYSKAYESLFNAKEAGLSVVIQTVITKQNARSEATVRLAEFAAKNGFAVDVMLVKAIGRLEGRHEFLCTPEDIEFIDNLHKEYPSFYRDIIPSYGMNRGCGTVRNTLHIT

SEQ ID NO: 102311 - protein, 241 aa, Unknown
  Obtained from environmental sample
  DOMAIN (71)...(143): Hpt domain
  misc_feature (1)..(241): Xaa is any amino acid
EKRARKQEKKEKRKEKKDGGENRAAQTAERSDSDPADDGDGEQLQALSAIHGVDTIKGISMTGGTFASYKQVLSLYCKDVDERLPLLEKTHEENMNMFVTHVHALKSASASIGAADLSAQAAELEAAGKAGNMAYIMTNLPSFTWQISETSKKISAALGTNEDAGQTSLTTEIPEELANLLRDLKSALEDKKTSEIDTVLDELNQKQHGTQIKELLEKISDDVLMTEFESAVKKIDEALGT

SEQ ID NO: 102312 - protein, 266 aa, Unknown
  Obtained from environmental sample
  DOMAIN (1)...(109): Pyruvate flavodoxin/ferredoxin oxidoreductase, thiamine diP-binding domain
  misc_feature (1)..(266): Xaa is any amino acid
MLASSSVQEAHDLALVAHAATLKARVPFIHFFDGFRTSHEIMKIEELPIETIRDLIDDELVAAHRARALTPDAPVLRGTAQNADVYFQGRETVNPYYAAVPGIVQEYMDKLGKATGRQYKLVEYTGAANAETIIVVMGSAAATVRETVELLASKGQKVGMINVHLYRPFPVKEFFAALPKSVKNIAVMDRCKEPGSLGEPLFQDVLTAISEAAMEGKYLPIPKVLGGRYGLASKDFTPAYVKAVIDNANSIDSKKHFTVGIKDDVS

SEQ ID NO: 102313 - protein, 264 aa, Unknown
  Obtained from environmental sample
  DOMAIN (1)...(264): Bacterial DNA polymerase III alpha subunit
  misc_feature (1)..(264): Xaa is any amino acid
MTARYVVGRVARVNGFSRSEIDTISALITDDMLKTAAMTASIADMSVLDMSILRNSAVLEGLIHDNSPYKNIFRHAAVLENLKHFPFTLSDCVIIAPGEVVNWAPIFKGPFPYSYQINTQFDKNHIETIGLVKMNFLGLRNLTIVQDTQRLIKKNHGIDIDLCNLSDDDQMALDLFGNGETTGIFQFEADAIKDYLRKLKPSGMEDLMAMAALYRPKNKDHIDMFIDRKHGMEKIEYLHPCLEKILGVTYGVIVYQEQVMRIAQ

SEQ ID NO: 102314 - protein, 275 aa, Unknown
  Obtained from environmental sample
  DOMAIN (13)...(78): His Kinase A (phosphoacceptor) domain
  misc_feature (1)..(275): Xaa is any amino acid
MEAKTAAEKANMAKSAFLANMSHEVRTPLNGILGMADILLRSQLTRDQISMVSTIRNAGYSLLMVLNDILDISKIEAGKMSLETLAFHLRDLVFEATTSLVSLAKNKPVEMMVNIQPETPEFFVGDPIRLRQIILNLVSNALKFTSKGEVVVKIKVLGQAAPDEGSPAAAAPLEEGTSQPPKDAVKLRFSVTDTGLGIPLEKRLVIFQPFEQADASTTRTHGGTGLGLAICQRILAMMGSRLELTSQVGQGSTFWFDLVMPIAEEEELPRLAQIN

SEQ ID NO: 102315 - protein, 53 aa, Unknown
  Obtained from environmental sample
  misc_feature (1)..(53): Xaa is any amino acid
WDIADTLNALMCVPNIIAVLLLSGLVYKETQHYLDGRLDEESKDIVPVWNPKK

SEQ ID NO: 102316 - protein, 276 aa, Unknown
  Obtained from environmental sample
  misc_feature (1)..(276): Xaa is any amino acid
ISPGKMEEFAEYVYEGTFYDSAYTIPANPPIITAGQSLYAKWTAVYTAYRFGGWYLDSLLTIPAEFPMRNVKQDLDMYAKWGGAYTVTFNPNGGTVVPYSDTTNIYGKLASLPRPVREDYIFNGWYTAPDGGMKVGTGTVFSANITIYAQWRAISDSYIITFDPNGGTVSPAVVYTEEGKKLSWLPTPEREHCVFLGWYTTPTGGLIEVTTSTVFDANTTVYARWRGYRIGFWWAYCAEGHSCDPPYPVHNLQHIYAGFDGKLASLPTVPNLEGWY

SEQ ID NO: 102317 - protein, 68 aa, Unknown
  Obtained from environmental sample
  DOMAIN (1)...(66): Protein of unknown function (DUF497)
  misc_feature (1)..(68): Xaa is any amino acid
DDQCHVTDIDDRFDYGENRWWIIGMTEDHCMMLYVVYTTRDGDTEVIRIISARRAKPHERKLYGYRKI

SEQ ID NO: 102318 - protein, 260 aa, Unknown
  Obtained from environmental sample
  DOMAIN (209)...(242): Tetratricopeptide repeat
  misc_feature (1)..(260): Xaa is any amino acid
KLIERYLTQGEFDRALDLIDRLLIENPDDEEANELQQRILTADRHKDSDGLTELQRQLLEEQRRQNERIAASMQKSMSSPGLASGESEAAAERRAAAEAEAARKKAQEEELAKVSRELQDKMRKVNELVADAKAKLNAGDLAGAERIFSEARKIMPENEPRFESQKLADMADAYYEYNTKNTNTSNGKEAARRAEALAGEAVTKDAAQALPHHTLGKLARDENKNDKAIAEFREASRLDSNNYLYSHDLGRSLFIAKRYQ

SEQ ID NO: 102319 - protein, 79 aa, Unknown
  Obtained from environmental sample
  DOMAIN (4)...(70): OmpA family
  misc_feature (1)..(79): Xaa is any amino acid
TEILLSAEHTALARGTREDHLELSQERARAVADYLLANKVRTADRMVIRGYGADKPIADNRTEEGMRKNRRVEITILEN

SEQ ID NO: 102320 - protein, 276 aa, Unknown
  Obtained from environmental sample
  misc_feature (1)..(276): Xaa is any amino acid
RKAGTYEWFDLDSIKKKADDYEYYETQYGAVLSRYTGSSTRVRVPSEIGGIPVKAIYGYFYYQERFGYSYSATFNSKKLEAVQIPEGITYIGRNAFKKNNLASVTIPNSVTFIGDGAFEENKFTSITIPNGVTYLSGFNENQLTSVTIPNTVMSIGNSAFSGNKLTSITIPNSVTVIGNSAFENNQLTSLTIGNSVKIINDSAFRFHKLTRVTIPKSVTYIRKGAFYQSDQSGNSESLDPVTRRSVPATLTSVTFEGTIPSDNFFQKLTSADIPVF

SEQ ID NO: 102321 - protein, 139 aa, Unknown
  Obtained from environmental sample
  DOMAIN (27)...(117): ParB-like nuclease domain
  misc_feature (1)..(139): Xaa is any amino acid
VGKTNVNLSLTGFDDIFNVGADGVQVTEIPLAELFPPEFHPFNVVNDDAMQSLAESIRLYGVREPGLARKRAEGGYELLSGNRRKMACEIAGLATLPVIIRTLNDDEAAIAMVDSNLQQREKLLYSEKAWAYRVKLEAL

SEQ ID NO: 102322 - protein, 142 aa, Unknown
  Obtained from environmental sample
  DOMAIN (2)...(110): CobQ/CobB/MinD/ParA nucleotide binding domain
  misc_feature (1)..(142): Xaa is any amino acid
KLKPSYDYIIFDCAPTPGLLTVNALAAADSIIIPVCPKYLDAKGMELLLKSIAQLRRKINPTLAIEGILLTMIDRRAKLTREVTASIENAYGGNIRIFNENVPRSVRAAETSGLGVSIFAHDPKGQVAAAYAALVEGVLCCG

SEQ ID NO: 102323 - protein, 130 aa, Unknown
  Obtained from environmental sample
  misc_feature (1)..(130): Xaa is any amino acid
DANLGGEIERKRIETSRRSRPNQTRFRKEVLNAYGRCIITDVTLPEVLEAAHIKPVKYNGEDTVANGFLMRMDIHLLFDAGHLRISDSGLLELSFRARQDYGASIRPAIHLPDTVNKEFLKWRWNNYNGF

SEQ ID NO: 102324 - protein, 91 aa, Unknown
  Obtained from environmental sample
  misc_feature (1)..(91): Xaa is any amino acid
GVRRKIALLGLQPQGAVINWDRVIFQGLRIKGIYGREIFETWYKMTALIKAGLDISPIITHRFKIDDFQEGFEIMASGNSGKIILDWEAST

SEQ ID NO: 102325 - protein, 278 aa, Unknown
  Obtained from environmental sample
  misc_feature (1)..(278): Xaa is any amino acid
DVILKLYVITNGTFVYSKNGVAAGDYFINFELYNGVTQPTVVSELVVVRSGLTSRKTITLVGDDLKPVLTGSVSIIGTVVVGEILTVNTSSLNGTGVLSYLWKRGTTNVGADAGTYTVQAADVGETITVTVTRDNYIGEVTSSPTVAVPALVSVTLNNVTQDGSSTQTTTTLTLSFSQAITNLTADNITITHSVSGQVIVKGVPTASGSSYTLPISGFTSGGTLSVAVAKPGYNISGSPKTAIPVYCYSPSLTGTVGINGRLQANQVLTAVTTNLGGY

SEQ ID NO: 102326 - protein, 279 aa, Unknown
  Obtained from environmental sample
  DOMAIN (183)...(278): Peptidase family M23
  misc_feature (1)..(279): Xaa is any amino acid
SLFTVHCSLLYAVSFRYAIIPENPRPGEPVTIGVCDSSGAKTVALLAGGKRLARSAFFSVPAEEEQPSFLAAVLPVPSTAKPGMVTVVFEAANGILGEIQLEIAGRDFVSEVIELNPVLTGVRTDPDPQKTNEAARLQAIINRTGNEIFCYGSFVPPVTATRRTSFFGDRRVYKYSNGGSDVSIHAGIDYGVPKGTVVSSCGPGKVVLARPRIVTGNSIVIEHLPGVYSLYYHLDKIEIEENAIVATGAPLGLSGATGLATGPHLHWEIRVSGENSDPD

SEQ ID NO: 102327 - protein, 278 aa, Unknown
  Obtained from environmental sample
  DOMAIN (38)...(278): Inorganic H+ pyrophosphatase
  misc_feature (1)..(278): Xaa is any amino acid
GEAVEAIEELHGLETAKAHVFTWFAPFRDAEFGPFERVSLVIVLAIAVAGLLYALMLVKQVRSADKGTAKMQEIGAAVREGANAYLAAQFRKIGPLIIIITILLYFSTQSDLQAFKFGRAIAFMIGALFSWTVGFVGMRLATIGNLRVAAAAKHSYGTAMQLGYRTGTITGMLTDGLGLLGGTLIFLVFGSQAYEALLGFGFGGTLLALFMRVGGGIYTKAADVGADLVGKIEKDIPEDDPRNAATIADNVGDNVGDCAGMAADIFESYEVTIVAAMI

SEQ ID NO: 102328 - protein, 271 aa, Unknown
  Obtained from environmental sample
  DOMAIN (1)...(232): Inorganic H+ pyrophosphatase
  misc_feature (1)..(271): Xaa is any amino acid
VGTPTKAETKGIAIGSAVIAAVSLFSSFIAVIAVGSEDKLAEMTMEQYNNIKGLLTVADPKVLIGLLLGGAVPFLFSSSLIRAVGRAAYYIVKECRLQFRDADIWKGTKKPDYGRVVNICTSTAQKELVGPVLLAIAAPLAVGLLLGTYAMGGFLAGMIVVGQLLAVFMANAGGAWDNAKKMIEDGVYGGKGSEAHKAAVTGDTVGDPLKDTAGPAINPLIKVMNMVSLLLLGVVMSFSLSEGTGSKTVGAILAIICIAAIVWGVVQSKKE

SEQ ID NO: 102329 - protein, 95 aa, Unknown
  Obtained from environmental sample
  DOMAIN (12)...(88): Surface presentation of antigens (SPOA) protein
  misc_feature (1)..(95): Xaa is any amino acid
MAARSGSQEMGNISLIMDVFMEMTVELGRTRKLIKEILGMGEGTIIELDKLAGEPVDILVNHKLIAKGEVVVIDENFGVRVTEIVSPMERMSEMG

SEQ ID NO: 102330 - protein, 288 aa, Unknown
  Obtained from environmental sample
  misc_feature (1)..(288): Xaa is any amino acid
MQRGMYRDMAAEEPYAVLSAYQGRANSPLFLYNILVFGARNDCVNLAGKIVSLLQSGKKKTMNPDFTCLDLTGENIDLPSQYMHYPWNINNKLVYTYRNQQLFDRVPMAKVLYRLPYIMTADEAAAFFRLPFSEKTIAALRSSQAIGSVEQFDSSVVSESNIVFGTLISSSGITIGCPENAFTKHALVVGTPGSGKTTFSFNILLQFARRGIPFLAIEPTKAEYRAMIDAIPDVQIFTPGNNSVSPFVINPFVPPKGISIEQYIPSLASAFKAAFSMPSPLDINSCGL

SEQ ID NO: 102331 - protein, 254 aa, Unknown
  Obtained from environmental sample
  misc_feature (1)..(254): Xaa is any amino acid
MGGGEMYAKFETELKSYLENPAKKFSKFLKEFLPRGKKEMQLINEKAEAGRDRLLEFNSQNKKISSELLAEAQKMDSNEELLDFAFDMLSVLDIEVQKGIYPGSFVLRGAPGQPEHATLLGASLGASSDNGEISEFDGCSITVATGRENALNYENVEFFHWEHPIMQRLFDKALSDDFGNVACVVCDIVPSGKVFAQYNFILEFSLNSHWGISNLVGESLLSITLDNKGNAQNIAEALQSAKLQNSKAADIPYS

SEQ ID NO: 102332 - protein, 96 aa, Unknown
  Obtained from environmental sample
  DOMAIN (39)...(61): MORN repeat
  misc_feature (1)..(96): Xaa is any amino acid
MDPVIGEVTFEDGSVYEGELLKGVPHGKGKMTFRNGSVYEGNLVNGKFHGKGKLTYIYGSVYEGDWVNGEQTGKGKMTYPDGKVDEGRFMDSEFVG

SEQ ID NO: 102333 - protein, 276 aa, Unknown
  Obtained from environmental sample
  DOMAIN (106)...(249): CBS domain pair
  misc_feature (1)..(276): Xaa is any amino acid
TSYLGRLTMDQGLTLESEEATIALTGIYADTGRLIHESVRREDLEVAAWLLDMGASLRLVKSFLETIKEEEQLLILNKLLLLAQKKTVRGHEILFSYLEIEENIPGLAPVVEKIMDIENPDAYFAVFFIRKNKTILVIARSQKRRIGLHALLSPYGGGGHELAASLLLRNQEGSRFYGEFLEHLERSMPPATRARDIMTTNVFTVNENSSVMNASIYMEEVNHAGVPVLDDKGNLSGFLGLRDIMKARKASQMHAPVKAYMAKQIVSSHPDSTMRE

SEQ ID NO: 102334 - protein, 247 aa, Unknown
  Obtained from environmental sample
  misc_feature (1)..(247): Xaa is any amino acid
VERDTKHYSLQMTISVGYKVNNERAIQFRKWASQIVKDHTIQGWTMDVDRLKKGHMFTDEYFERQLQLIREIRLSERKFYQKVTDIYATAFDYDKDSKTTREFFKLVQNKLHYAAHRHTAAEIIFERANAEKEHMGLSTWEAAPDGKIIKADVSVAKNYLNSEEMNFLERIVSLYLDFAEFQAQRKIPMSMEDWAKRLDGFLDFNGNEILTDPGKISHEQAKLRAETEYEKYRVVQDRLFRSDFDKL

SEQ ID NO: 102335 - protein, 186 aa, Unknown
  Obtained from environmental sample
  misc_feature (1)..(186): Xaa is any amino acid
MNTKALRQKILGLAISGRLVPQDPKDEPASVLLERIRAEREKNATGGGRGKNARGAVQGERLDVEEVPFELPEGWEWCRLGELAFYKKGPFGSSITKEMFIPFSATAIKVYEQKNAIRRNAELGDYYITPEKFEELKGFEVFGGDIIVSCAGTIGETFVLPERITKGIINQALMRVSLYDKRIIDY

SEQ ID NO: 102336 - protein, 160 aa, Unknown
  Obtained from environmental sample
  DOMAIN (46)...(160): Carbonic anhydrase
  misc_feature (1)..(160): Xaa is any amino acid
MKIHQPGELIEDANAALQMLKEGNERYLKGQLIPKTSYSADREVLNNGQKPFAVILTCADSRATPEIFFDQKLGDIFVIRNAGNVADKTALGSIEYAVEHLKSKLVVVCGHSKCGAVTAACSGGELPPNIKHIVDHIMPSVKKGDDVEKVVHSHVAKMLE

SEQ ID NO: 102337 - protein, 191 aa, Unknown
  Obtained from environmental sample
  misc_feature (1)..(191): Xaa is any amino acid
VASGKRLVASGLILLTLQALAAPASSVDKQLKSNAAALKKNQEEIQKAETKVRELENKESGVLKTIAEIDQGLTQTREQLYVLQKKESSLRTAIKEIEEEITHLQENIDTQKKAIATRIRDLYIHGKREEWELLFNLLKENENPERKLYWVQRLLESDRITIENYLASIEKQREKREQLGTKQKEMAELHE

SEQ ID NO: 102338 - protein, 135 aa, Unknown
  Obtained from environmental sample
  DOMAIN (17)...(135): tRNA synthetases class I (C) catalytic domain
  misc_feature (1)..(135): Xaa is any amino acid
MKKELHLYNTAAGAKELFVPANDPVAIYCCGPTVYNYAHIGNLRTYVFEDVLKRALKWCGYGVRHVVNITDVGHLTSDADEGEDKMESGAAREGKSVWDIAAFYTERFMADIASLNILRPDLWPKATEHIPQMIA

SEQ ID NO: 102339 - protein, 246 aa, Unknown
  Obtained from environmental sample
  DOMAIN (31)...(98): Elongation factor Tu domain 2
  misc_feature (1)..(246): Xaa is any amino acid
MSRGAAVDPASELFSGFVFKIQANMDPKHRDRMAFVRIVSGRFERGMTAVNVRTGRAARLANSSALFGRERATVDEAFAGDVIGVLGVDALRIGDTLCADSTVLYDEIPFFPPECFAIIHNPSPANYKRFREGLTQLALEGLVKLYEIPAGHQRISLLGAVGPLQFDLVQYRLESEYGAASRIENTDWTMVRRIEAEGIDIIEEKSLHIPAGARLAVDNDGRQVMLFPTDWHLRFFQEHNEGIILS

SEQ ID NO: 102340 - protein, 180 aa, Unknown
  Obtained from environmental sample
  misc_feature (1)..(180): Xaa is any amino acid
MKLIIPFTRSHRETKRLARENAALAKPLSPTSDFVFKTLFSGKDEDSREALRLLLSSCIHRPVRDLRLQNTEILPAFLMGKVFRLDVHVTFNDGEQADIEMQVNRSDDDLRARSLLYASRLLESQLGRGERFKDAKRVYVIFFLDFVLFPQSAKVPRRYVFMEESEHDRLNELVEVIYYE

SEQ ID NO: 102341 - protein, 260 aa, Unknown
  Obtained from environmental sample
  DOMAIN (2)...(260): Glycosyl hydrolases family 31
  misc_feature (1)..(260): Xaa is any amino acid
MWMSRMTYISADQIRSITGRMRKENYPCDVIHIDTGYFEKDWVCEWDFSRERFPDPKAFMRELLQKGFRVCLWQTPDIGRGNKHYEEGKGKKYLPQKKVIDEQNTPVSDFSDQDQVIAIDFSNQEAVSWYKSLLRRLMDYGASAIKADFGERINMSAEYKMDTALLHNLYGLLYQKAAWEVCSEYSDSPVCWSRAGWAGCQRYPLHWGGDTSATWDGLVQTLRGGLSFGLSGFTYWSHDIPGFHGLPDFMNSKPGEILYL

SEQ ID NO: 102342 - protein, 287 aa, Unknown
  Obtained from environmental sample
  misc_feature (1)..(287): Xaa is any amino acid
FLEKNAYRKIIDLEFEIYEAEKTFRLPPENAAWKKIQTPAPWGKEWTCFWFRSVYNAPLGDTPVFLSVTPNADSLAFIDGKPAGAFNMYHNKIRIDADGKEHTLHVEAYSGHFHGGCGPFEGTSIVINIGKVLTDFPNTFSGGSLLERRPAIHSLFYDIRALYETAKIADPNSLRKAQILKGLSLALNGISLNADGEELEKQAAAAAKMLAPLLALKNSPSTPEVHLVGHAHIDHAWLWPIAETERKTARTFANMLRFIKEYPEFIFIQSQPCQLEIVKNEYPDVFA

SEQ ID NO: 102343 - protein, 197 aa, Unknown
  Obtained from environmental sample
  DOMAIN (3)...(197): Glycosyl hydrolases family 38 C-terminal domain
  misc_feature (1)..(197): Xaa is any amino acid
MVAPGGVFNALITAEDVPVFWDAWDIDADWTKHIRQETQLVSTGVATDGPVCFRLRRAYEIGDASSMVQDIVCYAEDPRIDFDTKVFWKEKWRLLKAEFDTAIDTVQVRCEVQYGHILRNTHRNLMQDRARFEICAHKWISLEEEGSGIALLNDCKYGHDVEGGRMRLSLLRSPIAPDPEADRGEHYFTYSILPFAG

SEQ ID NO: 102344 - protein, 238 aa, Unknown
  Obtained from environmental sample
  DOMAIN (191)...(238): GTPase of unknown function
  misc_feature (1)..(238): Xaa is any amino acid
MRTEHKKNRSLPVVVLAGRPNVGKSTLFNRLLHKRRAITDPTPGVTRDPVEAECFIAGKPLRLIDTGGFKLADCEGIDKLVVKKTLETIKKADLIVLLLDAADITSEDEEFIGLLRPYREKLVAAVNKTEGGRGQADAWNVLKFGFDKVLMISAEHGDKVGELEQEIIKRLDFSKFENAPEGQSSSVSSNIRIALMGKPNTGKSTLSNRLTSTNSSIVSDVPGTTRDTVEGDFHWKGR

SEQ ID NO: 102345 - protein, 286 aa, Unknown
  Obtained from environmental sample
  DOMAIN (1)...(261): ABC transporter transmembrane region
  misc_feature (1)..(286): Xaa is any amino acid
GLIELPDYMSEITKLTQTPGSAMSAIWRNGGYMLLCALGSVAAAIIVGFFAARIGASFSQRLRSLLFNKVESFSMEEIDRFSTSSLITRSTNDITQVQMLIVMGLQLAIRAPIMAVWAITKIAGKGYEWSMVTGAGVLIVFVMVTILMIFVVPKFKKMQALTDNITRVTRENLTGLRVVRAYNAEDYQENKFEAANAELTGTQLFTNRAMAVMMPVMQTMMGGLALSIYWIGAYLIDAAGAMDKLAIFANMVVFSQYAIQVIMSFMMLVMIFVMLPRAGVSAKRIN

SEQ ID NO: 102346 - protein, 269 aa, Unknown
  Obtained from environmental sample
  misc_feature (1)..(269): Xaa is any amino acid
MASIMTIFKKAKLRTKIISVVIAICLFALLGMSIASYITIKKVSQYSARTNTALGSGAADSASGALLEQAHNFLMVIARQQAVNCNAMLNTFKFDVELLEGVVTDIFNNPQYYSLGRTVIKPSETVKGIYSGTYILPETVPMTEKIRQELNLLSNLGLLLPTLTNNPDIIEFYVGMESGLFYNYTPLIYPNPKYDPRTRIWYTQALAHPGTVIYTEVYEDALGSGLVATVSKAVFDKRKNLLGVVALDIMLDNYKKLLMETRILKSGYA

SEQ ID NO: 102347 - protein, 219 aa, Unknown
  Obtained from environmental sample
  DOMAIN (4)...(218): Type I 3-dehydroquinase
  misc_feature (1)..(219): Xaa is any amino acid
VAKICLCLAAKTLERNLEILNKYRKYADLAELRVDCLDPNERFLIRRFPGHTDIPVILTIRRDVDGGFFNSGEGARINLMAMGLAYADADRRRNFAYLDIEEDLSVPSLEEAARTFGTRIIRSCHSLKSPYANLSSKIRAMRHSEDEIIKLAVMANTTRDVLDLLRAGKECRRQEKILIAMGHLGVYSRILAEQFGSSLSYVGAYSEPDVPLTAPGQLK

SEQ ID NO: 102348 - protein, 261 aa, Unknown
  Obtained from environmental sample
  misc_feature (1)..(261): Xaa is any amino acid
MINCVDCENKDFSTGRFDLIIIDEAHRSIFNKYGVIFDYFDCLLVGLTATPKNEITKNTYSIFNCENGEPTNEYSLGEAVNDGFLVPYKVNSRSTNILTEGVDYEKLSTTDKEEFKRIFAAETGDDDDEPQEMPTKIEGSEIFKKVYNKDTCDKVLDDLMRNGLKTNSGEVIGKTIIFAYNHKHAQMIVERFFKMNPKAPENFCQLVDTYVKYADDLVEKFKANADFRIAVSVDMLDTGVDVPEILNLVFFKPVKRKSNRQ

SEQ ID NO: 102349 - protein, 90 aa, Unknown
  Obtained from environmental sample
  DOMAIN (39)...(72): Tetratricopeptide repeat
  misc_feature (1)..(90): Xaa is any amino acid
MDKKLEKALKRGHEHYENGNYDGAIADFTAVLEIKSDHYEALFFRGSAYINKEVYDKAITDFSEAIKLNPSNPNCLHARGYAYYRNHEYD

SEQ ID NO: 102350 - protein, 182 aa, Unknown
  Obtained from environmental sample
  misc_feature (1)..(182): Xaa is any amino acid
CKYGRNADLSQETEALINISAHIEREFEDVHIYLQPEKREESPYLGTIAKSDICIEAGPQAHGTLDAKIFFKVERIVFRFLELAKAYDNGALPKIDDVETFKEMRSIDYPRDSKGNIAAIIHPALQGKDFCELKSGMPIFMGFDGKEILWQGETCYPTFINEAAYYEKGIAMSLAEKRVSYF

SEQ ID NO: 102351 - protein, 278 aa, Unknown
  Obtained from environmental sample
  misc_feature (1)..(278): Xaa is any amino acid
TLLSMKTGVAYFGVRNPEWVRKDMQIIKGAGFDYVLHTFSEEDLQYYPQTMKDIIALSKKEGLGVYVNPWGVGRVFGGEAYTELAARNPEMAQVSQDGKKLVAACPNNPAFRSYMKKWIEAVCSCDIETVFWDEPHFYFEKNNPSLQACYCEHCSGTSRQQSLISFLSFLTEEVHKLGKRNSVCLLPPWFPAGLENWDEVAELPFVDEVGSDPYWEKGDTLEKVQKSYSEVSRRIADLAKKYGKEAQMWIKNYHIEAGTEHFITETTQIASGAGIKNI

SEQ ID NO: 102352 - protein, 212 aa, Unknown
  Obtained from environmental sample
  misc_feature (1)..(212): Xaa is any amino acid
MKVAIVHYWLVNMRGGEKMLEALLEMFPQADIYTHVYNPKAISALINRHRVITSRINRLPFAKKLYQLYMPLMPNALVDFNLQQYDLVISSEAGPAKGVVPNPNAYHICYCHSPMRYAWDMYHEYFRKTNPFVKFFMKRIIPSLRIWDITSANMVDRFITNSNYVAKRIRRIYNREAEVVYGPAPIEPLLNVERKPSDFYLFFGQITDYKRA

SEQ ID NO: 102353 - protein, 270 aa, Unknown
  Obtained from environmental sample
  DOMAIN (1)...(101): PCRF domain
  misc_feature (1)..(270): Xaa is any amino acid
AREELKELETKLTDNKDKLKFLLIPKDPLDEKNIIMEIRAGTGGEEAALFASDLYRMYSRFAESKGWKFEIMNSNDTELGGIKEIVFSITGNNVYENMRYESGVHRVQRVPATEASGRIHTSAVTVAVLPEADETEIDIKTEDLRIDVMRAGGPGGQCVNTTDSAVRITHIPTGVTVHCQDEKSQIKNKAKAMRILRARIYEMEEAKAAAERAEARKTQVGSGDRSQRIRTYNFPQNRLTDHRINLTLYKLDLIMHGDTAELFDALKLSA

SEQ ID NO: 102354 - protein, 181 aa, Unknown
  Obtained from environmental sample
  misc_feature (1)..(181): Xaa is any amino acid
MIFQHIMNDASITLDNMHEYFRPMESPVNFLPVLADWLGIHLDTLSGEDEVRRFLQYAIPLYRYRGTALGLRAHLTIISGIVPDIIEGVTPYSAMLIDVDKSSESNLLDSDDVKNSFTIHFPISRSKFSDTLIQRLSFIVQREKPVHTKAYISFETEKKKSRTVTTINTDTVMSEDGGISF

SEQ ID NO: 102355 - protein, 197 aa, Unknown
  Obtained from environmental sample
  misc_feature (1)..(197): Xaa is any amino acid
ADPDKLHRVRVAKKGEDESVADWIPVLTPYGGNDAGLSFLPDVDDQVLVISMGVMDGQKAIIGSVWSNEVSAPETGENSGADFNGDGENSLKFFKSRAGSMLIFDDTDGAEKTQLISAGKKSRLEFSEADELVSLNTEQDLSIGAKGAVLIKAEEVSITSKKQMDISAEEYQVDAKKGLDINCDKDIGIKGSGVALN

SEQ ID NO: 102356 - protein, 76 aa, Unknown
  Obtained from environmental sample
  DOMAIN (1)...(63): Global regulator protein family
  misc_feature (1)..(76): Xaa is any amino acid
MLILTRRPGESLYVGDNVRITILSLQGKQVRIGLNVPEDTVVYREEVYRRVTEENRMALTISTEDLFGAAQIWHKK

SEQ ID NO: 102357 - protein, 274 aa, Unknown
  Obtained from environmental sample
  DOMAIN (1)...(80): PET112 family, N terminal region
  misc_feature (1)..(274): Xaa is any amino acid
SPLEASTYLKVLHRLVTALGICDGNMEEGSFRCDANVSVRLRGQKEFGGRVEIKNINSFRFVRQALEYEVNRHIELLESGSRPTRETRGWDSSKGETRAQREKAEEMDYRYFPEPDLPPLTISQKEIDAARATMPELPWTQKKRFSDNYGLSDYEAEMLTQDKAFAEYFENAVKISSSPKQVCNWMLGEMSRAINERGGDIYSLGISEAHLTELIALIEKKTINLGTAKDAIFPALLTKEGSPLEIIEKRGLAHISDAGAIEAIVDEVLAAHKA

SEQ ID NO: 102358 - protein, 187 aa, Unknown
  Obtained from environmental sample
  misc_feature (1)..(187): Xaa is any amino acid
SADLSSADVLSEDLSSADISSEDLSSADVPSEDEITIDIDDQVTPEGFESELQEDITIDDTLEEVELPDSTADISPEEPAVTDKIVPDESAELESIDKIEDIGEIDDIGGIADIDEIPVEAESAPPSTAEQKTGNFQIPSDLKKELKNILGYMDQLLESLPEEKIEEFAKSEYFDSYKKLFKDLGLV

SEQ ID NO: 102359 - protein, 111 aa, Unknown
  Obtained from environmental sample
  misc_feature (1)..(111): Xaa is any amino acid
MNIGDYSVRRPVTIVILFALAMGIAITLVLNLAVDLYPSTTRPVISIFTRFPGSGPADVEKNVTERLERALSTSVGLVNMTSNSQFESSFINLEFAYGTDMDKAANNAQLL

SEQ ID NO: 102360 - protein, 219 aa, Unknown
  Obtained from environmental sample
  DOMAIN (126)...(219): Mur ligase middle domain
  misc_feature (1)..(219): Xaa is any amino acid
VVSDGNGILMDFSGLSRSLGAQLLSFGKFQANAGFTSVTIDSRTVRDGSLFAALPGSNCDGHSFVEAAFKNGACAALVERQKLDNYNLVGIAESLGKTLIVVDNSLEGLQKAAGAYLEKFPGLLKIAITGSSGKTTTKEIAAKIIGIEKRVTMNPGNYNSETGLPLSVFNLRPGDEIGVFEMGMNHEGEIAALARVLNPDIALITNIGSAHIGILGSKD

SEQ ID NO: 102361 - protein, 275 aa, Unknown
  Obtained from environmental sample
  DOMAIN (1)...(172): Glycosyl hydrolase family 10
  misc_feature (1)..(275): Xaa is any amino acid
SVYGDNSFIEEAFTFARQYAPATTKLFYNDYNEYIGAKMNYIANSIVKPLKQKGLIDGMGMQSHLDVRTGTPYPSASDYGTAITTYKNLGVEIHVSELDATVTDGNESYFPAQATYYKDIMNQILTKGGSAVTAVVVWGIQDNQSWRSSRKPLLFNASGNKKAAYTSVYNLIPQSEWGDGKNPSVGGNTGGGNTDINVTCNVDNLNSSYVAGSSVPRPNVSCGANGGAAGAASFSINGAAIDGWSSPNGTQALYNTGTRTVTLNSLQCGGVNVTP

SEQ ID NO: 102362 - protein, 262 aa, Unknown
  Obtained from environmental sample
  DOMAIN (1)...(262): LytB protein
  misc_feature (1)..(262): Xaa is any amino acid
MGVRRAVEIAERASLKAGRTGVLYTLGPLIHNSRVLESLGKRGLVCLNENEISTLPPGSTVIIRAHGISPVMERELSENGITILDATCPHVKLSQSKARSFVESGCRLFIAGEENHGEIAGIKGYAEDGCPKGLVSAIPPCFVLGNAEEAHAAAERLYRSEPEARTALIAQTTIRAEEYRIIGETIQRFFPSLEVVNSICTATVDRQRALGELVNTDAIIVAGSRESANTQRLLSLAKEMGKPAWLVEAVSDIPPEIAAYET

SEQ ID NO: 102363 - protein, 291 aa, Unknown
  Obtained from environmental sample
  misc_feature (1)..(291): Xaa is any amino acid
GDLEEVKNAAENEINTKIGQYNLSVADTLRQSQRDLETQIHELVTDSKERYTALETSSEEFRKNIEEWQTQYNTRMRELDNAMEEARRRGRELSVENEERLMAARNSLDEMRHEITAQVKLFDRTDMLKAELNRHVEDMSGNIERLLQLKNEIAHFENQFIQIKRLEDDVNAKMTRFLSEKRRIEVMESDFTRLLQTSQSVEEKLAQVSNSDDILQTMQVQLRRLEDAIKEAEEKYQRVERKSKTLQETNDSIDRNFRTLQEDEQLVKRLEDTISTLRTEVDAIQNSVRTL

SEQ ID NO: 102364 - protein, 80 aa, Unknown
  Obtained from environmental sample
  misc_feature (1)..(80): Xaa is any amino acid
LTANRTLLQHKYANVIEAFSKRQNIDLRQAMDVFYKSNTYQDMRDGVSDMHCRSDEYLAEELSIELTEKDYCSNKSKEFI

SEQ ID NO: 102365 - protein, 85 aa, Unknown
  Obtained from environmental sample
  misc_feature (1)..(85): Xaa is any amino acid
MNIAQGMLTEMLLVNKDELDFAVFCIENIAEYLNINAADVYRLLTDDSKILDEYIIQYYDALHTQGKEYIVNDIIECIRNEGLFL

SEQ ID NO: 102366 - protein, 90 aa, Unknown
  Obtained from environmental sample
  DOMAIN (3)...(89): Nucleotidyltransferase domain
  misc_feature (1)..(90): Xaa is any amino acid
HEQHTIIEAVRNIDPDARIWLFGSRVDDNKKGGDIDIGILSLKVDVMEEIEIRQKMCDKIGEQKIDLVVSKNGQEAFFKYAVTKGILLNG

SEQ ID NO: 102367 - protein, 66 aa, Unknown
  Obtained from environmental sample
  DOMAIN (14)...(60): Bacterial regulatory proteins, tetR family
  misc_feature (1)..(66): Xaa is any amino acid
LAIVVEHDKRRTKILDSALTVFMDEGFENATFQKIADHCGIARTILYLYFKNKTEIFNYSIKHLLL

SEQ ID NO: 102368 - protein, 278 aa, Unknown
  Obtained from environmental sample
  DOMAIN (41)...(120): Surface antigen variable number repeat
  misc_feature (1)..(278): Xaa is any amino acid
LRQFYMKNGYVDFAILSAKGTFSADRTKYSIVIEVDEGARYNFGKIEIKNPFQDVPIGALAAEATVETGDVYNIDSVESTISKLRAKVAEFGYAFINVDVVPKKNDDRRTIDLVFDIQKTNRNYISNINILGNVRTFDSVIEQLLSIRAGDPFSLNEIESAKQRIMRTQFFKSVDVVRSPVPGTNLVGLDVHVDEQPTGELSGGLGWSTINGFMLDAGIAEKNFMGRGQIVQLRGSLAQYQKQAMFSFTEPYLFGRQLSGGFDVNWTMYNYKNLSGLK

SEQ ID NO: 102369 - protein, 280 aa, Unknown
  Obtained from environmental sample
  misc_feature (1)..(280): Xaa is any amino acid
ATVGPAIAAIKIDVRGQSGLGASKSIIISSKGKTVFSTAGQIEVREAQVDHLAPATTAGASVFTSSEEGIYLKNVRVTNGTTANVAGRIADALKTITIEGGTFVSAQDPKGVALSSDGDISIEGATITASGSASQTGGYVVAGKNITIKSSATDSGAVAWNGSGVAVGGVVSKGAVNIYTDNLFSASVRVKGAGDGISVQPDLVKKDNGRVWLTGSSANSVYVIVESGKAIVVNNDDIDIPGTKDVYLYNTIVRRSGGSARTALVDLIGANAQISGTSLT

SEQ ID NO: 102370 - protein, 241 aa, Unknown
  Obtained from environmental sample
  DOMAIN (42)...(241): Sodium:alanine symporter family
  misc_feature (1)..(241): Xaa is any amino acid
MDLKAIVDMVNGWVWGYPLVLLCLGAGLFFSVWTRFLQLRHIKGMVGQLWTGKTSAHGISSFQGFAMALGGRVGTGNIVGVATAIAMGGPGAMFWMWAIAFLGAGSAFVESTLAQVWKEKRTGEYRGGPSYYIEHGLGIKWFAILFAVATALSCGLLLPGIQANSIAKACHSGFGMPTLVSAIVVTLLLAVVIFGGAKRIGRVAELAVPFMALAYIIMAVIVIAVDFRRVPDMFRLIFSSA

SEQ ID NO: 102371 - protein, 230 aa, Unknown
  Obtained from environmental sample
  DOMAIN (105)...(230): Alanine racemase, C-terminal domain
  misc_feature (1)..(230): Xaa is any amino acid
RFSKSLSLGGIVTHLAVSDSLDPDEIAFTKAQLSRLKEAAASIEKAGIDPGIVHAANSGALVFHEDSYFDMIRPGIFLYGYSPSDWLVKTGQADSLDNYLSAEPLMELRSAVVSVKKMKKGETVSYGRIWTAPEDTYVGIVPAGYADGFRRSLSNDHSMLIGGKTYPLAGRICMDQCMVNLGPEPVVKRWDEAVVFGPGFITAADIAVKAKTIPYEITCGIGKRVPREYI

SEQ ID NO: 102372 - protein, 282 aa, Unknown
  Obtained from environmental sample
  misc_feature (1)..(282): Xaa is any amino acid
KAFAVKEGMNNSGILTAVYTLKAAQPAASPTAGIYNTAQSVTLTTTTEGANIYYTTNGTNPTTSSMQYSSAINMSATTTLKAVAVKDGWDNSNILTEVYTIIFPFTTAPTLTLTADDAKLTYTWTASVPAADSYDVYWKTGNNLSAADVKTGTKITGAVSGGSITGLTNRTAYSVVVTANKTDYTGVDSTVITGTPSNEITLTENVWADGNLPTESDEQWFKFTATASTQYIHVSFGTLERLFVQIYDSSGTTVGNDTQFIREYNTKYLSQNVTVGQEYYIR

SEQ ID NO: 102373 - protein, 78 aa, Unknown
  Obtained from environmental sample
  misc_feature (1)..(78): Xaa is any amino acid
MSGREGMNIDKKLYFIMGIVNVTEDSFYDGGKYVDKDAAVEHALRLVSAGADVIDIGGCSSRPGAKFLPPEEEAARVV

SEQ ID NO: 102374 - protein, 96 aa, Unknown
  Obtained from environmental sample
  misc_feature (1)..(96): Xaa is any amino acid
MNRHRDYSESTAEAIDRRVRAIVDEQSARAKDILTEHRDELERLAKALLEHELLDREEIIKVVGGATLESAKKNRVLPQKAKVGREVELVVGDGES

SEQ ID NO: 102375 - protein, 288 aa, Unknown
  Obtained from environmental sample
  DOMAIN (1)...(288): AMP-binding enzyme
  misc_feature (1)..(288): Xaa is any amino acid
AGSPVWADYRIAVAETGDVFEPPDAASLPKNSDYMLLYFTSGTVGNPKMVRHDFAYPIAHIITAKYWQNVEDGGLHYTVADTGWAKAVWGKIYGQWLAGSAIFVYDYDKFNALNLLRRAAEFGVTTFCAPPTVYRFLIKQDLTQFDLSALKYCVTAGEPLNPEVYEQFLKTTGHRLREGYGQTETILFLGNYPWGEPKPGSMGRPAPGYKVVLLDSDGKICEPGEEGEVCIDLSQGVPWGLFSGYHRDQERTDSVWYDGYYHTGDAAWRDEDGYYWFVGRIDDVIKNI

SEQ ID NO: 102376 - protein, 250 aa, Unknown
  Obtained from environmental sample
  DOMAIN (8)...(249): Alpha amylase, catalytic domain
  misc_feature (1)..(250): Xaa is any amino acid
MKNKGKFLAFTERGTVNSSGDSTGIDHLVKLGITHVHLLPSFDFASINELASGGFNWGYDPMHYNVPEGSYSTDPKNPAARISEFKAMVQSLHETGIRVIMDVVYNHTYQTGGWPFDSIVPGYYYRVNDSGKYSNGSGCGNEVASERPMVRKYIIDSCKYWASEYGVDGFRFDLMGLIDTPTMKQLTDELRRFDPTIIIYGEPWQAGGSILPGNLQTSIGKQKGLGFAVFNDRIRAAIKAAATTQAAVLF

SEQ ID NO: 102377 - protein, 66 aa, Unknown
  Obtained from environmental sample
  misc_feature (1)..(66): Xaa is any amino acid
VGNFHKIRIGKITIEPNIMATTYKLPLIHTDPFDRFLIWEAINNKLTLISLDEKVKKYESFGLSSI

SEQ ID NO: 102378 - protein, 128 aa, Unknown
  Obtained from environmental sample
  misc_feature (1)..(128): Xaa is any amino acid
FSSECLAGYSAKKHDVDVGAGKEKVNERIKNSIEEEFVSSVTGYSSVETDGSAVNIENGKVNNVLLPLWILNTKYNDENYQFIMNGQTGKFTGKLPVDKRKAMKFGLMFIAIFGTVFTAVIQLLRVFL

SEQ ID NO: 102379 - protein, 155 aa, Unknown
  Obtained from environmental sample
  DOMAIN (29)...(153): Domain of unknown function (DUF477)
  misc_feature (1)..(155): Xaa is any amino acid
MKIKLFLLLMIIAISAPMFGLDRVMDFGGLLSSAEVASLEEMLKTISLTYDFDMVVVTIGQTGNTEPKEFADGFFEKNGYGLGKNRDGCILLIVTERKVFWFSTSGRGKKIFIPSVSKKLEKDVFGSLENGKFYDAFVAYAEDWKRVLVLDSQGR

SEQ ID NO: 102380 - protein, 81 aa, Unknown
  Obtained from environmental sample
  misc_feature (1)..(81): Xaa is any amino acid
MKPCVAKSRAVKLSADILNVAKTCATLNSRSIPKQIEHWAKIGKIAEENPDLPYEFIIGVLEGLKEIEHGETSPFEFRTGE

SEQ ID NO: 102381 - protein, 91 aa, Unknown
  Obtained from environmental sample
  misc_feature (1)..(91): Xaa is any amino acid
MTIIQTNRFKKSYKQLHKNQLTDVNNAIEAVIADVNIGERKKGDLSWLRVYKFKTCGRLTLLGYMVNTNDEIDLTFVDIGSHENIYRDLKK

SEQ ID NO: 102382 - protein, 172 aa, Unknown
  Obtained from environmental sample
  misc_feature (1)..(172): Xaa is any amino acid
LAAVFGVSVGVSDHSSDPELVPALSAAMGASVIEKHFCLSKTDPGLDDPIALPPQEFSQMVRAVRRAVEIGARETLDFYRRERGEELVGQILGSGVKELAPSEKANYHLTNRSIHALRDIQKGEILKRSDYAVLRTEKILRPGLEPCWEKLIEGRMAREFIPAGEGIRFEDI

SEQ ID NO: 102383 - protein, 272 aa, Unknown
  Obtained from environmental sample
  misc_feature (1)..(272): Xaa is any amino acid
LKAGPVKIRPAFFIALRYLLGRAREGGRYLRGAAAGIALSLIPIIVTLIVADGMIRGITDRYLELGTGHLQIYNYFNSQEPEAVLPQIKGLPGVRGAWPERHGLGVVFHGPSSKGVTIRAVEKSFWEDPGSMKYLKVLSGEANTDNARDVLLGEDLANSIGASAGSTVRIMTIRSSTGGSYIPRVTPFTVRGIISSGYRELDSLWCIMSLEAGKQILPDSGTAFLMLKIDDPYSKADSMVNTLYGLLDPDYGVYTWKMLPSSQYSSYESTRQ

SEQ ID NO: 102384 - protein, 74 aa, Unknown
  Obtained from environmental sample
  misc_feature (1)..(74): Xaa is any amino acid
MIIIGEKLNGSIPSVAKAIAEKNEQFIRELAKKQSEAGANFIDVCASVPEVREPEVLEWMINLVQEACDTPVCI

SEQ ID NO: 102385 - protein, 100 aa, Unknown
  Obtained from environmental sample
  misc_feature (1)..(100): Xaa is any amino acid
LNWGEPDDSGRRSPVAINSSEYNFDCDTVIVALGNEPNPLISKTTGGLLTDKRGRIVVNDEQKTSLEKVYAGGDIVLGAATVILAMGEGRKAAAAINALF

SEQ ID NO: 102386 - protein, 264 aa, Unknown
  Obtained from environmental sample
  misc_feature (1)..(264): Xaa is any amino acid
MNSMEPPKTEMFYSRESPKAGDTLYLKVTVPQGWKINSNRVPEDFLVPSSIEAIAKGIAFDSTIWSKPIVERNELLNMDLLLLRDTFTVALPIKSIEANYNPYDAKLKFTYQACSKICLPPKTIEISFNPVLQKKKVELETKENSSLPIYILLAFIGGLLLNAMPCVLPILFLKIFDLVKKTGESKRNMLKWGFATASGICFSFFVIALIISGLRLTGNAVGWGFQFQHPAYTAAMVLCLAIFALNLWGVFEIWMPGHVLNVWE

SEQ ID NO: 102387 - protein, 198 aa, Unknown
  Obtained from environmental sample
  misc_feature (1)..(198): Xaa is any amino acid
IYHNSTGTLAISGGTLSASYCAVMNQFIGTVSITGGTVSATGYAVSNAGSGTVSITGGTVSATGCAVYTLSAGMVNITGGTVSATSGYAVYTYINACKITVSGTAKVTSANTNTEQGTIYLRGGSDTTTVLEITGGTVENTSAGTGNAVRNDSIGAVSISGGTVSKAGDGNYAVYKGSFTGGITIGAGATIVGNKYGF

SEQ ID NO: 102388 - protein, 171 aa, Unknown
  Obtained from environmental sample
  DOMAIN (92)...(127): Sel1 repeat
  misc_feature (1)..(171): Xaa is any amino acid
GPAVFEQAAKEFNSLYSGDAEAQFKFGVMYINGHGVQRDVDKAIYWYQKAAEQEHVKAQLSLGVIYDKGIGVPQDYAKSAQWFKKAAVQGNADAQFLLGIQYLQGQGVIRDQQKGCDLLRASAEQGDQGAIELYNDVCIAENDVKEKDVEKRLKDEIARLVKSAEDLGRLQ

SEQ ID NO: 102389 - protein, 248 aa, Unknown
  Obtained from environmental sample
  DOMAIN (74)...(235): MatE
  misc_feature (1)..(248): Xaa is any amino acid
LNTILNYIFILGLGPIPGLGVRGAAIATTTARYTEMLILVIGCYVFRYPPAGKLKELFAFNSAYAARYLKVCLPVIFNEIVWSTGVSIQNVILGRSSTEAIAAYSLTNTVSQLTWMILIGLANGVAVLIGKKIGEGKEKEAREYAFRINRFIPLVSLGAVAILLPISRLLPHVINSEPEVMRVSTLMFIILSCAYPFKSVNLSMVLICRAGGDTVFCAFFEIVPMWLISVSLSAAAAFLFSAPAPHIF

SEQ ID NO: 102390 - protein, 287 aa, Unknown
  Obtained from environmental sample
  misc_feature (1)..(287): Xaa is any amino acid
GLGRYYNLNGDKFDKNAKIYEGNFEKDDFDKINPFAMVNCASQAYAGCEFWFHYTPKEADWQPFLKRRGLIFCDGEFLTQVNYTWQLSQLPGSYFVEDSGYQIFVRLKDDSHPKDHVITYTCRDQLFAPAEPYMSYVRVKGLEFEYVGNGCPGSQKGALSTFCGHHWILDDNKVRWANGLGIDIGHESPMRLSGKPVGGTLVRRNHVSYCGVGGIAGAPNYPERNEGILLEYNILENNCWHDIEFNWESGGIKVHCVHNSLIRFNVVKNNGYGPSIWTDFGNANERI

SEQ ID NO: 102391 - protein, 47 aa, Unknown
  Obtained from environmental sample
  misc_feature (1)..(47): Xaa is any amino acid
NLAGGFRIIKKDGSAYYDFSAEAVAEMLSAYLNPQLAEILKASAKNL

SEQ ID NO: 102392 - protein, 206 aa, Unknown
  Obtained from environmental sample
  misc_feature (1)..(206): Xaa is any amino acid
VGSYYYLVSQLPYLIYGQAPPMSPDAFRSLARPLLTDKDAALLDLVGLDPQPLKAGDDGHSYAENAPASGCDFIDGWREWERCLRLNLAKHRSIKTKREGAAPVEPPVFPADATAVAVKAVVAAESPLEGETLIDKARWNAIETLQGSDHFDRNTVFAYLLKLILLERRASFQTDIGFAEYKSLYASILESAAAFGGAQSSAGVSK

SEQ ID NO: 102393 - protein, 83 aa, Unknown
  Obtained from environmental sample
  misc_feature (1)..(83): Xaa is any amino acid
SSQPAEGLILAIQKKTGWKLHNIKVAFDSSVVIIAAAISFIIIKEIVGIREGTLISMIGIGRCLGFFTKHLGAQIDALFRLSE

SEQ ID NO: 102394 - protein, 268 aa, Unknown
  Obtained from environmental sample
  DOMAIN (113)...(268): Bacterial DNA polymerase III alpha subunit
  misc_feature (1)..(268): Xaa is any amino acid
GYIQAGKIDEAEKKAIYYRDLFGRDDEGNPNFYLEIQDHGIPSGVLRGSDLSQKDINKAIAAISQKTNIPLVATNDIHYLEKDDYIAHDILLCIGTGKVRTEEKRKKYYGDQFYFKTGDEMAEIFADYPEAVENTVKIARRCNADVPKIKTEELPQYLPEFEIPEGFSEPSEYLRHLAAEGLEKRYAKVKESDLNKWEEIKKRKDYELDTIINMGFTGYFLIVADFINYAKGQNIPVGPGRGSGAGSIVAYSLRITDIDPLKYGLLLN

SEQ ID NO: 102395 - protein, 128 aa, Unknown
  Obtained from environmental sample
  misc_feature (1)..(128): Xaa is any amino acid
MARTSRKNRAPQTAAPETKETVYNAGLYLRLSLPDSGKKDGESIANQQEFLERYVAGHPGLVLKQIFTDNGESGVDYQRPAWNGLMRECRAGRINCIIVRDLSRLGRNYLETGELLEKILPMLGVRLI

SEQ ID NO: 102396 - protein, 165 aa, Unknown
  Obtained from environmental sample
  misc_feature (1)..(165): Xaa is any amino acid
MAAGKEQSALAKRPYRILKYLRVSAEDIDLDGFGKYESNSIQNQRAYIDGFISRMPEFQGCEVEVSEEADDGKTGTNFLRGGVQRVIEMAQKGEIDCIIVKDLSRFGRSHIEAGDFLEQKFPAWGVRFISINDCYDSALLNGGTAGIDIAFRNLVYELYSQDLPK

SEQ ID NO: 102397 - protein, 131 aa, Unknown
  Obtained from environmental sample
  misc_feature (1)..(131): Xaa is any amino acid
LARFDAEIGEATREIKRIASLKQAAFEDYASGLLAASGYQYATAKYEADAEKQEARLEAAKREKAGYAENATPSNKWLAAYSRFTDARELTAEMAEALIERVEVSGRDKVHVAFRFRDEFEAVKKYAEGAE

SEQ ID NO: 102398 - protein, 260 aa, Unknown
  Obtained from environmental sample
  DOMAIN (58)...(74): KWG Leptospira
  misc_feature (1)..(260): Xaa is any amino acid
VEEEWSAGRIKVAVSDRRHGWLYGLADEAGHLVVEPSFREIQGFGPNLLAGASDREGRYGFINLQGAWAVPPVFGRVEPFAANGLAPASRAGEELWGYINAAGEFVIPPIYELAFTFDGDRAKVRSEDGLYSLINPKGQAVGPNKFVYLGDFDPGGLAPAQKEADGLFGLVNRKGVWAVPPRFERVLDFNGNLAPAQADGLFGFINRSGQWVIKPAFGNVDDFETRLGRAPAEQSGSWGLIDTAGNWVVGPEHLLLLNAG

SEQ ID NO: 102399 - protein, 155 aa, Unknown
  Obtained from environmental sample
  DOMAIN (35)...(112): Bacterial Ig-like domain (group 2)
  misc_feature (1)..(155): Xaa is any amino acid
MNRQHFSFAAALLALVFSLVTCGGGGENDNGRVVNVTGVSLNRSALEIGVNEEERLVATVIPSNATTQTVSWSSDNTGVATVTNGRVTGVGSGSARITVTTENGGYKANCDVSVRNIPVTSVALNQSSLTLSPGGTGTLVATVQPANASNQNVSW

SEQ ID NO: 102400 - protein, 66 aa, Unknown
  Obtained from environmental sample
  misc_feature (1)..(66): Xaa is any amino acid
ESIFVKQMLNVMRKSVKKTGFIDGGQAEEIFTDMLYDKYAEEMSRSHTLGLSRTIYRQLTGGKKWS

SEQ ID NO: 102401 - protein, 219 aa, Unknown
  Obtained from environmental sample
  DOMAIN (26)...(219): Flagellar P-ring protein
  misc_feature (1)..(219): Xaa is any amino acid
MGKRIITGIVLVIFASSVGYGAVSARIKDIATVRGMRDNQLIGYGLVVGLAGRGDSPRSALTRQTIRALLANLGITFDEGEMQASNSAVVIVTATVTPFAREGDQIDATVASLADARSLAGGILLQTPLKAANGTIYAVAQGQVLVSGSSETTTAAGAVPKGALVERGVPASFFEDNIVRISISDRDFTTMDNIAKALAERFEKLAYRVEDPTSISLTI

SEQ ID NO: 102402 - protein, 302 aa, Unknown
  Obtained from environmental sample
  DOMAIN (145)...(302): Adenylate and Guanylate cyclase catalytic domain
  misc_feature (1)..(302): Xaa is any amino acid
GHAAEGDNARRQISFTDTAGVRYFGGYYRLTGTDVAAITTIPHDVVFEAVRAVTRKNIFLTGVVLFMAVLFIWFFSKTISSPVRTLADAALRIEGGDFGIELEPRTHDELGLLTESFGKMTSALSIFGRFTNKDIAVRAMRGEIKPGGLPRHATIFFSDIRGFTEKSENFTKVFGGEASNRIVMWLNEYFTHMVDCVEQTGGVVDKFIGDAVMAHWGTAFTAGSPAADAFNCVKSALMMRQALMEINAVRKKNDPGNPEIRIGCGINTGIVTSGQIGSEQRMEYTVIGDPVNLASRTEALNK

SEQ ID NO: 102403 - protein, 184 aa, Unknown
  Obtained from environmental sample
  DOMAIN (64)...(178): GtrA-like protein
  misc_feature (1)..(184): Xaa is any amino acid
FGFEPEITARAADARCRVYECAISYNPRTYEEGKKIGWKDGFRALYCIFHYSAHTAPLPMQILIYLFIGGVSMVSNMVFFILGDLLSVPVNYSIVGAFVLAAAVNYVLCVLILFRHKARWRTSGELFFYGVATGLMGLIDFGLTRVLIALSGWLILPKFAAAVAGFVGNFLLRKWLVFPERKKK

SEQ ID NO: 102404 - protein, 233 aa, Unknown
  Obtained from environmental sample
  DOMAIN (1)...(202): Domain of unknown function
  misc_feature (1)..(233): Xaa is any amino acid
YEWIEWHKSKGVEKFYIYDNGSDDNTEEVLRPYITEKTVEYTPFPGKRVQLDAYDDCLERHRFDTRWIAFIDADEFIVPLQNDSIPEFLKNFEEFSAVEINWLCYGSGGAKKRETGGVMERFRTHAALDYQDNRYVKSIVNPRRIINLPSVHEPACLSGKIVDTHGTIISRDYKDRPPLLDKIRINHYSIKSLEEFLEKRSRGRAYRGTTHKMDYFWKRDRNEINPDIDNNTL

SEQ ID NO: 102405 - protein, 228 aa, Unknown
  Obtained from environmental sample
  DOMAIN (10)...(227): D12 class N6 adenine-specific DNA methyltransferase
  misc_feature (1)..(228): Xaa is any amino acid
LAVTRPLLKYHGGKWILAPWILSHLPEHRVYCEPFGGGGSVLLRKNRAHEEVYNDLDGEIVNLFRVVRDCGEELKRKLELTPYSRAEFDLSYEPTDDPVERARRTVVRSFMGRNPASATQAEGSFKSKQVKSYITIAKVWMKYPDALHSITERLRGVIIDNDDALDVIRRHDSPDTAYYVDPPYLPSTRDAGRDYRHEMTEEDHVKLAELLNSVEGKVVLSGYPSDLY

SEQ ID NO: 102406 - protein, 60 aa, Unknown
  Obtained from environmental sample
  DOMAIN (14)...(49): Sel1 repeat
  misc_feature (1)..(60): Xaa is any amino acid
AIQWLEQASNDGHAEAKIKLGAAYIEGIGVPANKEKGLSLLREAAALGDKKAQTLLRELR

SEQ ID NO: 102407 - protein, 281 aa, Unknown
  Obtained from environmental sample
  DOMAIN (223)...(256): Tetratricopeptide repeat
  misc_feature (1)..(281): Xaa is any amino acid
DKAIAAYDQAIRLNPDLAVTYNNRGAAYAGKGDFDKAIADYDRAIQLNPKYAKVYLKRGKAYFYGKNDFGRAIDEFDQAIQHDPNYAEAYTRRGLAYLALDNYHCAIPDLNQAIQLDPNYDWAYYNRGLYYDMIGDYDRAIADFDKAIKIDPNYADAYDARGSAYSKKGDYDRAIKDFDQAIQINPKNMLFYFERGLAYRLKGNSDRAIDDFSQAIRLDPDCEQVYNSRALEYSSNRDYDRAIEDYGQVIRINPQNSDAYYERGRIYEVKLGDHDKAIADY

SEQ ID NO: 102408 - protein, 293 aa, Unknown
  Obtained from environmental sample
  misc_feature (1)..(293): Xaa is any amino acid
ADYGGGVYHGNGTFTMSGGHIYGVDAPTGYPNTVNNTNSNGTAFCKGGNGTASYDGAYGTGAIVTTVYTLPLQSLPVAKVNVDGYKYGYPTLTEAIAAAPTGTNINVDNPIVITILRNITLPETGMSANTGYTISDNKHIKLIVEAGENRTISALAGNYRLFTVNLNASLNLDGTGGSLTLNGNKETAAANSSGVYVDRGIFTMNDGVTITGFKATNGGGVYLNNNTTPYTGFFTMKGGTIKGNGATNYGGGVYMNGGTFTMEGGEISDNNADYGGGVYHGNGTFTMSGGHIY

SEQ ID NO: 102409 - protein, 285 aa, Unknown
  Obtained from environmental sample
  DOMAIN (9)...(202): Amino acid kinase family
  misc_feature (1)..(285): Xaa is any amino acid
ALLAKTGCKVIIVPGVRENIDAVLKQHDINSSYASTQDSPVRVTTSEGISYVEMAAFHVASRIMTFLSGSRVDAIIGNFVRARGLGVINGIDAEYTGVVDKIYTDSLKRVLELGMVPILPCIGWSPSGKPYNVPSDEIALAVSKALGAIKLFIITATEGLNITRLTPKETEDLINTGSNFMRELKLALKASQEGVHRVHIIDGREEGAVLKEIYSNLGAGTMIYTDEYDSIRPLHSKDLPDILRLMEPFMQKGILIRRNPEQIQEKKTDYSVLEIDGSIRACGAL

SEQ ID NO: 102410 - protein, 282 aa, Unknown
  Obtained from environmental sample
  misc_feature (1)..(282): Xaa is any amino acid
MPDYECDDHIIEAKVRLDSLGGYSAAGIIFRIMDEESYYMALVSTKGYFRLDVVKDNAPKTLIAWTEISDFNGINFTMNIITCGACLIFLVNGKWLAEVADSTVDYGKLGFVLASYESVEESNEYVCKAMLDYLSIDTRVKSIEDCYKKWTDDSNINAEWRLRLAETYAVMDEPAKALDQINRAWKRRDEVIKTVSNTAEVRTKRELLLAARMSFRIREYKTAEEYINMILDQWSDSAEGKLACIEKIKILYELNKFAELKEFIVKNQVNINKDIDYYTLLQ

SEQ ID NO: 102411 - protein, 93 aa, Unknown
  Obtained from environmental sample
  misc_feature (1)..(93): Xaa is any amino acid
LERVIIGNNELLKNVLIDIEKGVRNGINSDIIAKKHALSESHLHKLFRSTFNQPLGFYIRTYKLAESIGDLLNTKLKILDIALGYGFEYEQSY

SEQ ID NO: 102412 - protein, 71 aa, Unknown
  Obtained from environmental sample
  DOMAIN (8)...(62): Chorismate mutase type II
  misc_feature (1)..(71): Xaa is any amino acid
MDIDKLNEEMDSVDDQLLNLFERRMELAQDIGRQKKELSQPVADSERERKTLYRLCEKAHPELAGYVKVLF

SEQ ID NO: 102413 - protein, 52 aa, Unknown
  Obtained from environmental sample
  misc_feature (1)..(52): Xaa is any amino acid
MMGFSARYASGTLKADGVEIEDARWFSRDSLPTLPGPESLSRALIDRWLALK

SEQ ID NO: 102414 - protein, 260 aa, Unknown
  Obtained from environmental sample
  DOMAIN (1)...(260): Beta-eliminating lyase
  misc_feature (1)..(260): Xaa is any amino acid
MVGDEASAGGRSYFKLVAAGQDIFGYKYIQPVHQGRAAEKVIYGLLLEKGKYSISNMHFDTTRAHVELAGGRAIDCNIKEAEDPAARIPFKGNMDVKRLQELINEHGAKNIGVVIMTITNNSAGGQPVSVANIRETSEICKKNGIKLCIDAARFAENAYFIKRREEGYANKSIKEIVREVFSYGDLFALSAKKDAIINMGGLVGVKEDAALFQGCKERTISFEGFISYGGLSGRDLEALAIGLYEGINEDFLEYRIGQVE

SEQ ID NO: 102415 - protein, 176 aa, Unknown
  Obtained from environmental sample
  misc_feature (1)..(176): Xaa is any amino acid
IRGSDKSYNDLKQAYQIAILAKDRFFSDEVILHTFEYYDREHAVPLNGKSRIITLELSKVDKVIEKPIMDMSAPEHWGIFFRYLTDKAKRGKINEIIKCEEGIAMASEVLITISKDEEERFRLMSKEKYELDLQSKMTYEKRQARQEGKQEGKQEILDLLKSGKSAEEIIRDYSSK

SEQ ID NO: 102416 - protein, 274 aa, Unknown
  Obtained from environmental sample
  DOMAIN (29)...(202): Radical SAM superfamily
  misc_feature (1)..(274): Xaa is any amino acid
MQHLMAKCALRYACPAARNLALGRHEAPLPVSRACNARCVGCISQQEKGSKIRVTPQDRMNFTPTADEVLEVMLHHAGEEKRPVFSFGQGCEGEPLTQAALLTEVVRRFRAAGGGGTVNLNSNASLPGAVAALAEAGLDSLRVSMNSAREECYAAYFRPQGYAFAQVRESMALARAAGVFVSVNLLYFPGVSDTEEEIAALVELVQSCGINFLQLRNLNIDPELYMELLAPMARGPSVGFGNFKKRLRKACSRLGFGYFNPYLGDDGDRMTQPE

SEQ ID NO: 102417 - protein, 113 aa, Unknown
  Obtained from environmental sample
  misc_feature (1)..(113): Xaa is any amino acid
KGICQASAEQLSNSIKAFKKANPNYWVVAMLHWGEEYQKEPSQRQREEAYLLVDSGVDAIIGHHPHVIQDKEIYKGKPIFYSLGNFVFDQKESDRSPGLVVSLSFSILQMCLE

SEQ ID NO: 102418 - protein, 243 aa, Unknown
  Obtained from environmental sample
  DOMAIN (114)...(242): PAP2 superfamily
  misc_feature (1)..(243): Xaa is any amino acid
MRKITLILLFLSVFARTEEYSPVSFIDVFDGILLNSGKVFIYNYGLNTAFMAGGTYAFVETGIDWEWRQYSYNHKAISSAGLPAVMAGGLAPIAVPLSLYGVGSYREDSKLQTTGVAVAQASIISTILTTGIKAFTSRQEPHIWGDDRRDNAEDFSDDFRFGFFRRVPFDGWPSGHTSAAWAMAATITEFYPDNIPLAIGLYGYAAYIGLGVSTTIHCLSDGFAGALFGYAVGKTVAQHFINK

SEQ ID NO: 102419 - protein, 206 aa, Unknown
  Obtained from environmental sample
  DOMAIN (72)...(110): WD domain, G-beta repeat
  misc_feature (1)..(206): Xaa is any amino acid
MKKFLPLLVAVLFFSCTSPPPGPRIEQDYIREDETLIKAPAPSPKVEEHSFRQERIIQDREEIIREEVPVAPPDVRVFPQVSGTVEAAVFSPDGRYVLTGDGDGAVKVWDAETGVLRASYYGHGKLVKSVAWSPNGKLIASGSWDNTVRIWNVSDLSSGTGEPLSLKHERSVYSVAFSPDSRFVVSGSSDKTVRIWDAANGREVRA

SEQ ID NO: 102420 - protein, 257 aa, Unknown
  Obtained from environmental sample
  misc_feature (1)..(257): Xaa is any amino acid
MADIYMNEIWSAAFSPDDRTVIASSANNQILKWEIDANGTYRYKGAKEKLLGVVFSLSYVSNGTRILAGISDGTARLYNAEDLHEIACFVYFTGEDGRAAVKGRGTSAEAEQAISDIDGEWLTITPDGFYRGSPKGDRFINVLINGRDLTSMDAYSDFFYRPDIVYARLNGLPDPEKPVFTIQQAASFRPPAISILSPRPGSTVSGNGRVDISVSITDRNRPIQDIRILVNGVRLGSDELRAVRGTTGLTAEEGGLS

SEQ ID NO: 102421 - protein, 213 aa, Unknown
  Obtained from environmental sample
  misc_feature (1)..(213): Xaa is any amino acid
MSSGGAVIISSSGTVNAESCIFSRNQASYGGAIYNDGNLTVTGCTFYGNSSGSYGGAIYNGSTLTLTGNLFYGNTASDYPLVYPGGTRTSGGYNVVDVPYGTNSTQSGWTATATDTTISDLPVSGITFKLLQDSGAANIITTLPADYPALDFYGNAITNGAAAGAVQASVSGTGFYLDFSINNPAAGTVNISPVPDEDGICSGTTTLTATAEA

SEQ ID NO: 102422 - protein, 267 aa, Unknown
  Obtained from environmental sample
  DOMAIN (81)...(104): 4Fe-4S binding domain
  misc_feature (1)..(267): Xaa is any amino acid
YNTIDKSLGEVHEIKYPGTADGKLNVKPPFATSKDPWIREVLGAVSVQQGDKLPVSKIPNDGTFPTATTQYEKRAVAERVPSWNPEVCIQCGLCSAVCSHACIRMKNLTNAEASAAPAGFKTAEIKPKPVEGKKTALAISAEDCMECGVCINCCPMSKDTAKPTALSWKSFADDPAYHEEQAKAWYYFLSLPEVPAAELNLGTQKGLAYQRPLFEFSGACGGCGETPYVKLISQLFGDRMIMGNATGCSSIYGGNLPTTPYCQRADG

SEQ ID NO: 102423 - protein, 228 aa, Unknown
  Obtained from environmental sample
  DOMAIN (16)...(227): Phage late control gene D protein (GPD)
  misc_feature (1)..(228): Xaa is any amino acid
VAVEQDGLRVAEIQAKILYEDVDIFADLKDYLFELSYTDSLEGTEPDKVTVKLENSAGPFSGPLYPVKGAALAFEFGVSTGDTFSSGKGYRIDTIKVVGGRGTGDTVEWTATGQLPSAAIHTRRSQAWTDTTLEAVAKAIADKHGLELVYECNDKINFTRLDQANRTDLELITKLAKEYGLACSIKGGKNGKPTLVVLDPADRASKPPAFTIRRSDCDTFSFTDRAGL

SEQ ID NO: 102424 - protein, 295 aa, Unknown
  Obtained from environmental sample
  DOMAIN (2)...(196): Type III restriction enzyme, res subunit
  misc_feature (1)..(295): Xaa is any amino acid
ENNYANPLVRNTQNIDVKMETGTGKTYVYTRLIHRLRHEYGIFKFIILVPSVAIKEGIKMSIASDDWNKHFRQEFGNQSIHLGIINAGDFDAKKGKRKQIPEALRSFCDASAVEDKSIHVLLLNDGMLSSSSMSKSDYDSTLFGNISCPMEGLKATRPIVIIDEPHRFNKTNKAWKTITEGLCPQIIIRFGATFPEIKTGGLKKIDYENLVYDLNSIRAFNEGLVKGVHIEYPMLSDTKTELVKYKVKQIERGKSVTFVKVGSKKEHKLCIGEDLSFVDPLFSGGITLEEASSAT

SEQ ID NO: 102425 - protein, 277 aa, Unknown
  Obtained from environmental sample
  DOMAIN (1)...(128): BPG-independent PGAM N-terminus (iPGM_N)
  misc_feature (1)..(277): Xaa is any amino acid
VIAENGKPVGTIEDGDSVIYFNFRGDRALEITAAFEEEKFNKFNRVRLPKICYAGMMEYDGDTHVPKRYLVSPPSIDRTMGEYLAATGVRTLAISETQKYGHVTYFFNGNRTGKFDDKLEDYVEIKSDIVPFEERPWMKCADIADRVIEAAGSGKYDFIRLNFPNGDMVGHTGIYQAVVCSMEAMDLQIGRIAHAVEKAGGIIVITADHGNSDDMYEHDKKTGAVSLKPDGTPKAKTAHSLNPVPCVIFDPECKGEYPAKSGEGDLNEGLGISSIAA

SEQ ID NO: 102426 - protein, 238 aa, Unknown
  Obtained from environmental sample
  DOMAIN (26)...(238): Amino acid kinase family
  misc_feature (1)..(238): Xaa is any amino acid
MNSISNNDRAGVLVHALPYIQSFQGKTIVVKYGGNAMLNDELKRAVIEDVILMSCVGIRTVLVHGGGPEIEAMLKKTGKESRFINGLRYTDEETMDIVQMVLCGKVNKEITALIEKTGGKAIGLCGIDGAMLKASRMKSEDLGLVGEIDQVDVSMLNAVLDAEFIPVISSVAYGTGQDEGKALNINADIAAAKIAAALGAEKLVLMTDVRGILRDIKDENTLVKSIKRPQLNTLKEEG

SEQ ID NO: 102427 - protein, 285 aa, Unknown
  Obtained from environmental sample
  DOMAIN (176)...(285): Probable molybdopterin binding domain
  misc_feature (1)..(285): Xaa is any amino acid
GNVPVEEALAKYFSAWEGLLAPKFEEIPVTESLGRVSRQAIYARLSSPLFNSAAMDGIAVTSSQTAGARESAPLILTEGKDFIPIDTGDPVHPPYDAVIMAEDVIEIVDSVENGNGKKVKILEAAAAWQHIRPIGEDIVAGEMILPGRHCVRPIDIGVLLSGGITSIEVYAKPRVAIFPTGSEIVESASIDRAGVLPKEGEIIESNSRMFQAMVNQAGAAAERFAPVPDDYELFKKNIFSAAKEYDMIIINAGSSAGREDFTVHILRELGEVIVHGVAIKPWQAG

SEQ ID NO: 102428 - protein, 61 aa, Unknown
  Obtained from environmental sample
  misc_feature (1)..(61): Xaa is any amino acid
MIVGGNIQHKTRTMTTTITMLRNTGDFAQGITMGILLLIIAFILQSLSDFLHKGEAPEENL

SEQ ID NO: 102429 - protein, 193 aa, Unknown
  Obtained from environmental sample
  DOMAIN (25)...(193): ABC transporter
  misc_feature (1)..(193): Xaa is any amino acid
MTVTALEKKLGDFSLNIEKLVFSHAGIYGLVGPNGSGKSTLAKLITGLLEPDHGRVDVEGLGPRDITLISRKPYMMDDTVYNNLVYPLRLRNIAPDPKLTDEYLGLMGFSRRQKQKARLLSGGEQQKLSLLRALIFRPRLIVADEAMTALDIDSLDFFEKLILESQKKDPIIWVIISHQMLHVTRLVEKIFFM

SEQ ID NO: 102430 - protein, 155 aa, Unknown
  Obtained from environmental sample
  DOMAIN (46)...(128): Acetyltransferase (GNAT) family
  misc_feature (1)..(155): Xaa is any amino acid
AYYELSLKLDEETPFRLYEAGERPYDPNLFFRETADFLKNPCSIIFVAEKDTRLVGYLQATGRIARRVRHVITINVAILQAYTGQGLGGKLFGAAEEWARQCGIIRLDLSVMVNNFPAQKLYRKLGFVREGIKRGSMFVDGEYIDEYYMCKWLED

SEQ ID NO: 102431 - protein, 139 aa, Unknown
  Obtained from environmental sample
  misc_feature (1)..(139): Xaa is any amino acid
MNTICANGWKIDMEDYNFEKLTKLLDDSSGQLYGKAVCAVSKDGKRVFSHSVNCSMDVMFDLASVSKILTGTTVLKLIGEGKLSLDNSLDTLFHTEALGPVTKERFKDITLQSLLTHSSGLPAWFPFYAQEGSFWDVLE

SEQ ID NO: 102432 - protein, 181 aa, Unknown
  Obtained from environmental sample
  DOMAIN (7)...(181): BadF/BadG/BcrA/BcrD ATPase family
  misc_feature (1)..(181): Xaa is any amino acid
MGNPCFFGIDGGGTHSRLALVDREGKVLARSEAGSTNIYSVAKDEVFANLSTLLGSALKSAGLNNRDIAAGCIGSAGLGRAEEQELFCDFFDSLLGKDIPVKLCSDGEILLCGGLENLEGYCLIAGTGSIALGRSREGALVRSGGHGYLLGDESSAAWTGRTAIARTLRSLEGRDISTGML

SEQ ID NO: 102433 - protein, 227 aa, Unknown
  Obtained from environmental sample
  DOMAIN (30)...(213): ABC transporter
  misc_feature (1)..(227): Xaa is any amino acid
MQTIIRIESLVAAQGGARVLGVSELAVGRGQVLAVLGPNGSGKTTLMLCLAGLLEPVEGKIFFKGEEVAGRAAFAKLRRHVTLAFQEPLLFDSLVGANIESGLRLRRVPKAERRERAAAAAALFGVSHLLGRSARKLSGGESQRVSLARAFAIGPELMLLDEPFSALDAPTKRPLMADLGRILKDTGTTAIFSTHDINEATSLASHIAVLNGGRLVHAGEAGEVAGN

SEQ ID NO: 102434 - protein, 219 aa, Unknown
  Obtained from environmental sample
  DOMAIN (22)...(219): Bacterial sugar transferase
  misc_feature (1)..(219): Xaa is any amino acid
FFGILGIDISNKLKFIWNLRLKRIIDLAVVIIGGILISPILLLISILIKITSRGPVLYKQKRLGKNGKYFFTYKFRSMAVDAEQQLQNLIDKDSLLKTEWEQKHKLQNDPRITSIGRLLRRTSFDELPQLINILKGEMSLVGPRPIVDEEVIKYGEDYNLVFSNKPGLTGLWQISGRSDTKYHDRIAYDTYYLQNWSIWLDLWIIYKTFGVVISGKGAY

SEQ ID NO: 102435 - protein, 275 aa, Unknown
  Obtained from environmental sample
  misc_feature (1)..(275): Xaa is any amino acid
IARIRARIHHGFTDVLTRYHKLFGYDAFFMTGVDEHGQKVQKAAAARGISPQQHVDEYSEHFRNLWPKLNIDYGYFIRTTDGYHKKFVQDSLQVLFDKGEIYSKEYSGWYSVGEERFFEESELVDGKDPISGRAVEWLCEKNYFFKMSNYQQKLIDYINENPNWILPDFRRNEVLGFLKKPLNDLCISRPKSRLAWGIPLPFDEDFVTYVWVDALENYISGVQDKKHKDGSQMWPADFHIIGKDILTTHCIYWPTIIMAMGWELPQHVLAHGWWL

SEQ ID NO: 102436 - protein, 237 aa, Unknown
  Obtained from environmental sample
  misc_feature (1)..(237): Xaa is any amino acid
MRINFAIIIALIAGLLVLSTGCELPAGFDDNSVKSGISYSVSQSGGTEKTADSTGIVFKFSGAIDGLDISATDITVAGSAVKGPGATFAKSGDGDNWILSPITVRTAGDATVKIWKDGIETEAKSVSIYKKQSAPSDIRYTVEQTGGTDGIVDSTGIVFRFSSSIDALGATADDVSVEGAAGKASGTAFQKYSGNTWLLSPITVSKQGEATVKINKSGVDPATYEVLVFKQGEADQE

SEQ ID NO: 102437 - protein, 94 aa, Unknown
  Obtained from environmental sample
  misc_feature (1)..(94): Xaa is any amino acid
MTASALTGDGIADVWGTIQRFVESTKASGVFKKRRQAQERDWLRAMIESHLIEKFYANNEIQRLLPALDLAVMSGEIPVAAAAQKLLDAFQVTD

SEQ ID NO: 102438 - protein, 167 aa, Unknown
  Obtained from environmental sample
  misc_feature (1)..(167): Xaa is any amino acid
MAVDVRHPIDRWLLMFALLLAVMGMVWVYSATGTRAGFAYVVKQGVSGLVGVALMLAFSQIDLSGLRESPKTMVALYIVFIVFLSAVFYFPAKNGAHRWIAYHGHQLQPSEFFKPFSVILTSWWMVKYRDAWAKHQETLPKLVALFLILLVPLCIIFKEPDMGTTFL

SEQ ID NO: 102439 - protein, 269 aa, Unknown
  Obtained from environmental sample
  DOMAIN (20)...(269): Aminodeoxychorismate lyase
  misc_feature (1)..(269): Xaa is any amino acid
FSRIFENGEDIAVEFDGEAVTFEVFKGESAKSVGDRLAALGLIRSRLFWQILCRYAGGQIKTGNYRINVPSESLAIHRLLVSGKQVLLRVTIPEGLTLSKTAKLMESAGICAGEEFIASASDPAITGFYRIPGPVMEGYLYPDTYLFPSGYPAEMVVRAMADNFFARIAKMDERAPVMPPDELYKRVILASIVEREYRLDEEAPLMAGVFQNRLNIGMALQSCATVEYVITEIQGKPHPEVLSTRDTEINDPYNTYIRPGLPPGPIASP

SEQ ID NO: 102440 - protein, 167 aa, Unknown
  Obtained from environmental sample
  misc_feature (1)..(167): Xaa is any amino acid
MKKENLHNLVKTRIESADSTGSVCGCNPVKEKSVAGAIAGSVLKIILGILVLSAFVFLSGCERIKEVYGKKVLGGPVEFEAPVYAVNTTLAVQGQIKDYLALSGDIIAGSTVDAYSEVAGKVTEVYVSVGNRVSRGDKIAAVDPSRPGMSYRIGYATSPISGNIVML

SEQ ID NO: 102441 - protein, 290 aa, Unknown
  Obtained from environmental sample
  misc_feature (1)..(290): Xaa is any amino acid
TSLDQIRNTVISYKGGGLVNGQIQPPRSVLLRDLADVYEDYRDETSIVYVDGASAVSLSVQKQSGKNSVQTAKDLRLRLENMRKELPPDIEITEMFNTTDIIQSSLNQVTSTAISGAVLAVLVLFIFLRSFKPTLIIGISIPVSIIITMMLMYFANLTLNLMTMAGLVLGIGMLVDNSIVILENIYHYREKGAKLTTASVLGTQEMVVAIVASTLTTICVFAPLVMFQGLLEIAGELFSGLAFTVVISLGISLFTALFLVPVLSSHYLPLVTRKQVPLKGALQKLDSVLK

SEQ ID NO: 102442 - protein, 259 aa, Unknown
  Obtained from environmental sample
  DOMAIN (4)...(259): Melibiase
  misc_feature (1)..(259): Xaa is any amino acid
MPILAKTPPMGWNSWNTFGNNISEELVKSIADAFIRRGLKDAGYQYIVIDDCWSEKARDKNGRLVPDKKKFPDGMKDLAEYIHSKGLKFGIYSCAGTHTCAGFPGSFEHEFVDAVTFAEWGVDYLKYDYCYKPRNTAGEDLYKRMALALRNCGRDIVLSACNWGNDGVQKWIRESGCHLYRSTGDIQNNWKSIEGIMLSQLNNACFSGIDCWNDMDMLVVGMGGSGENAYVLSTGCNETEYKTHFSVWAMMNSPLMIGC

SEQ ID NO: 102443 - protein, 97 aa, Unknown
  Obtained from environmental sample
  misc_feature (1)..(97): Xaa is any amino acid
VKETKDLQEMKKLFPYIREYQKLASKYNINDIFQDNGGKILQMLLVTGLQALPGREGNDAIDESGQEYELKSVNTLLTQSFSTHHHMNPTIIAKYRL

SEQ ID NO: 102444 - protein, 68 aa, Unknown
  Obtained from environmental sample
  DOMAIN (11)...(65): Helix-turn-helix
  misc_feature (1)..(68): Xaa is any amino acid
MKLKKIFSNNVRKYRIKQNLSQEELAEKAGLHRTYIGSVERGERNITINVMEKICIALEMSIIDLFKE

SEQ ID NO: 102445 - protein, 282 aa, Unknown
  Obtained from environmental sample
  misc_feature (1)..(282): Xaa is any amino acid
GIRKLLHFTVILAVSLFITGLLFASGFLEYADKVLYDLSINYRVIKGPETKSPLIAAIDLNDASIKALGESIDTRQAFADILEVLADSNTSAVLDFLFSIEKSNDTAFIRAVDWAQNTVIASLAVDKKTINKANNPYRELTGQERQMLQRHIWRINVLDKGKVPEAGTFILPFSALIDAAGQIAHINMDPDPDGIYRRTPLLYEWDGGYIPSLALAAEVSHLGIPVESIELKAGSYLALPLSENEVIRIPVDIQGRMLIPYTETWTNDTGRISFSTVAEAKN

SEQ ID NO: 102446 - protein, 278 aa, Unknown
  Obtained from environmental sample
  DOMAIN (1)...(267): Aminotransferase class-V
  misc_feature (1)..(278): Xaa is any amino acid
VIAVDSEGRVTPETLLKALDKYKDVRFVSVMSVNNETGSVTDIASLIDIIRKQTPPVHFHCDIVQAVGKVPIDISGWGIDSASISAHKIGGPRGIGLLYLRHSAGQSKTEVFYKGGGQENGIRGGTENIQGAIALANCMEMYANSKTLHENYESAKARWNKLITTLSAIERCTIIPQQRSLHLGVQNNNTDRFSPYILQVGFKGIPGEVLARALDDLGFAVSTGSACSSSSPERPVLAAMGIEENLRIEGIRISQGFTTTDEDIDLLLNAIAEVLKFL

SEQ ID NO: 102447 - protein, 244 aa, Unknown
  Obtained from environmental sample
  DOMAIN (146)...(221): Fibronectin type III domain
  misc_feature (1)..(244): Xaa is any amino acid
VSRTAETSVWLAKADPPLLLTPPDRQWVPAPNDLHPVIFSWQPRNVASPNSAMETSYLLELFEVVVEGSSPDRVAKSQPPIYARELAQPMQTSYSYGPADPRLTLGRAYAWRVKAVDRSGRDLFTNSGYSPVYSFTYGYDQATAPLPPVTGVQVTTKNNTATVTWQGHSDHAYYVVEYRCGDCQSWVAVDSTDQRRQLLAPLGYGVKYEVRVTAHNERRQSPATEPVSFTCVEPPRVGCDEGSR

SEQ ID NO: 102448 - protein, 166 aa, Unknown
  Obtained from environmental sample
  DOMAIN (36)...(166): tRNA synthetases class I (W and Y)
  misc_feature (1)..(166): Xaa is any amino acid
MGTFSIQGSLNLLRADLLLKGTVTCHTAEDLELRLQSGRPLRVKAGFDPTAPDLHLGHGVLLRKMAQFQKLGHTVIFLIGDFTGMIGDPTGKKITRPPLSREEINKNAETYKAQVFKILDPELTEIRFNSEWLGDLVGEGWIRLAARTTLAQLLERNDFSKRMAAA

SEQ ID NO: 102449 - protein, 87 aa, Unknown
  Obtained from environmental sample
  misc_feature (1)..(87): Xaa is any amino acid
MSVDIAAPTARIAVIGFDAKPADIAPVHITKKELAIVGSRMNCDRFPEVMELFGKKSLNTDLLISRKYPMEESRKLLTKQSPTRKTR

SEQ ID NO: 102450 - protein, 221 aa, Unknown
  Obtained from environmental sample
  DOMAIN (30)...(152): Domain of unknown function (DUF477)
  misc_feature (1)..(221): Xaa is any amino acid
MKAKLFLLFPVMLIISAPLFANSRVVDNAGLLSAAEAASLKQLADTVSLAHNFDLVIVTENDIGYARPMNYADDFFDNNGYGLGQNRDGCLFLLVMGTRDYWFSTSGRGIKLFSNAVAGKLEKDMLGYLGNGFYYDGFTVFLTDWEEFLGLDAQGMRYNVFYEYNLIMVIVAWLVSLGIGFLIVGIWKKSMNTVLPQTQAAAYIVPGSLSFGVKQDQFLYS

SEQ ID NO: 102451 - protein, 183 aa, Unknown
  Obtained from environmental sample
  misc_feature (1)..(183): Xaa is any amino acid
RNSFPHLYSSDAGEYGLAYSFPGAAKETTLPSIDKIHGDTTSGEGASIKEKFHKVLDRMKITKQERDELLARIERGLVLNEAQLESTSVRYEKLEARGLDYTGKTTIAKQAIETGSLLEITWPGRDGEPNSTIGIPQTIEKKEGENILVLRTSGNSESAARVLKIPIGKISLLRRIKQSIFGE

SEQ ID NO: 102452 - protein, 179 aa, Unknown
  Obtained from environmental sample
  misc_feature (1)..(179): Xaa is any amino acid
MKTKKLIALLLVFVFSMQHLQFVRADEENDGFASYESNYNVWDGSVAEAYQTGNGTGESPFLISNPAQLARMAQEVNSQNETDCYYELANNIDLGGLEWLPIGNAVYHFKGHFDGKRFTISNLTVNTPNTHTGLFGYISSGSIDNVVINGANVGWGSYTGGIVGYAETEVILCERGFIT

SEQ ID NO: 102453 - protein, 224 aa, Unknown
  Obtained from environmental sample
  DOMAIN (4)...(224): Domain of unknown function (DUF323)
  misc_feature (1)..(224): Xaa is any amino acid
MTGNPDIKVSMPIGFWMAETETTQELYEAVMGDNPSQFKNNAFYGEVQVRRPVECVTWYEAVLFCNRLSIMTGREAVYGVWGIADWEAYLEWVISSSTSYAVANIYADEKANGYRLPTIDEWLWAAMGADLQNPGQVSVLGATKYYSGGPSGGAVGMEGFTWLYSNSSILTHEVGKKTSNELGIFDMTGNVNEWIYGASPDSNTHAYVAGKSYLDSVSSYLYVI

SEQ ID NO: 102454 - protein, 181 aa, Unknown
  Obtained from environmental sample
  misc_feature (1)..(181): Xaa is any amino acid
MTKIDFEADATGKTYETTRGNSTPTVSVVVDPDSSNSTRSLQFTVTNYNQAPVIPVNLPSPLSHYEYVTFKFRLASTNPGTDLTDKSIMLYAAQTSTTFTSPQHQFGNANASFANNLVGSTASVTFGTEHQATWTPLTITLPATANDFNSNIRDLQGLIYIAIGINCSSMNYLLDDITFIL

SEQ ID NO: 102455 - protein, 195 aa, Unknown
  Obtained from environmental sample
  DOMAIN (6)...(194): haloacid dehalogenase-like hydrolase
  misc_feature (1)..(195): Xaa is any amino acid
MPLDLIAFDLDGTVLNSNSVISERNYSALRKAYEQGVKLVPCTGRSLYELPVELNNLIDEFGFSVFPHIITDNGAQVYDLPKKELLYTKNISRETALAILREGRKELALIYGSFGIQGATDNRGVVWEAEEAKPFVKKYQEMWDIPTADLEELIEWNGGLVKVSMNFAFKADRKKCFKEFSAWPDLALSSSAPEN

SEQ ID NO: 102456 - protein, 239 aa, Unknown
  Obtained from environmental sample
  misc_feature (1)..(239): Xaa is any amino acid
MSGKKLKAKNGWNSNGTDDYGFSALPGGRRDSRFYNAGNNGYWWTATEYTSDYADYRYMDNFHYGILNDDYYNKSRGYSVRCVADNTEYESTPWRQPQSTAAVNVYQSDSGASPSSSSYSSSAYSRSDSADSRSDKPGRERKPKPRRKSSWGIGGQYVSDFGGVITWGNSDGRLTMPCYGGGIYGFADWIYFEPIFGIVVGGADWENSDAVSHDGEELPASVWRVYANIGALVKFPLIG

SEQ ID NO: 102457 - protein, 288 aa, Unknown
  Obtained from environmental sample
  misc_feature (1)..(288): Xaa is any amino acid
ELANNGATATFTVRPNPDLGVGEHPATITINTLESVSVSVDVNFKVEGADDYKLWASALTSFGTPPCVPTNNAASPCSYTQPPAQVVQVKNVGSGTVDVTSLALSTSKGSGALTASDYIISAPSKTTLKKDSVATFTVQPRTGLSAGNHDEVITITGYSSGYKLTYEIYPTFTLTPTRTMEARPDSAVFDTLEAGYPATALPAAQTIRIVNTCDDPITLTALPTTTANFTLTALTPNTTLTARGDSTTWRRFTVRPKVGLRASQASDGGDSVYVDTIRVLGSGGASAV

SEQ ID NO: 102458 - protein, 292 aa, Unknown
  Obtained from environmental sample
  misc_feature (1)..(292): Xaa is any amino acid
DYPLKQAILDRIVKRPVKGIAQIEEAKSDIASVRYSGFLTAGVERWKEYSEQLTPLKKKPILFVMMNDTKEADDIGDWLRTKYPSDFGGEKTLVIHTDNSGDVSKKDLDTARKTARDVDHEKSPVNAIVSVLMLREGWDVQNVTVVIGLRPYTSKANILPEQTIGRGLRLMFRDNAGGYIERVDIIGNRAFMEFVEDLEKLEDLKLDTFQLGADKLTILIVQPEERKKDFDIGIPEITPLISRKKSLTEEIGAIDVMKFDINKLPLGNDITDIKKFIYEGRDILTDEKLGNA

SEQ ID NO: 102459 - protein, 209 aa, Unknown
  Obtained from environmental sample
  DOMAIN (2)...(209): Phage protein Gp37/Gp68
  misc_feature (1)..(209): Xaa is any amino acid
MTKTNIEWADDTHNPIVGCSKCSPGCDRCYAEKFAARLAGNPKTAHIYKPVITNGKWNGKINASCVCYKLPKKPSRIFMGSMTDMFYEPAQELLAICLAKMKFHPQHTFLILTKRPENAKRFFDDPSHCQPPPNLWLGVTVCNQQEANEKIPILLNTPAAKRFVSIEPMLGPVSLRWMCAWPGTEYPAMHPEHYAKGANGYTRGTDHLD

SEQ ID NO: 102460 - protein, 211 aa, Unknown
  Obtained from environmental sample
  DOMAIN (10)...(73): Histidine kinase-, DNA gyrase B-, and HSP90-like ATPase
  misc_feature (1)..(211): Xaa is any amino acid
MDTGVGIKPEDIDKLFIDYNNSDAARVRSRNQEGVSGLGLALTKKIAALMDGTITVESTLGKGSTFTVRIRQKYLNDDIVSVERLESLKNFKYSEKKHIDRASLQRVQLPKIRVLVVDDIDLNLEIAQGMLKPYGMTIDCLASGQEAVNVIRRGEPHYDAIFMSRWMAEMDGKEAVRIIRDEIGGEYAKNIPIIALTSTAVIGNKDIFLNL

SEQ ID NO: 102461 - protein, 293 aa, Unknown
  Obtained from environmental sample
  misc_feature (1)..(293): Xaa is any amino acid
LDGDAVVFASGIGTKKANQKLTSGILFIANGTTYIDGASVTEHFPTESITAIWTKQSNKNGITYTGSKNGFIEIPSISLIDRNSINNVPYIDKNGIAQTANNVIVINSENIAAIDNLYGWFLVRGNLNRNATLNVSGVAHIILENSSNVTVNGNFENAGINVSIGNSLSIYAQSLDANIMGKLTATGDNSGAGIGGSKRDSSGTINVSGGAITATGGTQGAGIGGGSTGNDNGKSGGIINISGGIVTATGSQGGAGIGGGLLGDGGTITISGGTVTAIGSIYGYMPNPNIVQA

SEQ ID NO: 102462 - protein, 195 aa, Unknown
  Obtained from environmental sample
  misc_feature (1)..(195): Xaa is any amino acid
NATLPIPANITLTNKGTITPANGSTINMAGTVNGNKIIGANVNAPTANEITSTSITINAAELLAATGQVVEYAINTANTTPINGWQTEMTFAGLTENTTYWIFARSKENSHFTAGTVSVGLQASTESSTPISPNREHSIMLSNLPTNTKVEVYNLQGKRIYSAHLENPKILTIGVQTKGIYIVKIGTQTMRVAVR

SEQ ID NO: 102463 - protein, 269 aa, Unknown
  Obtained from environmental sample
  DOMAIN (1)...(133): DEAD/DEAH box helicase
  misc_feature (1)..(269): Xaa is any amino acid
AIKLALKIIETYNGVIVSDVVGLGKSIIGSVVAHNMGLRTIIIAPPHLVPQWEDYCIDFNYHAKVFSSGKIESALQHFKEKSNFGKPWLIIIDEAHKYRNENTTDYKNLHNLCRANKVMLLTATPFNNRPADIYSMVKLFQLPSKSTLKSVYNLGLSFQELINHYKELNNKQRKKAIDEITLKQEIELIASKIRHIISPIVIRRSRLDLMKITDYKNDLEKQKMGFAETGDPQALEYDLGEIKDLYLSTLQQISPDWKVKQNSPIIKPR

SEQ ID NO: 102464 - protein, 233 aa, Unknown
  Obtained from environmental sample
  misc_feature (1)..(233): Xaa is any amino acid
VAKDVFAPNAQLDSAVSRLAKMGCNMLRLHHMDAPWTSPNIFGNTAGTRALSDESMRQLDYLISRCKERGIYIFLDFLVHREFTAADGVFDPPPDLGGKQVGFFSRKLINLQKEYITSLMNHVNQFTGIAYKDEPAIAASEFINESTIFTAFSGDILTQTYRRELEDMWEERLLKIEAAESDKASRNFAKPSPIKSSSKKSTAAKSSSSKSATAKAEFAKFKSTYKESAARLE

SEQ ID NO: 102465 - protein, 131 aa, Unknown
  Obtained from environmental sample
  DOMAIN (2)...(123): Cation transporting ATPase, C-terminus
  misc_feature (1)..(131): Xaa is any amino acid
MGAEIGRGAVLFLALLVTMMVCFLDGSVHRLTIFFTVFVFLQVWNMLNMRFFARRHVPARDFFGNRSFWFVTLAIIIGQVVIVQFGGEVFRTEPLSLAEWGVIALVSSCVFWLGRLHRAIAGMQRGSARNV

SEQ ID NO: 102466 - protein, 284 aa, Unknown
  Obtained from environmental sample
  DOMAIN (38)...(207): Metallo-beta-lactamase superfamily
  misc_feature (1)..(284): Xaa is any amino acid
VRSIDFPIITQNRYTQRTMNLEAFVLGCGGMMPLPNRYLTSVLLRREGELFLFDGGEGTQVALRKLNLRWKKISVIFVSHTHADHVTGIPGLLMLSSQVDRDDPLYIIGPPRIAEYIETSRRVLDMYINYEVIVKEITEPGVVYEGDGFRIRCFPLRHTKPCFGYTLEEDMRPGEFHPEKAMALGVPRGPLWSRLQDGETVKAADGRDVRPDEVLGSPRSGRKFSFVTDSLAFPEIAPEVANSDLFVCEGMFERELAEDAHSKKHMTAEEAARIAVSAGGVKKL

SEQ ID NO: 102467 - protein, 247 aa, Unknown
  Obtained from environmental sample
  misc_feature (1)..(247): Xaa is any amino acid
MPKIEVNEEVFYKLAGKRWDGGNKEEFEEALTCAKAELDEDSDKNLPVHERILKIELNDTNRPDLWGTAGCARQLKVYRDGKIPEYPFFSRPGGIKECTHKVKVEKSVQKVRPFLTGFIAGGKTISDPALRDMIQTQEKLAWNFGRKRRSISMGVYRIARINWPIIYKGVDPDSVSFVPLQWDSPLTLREILKQHPKGKEYAFILEREPVHPLLTDSQGGVLSYPPIINSNDLRAVQVGDTDIFVEL

SEQ ID NO: 102468 - protein, 201 aa, Unknown
  Obtained from environmental sample
  misc_feature (1)..(201): Xaa is any amino acid
VRQGIRYVKSHVEREEAALSFGSDNFNVAVLEFPYIFGVQPESEPVWTLLVKILRGMKWVTMYSKGGTTMITRNQAAQAIAGALEKTKGAKRWPIGCYNMPWKDFLAIVHKNMGMPERIVITIPNWLIKPEIKYIESILRKDGDKIGRKFNINKFLEIQSAQTYIDRVHGCNPLGVKDDDIESAISESIRLSVEFLDGVQK

SEQ ID NO: 102469 - protein, 105 aa, Unknown
  Obtained from environmental sample
  misc_feature (1)..(105): Xaa is any amino acid
DNYKKADNPALADVRSEPVIYRNVHVIWKGMATNVTVTDEGTTFDLLVGYDTRKILEGIVPVVFFIPVSINTEKPLEVLGKITVNASSDIRLEGVAIHQSGKLEN

SEQ ID NO: 102470 - protein, 123 aa, Unknown
  Obtained from environmental sample
  DOMAIN (1)...(116): FabA-like domain
  misc_feature (1)..(123): Xaa is any amino acid
FVDEIVEASKEKIVAKHVFTEKEFFFKGHFPEYPVVPGVILVETMAQSGGAGLRKIGVIGEKGLFFLATVDKVKFRRQVRPGDEVRSEIENLRISPKMIKQSGKAYVGDELAAEAEWMCLVGG

SEQ ID NO: 102471 - protein, 176 aa, Unknown
  Obtained from environmental sample
  DOMAIN (1)...(176): Short-chain alcohol dehydrogenase
  misc_feature (1)..(176): Xaa is any amino acid
MVRNNICLNSHPLGCAVSVGRQIEYAKKNLKPLTGTEPKLALIIGCSNGYGLASRIAAAFGYGAVTVGVSREKAATESHTATPGFYNNLAFDHAASKAGLISKTLDGNAFLGEMKAETAKAVRGAAAEAKIPAKIDLIVYSLASPVRTCPQTGILYKSAIKPVGESFSGKTLDMMS

SEQ ID NO: 102472 - protein, 284 aa, Unknown
  Obtained from environmental sample
  misc_feature (1)..(284): Xaa is any amino acid
GRVEATNGGIAVSNAHYGPIVVSGGTVISNNTTSNQGTILLEDKDGNVTSTSNGEDGKDSQIGLTPVIYRLTIRGGEVLSTGTGGNAVFNAGKGRVLIRSDTTVEPATFGTVRATGLNGNAIYNASTGDIVIQGNTASEIDPDDPDDTLEGYTLVQTATGSAVFNSSYGTVRIEGGKVEATGDTGVAVFAFSANTAGVEVTEETSPKPVNLITITNALVTSKNNRPNLGTIVLANNGTAGSSGDPDPNCDVIKIRQVRVLIGGTGSGGKVENTGRGIAVFNDSV

SEQ ID NO: 102473 - protein, 280 aa, Unknown
  Obtained from environmental sample
  DOMAIN (116)...(280): Conserved carboxylase domain
  misc_feature (1)..(280): Xaa is any amino acid
MSGLLKPYEGYNLIKAIKKLTDLPIEIHTHATTGMSVATLAKCAEAGAEILDTVISSLAMGTSHSPTETMVEIFKGTEYDTGLDTSLLLEIAAYFREVRKKYKKFESSFLGADTRILLSQVPGGMLSNLESQLKEQGAADKIDDVLKEIAVVQKDAGYPPLVTPSSQIVGTQAVFNVLFGRYNRLSGEFQDLMVGKYGSCAAPKNPEVVKKALEALKMEKEITHRPADDIPPEYSKLEEEAKKVLGTSTITTEDVLTYAMFPKLPPTSSKHGRMARWFSR

SEQ ID NO: 102474 - protein, 211 aa, Unknown
  Obtained from environmental sample
  DOMAIN (109)...(211): Na+-transporting methylmalonyl-CoA/oxaloacetate decarboxylase, beta subunit
  misc_feature (1)..(211): Xaa is any amino acid
MLNNKKDPVYITKMCMIIVLGALIASLATTAFSPRAKAQTTASADLPSWHNLEGKIPNSDNLPRISLGTFLKKIAETTGIYAFISDKIDKETTVIDEATGKNKTTRVAGWEELLMVAVGFLIVYLGAAKGFEPLLLIPIGFGTIFVNIPFAGMGDAPHGFLNIIYEGGVGNEFFPLIIFIGIGAMTDFGPLIANPKTALLGAAAQFGVFGT

SEQ ID NO: 102475 - protein, 68 aa, Unknown
  Obtained from environmental sample
  DOMAIN (1)...(67): Biotin-requiring enzyme
  misc_feature (1)..(68): Xaa is any amino acid
TVVPAPVAGTVLRYAVNEGEQVASGATIIIIESMKMELEIKATAAGKVHFLVPTGKQVASQQPIAEIA

SEQ ID NO: 102476 - protein, 122 aa, Unknown
  Obtained from environmental sample
  misc_feature (1)..(122): Xaa is any amino acid
VLVDAHCHPFDLAEHLNNAEEERRNLGVICASSATTIEEFEFCEKISIQAKKDKAPPLLPCFAVHPQMPLALGNGTQMFLQESLSVLDALAARKRLCAVGETGFDLYNTAYKETEGIQDELF

SEQ ID NO: 102477 - protein, 292 aa, Unknown
  Obtained from environmental sample
  DOMAIN (182)...(291): Response regulator receiver domain
  misc_feature (1)..(292): Xaa is any amino acid
MNGDIWVESEYGKGSNFFFTFQLQYGTNQKHTFLSDDINLSNLRVLTVDDDPDILTYFLDIAQGFGIMCDAAISGEKALELINQKNGYHIYFIDWRMPDMDGIRLAREIKSRASEHPVVIMISAAEWSAVAEEAKEAGVDRFLSKPLFPSTIAEVINECLGVDKKYVEKSQSANIAGIFAGRRILLVEDVEINREIVLTLLEPTKLEVDCAENGAEAVHIFSEAPDKYDMIFMDIQMPVMDGYDATRHIRELDIQKAKTIPIVAMTANVFKEDIERCLESGMNDHVGKPIDF

SEQ ID NO: 102478 - protein, 191 aa, Unknown
  Obtained from environmental sample
  DOMAIN (112)...(190): D-isomer specific 2-hydroxyacid dehydrogenase, NAD binding domain
  misc_feature (1)..(191): Xaa is any amino acid
MKILVTPASFKQGASPAVMDTLKGFADDLVFNTKGKPLTEDELIAALKGCDGCIAGLDPFSRRVIESADKLKVISRYGTGVDNVDVAAAVEKGIAVCRTPGVNSQAVAELAIAFMLCLARQVTMLDRKTREGHWVRSVGIELHKKTLGILGLGAVGKKTARIAAGFSMNVLACDPGIDTGYAKDNGIRPVD

SEQ ID NO: 102479 - protein, 96 aa, Unknown
  Obtained from environmental sample
  DOMAIN (2)...(95): Sigma 54 modulation protein / S30EA ribosomal protein
  misc_feature (1)..(96): Xaa is any amino acid
MNTEIKAVHFTMHEDAKEYLNKKIERIHNAENMIVDLLITIKKEKDFEAEATVNFRWGVSIHVKENEFELTPAIDKMMDKLESKIIKEKEKVKEKR

SEQ ID NO: 102480 - protein, 75 aa, Unknown
  Obtained from environmental sample
  misc_feature (1)..(75): Xaa is any amino acid
LSFDVLDDLLTAKYARQKREILFRANLRLEKLRFFVRLAHDLGFVGPKRFGHIAGLINQIGVQVGGWYKNAGAPA

SEQ ID NO: 102481 - protein, 227 aa, Unknown
  Obtained from environmental sample
  misc_feature (1)..(227): Xaa is any amino acid
MKSYKNLFGQITAFDNLLLAAHKTRRGKRFQAEALRFNYSLEREVLALQAELLSETYQPGGYRHFYVNEPKRRLISVAPYRDRVLHHAVCNVLVPFWDAAMLPENYACRKNKGTHQAILRFNACARRYPYVLKCDISKFYDNIDHAILKKIVFRRLAERQVRDLLNKIIDSTGTPIGLPIGNLTSQWFANLYLNEFDYFVQQELRLPYVRYMDDFALFARRQDELHG

SEQ ID NO: 102482 - protein, 231 aa, Unknown
  Obtained from environmental sample
  DOMAIN (155)...(222): 3' exoribonuclease family, domain 2
  misc_feature (1)..(231): Xaa is any amino acid
MRPDKRKNDEIRQVKITPNFTKNSAGSVLITMGDTQVICTASVEEKVPSFLRGQGQGWLTAEYGMLPGAANERVGRDRYKVGGRTMEIQRLIGRALRAAIDLKKLGEITITLDCDVIQADGGTRTASITGAFVALRLAVNKLLASGKVLSDPIIDSVAAISVGIVEGEPRLDLMYLEDSAAEVDMNVILTGTGQLVEVQGTGEHGTFTRAQLDQLLDLGEKGVARAGREQR

SEQ ID NO: 102483 - protein, 156 aa, Unknown
  Obtained from environmental sample
  DOMAIN (25)...(155): NeuB family
  misc_feature (1)..(156): Xaa is any amino acid
MNPPKIVAEIGCNHKGDINIAKEMIITAATYCKADIVKFQKRNNKELLSEEEYNAPHPNPAHSYGHTYGEHREYLEFNIDQHKQLQSWCKENNVEYTSSVWDTASAKDICTLNPVLIKIPSACNLNKKLLEYLCENFGGEIHVSFGMTTREEEEKI

SEQ ID NO: 102484 - protein, 282 aa, Unknown
  Obtained from environmental sample
  DOMAIN (17)...(281): Dak1 domain
  misc_feature (1)..(282): Xaa is any amino acid
MAKKIVNSPDAAVSEMMEGYIAAYSRYFEKVPDVNGVLLRQRRKDKVSLVIGGGSGHEPMFSGFVGRGLADAAACGNIFASPDPGTICETAKAANAGKGVLFVYGNYAGDNLNFDMAEEMLNEEGIKTRHVRVWDDCASAPPERVEDRRGIAGDVFIVKIAGAACDAGLSLEEAAAVTEKARANLRSIGIATSPGQIPGNEKPTFELGENEMEYGMGLHGEPGIERTTMKPADELVRVLYANLVKDMPLAKGDEVCALVNGLGSTTIMEMGIVFRKLKKLLE

SEQ ID NO: 102485 - protein, 129 aa, Unknown
  Obtained from environmental sample
  misc_feature (1)..(129): Xaa is any amino acid
GIYLADDEKTITQKVMRAVTDSGPTAPNSPMPETIQNIFTILEAVSTPDTVQHFRSKYSDCSIRYGDLKKQLAADICKATLPIRERIEAIGNNSDYLRKVAQEGAARARESAQATLREVRKAVGLMGNY

SEQ ID NO: 102486 - protein, 294 aa, Unknown
  Obtained from environmental sample
  misc_feature (1)..(294): Xaa is any amino acid
IELHKEIDAPAARIVSRGLQEALKNNSDYVLLHLNTYGGELSAADSIRTALLHCPIPVIAFIDNQAASAGALIAIACDSIYMRSGGSIGAATVVNQTGEALPDKYQSFMRSMMRATAESHGKRKIVKGRDTIEVWHRDPLIAEAMVDPRTAIPNLIDSTKVLTFTTDEAIAHNYCEGKAESIKEVLTIANLESADVKTYTLSGLEKIILFLMNPFLQGLLLMLIIGGIYFELQTPGVGFPLIAAITGALLYFAPLYLDGLTEYWEILLFVAGLVLIIVEIFVIPGFGITGISGI

SEQ ID NO: 102487 - protein, 268 aa, Unknown
  Obtained from environmental sample
  misc_feature (1)..(268): Xaa is any amino acid
GLDQRKTEIIHLEDQFTRVKHLEDDVNKKMTRFMNEKARIDQIQNDYDKLIRTHNSVEERLAKFTDYNDTLEDVMLKMRKLDDKIKETDEKYQRIERKSDVIDETNESITNNFNKLQKTETAINNAEIIIKDLLDQIEEIRSSIETLSAESEKANNALEKIAVLDDSLAQIEERIEKMNVARKWLAGVETELNTLDKSIRDQLKLTKALVDKEGKKIQAESKGGGPPPQIREDAIKLKAKGWTTEEIANALRLSKGEVELILEITPRG

SEQ ID NO: 102488 - protein, 148 aa, Unknown
  Obtained from environmental sample
  misc_feature (1)..(148): Xaa is any amino acid
IGRNPTKDKVFCLSIDEVCRYFGDSTESLKNKNFVQIGYEKYEALVPDAYGRLDSFDHRRIFDKNNLNRGAIRHERPRKNQNYGLVHPITKFTDKNPYLHESWWLRTPGNSNDHAIYVGGGSSNGHIFMEGASINEINCVRPALWIQV

SEQ ID NO: 102489 - protein, 200 aa, Unknown
  Obtained from environmental sample
  misc_feature (1)..(200): Xaa is any amino acid
MKAATISKIENYTFNSINTLFLVLLSFITLYPFWTTIAVSFNDAMDTIRGGITFFPRKPTVFNYQVLFQTGAIPHAFMISVARTSINLVTSVFFTAMIAYALSRREFVLLKPFTFILVLSMYINAGLIPTFLLIRSLGMINSFWVYIIPGIVNAFNFVVMRTYMRTIPESIIESARIDGYGDFYIFVRIILPLSLPVLAT

SEQ ID NO: 102490 - protein, 200 aa, Unknown
  Obtained from environmental sample
  DOMAIN (1)...(172): Magnesium chelatase, subunit ChlI
  misc_feature (1)..(200): Xaa is any amino acid
MLAKRMPSILPPMTLHEALETTKIHSVAGKLGRLRGLVSARPFRAPHHTISDVALVGGGSVPQPGEISLAHNGVLFLDEMPEFKRQVLEVLRQPMEDRVVNVSRARMSIDYPANFMLVAAMNPCPCGNYNHPWKPCTCAQGAVTKYLNKISGPLLDRIDLHVEVTPIDETIVNTLTPGETSATIRQRVIAARQKADLRFA

SEQ ID NO: 102491 - protein, 82 aa, Unknown
  Obtained from environmental sample
  misc_feature (1)..(82): Xaa is any amino acid
LRIGLTLSLHDLQPQVDGEELTRTKWDEEFLHYLPFLQKDDFIGLQNYTRKIIGATGALPPQKDSETTQMGYEFYPEALGNV

SEQ ID NO: 102492 - protein, 93 aa, Unknown
  Obtained from environmental sample
  misc_feature (1)..(93): Xaa is any amino acid
MILYHGSNQNFNDVDLSKTKDRRDFGKGFYTTTIREQALQWGYNMFKRFDGEGIFLYEFDFSPSSSLKSKLFTEISDEWFDFILLNRGFQYFT

SEQ ID NO: 102493 - protein, 93 aa, Unknown
  Obtained from environmental sample
  misc_feature (1)..(93): Xaa is any amino acid
MSTMFEASHKCPYCGKEFDYTVQMSCTIFGKMLDFRPYGAACVPAPVPKCPECGFVFFGDLFSENEIDILKRKFKTDDIFKIEPDMPNYYYLA

SEQ ID NO: 102494 - protein, 112 aa, Unknown
  Obtained from environmental sample
  misc_feature (1)..(112): Xaa is any amino acid
MPREAKTQKICLLAVQKEGKNLFFVPEEFKTPEMCLAAVKNDGWALKAVPEKLKTPEIYLAAVKKCGLVLEDVPEKLRTPEMYLAAVKQYGTFLKDVPKKLRTPEIYLAAVK

SEQ ID NO: 102495 - protein, 139 aa, Unknown
  Obtained from environmental sample
  misc_feature (1)..(139): Xaa is any amino acid
AVRKNGTNLLYVPEELKTSEMCLIAAKTSSYPLLFDIIRKHLLTPEICNVALKNNFRFNVVPQELRTPDIYLLAVREHGHNLQYVPEELMTLEMCQIAVQKYVSWGYNLRYVPEKFKTKKICHDAVQNFGLALEFVPEK

SEQ ID NO: 102496 - protein, 289 aa, Unknown
  Obtained from environmental sample
  misc_feature (1)..(289): Xaa is any amino acid
PHRGRVSDDPKAKDPDWEEWSLPLGCGYFGVNVFGRTDTERMQVTEVSLANPYPYGVNNFAEVYIDIGHSENEVSGYYRDLALNDATAHVTYNYRGITYEREYLASYPDGVLAVRLSASQKGGVSFALRAEIPYLKPFGTNGNSGNGLDFNIGKTGTVTVDGNKITLSGEMEHYGILYEGQLCVINDGGKVTGGGGRITVEGADSAVILLTAGTNYILNEKVFFETDRLTKLAGNPHPHERVTAVLAKAAGMSYEVIRSRHTADYCAFFDRAHIDLGGVSGHKPTDRLL

SEQ ID NO: 102497 - protein, 185 aa, Unknown
  Obtained from environmental sample
  misc_feature (1)..(185): Xaa is any amino acid
GQTINSDTPEWIQAARVTLTERGDKSTGWAMAHRLNSWARARDGGSAYRLFKTLLQTGTLPNLWDTHPPFQIDGNYGGTAGMAEMLLQSNGNTIEPLAALPAQWSKGRFEGLVARGNFVIGCEWENGKLGAMTIEARRGGVCKVRYPGIAAAVVTDKDGKQVTTATDNGDLVIDTVVNGKYTIKQ

SEQ ID NO: 102498 - protein, 260 aa, Unknown
  Obtained from environmental sample
  misc_feature (1)..(260): Xaa is any amino acid
MDARYIGRPGSTPTGQYAMTWGRDTGQIISTPNLNVQETMAHLNGPNARKDRVEDPTPFTVMGKQTYVFRLGVPVINDSNNEVVGSVTCLLAIDGAQPMVEKIIKEEEAVVSMSIYTNTGFIIANLSPERIGKKLIDAETLYGKYLQEANNAVLKGEEKQFPNLYSQVLKTNVSVDLMPFTVGNSDVTWTIMMAADDDYVLKDINRITVFVIILSVVALIIAAAIVYSVMHFTTKPIVHVADTLKDISEGEGDLTRHIDN

SEQ ID NO: 102499 - protein, 151 aa, Unknown
  Obtained from environmental sample
  misc_feature (1)..(151): Xaa is any amino acid
MKSYNPLAETMNRDLQAGAPQILDMLSARGKAVYFPHKGILGQTAEAKGAAINGTIGTAFENDGSPLTLECMESLVNIPSEAFLYAPSFGLPKLRDEWGKLLTIKNPGLAGKTFSSPVVTAALTHGLSVAGYMFIDPGDKVILPDLYWDNY

SEQ ID NO: 102500 - protein, 305 aa, Unknown
  Obtained from environmental sample
  DOMAIN (53)...(132): Bacterial Ig-like domain (group 2)
  misc_feature (1)..(305): Xaa is any amino acid
DATYKTVCGSSNNPDVASVINGQVTAVSGGNATITAATADGKTATCTVTVTAVVTSVDFDVSSPLGLSIGVSLKLNTIIEPETAPNKKVTWISNDPSIVTVTGDGTVTAIKAGSTTIKVTTIDGGKFATCTVNVKAAKEVFNLAEMLKTKPDGEITDFSAFGGLIDGTFWDVKYKIVTENRVKKLQFTEYHGSCNGLDLKNAEIDFRVGDIIEIKGTFTKLNSKCSGFVLQLNNWGWEPLEGWGCWNSGGFEKTFKPLTQSDVDLLQINPGTVGGGIRIKSCLQSGEDWDQAFPEGVSIIKIEQV

SEQ ID NO: 102501 - protein, 43 aa, Unknown
  Obtained from environmental sample
  misc_feature (1)..(43): Xaa is any amino acid
VMVIDGQTVVTGSFNFTKAAQERNAENLLIVRDAGLAKQYADN

SEQ ID NO: 102502 - protein, 118 aa, Unknown
  Obtained from environmental sample
  misc_feature (1)..(118): Xaa is any amino acid
GNRIIAGIARGVLIVEAPQKSGALITARFALDYNRDLWVASAGVAAESNRARFDRRGTTKHAGDGAPIIQNASDILQAWSRETTLSESQEVQIDSMKKIKTTEYCRSANGLEYHGVLI

SEQ ID NO: 102503 - protein, 59 aa, Unknown
  Obtained from environmental sample
  misc_feature (1)..(59): Xaa is any amino acid
MGTMQTPSNQILISLALAISFFVMAPVGREIYAEVVQPLERNELTLTQAMDKTAAPLKV

SEQ ID NO: 102504 - protein, 85 aa, Unknown
  Obtained from environmental sample
  misc_feature (1)..(85): Xaa is any amino acid
VPLKLYKGSVSSAGASSPYSLYNASIASFATGELYNHADAKGFIRLYGLPTLVRALMNNDAKGKKRAKKASENPKPDSKSQGISG

SEQ ID NO: 102505 - protein, 125 aa, Unknown
  Obtained from environmental sample
  misc_feature (1)..(125): Xaa is any amino acid
MKNNDKQVLWAGRLEEKPEAEAFAFQASIAVDRRLVQEDIAGSRAHAAMLAKQGIISAETAQALDRELERIAREIASGALPIDQNAEDIHSFIEGVLTDRLGDAGRMVHAGRSRNDQVALDFRLY

SEQ ID NO: 102506 - protein, 101 aa, Unknown
  Obtained from environmental sample
  misc_feature (1)..(101): Xaa is any amino acid
GYLEKNVKDVQTYHRILTSLDDFFKANVQPEDRNKIKGIKPELSALKNTYIKANQLRYEYSAQMEAEEQMKRLGAPPSAPAAASPASPAAPPVAPPTSTNS

SEQ ID NO: 102507 - protein, 95 aa, Unknown
  Obtained from environmental sample
  misc_feature (1)..(95): Xaa is any amino acid
MKSGKRDTILTLLALAGFAYFLSWATTPGNLDGYKLRIINLIAINAILGLSLNLIYGMTGMFSLGHAGFMAIGAYVSALLVLTPQQKASMWILQP

SEQ ID NO: 102508 - protein, 182 aa, Unknown
  Obtained from environmental sample
  DOMAIN (13)...(158): ABC transporter
  misc_feature (1)..(182): Xaa is any amino acid
IQYTGHTGTPVPLNGRPPEDMVKMGIALSPEGRRILPHLTVEENLWLGAYSRSDKAEILKDMDYVYNLFPRLKERRSQKGGTLSGGEQQMLAVGRALMSRPELLMLDEPSLGLAPKLVGEVFDIIREINHQGKTVLLVEQNAFAALSIADKAYVLEVGSIAITGTGKELLQDPRVKDAYLGG

SEQ ID NO: 102509 - protein, 276 aa, Unknown
  Obtained from environmental sample
  DOMAIN (1)...(223): Cellulase (glycosyl hydrolase family 5)
  misc_feature (1)..(276): Xaa is any amino acid
ILPTSPDIDKILIPVWEQTARLFKDRGRYVLYEVLNEPHGIDDARWGEIQGKTIEAIRRIDQKHTIIAGGTDYNSINKLAAIPKYSDTNLIYTFHFYDPYIFTHQGATWGEPSMASLKNVPFPYNREKMPKVPAVLIGTWLETAMARYMYESAPSALYASLDKAVAFSKERNVPVFCGEFGVFMIQSPKDDRVTWYKVVSAALDKRNISRTSWDYYGGFGVFNSEKGNFNHDLNVEVVRAMGFNPPVQIERTTQVLNSGFIIYDDYPNNKYVTVGY

SEQ ID NO: 102510 - protein, 276 aa, Unknown
  Obtained from environmental sample
  misc_feature (1)..(276): Xaa is any amino acid
EKLNKSINIRYDENRQTIDGFGGSNAWTRLPNDPETEERLVKLLFSRTEGMGFTILRNRIPFRERLEGDTDPGNNDGFVTRKNDNTYDYTVNPDGTKTFNLNWDSWDISGTRHLIRQIKALGEKGPEKLTIMSTPWTVPNNRITRWKEDITGVNARTNYTMDWSLPDRWGRLRRDKYADYADLLADYVKNFESKMGAPLSILSVQNEPNWNASWETTYWDGSGLRDFIVTISKRFPMKGIIAGNGGINIMMPEFENFNISFNDMIKPSLDNPESEK

SEQ ID NO: 102511 - protein, 89 aa, Unknown
  Obtained from environmental sample
  DOMAIN (2)...(82): Ribosomal L27 protein
  misc_feature (1)..(89): Xaa is any amino acid
MAHKKGASSSRNGRDSNSQRLGVKVFGGQLVPAGSIIIRQKGTVVHPGTNVGKGSDDTLFAKITGTVKFSRGAGDRKRVSIIPAPATGS

SEQ ID NO: 102512 - protein, 257 aa, Unknown
  Obtained from environmental sample
  DOMAIN (36)...(246): haloacid dehalogenase-like hydrolase
  misc_feature (1)..(257): Xaa is any amino acid
MDISIIEHAREKNLTDLWDGYKKVDEIPFDFNRRRMSVAVEDKNGQVELITKGAIEEMLAISTNAEDNGETIPLNDDMRKKIIDTCYNLNEKGMRVLGLARKPVNNNSTALSVTDENEMIFVGYLAFLDPPKDSATAAIKALNEFGVRVKVLTGDNDAVTVAVCKRVGLDIKHILLGSQIEEMNDEALKKAVEETDVFAKLSPVQKARIVTALRSNGHTVGFMGDGINDATAMKAADVGISVDTAVDIAKESANIIL

SEQ ID NO: 102513 - protein, 61 aa, Unknown
  Obtained from environmental sample
  misc_feature (1)..(61): Xaa is any amino acid
DVGLCPVESARWGNFKGVITTEGNFGISHSGIVDSSRVKYKGVDIPKWYLSILEDLERNGF

SEQ ID NO: 102514 - protein, 272 aa, Unknown
  Obtained from environmental sample
  DOMAIN (91)...(272): Outer membrane efflux protein
  misc_feature (1)..(272): Xaa is any amino acid
ATSVLSLSIAEIRRANGMVNAGDYLKALADKEARENSRNQARRNLSLSMAKLKALTGITATVELKPVDFSAYEGVIQRLAGISDEDTDALYDEFIKTLAATNPSLARVALNSQRAQKSLSLIRRDFFPTISATVFSTDMNYSTAGGFSTPTSGGGISIRGSIPIDFWVTANRIEKSKIAVESAALDYISAERQLETELQSALLNAFAQAEAVLSSRRSVEYVEKHFEFVMERYRLSQSSVSDLGEATSLLITSKNNLIKASYGFLQSVSKLR

SEQ ID NO: 102515 - protein, 206 aa, Unknown
  Obtained from environmental sample
  misc_feature (1)..(206): Xaa is any amino acid
MSKETTNLEVLSTRSGFNTAVRHMNKTIEISGSLGSSNLGDLLYERGDENLSGERGALLLRMLLVDKLGYKSVSVNLESVASDLPALAGEFSRWNGVDLIAAYYHPDLGLLIANPKVAEELANFGMLRKRELLVLYAGKGSSPADASCQKAAELAVKLFEGKKSKAPPDLLQGEFTVRALRKNKEETEKDEEEAPEKPPKPGRKRP

SEQ ID NO: 102516 - protein, 139 aa, Unknown
  Obtained from environmental sample
  misc_feature (1)..(139): Xaa is any amino acid
MCVLAERNKLKFFVVIAVIGFAFTACPEPETDTPAITTITIKTQPVATTNVTAGSISGSLSVTASVSSNAELRYQWYSNTSAVNKDGTIQSGATSASFTIPATLEAGTYYYFCEVRAAGAAAVRSMWRQLLWRPQNPLL

SEQ ID NO: 102517 - protein, 302 aa, Unknown
  Obtained from environmental sample
  misc_feature (1)..(302): Xaa is any amino acid
ASANVVVARDDTPKVRMGHPAADEYHANPPPFERKESRSPDGPLGSLFPSSPTVGTAMSFWIESSYGNGIFVQKTATLKALGTYGNIWVINDLTTFTSARAQEMAQKFDQIYPIETNLLGDDFGGWDIDSKIQLLVYDIGYDPAGTTLGYFWGKDMRMDTGSGQRSNEAAMFYINGNENVFTKFGADTLYSTLIHEFQHMIHHARKSMKGLNSAAWYNEMLSMITEDVISPLIGIGPTNQGHPIQRRIPGTNGFLNRYYTAGITEWGNTLDSYAVAYAFGAYLLRNYGGASLLQEMLANNST

SEQ ID NO: 102518 - protein, 175 aa, Unknown
  Obtained from environmental sample
  misc_feature (1)..(175): Xaa is any amino acid
DYAFRIKEGAKYREKFFVEAKAPHVDLTGNIPVFQAKRYAFSSHGKTPIVILTDFQTFKVFNGLEKPIFENPLQGLIKWLDLEYHIYLDKWDIIWDNFSKEAVTEGSIEQLIGKVNRNVKSLDDEQPQGKPHGIEDFSLKSLRMRGNTSPAPPAMKRPKGRGIKPQKGYALKKEQ

SEQ ID NO: 102519 - protein, 213 aa, Unknown
  Obtained from environmental sample
  DOMAIN (1)...(210): DNA topoisomerase
  misc_feature (1)..(213): Xaa is any amino acid
MELAQKLFAAGHITYLRTDSPSMADEAIAEIRAYCFEVEKWQLSPKERRWKAGSDAQGAHECIRPTHIEVENAGESDAEQALYSLIRIRALATQLADEVHSVRVARLKASLDGMEVIFEGRGRTPVSKGWRALLLEDDSVEKTPEPNNPVPMLKQGQKLTAANGNLLTHKTTPPPYFTEASLVAELESRGIGRPATFASILSKIIQRGYVFLD

SEQ ID NO: 102520 - protein, 294 aa, Unknown
  Obtained from environmental sample
  misc_feature (1)..(294): Xaa is any amino acid
NEALRQKTGWHKGMDGKWRYEIPDRIDAIGFGPLTGKPEGTRVKLADIYENPDLYRTYPHLKDMPVIFKEMESFGGSYSKDGIAINPKPDKYAGTILHETNPKEPNEGNYAETLLHEIQHAIQEKEGFAKGGEPGMFNERVKKEWDEVTSAYDSVKHGPGSEMLIQWDLMKCNGWKMPPSSDHVATRDVRWVETSLDALTARLEKEYPDAFSRFKQAREKLGKYFGGQRQLELYNLLAGEIEARDAAARAALTGEQRAAQAPNLRDDAIVIFGCERVAAFSANPVPRGMVRFDN

SEQ ID NO: 102521 - protein, 220 aa, Unknown
  Obtained from environmental sample
  misc_feature (1)..(220): Xaa is any amino acid
SWTFNNAFAPISRQPLEWLPAIELFGEGIFLQFDEDTVEKWEKLNSKYYEKMGRNLAPGWEWGNMFNCKKPRFVLLHTFAHLLIRQLTAQCGYATASVKERIYSTFNDIDEKMSGILIYTSATDTDGSLGGLVREGESSRIGNTIRGLLEESSWCSNDPICIESKNQGFRGLNYASCHACTLLPETSCEHFNCLLDRASITGLPDNDNKDIGFFKNLLIG

SEQ ID NO: 102522 - protein, 290 aa, Unknown
  Obtained from environmental sample
  DOMAIN (189)...(290): Anticodon-binding domain
  misc_feature (1)..(290): Xaa is any amino acid
CWYYLRYIDPKNDNAFVAKDLEKFWMPVDLYVGGAEHAVLHLLYSRFWHKVLFDLGYVSTDEPFQKLFNQGMILAFAYETASGAKVPSDEVEEKDGKFYRKGTSEELKQIIAKMSKSLKNVVNPDDVVNQYGADSLRLYEMFMGPLDAVKPWQPQGIEGMYRFLSRAMRSIAGDEGSPEYTDNAPPEELTRLMHQSILKVSDDIENMRFNTAISQLMVFNNELIKQSLRYREPCEVFVKLLHPFAPHLCEELWQILGHKGSLTGVAWPVGSAELAAEASVEVVFQVNGKV

SEQ ID NO: 102523 - protein, 268 aa, Unknown
  Obtained from environmental sample
  DOMAIN (1)...(268): Alkaline phosphatase
  misc_feature (1)..(268): Xaa is any amino acid
VFLFIGDGMAMPQVSSAEVFSTARSSKDINVTKLGFSQFPVIGLTTTYDAGTFITDSASAGTAIATGNKTLSGVINMDPGKTRKFKPITEYIHDKGIKVGIVSSVTLNHATPASFYAKSPSRSDYYDIAVQLAQSNYDYYGGGSILQRTGKNNNQQDAVEIAKANGFTYVDTKDGFNALKPGSGKVIAVSPRLQDDGAMPYALDRKSDELSLADFTRKGIELLDNPKGFFMMIEGGKVDWACHANDAGAAISDILSLDAAVRVALDFA

SEQ ID NO: 102524 - protein, 192 aa, Unknown
  Obtained from environmental sample
  DOMAIN (109)...(188): Methyltransferase domain
  misc_feature (1)..(192): Xaa is any amino acid
MPVSGAKSGLIPCNYCGGLIFKPALECEGFNFVQCTQCGLVQRNPQPVKEEIIERYSKTYGNDYLSYELENEAAFLKLQQLALQDAGFDKTEKAAFLRAKTAGSEPSVLDIGCATGALLAFLRDRGWRVTGVEISPGAEYAKKERGLNVHNIPLEEINFPDESFDAILASHLVEHLNDPHSFFPDCAVFLKK

SEQ ID NO: 102525 - protein, 99 aa, Unknown
  Obtained from environmental sample
  DOMAIN (1)...(63): Fic protein family
  misc_feature (1)..(99): Xaa is any amino acid
IDINKIIDFHYNFERIHPFQDGNGRVGRLIMFKECLKNNIVPFIIEDNNKQFYHMGLKEYPNSKIRLIDTCLYSQDIYKDAIKYLNIDYENESNTAIVN

SEQ ID NO: 102526 - protein, 199 aa, Unknown
  Obtained from environmental sample
  DOMAIN (7)...(199): Aldo/keto reductase family
  misc_feature (1)..(199): Xaa is any amino acid
MLYRKFGGTGIDISVLGFGAMRLPASYSGGKAVYDYEESARMMARAYELGVNYFDTAPLYCDCESETITGRALKPFRDKVYVSTKYAVSSAKGSDLRRGLETSLKMLDMSYIDFYHFWGITWETYKSRIIAKGGPLEEARRALGEGLIRHISFSFHDDAPSLPKIAESGDFETVLAQYNLLDRSNEAGLAKAHALGMGT

SEQ ID NO: 102527 - protein, 247 aa, Unknown
  Obtained from environmental sample
  misc_feature (1)..(247): Xaa is any amino acid
GQTERIIKSFKHRWDIPKIEKLAVSGNTTMLHLFLNVDPSSMGELPFTPVFLEEKKLKGEAISLSVEDVTVLPSIAAFIGSDISAGLTALDIFDTVRAPGPSFFIDVGTNGEMALCNRGAIYCCSTAAGPAFEGAEISCGIGGIKGAISGVKLAEDKTAGLSLTTIGNVPPVGICGSGLIDAVTVMLKQGIIDETGYMPGPTKEFNLTPGVSISGRDIRQFQLAKSAILSGIKILCKNAGLQPGEIK

SEQ ID NO: 102528 - protein, 247 aa, Unknown
  Obtained from environmental sample
  misc_feature (1)..(247): Xaa is any amino acid
MACVSYSKTINESYQRLENYNVKTFDTEYGLMSYVDEGNGEVIFISHGIFGGYDQGYEHLKDIFGDNYRKIAVSRFGYPGSNLPSGSTPGVQAKVFLELLDRLQIDKVFLLAASAGGSAGIRFALDYPERLKGLILLSSGVPSVPMTKKEIGRTGPPNFILNDKLMLFSIRNFKGVFYSMFGSKNIGEEVFNSLLPVKPRKEGIIYDSEINNIDMAVNYYDYPVEKIEIPILVVHAKDDPMVKYENI

SEQ ID NO: 102529 - protein, 178 aa, Unknown
  Obtained from environmental sample
  misc_feature (1)..(178): Xaa is any amino acid
MNNKVKSIFATFIAHCSPFIPHYYKESRRDAVFILVAGLLTLLILAVPTGFKGSAVQANAVRARVHVIEVNNERLKIIGPVRQGEQQLEVKVLSGRFKNRVFSSSNNMMGKMELDKAFVSGDVAFAVLNLTDDGEIAHVQIIDHYRTGKTVFLCVVFILVMLLIMGWMGIKILITFIF

SEQ ID NO: 102530 - protein, 108 aa, Unknown
  Obtained from environmental sample
  misc_feature (1)..(108): Xaa is any amino acid
ESFGIDFISLSSFQKEQIEFAFQRSMGNEQIRSFAEDQYVLYGGYEPLTVKLTQMMNQTAGIGWTSYAHTGVPVPTFASGVHQDIFGGYYDNTDLFRKLASVMNLKVN

SEQ ID NO: 102531 - protein, 237 aa, Unknown
  Obtained from environmental sample
  misc_feature (1)..(237): Xaa is any amino acid
MKKGHSVYLMPPGGSSLRAFRLPIWAIVIVALLAVAGVVGFFVPLDQMMLADQERAQGNTLRQQNDRLSSNIGFTLKHLSALKERMGRLQGAKEQHFESIGLPDKPQPIKPPQKTPAVGLSPAAVLRHIGEYEKVVAGFALAVGSERRNLFDTIPVCRPVQPSRSVLSRRFGMTVDPFTSKPKMHYGVDIAAENGVPVVATAVGVVTHVDVDPIWGKRVTITHGRGFRTVYAHLGTI

SEQ ID NO: 102532 - protein, 287 aa, Unknown
  Obtained from environmental sample
  DOMAIN (181)...(278): PPIC-type PPIASE domain
  misc_feature (1)..(287): Xaa is any amino acid
DLQTVALVTLTKSEPITVRQLKTEIEKLVWQNIVASAGRVPTTTEINSEVQKVSIDVRKQILEVMINDRLAIQAAERDKITVTDNEVNQQITQLKAQMAQQIGRQPTDEEFATAIKNETGQDLPAFRDSLKRQSIIQKYLLAKKQSLFSSVKEPTNEEIVNAYNLAKAQFVRPETVRISMIQVPYGSDTASKNRAKETADRLVREIGSDPSKFDEAVIKSRAPNSGYQAGDGGYIQRNQEYQQYMGANFMNTAFSLRQGEVSKLIEGLPGYQIIKITETLPMKPLEL

SEQ ID NO: 102533 - protein, 174 aa, Unknown
  Obtained from environmental sample
  DOMAIN (1)...(156): Thiamine monophosphate synthase/TENI
  misc_feature (1)..(174): Xaa is any amino acid
NGARIVQLRDKESDRETIYQKLLQVKQLKDKYDFVLIVNDYPELGRRAGIDGVHVGQDTDPAAVRKIIGMDKILGWTTHNIAQAKKAAELKVNYISAGPVWSTPTKPGRPPVGLEYVREVAAQTDLPFVAIGGIDLKNVREVLAAGADTIGVVRSAGDTVKYLQQIKAANDISM

SEQ ID NO: 102534 - protein, 286 aa, Unknown
  Obtained from environmental sample
  misc_feature (1)..(286): Xaa is any amino acid
EKLTARSTGETDQIKAQVKAELWKVNGLPTRGPKKPRPVIEIAGVESIVKAIRKSELNADDALQIVSTLKSIGLIEVSAVKNTGRGSIPFVQFLETFWDFDKSEYIQDRLAHGFRFTKGYAHECQKRLVKDIKPFFGDKKLNCVTTDDLRKLTNQLADRKLATSTINQALLVCCTPLKWAFKEKIIPSNPVIGLSRFSITNKERGVLTEAEATAVFAVEWKDKRAFVASLVAATTGARQGECLALRRSDISTDTLHIAHSYSPFDGLKCPKNGHKRVVPLLPEVRA

SEQ ID NO: 102535 - protein, 275 aa, Unknown
  Obtained from environmental sample
  DOMAIN (27)...(111): Helicase conserved C-terminal domain
  misc_feature (1)..(275): Xaa is any amino acid
YAAHPRKKYSFYAIRRYRLFLYNALKKRGLPDIECVTGSSDDPSSLAYRFSPESNRDHIGKKTIEEIRVLVSTDVLSEGQNLQDCHIVVNYDLPWAIIRLIQRAGRIDRIGQKSEKIWCYSFLPEEGLETILDLRGRLQKRIRENAETVGSDEIFFDGDPVNIKDLYNEKAGILDDEDDMEVDLASYCYQLWKNGVDAHPELKTKIPELPDVVYAAKKAEIPNASPFGELAAGFGELPPHKADSGVIVYAKTTDDSDCLTWVDEKGGIVTQSHFE

SEQ ID NO: 102536 - protein, 292 aa, Unknown
  Obtained from environmental sample
  misc_feature (1)..(292): Xaa is any amino acid
IPPDNELFDIDDKIILYDLTNTYFEGEKRSSKLARHGRSKEKRKDAKLVVLALVVNPFGFIKHSSIFQGNISDSSTLEEIIKNLREKTSKTATKALIVIDAGIATEENLAKIRKEGYDYLCVSRSRLKDYQTVSESAPLTVEDNRKRKIHLQKVTPSKKPSTESTESTESTEPVECFLKIESQSKRKKETSMNERFREGYLKGLKSISVSLTKNRGVKQESKVHQRVGRLMQKYPSIHKYYQIDYDVKEETKGKKKPVIKRTVTSMTWKLKPDMDMDNHCGIYFLRTSLNDE

SEQ ID NO: 102537 - protein, 199 aa, Unknown
  Obtained from environmental sample
  misc_feature (1)..(199): Xaa is any amino acid
LVSGQTVVSDGSFIPANVSWQSRVEITRLVEKSTVDYLEVLDEELKKTEGYVPAYPSIIQKKELKSKTDTDCGYIHHDRKKGLGYLAEVTVDTENGIITGMDCYPANRRESDIILKHIERQIQDNQVSIQRIGLDAGYDVGAVHRGLEIMGITGYTSLRYEHHNPMKEGFTYLGEEDVFTCKEGTELPFTKLIFKKGTG

SEQ ID NO: 102538 - protein, 288 aa, Unknown
  Obtained from environmental sample
  misc_feature (1)..(288): Xaa is any amino acid
MPNYGELAIIMSPRGRRRLLRLEEGRDLHTGEGVLRMADIVQAGFGAEAATSLGVPFRIQQPTIYDLIRGVKRQTQIMYPKDICYVCMRLGVGPGRTVIEAGSGSGGLTLGLSWFSGPTGHVHSFEAREEFHKLARRNLEWADLGHNVTLRCHDIADGFAGVTGADALFLDVRTPWEYLHHIPAAVKPGAALAFFLPTTDQVSALLLGLEQGPFDDIDVCELLLRRWKPTPDRLRPDDRMIGHTGFLIFARIQERSASFEALRPLGTRERKQEAARNARLTNATRPQA

SEQ ID NO: 102539 - protein, 110 aa, Unknown
  Obtained from environmental sample
  misc_feature (1)..(110): Xaa is any amino acid
AKVFADGGEIRRAVISVFSGNFAEILIAILAVLAIAAGVFILFKFFGVSIAITELLLIILAITWVVFILMIDIVYPINHKGTNFVDWLRIFGSHLMALAGIILATGRFGG

SEQ ID NO: 102540 - protein, 68 aa, Unknown
  Obtained from environmental sample
  misc_feature (1)..(68): Xaa is any amino acid
MLGPIVNAAAVVVFSLAGTFLVKGIPERIEDIIKKAIGLSIIFLGIKGAFENEKILLLIMSMVFGGII

SEQ ID NO: 102541 - protein, 232 aa, Unknown
  Obtained from environmental sample
  DOMAIN (36)...(213): Phage integrase family
  misc_feature (1)..(232): Xaa is any amino acid
SLIFDHLIQEGQIKINPCKSLITLKIKQEDQEATGCYEISKLKGVFNKKWKNEFSYLLCLVIYATGMRNSEIERIKVNDIITIDKYYFIDIPDSKTKNGIRIVPLHDFVYKKLSAFIRKYKLLNDDLIFKNPKRKKLGSDIYEAANLELGKYTGYDSERLERENITFYSGRHFWKTLMNSESLGDVEEYFMGHKVSGDVAKRYNHRDKQGRKKLLEKAKKVFWILDKYIFKL

SEQ ID NO: 102542 - protein, 261 aa, Unknown
  Obtained from environmental sample
  DOMAIN (9)...(260): Amidohydrolase
  misc_feature (1)..(261): Xaa is any amino acid
MKTEFQMKIDCHVHVTPPDIIADWEKYADKEPYFSLISHSKVNKFAMAEDVVSVLEKDGFDRAVIFGFGFNDLGLCRYVNDYVIEKTKQFPEKLTGFAVVPPVIDAAKEIERCFNNGLKGVGELFPEGQSIDLTNEMATSSLAGACKELGMPLLLHTNETVGHYYPGKTNIQMHNIEKFILNNPDLKIILAHWGGGIFIYETMKEIKTSFRNVYYDIAVTPYLFDERIYRAAKALSLCEKIIFGSDFPILPPSRYIKGLNN

SEQ ID NO: 102543 - protein, 254 aa, Unknown
  Obtained from environmental sample
  DOMAIN (7)...(46): Pentapeptide repeats (8 copies)
  misc_feature (1)..(254): Xaa is any amino acid
MKVSEGLSFKNTDLTGAKLIDVDLTGADFGGVVAQRTDFSNSGLAGSNFKGAQVTGAKFTKCNLTNANFVNVDLNNSDFTGAGLQRVDFSGADFGNANFTNADFSLTSFSNADLKRAKLQKAIFAQATISDMDFNGMTITGVVFDKSTVSSSTFIQTKMAGASFFDASVDKCDFVGTDLKSAIFDGTDMKRSQFPKADLTKANFENSTLDRIIFSEASMTGVKFSGAKLSQVSFVNADIQNATFNADTKLDRVD

SEQ ID NO: 102544 - protein, 205 aa, Unknown
  Obtained from environmental sample
  misc_feature (1)..(205): Xaa is any amino acid
ATKNYDGLNIDFENIPPRSGEAFLSFLRELKAGLPKEKIFSIALYARTKTINDVYDYEKIKPIVDKIFIMAYDEHWTRSEPGPVASLKWCRNVAEYSLRVIGDEKLIMGIPFYGRAWEDKNHHRALIYTTTENLIETYKVKDIKRENGIPTFDYNANLAVKVYYEDEYSISARMEMYKAMKIKAIGFWRIGQETPKVWDIIQLEK

SEQ ID NO: 102545 - protein, 293 aa, Unknown
  Obtained from environmental sample
  misc_feature (1)..(293): Xaa is any amino acid
EDITVGAWLEKFTALETSPRTGINVSRNRPYSIGSLENYKGYYRTHIHGDPITDLKMGEVEEEDAFEFLTRMSVKKLKDGCPMGGTRTFAGVVKFVIMAFNVYKRRNRRWHNPFQEIDPPSYNKKTRDFLPEEEMIRLFYPGVLQSTMELAVCAAMFLSGLRRAEVAALKPEDLDWHTPKITVRRTWQNFAKKNRILGPPKSKKERVAPFDLLLQEAIKKLWEENGKHEFVFCWKNGKYLGPTWVNKKFKGWLEKAGIELGGRNIVPHSSRHSLASILEDRGESLRYIQEMLG

SEQ ID NO: 102546 - protein, 210 aa, Unknown
  Obtained from environmental sample
  misc_feature (1)..(210): Xaa is any amino acid
MFLVLLICLTAVLLFWRQFLSFYRTEQVRLLSASFQPIITTITERSRTPEEMADIARTFSENNQSFKFQIQEEDGKVLFTTGNFKEDESPGSFNVVRLRLVSALWDQIPIGQIPGDQISIAQISDDQISRVQIPPGTQMPGDQRGNAVKGFILTGYGTQIDYSGLVFRSLLGVLIMFAIAVLGAFVFARKITKPLEDEIIRERTIEENQR

SEQ ID NO: 102547 - protein, 211 aa, Unknown
  Obtained from environmental sample
  misc_feature (1)..(211): Xaa is any amino acid
AYIHKLGANVITWGECCFYKKDLAEDMEKIPYVLRPENISGDSPGIGEKIYKTENEKIAVIVLLGQNGFNRLHANNPFTALPPLLDRLKKQTPYIIVDFHAQATAEKKTLFYAADGNCSAVIGSHTKVQTADETILPNGTAVITDAGRTGSVQSVGGSDINSRIKEYITGIPDWTKEAWDQPELQGVYLDIGKDGKALSIERVRIPVQAPD

SEQ ID NO: 102548 - protein, 91 aa, Unknown
  Obtained from environmental sample
  misc_feature (1)..(91): Xaa is any amino acid
AQNGRYPGFLKRRIAGKRGHLSNAEAGKFLAAHFHPQLKYIYLCHLSKDNNTPEIAFATVRDCLCEQGIQPGRDVELVVLERTSPSALYRL

SEQ ID NO: 102549 - protein, 219 aa, Unknown
  Obtained from environmental sample
  misc_feature (1)..(219): Xaa is any amino acid
EFTFSGLYLYRNKYDYRVSRNVPNNGRDEGGFIISGKQNGKSFFSTPCEAPNDEILESLFKTHDYWKNIPESVLLPVKEKLEKKGIVFAEDRDNFDYLYYRSDLAELAGKKYHKKKNHVNNFLSTYPDHELRQMNAEHIPAAIEILDRWHKDKNEDGDYRAPREALDLFDILPLKGAIFFIGGQPAAYCLGESIARGKMFAVHFEKAIEEYKGIYQYVN

SEQ ID NO: 102550 - protein, 297 aa, Unknown
  Obtained from environmental sample
  DOMAIN (4)...(295): DNA gyrase/topoisomerase IV, subunit A
  misc_feature (1)..(297): Xaa is any amino acid
ALVVLANKELFIDRQGNFGNIYTGDEASAPRYIECRATPLSKDIFYNPKLTEWTDSYDGRNREPLLFPAKMPVVLVMGAEGIAVGMSTKILPHNAVEVLEAEIACLSGKKFELYPDFPTGGLMDVSEYRDGNGKVLVRAKLDTSDPKRILITELPFGSTTESLINSVEAAAKSGRLKIQGINDFTTDKVEIEVKLARGVYAQETIDALFAFTECQQSISVNLLVIKNGLPAIMTVTGVIQHHAKQLVKILTKELELEKKELGDKLHLRTLERIFIEERIYKGIEKMKTAKGVQEAVI

SEQ ID NO: 102551 - protein, 279 aa, Unknown
  Obtained from environmental sample
  DOMAIN (121)...(279): Mur ligase middle domain
  misc_feature (1)..(279): Xaa is any amino acid
MDYAGMKVLIMGLGLHGGGLESARFLLKRGAELTVTDLRDEQTLAPSIEQLEAACKDGSRRASVRYVLGKHEIDDFKNADMVIKNPGVPPDSPFLQAARLASRRIETDISLFLEVSPARLTAVTGSKGKSTTASALHWALAQSGEKKTGGKAYLGGNITVSPLTFLDELKEGDDVVLELSSWQLGDLKGRCRADKNHANSMLLKPKAAVLTAIMPDHLDRYGSMEAYIADKRVIYQGQDTADFTVAGDDSWGRSFLAEEQAVPLYTPMRLYRKGFPAAG

SEQ ID NO: 102552 - protein, 83 aa, Unknown
  Obtained from environmental sample
  misc_feature (1)..(83): Xaa is any amino acid
NQTKIMIAKEPNESFGSFTVLKPAGNNFAVVFYKTPHMYRSLAEFFVETLNRQRRVPEHDAKMAALKIIEILKKHMSFKGEYE

SEQ ID NO: 102553 - protein, 87 aa, Unknown
  Obtained from environmental sample
  misc_feature (1)..(87): Xaa is any amino acid
MKPLEHLDTLENKSIYIFREAYSQLGNLCMLWSIGKDSTVLLWLARKAFLGHVPFPLVHIDTHYKIPEMIEYRDKYALEWSLDMIYG

SEQ ID NO: 102554 - protein, 231 aa, Unknown
  Obtained from environmental sample
  misc_feature (1)..(231): Xaa is any amino acid
MHGALSPDGTKAVFWDDSGLVLWDYINWRPVQTLRREPVYSCIWVNNNEVIAGGSRLIERINISGSDLMDRRQIICLSGADDFGFEDTGNLNRLDFLNLLGLNRQAANPVRILAKTGGEWFVTDGKTPWAQVTGGTVPRIRGASRMSEQYRVYLEEQTSGPYENLPMLRNVLSVGTAPLLPAISPGPAILPNEPAYVGLCFDLYDDDTGVAQVLDALRRYGIKATFFMNGD

SEQ ID NO: 102555 - protein, 210 aa, Unknown
  Obtained from environmental sample
  DOMAIN (63)...(180): TIR domain
  misc_feature (1)..(210): Xaa is any amino acid
YRAKKHAERKKNDNLQKNIQQQYERRISDLTSQLSQGFISYPAFINTGYSNAVINYNNEEYDVFISYASEDKETFVDDLVKELKNNGVKVWYDDINIAWGDTLRTKIDLGLAKSKYGIVVLSRDYIKKYWTQQELEGLFQRETTDKKVILPIWHNITKDEVNAFSPILASRKALSSALFSIKEIANEFSKLLPNIKQNDLEETKEAASND

SEQ ID NO: 102556 - protein, 193 aa, Unknown
  Obtained from environmental sample
  misc_feature (1)..(193): Xaa is any amino acid
LTDDGVLVVAIDENEQATLTMMLKEVFREGGYEIVCVSVVHNPRGIQGNNFSYTHEYAIFVYPRGRKMIADRIIEEDDVDWSQFRNWGTESERTDAKNCFYPIHVKDGQVIGFGDVSPDIYHPNQTEWNGDTAYVYPIDRNGVERKWRYARQSVDAIASMLRAKKTDNGFEIEIGKTFGNYKTIWNDKRYDAN

SEQ ID NO: 102557 - protein, 302 aa, Unknown
  Obtained from environmental sample
  misc_feature (1)..(302): Xaa is any amino acid
EAQRPQTSEAQSGRSVAITERELERTAEIGLIEDVMNSVKLLPGVGYTGMFGALPSIRGGDPGDLMSVFDGFYLERPYHWVGAVSIFDPKMVSGARLSHGVFSSRYGHTISGLLEITSKSPSSTEIEMETALSTSAASINLSYPLDEKGGILFMGKITYWETFIGLLQGLSKVTDDENLDRINAITTSPYIRSAAVAANYRFTPDLEWRLNAFFGNDGIGADYKNDYNDEGIEGRMEMTADYDNYQGFLITGITASPTTKLALRFYGGVGFMDTITNDMVDNNVTVKYNQDFLDKFPSLASA

SEQ ID NO: 102558 - protein, 97 aa, Unknown
  Obtained from environmental sample
  DOMAIN (3)...(51): Sigma-54 factor, Activator interacting domain (AID)
  misc_feature (1)..(97): Xaa is any amino acid
MQASFVQKQQFGVKMNPQVYQSIKLMELPLVDLREKIEEELEKNPALEVVDDRSTVSLSEDEPQQREVEEYFETSSDSGFINSGSSGAAASDEHRRS

SEQ ID NO: 102559 - protein, 143 aa, Unknown
  Obtained from environmental sample
  misc_feature (1)..(143): Xaa is any amino acid
MLIKQCFSFIVNNLFFWYTVLVNIILLEEHELGHSLSRRDERTIHLVKVLHKKAGDVFEAGILGGMKGTGKIEKINFDGSIFITVNVNEPPPPRLPLRVAVGFVRPIQIRRLLRDLSNIGVSAVDLVGTELGERSYRDTKLLD

SEQ ID NO: 102560 - protein, 81 aa, Unknown
  Obtained from environmental sample
  misc_feature (1)..(81): Xaa is any amino acid
MSNKRPALGTGLSSLMTQAGHAPAGGDTSPREIPTGALRPNRHQPKTTFDQSAMECLAASLRQHGIVQPIVARKVGDHYEI

SEQ ID NO: 102561 - protein, 296 aa, Unknown
  Obtained from environmental sample
  misc_feature (1)..(296): Xaa is any amino acid
FSFVGWGAASWLLDRGTSSESLIKIGSQTVSITEFEQERARQLAKIAQEMQNKLYTDRQTRAYFNQQILANMTSRILLEQHAKNLGLAVSPSAIANIIKGSGEFWVDGAFSPDKFDAVLDTNGITEEYFTKTLRNGRLREMILGALDNNLPAPEFMTTVAYNSRYATRQIEYSTVKFDSFNISAAPTEENLREVYAKNPKVNPEYRTISYVIVGAKMQEPDSYDRALDAARSVEDMLIAGDPMKDAANRMRAEFRTFNPMTIQKKYANGTVNGDSVLTEEVMRTLFSMEQGLESEI

SEQ ID NO: 102562 - protein, 282 aa, Unknown
  Obtained from environmental sample
  DOMAIN (135)...(171): e3 binding domain
  misc_feature (1)..(282): Xaa is any amino acid
IMPRQGNTVESCIIQEWKVQERDAVKAETTVCVVETDKATFDVPAGADGLVLKILHPSGDDVPVLQPIAVIGKEGEDWNAALGASQENAAGESSHGRAETQNAVSANNDRPHSKNIDTPPAVLPSNLSAFDKTGISPRAKKRAIKEGIPPAAIAGSGPGGRTIERDVAAALANRPPLTAAAKAAAAAGLLVPNAGTGMGGRITAADMAGAAGTAGVVTNMVDTARTTFPAPLGEGGITETSIKGIRKIIADRMHASLMESAQFTLNANASAVQIQELRNWMK

SEQ ID NO: 102563 - protein, 245 aa, Unknown
  Obtained from environmental sample
  DOMAIN (37)...(178): Pyridine nucleotide-disulphide oxidoreductase
  misc_feature (1)..(245): Xaa is any amino acid
LVCAGSVPAVPPIPGSKDNPQVLDSTGLLSVKEVPKKLAVIGGGVIGVEFAGLFSSLGTEVTVIEMLDEIVPFMDKEQAPLLRRAMKTSGGGGTVDFKLGCKVTSIEGAVIHYSTKAGANEVCAADIVLMAVGRRPVLDGWGAKAAGIDTKSTGVTAGDRMRTNISGIWAAGDVTGKSLLAHSAYRMAEVAVTDILSYLDGGTSLAENTWRSNAVPWAVYGIPEAAGVGLTEQEAAAKGISVVKA

SEQ ID NO: 102564 - protein, 98 aa, Unknown
  Obtained from environmental sample
  misc_feature (1)..(98): Xaa is any amino acid
TRNMDTLQRSPFPVGQKKPNAFGLYDMHGNVLEWCWDFFAPYTAEAQIDPTGPAKGDRRVYRGGCWDFEELNCRSAYRFRQHVNFRFFYNGFRVARSL

SEQ ID NO: 102565 - protein, 280 aa, Unknown
  Obtained from environmental sample
  DOMAIN (1)...(280): Phenylalanine and histidine ammonia-lyase
  misc_feature (1)..(280): Xaa is any amino acid
MVLLDGENLSAGRLEAVAAGESVSLDEAALARVGENRAVIDSILLEKRVVYGINTGFGQFATVVVPANQLAELQLNLVRSHAAGVGEPLTVAQTRALMAARINCLLKAHSGIRVEPIRLLAECLNRSVVPVIPSMGSVGASGDLAPLAHMALLLIGEGLAWDGTGRAPGGGALKKAGLEPIQLQPKEGLALINGTQMITALGNLAVARLRRLVPLADEIAALSLEALHGTRAAYDPRIHAARPHPGQIEAAAHMRLILGETSEIADSHQDCSRVQDAYSL

SEQ ID NO: 102566 - protein, 276 aa, Unknown
  Obtained from environmental sample
  misc_feature (1)..(276): Xaa is any amino acid
AHATAPKAVKDPAKPDQTAAPKQTKAPAQAAQAAASKPAQTAAPSPTQKPTQADKSATPKSQGPKPAQKPDKDKAQATEGAPKKAAKQPVQKPLPKPAQKPAPKTTHKPAPKHARVPAHLAQLPAFLENPDVTDFIGRMVVTHGFSADSLKEQFSVIAPNVRVLTLFRPVWPPPVQQPRPTQPKPSAVQSWKKYSAPFLNNNRIAGGVKFWRENAATLEKASDQYGVPPEIIVAIIGVETLYGGHKGGFCVMEALASLAFHDPKRGDFFREELENF

SEQ ID NO: 102567 - protein, 278 aa, Unknown
  Obtained from environmental sample
  misc_feature (1)..(278): Xaa is any amino acid
GYAGLRHYSDQTGPHIRYISSSWVSTDPVAETVPAAYSNYYVWNTKTEKTFTGGDGAWGGSFWSKDSSTVKGAWEAGSNALFIASPKGTITAAAQSVGNMAFAFNGYEIAGTSLALGAANRRIIVTGTNTATISSVLSGSGGITKDSSGTLTLGGTAANTYGGGTTISAGTVIAAKSGALGDSAGTVRLTASGATLRLAAATGTTGITLNNPLTLGGGALSNTAGVNTLGGPIQVSGASTIGVDGSLTLKGAISGTAGITKTGNGILYIESENTGYTG

SEQ ID NO: 102568 - protein, 93 aa, Unknown
  Obtained from environmental sample
  misc_feature (1)..(93): Xaa is any amino acid
TDDDHLNPYLEIDLKKSQTFNRLLLQEYIPLGQRVTSFNVQYWDEKAKRWTELTQATTIGYKRILRFPKVSTQKLKIEFNALACPIISTVGIY

SEQ ID NO: 102569 - protein, 260 aa, Unknown
  Obtained from environmental sample
  DOMAIN (93)...(209): PAS fold
  misc_feature (1)..(260): Xaa is any amino acid
MNGLSSLWIYSFPLMSIFTLGLPIGFIPAFLILITAGLGTFGGLSKYQYTFQEAVLLCGVYFFVMILTVVYEFVRSFKDRWLARQDSYMNLVFDNSPDIIMLLDKNIGLVHCAKTFLKSAKIKDFEEIRKASYDEVFGLFTDYEMLNQITTFFNNSIYNKKPVTFERVLDFSGEGNNRHYEIHFTPMYNSKGEFQGAFILFHDMTDILETKNRAEQASKAKSIFLANMSHEIRTPLNAIIGMTAIAKNSDELERKNYCLK

SEQ ID NO: 102570 - protein, 293 aa, Unknown
  Obtained from environmental sample
  DOMAIN (1)...(243): Glycosyl hydrolase family 9
  misc_feature (1)..(293): Xaa is any amino acid
ELVKADQSAFNTETYESGSDYDKRIWAAAELWETTGESTYLEYLENAFIGGDIRQTTEWADVSNLAYLTYICSKRFTKGEDLANKLEESLISRADDIVDNALRHKYGRTNGTSYGWGTNGGTASTAYVLGAAYRLTGEEKYRHAMQDAVSYLLGRNYFARSFVTGVGNNPPLKPHCRRSVASGNAWPGYLVGGPTTQAIEAAGGETCQNNAPGTCYFDKSGDYARNEIAINWNAAMIYALAGILPGAGTFPAPNYPGQPEEGVSVSHRTAPTRASIGRAGTMRVVRVRNGRLN

SEQ ID NO: 102571 - protein, 92 aa, Unknown
  Obtained from environmental sample
  misc_feature (1)..(92): Xaa is any amino acid
MASRRKGRILAFQALYSWDIQFRQTGDASISEGLLDFSWDDGDTLDEISAAFPRLLVTGTVTHITDVDSMIQKHLENWELSRLNKVDLAVLR

SEQ ID NO: 102572 - protein, 132 aa, Unknown
  Obtained from environmental sample
  misc_feature (1)..(132): Xaa is any amino acid
MSGENKLLDVRHATRSFHIGGIITGTKLVAVNDVSFSLEKEKPEIFTIAGESGSGKTTLSRMLLRDLEPSSGEVLFEGRNVTSIRKRAEFSAFMKKVQPVFQNPFETFNPLRRVEEYLVDTAVNFGIAPNRR

SEQ ID NO: 102573 - protein, 64 aa, Unknown
  Obtained from environmental sample
  misc_feature (1)..(64): Xaa is any amino acid
MQKHAERGQIVAAIIDGDATLKHYYPAENRIELRASNQAYSPIVVSEGENFSIAGILAGIIRKC

SEQ ID NO: 102574 - protein, 282 aa, Unknown
  Obtained from environmental sample
  DOMAIN (168)...(280): Response regulator receiver domain
  misc_feature (1)..(282): Xaa is any amino acid
KSQKLTDGPSEAAARQDAAESDVNSKKVIVERLLEITDLKLAEKIKKMGEGEIDNYLQLLNTFTENFPTQEEELNEALKNKDNDAFVRLLTDIRDILGKMYAEELAQDCDKQISSVGTTSPEKVEAYMRYFLSSLSMLSIDIQMAGQKTDAPAAPPESAPEEKLRTGIRILAVDDTAFFLTILKKILSDTRYILTCVSSGRDALKYLEKHQPDIFLLDIEMPGMDGYELATRIKESGQKAPIIFLTGNAKKEHLAKAVKSGAVDFIIKPINKDVLLTKIHKY

SEQ ID NO: 102575 - protein, 89 aa, Unknown
  Obtained from environmental sample
  misc_feature (1)..(89): Xaa is any amino acid
MWYKGDNVSRYDYMYSDTELKTFVNPILELLKHTRIVQLFFNNHAKSQAVVNAKKIEMLLKEMSKKNNNDTVFTSADFKSTDFKSEMSH

SEQ ID NO: 102576 - protein, 232 aa, Unknown
  Obtained from environmental sample
  DOMAIN (20)...(139): FAD binding domain
  misc_feature (1)..(232): Xaa is any amino acid
LISRNVSLKKYNTFKIGGNAKLFAEPKVIRDIKDLFLFCRQNNEKFFILGAGSNVLFGDEGFDGLVIKIGKHFETGKSLHTLIQTAADKGLGGIEKLEGIPGTVGGAIFMNASAHGQQISDCIENVVSITIYGEIITRTNEECKFAYRNSIFRMLDEIILSAEFNFIPMPKDVINKNRKEVLAWRREKQPLKYPNAGSVFKNPTNNLPLADSRVSAGYLIDSCGLNRVQGRR

SEQ ID NO: 102577 - protein, 154 aa, Unknown
  Obtained from environmental sample
  misc_feature (1)..(154): Xaa is any amino acid
MKFFKDNPQKGGVQEMLVVAMPMVLSMSFDTFLVFINRLFLSKLGSDYMNAALTGGLMEMVTIVFFNGVIGYSAAMVAQNLGAQKTARCSLVLVQALFMAICSYPLALALMPLAHIYLNSFPVPAQQSVLQIPVLQYPALRLNNHNDSPRLCLF

SEQ ID NO: 102578 - protein, 92 aa, Unknown
  Obtained from environmental sample
  misc_feature (1)..(92): Xaa is any amino acid
MDIILDTQTFIWFCEGDEKLPNKVRDVINNKENNIKVSIASLWEMTIKMSIKKLVLSFNITEIMNLVFEISENIPVISSDGVFKEYPVQVIW

SEQ ID NO: 102579 - protein, 174 aa, Unknown
  Obtained from environmental sample
  misc_feature (1)..(174): Xaa is any amino acid
DPDAIVKLEAKLASLKAEQEEMKKANAYYRKHKTMRGYPGLDDYEATAADNKINSSYSWEKQPYPAYLLQNNNANIRRIVERIAELKSKSVISEGDGWEFDGGNVEMNVESNRIQIFFDAKPDEDVRAELKSRGFKWAPSQGAWQRQLNGNGLYAVKQIKCIQPAVCEGSNEYE

SEQ ID NO: 102580 - protein, 236 aa, Unknown
  Obtained from environmental sample
  misc_feature (1)..(236): Xaa is any amino acid
MPDNDVIIEAVFDTIRPNTPYLEFELPMPEFNEVEYGYEAQTPLNITIINIGTGTGTAHITSIKLDERGNAAFELSGNLITTIPANNGTATFKVQPKPGLPVGNHEGAIIVTFDSERTVKAEILFTVNKAEGWPVKAPQSTLFVSADRITINEVNKPDSGQSVEYAISTTNEAPTDDWQTSTTFEGLSAGTIYYIFARSKENENYHAGTPSDPLGVIYLGSGTVSDPFIVHDVTTL

SEQ ID NO: 102581 - protein, 282 aa, Unknown
  Obtained from environmental sample
  misc_feature (1)..(282): Xaa is any amino acid
AAWTSNANGVDGADITAADWLGGEAFWKDRANFDTTVWVIENNKLPILQNMPKGTQNPTVQHIPPLNVTTGTEWASICTAISNAGNGTSSNYKNYTINVNGNVTASGSTNNTFGNAAYINVTITGNHTITLSGTGSLLRLGNNQTVVIHDTDFVGLNTNDTSLIYVNGYNARLTMEGNSSVSGNKGSLGGGVFVESSLNEATTAIFTMKDNASVHNNTSTSRGGGVCVETLATFNMEGGTILDNNTTGSGYGGGGVYFSGYTFNMTGGTISGNTSSSNGGGV

SEQ ID NO: 102582 - protein, 94 aa, Unknown
  Obtained from environmental sample
  misc_feature (1)..(94): Xaa is any amino acid
LGENPQPFFRQPDLAVAGGQDFPKDKYLNFGRETGLRVLPYKMQDRYSRELVDMEFSSVVMENDFLKAEFIPALGGRLWSLYDKKAEPEILLYR

SEQ ID NO: 102583 - protein, 297 aa, Unknown
  Obtained from environmental sample
  DOMAIN (7)...(287): ABC transporter transmembrane region
  misc_feature (1)..(297): Xaa is any amino acid
VLLIMTIGCSLVETVGISAIMPFISIVSNPKLLEAGFYKTAFEFLGFATTEKFIIVFGIGIIIFYLFRGVYSIILAYVTKRYSTALYTHFSKRLFKIVLSVPYKVYVQKNSAELILSIGGETSAIGKVVFHFLNVCSEFFTILMVYAVIVYLNWKMTIIITSILLVLVILMLSYLAKINSAQGEIRFTSGRNMNRALKESLGNLKYVKLKGNEDELLKTYNDALEKHNRSELITYVFGAMPKSILESLGFSFLIAVVVFIVWLYNDASLVIPIISMYALALYRILPSVHRMLQEING

SEQ ID NO: 102584 - protein, 293 aa, Unknown
  Obtained from environmental sample
  misc_feature (1)..(293): Xaa is any amino acid
ITAFEFDIKGRTRPYALIHAGEFREGETLHGLANLEKYIIDKTQILINQRVLKDNASMSYSIGVQSEDGAYPVIITINVEDSWNFIVLPKPGYSTNTGFELIAKARDYNFLGTMNPLRIDLGYYYDENSRHSFMLGVYSSTPFRALGYTWNIKFDNTFNYRPQVEEPYYYQNITGLSVEVPFRTTTFTFGFEESVNLNEENSDGNKEKYGNFQNGLYMSTSLFTSWEIPTGLIISRFGELTYTPGISATFNHELPEWYLQEIRRGPFMNFSHSLGFEKIDWHANYRERLSVSV

SEQ ID NO: 102585 - protein, 285 aa, Unknown
  Obtained from environmental sample
  DOMAIN (36)...(254): Bacterial extracellular solute-binding proteins, family 3
  misc_feature (1)..(285): Xaa is any amino acid
ADLYNEGCLQYREYKLYTALTKEERLYLQSNPVVPVVGEFNNYPVCFYNTYTKNWEGIYFETLNEISKISSMTFKLINDENTKSPELINMLEKGEALITSELFKIREYEGRFLWSAIPILKDNFALITKSDFRNIRTDEVFFLKTGVQKDSVYSEVFSKMFPGHPNLSQYESMEELWSAFENGDFEVIFTSQRRLLIYTNYYDDTSFKLNIVFDQSFDTSFGYNRDADILKSIVDKALRIIDLNNITSQWMYKAYDYRNKLDEARRPFLVGVLILFFIVLVLVLA

SEQ ID NO: 102586 - protein, 300 aa, Unknown
  Obtained from environmental sample
  DOMAIN (172)...(286): HD domain
  misc_feature (1)..(300): Xaa is any amino acid
VIDQRSRYGIGAGLVYERFLNENIRNTLGMLNLEMDFAHVRTVVAAGTDARIAADQAGKELNSNCRIIEREDFFKFTEKVCSYSIERCINEFGSSYADAEGLIPGLLVLKLFLERTGAANVAVPYVTIRDGYLADLASGVDSKLQDEFFSQIIASAVNLGRKFHFDEAHGRYVANCCMTLFDALTKEHGMNRRHRIMLEIAAILHDIGAYVKSSGHQKHGQYLVANSEIFGLHNDELNIIANVISYHRGEPPSQSDIEYVKLQREERVLVLKMASILRVADALDRGHSQQIKNITVERRR

SEQ ID NO: 102587 - protein, 287 aa, Unknown
  Obtained from environmental sample
  misc_feature (1)..(287): Xaa is any amino acid
TKHDFPKIHFYDQDFVDIYDKTWAWIEDCWNNEGVKNGIEGKFFSYPESPVVTQADAVFSSFFLVYSNRIYQANSTLDLFYSRQEPDGAIRCAYDIAAGSPAVDRDNPEGLGIPLFAWAEYNIYHKSGNKKRVKDVLPVLCKYSTWIDSVFKKPNGLYKPPLCATGMINLPRGETCYPMDFNTMMAVNMLYISALADILNDKETSFQYKRQYFSLKTRINSLMYNPADGFYYDICKNEKHIPIKTIAGFWPLLAEIPNGEKAERIIAKLSDPEFFGTPHPFPSLSVS

SEQ ID NO: 102588 - protein, 78 aa, Unknown
  Obtained from environmental sample
  misc_feature (1)..(78): Xaa is any amino acid
AITRKSEPLRGGEKDSINLSPEAKEKAELYQVIELIKSAPELSDSEIVALREKINDPSYLNERTIGATADRILDAFGL

SEQ ID NO: 102589 - protein, 63 aa, Unknown
  Obtained from environmental sample
  misc_feature (1)..(63): Xaa is any amino acid
VFCIENVAEKLGKAGNEIYNILAEKSDILDSYIIPCYDVLHTQGKNYIVDDILSYMKKRGLVE

SEQ ID NO: 102590 - protein, 69 aa, Unknown
  Obtained from environmental sample
  misc_feature (1)..(69): Xaa is any amino acid
MKAHPTLLQLKYDSVIETLSKRADVSLREALDIFYKSPIYEEISQGISDMHCRSDGYLVEDIVTFKQHY

SEQ ID NO: 102591 - protein, 243 aa, Unknown
  Obtained from environmental sample
  misc_feature (1)..(243): Xaa is any amino acid
MNTSKNDFDHIKWKNQFELASKEKTGFRELRADVFQNTTKLVKNGGYYVDGNLINIPNNLLAEKTEYFTAPDKLEANGNYQTEYSVINADCLETAEILLKSGFNPCVLNLASRQNPGGGVLTGAGAQEENIFRRSNLFLSLYQFTSYANEYGIKKHEKSYPLDRNTGGIYSADITVFRGSEKNGYCLLRKPFTVSFVTVPAINAPELIERNGNLYIVDNLVEPTKEKIRTILRIAGKYKHECL

SEQ ID NO: 102592 - protein, 166 aa, Unknown
  Obtained from environmental sample
  misc_feature (1)..(166): Xaa is any amino acid
RDYQRIVIGVDPSGTSTGDEIGIIAAGKFGNEYRILDDDSCHGTPNEWSERVAAMYKKWKADLVVAEKNYGGDMVGHTIRSAYRDINVKLVTSSRGKILRAEPISALYERGEVKHRVPFTELEDELCSYTEDTKESPNRMDAAVFALTELSEIGEESSVGSARIVY

SEQ ID NO: 102593 - protein, 134 aa, Unknown
  Obtained from environmental sample
  misc_feature (1)..(134): Xaa is any amino acid
FIETNIRSTVIHCFFPGRDDVKDSEIFPILEAALDKKDPRTWYYALMDYGVSLKKLTENPGRRSAHYTRQSSFIGSFRQARGKVIKALASIGSSNAEELRLACGLEEEKLYRVLDRLEEESLVAEKDGIYRIKD

SEQ ID NO: 102594 - protein, 110 aa, Unknown
  Obtained from environmental sample
  misc_feature (1)..(110): Xaa is any amino acid
VNKKFTTPEERIKAINDTHFIFGHEIKITGKGKYEVKFFDDAVPEKKCSCSGGRLVILNKKWSKTWCYCCGGHVKHHLETVLGKKLKVKIKSSALTSLGRKNCCFELNEI

SEQ ID NO: 102595 - protein, 244 aa, Unknown
  Obtained from environmental sample
  misc_feature (1)..(244): Xaa is any amino acid
VAKEIKAGVELNLKDLFSAGMSKAAKATDDFAGKTIGALNKVDKVLSGTAAKLGALGVTLSLGAAAKGIIEMDHRMTRLGLSVNASAEQVSELKRALFEAAQAPDVKIDVSDLQRGIDTIISGTSDLEYAKESIRNVALAIQATGESGDSIGAIFTEFKKFGYTSDQISSLMDDMVAQSNEGAFSLAEFAKAAPQIFSSYSRIGSAPENIKKANAALQIINAGTKSPLKAVSTFNAAMEELADV

SEQ ID NO: 102596 - protein, 146 aa, Unknown
  Obtained from environmental sample
  DOMAIN (1)...(143): Uncharacterized BCR, COG1636
  misc_feature (1)..(146): Xaa is any amino acid
VHPYTEYRSRRDALCLYANNKTLKLYTEDEYGLRSFVKVVSSFEQKDNRCLYCYRTRLEKTASMAAERSFDAFSTTLLISPYQNHDAIKEIGEQAANNLSVKFLYRDFRLSFRAGQKQAREAGYYMQKYCGCIYSEEERYLERLNQ

SEQ ID NO: 102597 - protein, 87 aa, Unknown
  Obtained from environmental sample
  misc_feature (1)..(87): Xaa is any amino acid
GELYKRHPFSALVLTRGSEPLWYAEKEELKEFAFKNVEPLNTTGSGDAFSAGLAAALEEGASLADAVAEGARCGALNAALLKPGVIR

SEQ ID NO: 102598 - protein, 33 aa, Unknown
  Obtained from environmental sample
  misc_feature (1)..(33): Xaa is any amino acid
MMSQTDRQTDRQTDRQTDRQTDRQTDRQYNPSL

SEQ ID NO: 102599 - protein, 233 aa, Unknown
  Obtained from environmental sample
  misc_feature (1)..(233): Xaa is any amino acid
LYACLVLVACSAPRTLERTGAGVADLQRFPQDLWVYAGRIGADRLLLDAAGQTAHWERYRRLHFSPWQAKKAGVSREEAFSAFNSAGYAENLLPRTSADLAALERNSNRPAYPDRLARGITVRATALRAAPTALPRFNNPLDAGEGYPFDTWQSAMLPLGMPVLMTHASADGAWMFVENALVAGWVAEQDVAEVDAAFMERCRGLPLCAVLREGVRLSAFGRVAALAGIGTLL

SEQ ID NO: 102600 - protein, 289 aa, Unknown
  Obtained from environmental sample
  misc_feature (1)..(289): Xaa is any amino acid
NETKNPKPSLYAVIPATVRYEKIPDGAKLLYGEISALCDKKGYCWARNEYFAELYQVNERTIRNWIDSLRDKGHISVNFIYVPGKKLIQSRIIRLTCAEKVQKTQQKRNIELPSDKEVGKNSSIGGENFFHTPVNNFPQVGKNFSIGGEKNCRDNTTSNNTNTTTTTGEQPDLIQEAPAQAETAAAAVLSPEEIKAALLAIDRALLLKTDFYSRAAAFMALNYLDSGYFAWLYKQCEHREPDKSFEGYYFTLFFAENMVEKYKISKKPPPPSLPPEFKCPVCGTIHDKQ

SEQ ID NO: 102601 - protein, 275 aa, Unknown
  Obtained from environmental sample
  DOMAIN (1)...(274): Serine hydroxymethyltransferase
  misc_feature (1)..(275): Xaa is any amino acid
AAEGDANLYNLTETQWKELKAELGNQRLLGLDYFSGGHLTHGYRYNLSSKMFDIYSYTVSQKTGLLDYDEIESQAKKVRPLILLAGYSAYPRKINFRRMREIADSVGAVFMVDMAHFAGLVAGKVFTGDYDPVAHAHVVTTTTHKTLRGPRAGMVLSVNEFAASLDKGCPLTMGGPLPHVIASKAVAFREARKPEFQKYAAGIVENSQALAASCMKNGLEILTGGTDNHLFLANVQTAGLTGRQGENACAECNIILNRNSLPFDPTAPGIRRACA

SEQ ID NO: 102602 - protein, 290 aa, Unknown
  Obtained from environmental sample
  misc_feature (1)..(290): Xaa is any amino acid
VRWDWFTGEDYFELDNREYISINLSMMPGFPEEVIERTDQYEIIRNGRGIVTKALIEGSVGRARMSMDQYLSFPVETLADFEKLKHRYIAGQQSRYEQGWKEFRLEGWKNRKHVLVAGRNGSTLGFYWRAREWMGTENLSYAWYDDPALCDAMMEFNADFTIEVLRPVLDEIAVDYIFINEDLAMKSGPLLSPDHYRRYIFPHMRRLVDFMKGKGVSYVIVDTDGNSEPIIPQLLESGVDGIWPIERASENMDPAALRAKYGKALRLWGAVDKRCVAAGFKSIDEHLRTM

SEQ ID NO: 102603 - protein, 166 aa, Unknown
  Obtained from environmental sample
  DOMAIN (92)...(164): Cyclic nucleotide-binding domain
  misc_feature (1)..(166): Xaa is any amino acid
MALRVMLGQSKYNFLYGTLGNLITLLINVYFFFLFFMTGGQFAYVSDYLDSFLFIKMRRARINAVNNTKLLSISKSIDRLFLSVEGSLQKYYRFHEKGETIFFEKDKSDEIYYILEGEVEVLALSGPNNYTQIATLGPDFFFGEMGYMLSEDRNATIRANTDISSL

SEQ ID NO: 102604 - protein, 68 aa, Unknown
  Obtained from environmental sample
  misc_feature (1)..(68): Xaa is any amino acid
MAIITVSRELAALGDETARELSKISGWRLADKAALEEKIQLYGMKSRKLKEYDEKKPSLLASLSRDRD

SEQ ID NO: 102605 - protein, 285 aa, Unknown
  Obtained from environmental sample
  DOMAIN (7)...(251): Beta-ketoacyl synthase, N-terminal domain
  misc_feature (1)..(285): Xaa is any amino acid
MTTVQRRRVVITGMGTVNPCGNTVAETWDSLLAGKSGIQTIDRFDTTDFSCKIAGQVKGFDPDPFIEKKEQKKMDIFIQYAMAATSEAMKDAGFEGVELPKTERERFGVAIGSGIGGLGTIWNEANGYRGPRRTSPFFIPSLIINLASGSVSIKYGLQGPNTATATACATGAHAIGDASRLIMFGYADRMVAGGSDSVINQLGVGGFAAMRAVSTRNDAPEKASRPFDKDRDGFVMGEGSGVVVLEEYEMAKARGAKIHAEVVGYGMSGDAFHMTSPSEDGDGMM

SEQ ID NO: 102606 - protein, 272 aa, Unknown
  Obtained from environmental sample
  misc_feature (1)..(272): Xaa is any amino acid
AISRVNRPTLVFAPNKTLAAQLFAEFKQFFPENAVEYFVSYYDYYQPEAYVPERDLFIEKDAKINEELEKLRLNATRHILERRDTIVVASVSCIYGLGDPSSYLDLSVNLKVGDTKDRSMLLRDLVAIQYARNQMSFEPGVFRVRGDVVEVYPAYEDIAYRIELFDNDIERLSSFDPLRGTTIEEFDALTIWPKSHYVTPEDKLKQAIREIKVDLDLREEEFRSQGKIVELQRLRQRTLYDIEMMHEMGYCSGIENYSRYWTAEKWANRRTH

SEQ ID NO: 102607 - protein, 288 aa, Unknown
  Obtained from environmental sample
  DOMAIN (1)...(288): Carbohydrate phosphorylase
  misc_feature (1)..(288): Xaa is any amino acid
VSAVIQDIIRRHKQNGNNIADLGAKTAIHLNGSRCALAIPEMMRLLVDQEGMEWKEAWKMTQSIFSYSSSAVQREHVETWPVYKITQLLPRVMQVIFDINLEHLDLIRARGCNDVDLLRNLSLIEEGEVKRIRFADMAVLGSNSVNGVSAAHTEILKKHLFPNYYSQYPEKFYCKTNGVSHRRWLYCANRPLSALISRPIGDGWVRRPEELSKLEFYAENPEILKGFWNVKNRAKSELCAVLREKVGVALDPAMLFDVNCRPIHTMKRQVLHILYILHSYLKIKKGET

SEQ ID NO: 102608 - protein, 154 aa, Unknown
  Obtained from environmental sample
  misc_feature (1)..(154): Xaa is any amino acid
MLSNLDRIIISDTACLIGLTNIGRIDILREMSSSVIVTPEVAKEFGEPLPEWITLKVVSDSEKIKILNKFIGLGESSAIALAIEIRNALLIVDDKRARQFALSLDLEITGTLGLLIRAYRNGVIHDIDSVIASLRKADFRLPANTEILIKNIKK

SEQ ID NO: 102609 - protein, 165 aa, Unknown
  Obtained from environmental sample
  DOMAIN (21)...(165): Carbonic anhydrase
  misc_feature (1)..(165): Xaa is any amino acid
ALSKGELIPKTSYSADREVLNSGQKPFAVVLTCADSRATPEIFFDQKLGDIFVVRNAGNVADKTALGSIEYAVEHLKSKLVVVCGHSKCGAVTAACSGGELPPNIKHIVDHIMPSVKKGDDVEKVVHSHVAKMIEQVKADEIVKHLGVKVVGAYYDIHTGAVEWL

SEQ ID NO: 102610 - protein, 273 aa, Unknown
  Obtained from environmental sample
  DOMAIN (79)...(112): Tetratricopeptide repeat
  misc_feature (1)..(273): Xaa is any amino acid
MRHKRLGRGPRALFLLTLILFVLLAATAGTGGAAGGAGRELSPAEALALARALLEKGQPEAAEKIYNALRQNPSLEYRLEAAFQLAQLRLAQRRFRQAINLFQEILNQRPNLPRVRLELARAYFLDKNYEDAAFQFELVKGGDLPPEVLANVDAFLNAIRRQKNWTLDFSFSPVSDSNLNQASGGKEECIDTQFGTLCRPLDDKAESLGLSADATLDYFWRLNQDWGLKSTLGFYGTAYEQSEYDDYSLYAALGPRYLWESGESSLQPTFRKR

SEQ ID NO: 102611 - protein, 276 aa, Unknown
  Obtained from environmental sample
  misc_feature (1)..(276): Xaa is any amino acid
MMSLLSRDGKIYGVPRDAYALGLMLNVDLFRQAGLVDRNGIPQYPKTWDELATVAQTIKQKTGSAGFVLLAKDNAGGWHFTNIAWGFGAVFEVQRGGKWYAQLNTPEAVAALQYVKDLKWRYDVLTADPTNEDWSSGFRAIGTGAAAMYIAAQDAVSQPTQANGLPVGDLALVPVPAGPKGQYSLMGGTPYMFAPNATSDQVTASLRYLEIMGRSPLVNADVIAGLRADAQNRKNAGVPVIPEVPAWTDPAFAKAKQDALDAFANVDMRLYNDYYA

SEQ ID NO: 102612 - protein, 89 aa, Unknown
  Obtained from environmental sample
  misc_feature (1)..(89): Xaa is any amino acid
KSLKNLKAQNLRDHMSEAELIFTALAELSTRQIAESERATGYTENAIASKKGGKIAKNARNDLESKTGKSVVTGENFLPPHSGKKKLKK

SEQ ID NO: 102613 - protein, 239 aa, Unknown
  Obtained from environmental sample
  misc_feature (1)..(239): Xaa is any amino acid
MLKDYTFVGWFTDAEFGVKVTTSTVFEDDAVIYARWSLFTHAKVTFSAGANGTLRVTVDGKPIASGDSVGIGKDIVFTAIPADGYKVSRWTINGAEVVDSFFTYVHAGLSDAAVVTVSFGESISLASPNREIPTGGASEEVVAVAPVRVSSGGVVAGPNPVKAFGEAVIYWTGGKPVKGSLSVFDAVGQKVAVVNVSGTKKIGTWKVGDVAEGTYLIKGVLTDKNGVRVMVSVLVGVVR

SEQ ID NO: 102614 - protein, 296 aa, Unknown
  Obtained from environmental sample
  misc_feature (1)..(296): Xaa is any amino acid
TSFTIAPEAGSLRLRRVINKDFTDEAIFNTVKLLLERNAQTIKLYFMVGLPTETEVDLQAIVDMTKTISGMMRAKSPKLALHVAVSPFSPKANTPFQWEGMTPIDVLDTRGRFIKGCLRDKKNVKVSYRDGRMAFLETATARGDRRVGDVALAAWRAGARFDGWDEMFNLNLWIEAARSIGVDLEQYTKPIDIEEILPWSAVSVGVDVGFLKRERELAFKEEATPDCRTGGCANCGACGGRVSTRLCIDAGESVSTDVSSTVSSNASTKASTETSTETSYGRRLQAAKEQSASIQT

SEQ ID NO: 102615 - protein, 204 aa, Unknown
  Obtained from environmental sample
  misc_feature (1)..(204): Xaa is any amino acid
MGKLELFLHDVPSPVPVLMKAALAHAQFETIHPFLDGNGRLGRLLITLILCEQNVLREPMLYLSLYFKTHRQEYYALLNNTRLVGDWEAWLSFFADAVTTTASQAVAAARQILDLSEQDRAKINGIGRGAPSVMKIHQSLMAYPIATPSLLAKKTGLAPATVNKALSYLESAGIVKELTAQKRDRVFRYSGYLEIMEQGTELPE

SEQ ID NO: 102616 - protein, 262 aa, Unknown
  Obtained from environmental sample
  DOMAIN (29)...(261): Phage portal protein
  misc_feature (1)..(262): Xaa is any amino acid
MGIFTTLTASKRTEKRSAGIPDFLMGNAAYSRSGIAVNEASVISLSPVASVLMRLSSILGVFPFKTYRKNDDGSLAEIDHPALRLFNVEPNEYLNGQQLKYILMSNFLLHGAGVAEILFQGGFPSALTPIHPTNVQVVNTNGKISYRVTRESGQQAALQPHQLLLFKLFPKADGGWVSPLQTHRAIFEEALALREFSSMVFSQGCNPAGVITGLPEEMTEESRNTLLDTLKGYVGLGKSHQFMILPTGKFERVAAPSTDLQY

SEQ ID NO: 102617 - protein, 194 aa, Unknown
  Obtained from environmental sample
  misc_feature (1)..(194): Xaa is any amino acid
MDCGVIASGFPERSAAVQIASIPTLYRRRDKLPLFDLVIIDEAAHLPSKTWRETVNSWPHAYRIGLTATPQRLSGEGFDSLFDKLILGASTAELIRNGWLSPYRLFAPQVASFESVHIRGGDYIPEEVDGIINRAKITGNVIEHYKNFSPGRRAVVFCASVNHSRAVAAQFADTGFRAVHIDGGTPADERAKAM

SEQ ID NO: 102618 - protein, 248 aa, Unknown
  Obtained from environmental sample
  DOMAIN (3)...(244): Polysaccharide biosynthesis protein
  misc_feature (1)..(248): Xaa is any amino acid
MHAFISGGAGFIGSHLAVRLLAMSDVQHVCIYDNFSSGTEKHLAGLGGDARVHVVRADLHDTDRLNDAMRGVDSVFHLAANPDIAAAVSDPDIDFRQGTVLARNVLEAMRLNGVRAIYYTSGSGMYGEAPGTAFSESYGPCLPISTYGASKLACEALISSYCHMFGMWGRAYRFANVVGPRQTHGVGYDFVRRLLADSSSLKILGDGTQCKSYIYVDDVLDALFLVGGDRATGQPFDVYNVATDDYIT

SEQ ID NO: 102619 - protein, 209 aa, Unknown
  Obtained from environmental sample
  misc_feature (1)..(209): Xaa is any amino acid
MVHLRAVHMKSLKKGLQSLWRREVAESTLPDYPRGITFEDVWASLKELAEEHKKTERVVKQTSRQMGGLHRRFGELAEHMVAPGIVKRFNELGYHFHSVSPGGQRILDENGRVKTEVDLLLENDEYVVAIEVKTRPVEQDVEHHTGRLEILREHRNKHHDSRIILGAIAGAIFPQEVKKLTHEAGLYVLEQSGDTMKIDVPEGFVPREW

SEQ ID NO: 102620 - protein, 286 aa, Unknown
  Obtained from environmental sample
  DOMAIN (143)...(213): HAMP domain
  misc_feature (1)..(286): Xaa is any amino acid
GITRLARELLGFKLGELEKYANNQWSLLVDNNYAGKPEMVEAAEKAVEQYGRSILLSDTEIIFAVDASGKTAMSTSEVKLSPSESKALLQLLEHENQGLQTAVINGEKRIFQAFYFTPFNWYILISEKEQVFYEDAKMIAVQTFISLGISVAIAVFMLIIVTRRLTNPLGKVVTTMESIIETADLSSKVEVEYNDETGILAQTFNNMTEELDRAYSQIKRYAFDAVLAGKKEERIRQIFQKYVPNNVIEKFFASPEKMLVGDNRKLSILFSDIRSFYYHFRRHGSR

SEQ ID NO: 102621 - protein, 72 aa, Unknown
  Obtained from environmental sample
  misc_feature (1)..(72): Xaa is any amino acid
MMDRHVLSNGYLSATVKADGAELCSLRDAEGTEMLWQALPLWPRHAPVLFPIVGRLKNDTLVHDGKSYRMTQ

SEQ ID NO: 102622 - protein, 291 aa, Unknown
  Obtained from environmental sample
  misc_feature (1)..(291): Xaa is any amino acid
MAESWSFAPKKGAYTFDQSTEPSVFHGGLGKGIGDIFKNLGDRFKYGGQPGKEQRIYYFNTKEIMGNKYGTPAPIPYLIVDPNINLRLTISLRANGEYSYHIMNPMAFYANVCGNVEELYTRDKIDSQLKSEIVTVLGPSLAKLGAGLEYHMISAQTDKLAEILNEALTAKWREGRGIEIVNFGITCTATEEDETRIKQLQTAAVMRDPTMAAASLVNAQSDAMRTAAGNTGGAMAGFMGMGMANMAGGMNSQNLYAMGAAQQPAAAAPAGAGWSCSCGHAGNTGQFCAEC

SEQ ID NO: 102623 - protein, 298 aa, Unknown
  Obtained from environmental sample
  misc_feature (1)..(298): Xaa is any amino acid
VALATRTLYSANGNTVTAVFGFTGDNTPIDPTVYGVIGPRTGKDPVMAVDTMQYSGSIKWTSDGGDLTPPATFIEGVVYTATITMTPKNGFHFVDASPSSWKVNGTAANVTNFQINGNKGVITAIFPETTDGKGDRLPVEVITLAKPKAGEEPEFFYEGENFKGNVSWIVLDTASFTGVHPTDALKPGDLFDPETKYYALIAIDAGEYDLPPLDIPEWKHSEGKDKVTVAYSDRRFVVTFDYTETRIDLKRDWTLSTEVGADPDTFGPGDKGPDFPININDPTNPWDRNPGSGVTLIL

SEQ ID NO: 102624 - protein, 288 aa, Unknown
  Obtained from environmental sample
  misc_feature (1)..(288): Xaa is any amino acid
VDEWLKAIGTGAINPSTTDEVQIANNNKQLKLRQLLEKAHGKLDGSRTLLKAKSQERVSLETSLKTYLEVVMEHFPLSDFQDAFTCYNDSQKKSFNEIQEIIRNMLKNDRELATLIKDYYQAQEDVEVLRDKQDEDDDEGKVLDLQALNTEFDTIRQSVKMTVGRQGNHFPILTSEYFRCGPNDVAFRENVITMLAKIESIDKEAFCRVYKNKLNRIIPYVVLLPCYGDTGVCWEPFNKHNRATSRGRIFVPMYPHNLYIAVLSAVADLRWQVAKEKASFYWMEEGLT

SEQ ID NO: 102625 - protein, 201 aa, Unknown
  Obtained from environmental sample
  DOMAIN (1)...(197): Indole-3-glycerol phosphate synthase
  misc_feature (1)..(201): Xaa is any amino acid
KASPSKGVIAEDFPYTDIAREYEEAGAAAISVLTEPDFFLGSDLYLKEISKVVNLPLLRKDFTIDPYQIYEAKIIGASAVLLICALLDTKTLAEYIEIADSLGLSAITETHDENEVKSALEAKARIIGVNNRDLKTFEVDIETSVKLCKLVPDNVLFVSESGIRTKEDILRLGRVNAVLIGETLMRSGDKKAKIKSLLTHG

SEQ ID NO: 102626 - protein, 267 aa, Unknown
  Obtained from environmental sample
  DOMAIN (86)...(196): Region found in RelA / SpoT proteins
  misc_feature (1)..(267): Xaa is any amino acid
LEPAKIKAIATETLDIYSPLALRLGMAKIKCELEDLAFKHLHPEEYKEIVSKVVASRVEREAVIEAFSGPLRESLNADGINATITGRPKHFFSIYNKMKKRGKPYEEIYDVLAIRIIVNTVRECYCALGIIHSLWVPVQDRFKDYISSPKSNGYRSLHTTVAGGHGNVIEMQIRTWEMNKTAEDGVAAHWLYKNGERPGEISRDDRALAWLRNIIEWQEHLTDSAEFYEFFKVDLFDTEVFIFTPQGNLITLPRGPRCSTSPSPCTR

SEQ ID NO: 102627 - protein, 292 aa, Unknown
  Obtained from environmental sample
  DOMAIN (14)...(291): PEP-utilising enzyme, TIM barrel domain
  misc_feature (1)..(292): Xaa is any amino acid
ELEKWERLKTRESKKLNESFKTSELPAETKDGHRVLLKANIEIPEEAETLYRFGAEGIGLYRSEFLFLNPGKDAEEEMQLEAYNKVLLAMEKLPVTIRTVDIGGDKILPGFSDISEKNPLLGWRAIRFSLSMPEFFKTQLRAILRSSVNGNVKIMFPLISGLEELDAALALLEEAKSECRKRKQPFADNIEVGTMIEVPSAAIIADILAVRSDFFSIGTNDLVQYSIAVDRGNEKVSYLAQPAHPAILRFIKTTIDAAHKRGIKAAMCGEMAGSTAVTVLLLGLGLDEFSMA

SEQ ID NO: 102628 - protein, 81 aa, Unknown
  Obtained from environmental sample
  misc_feature (1)..(81): Xaa is any amino acid
MADIVRLYVGVFSKFKTPNMKQRRYLLDTTLRDGEQSPGLYFTSEQKIKIAALLDLYGVHQIEAGVPAVSKQEKEDIIKIM

SEQ ID NO: 102629 - protein, 61 aa, Unknown
  Obtained from environmental sample
  misc_feature (1)..(61): Xaa is any amino acid
VIIIVLWLAGIAAAMQFAKFSFAFDFLKNQYNVSPFWIGMSLSVVGLIGLIFGITVSIYSS

SEQ ID NO: 102630 - protein, 175 aa, Unknown
  Obtained from environmental sample
  misc_feature (1)..(175): Xaa is any amino acid
MLFAKEVKLSAKMFYSFFKIGKTRLFPKRDYNYNHFKNLALVYFKPTPACNLRCVMCGQYGDKGVMKDCAAEETRKILPLETWKKFIDEIAPQKPVTYIWGGEPFLYPDLFPLARYMVEKGLFVAVNTNGTLMEKHAEQIVRDKWSTIFVSLDAFREVNDETRGKGAYDKVIAGL

SEQ ID NO: 102631 - protein, 287 aa, Unknown
  Obtained from environmental sample
  misc_feature (1)..(287): Xaa is any amino acid
AFDDCPKLTSVTIEDGGTAIGNEAFYGCTNLKSVTIGNGAKCIGKKAFFGCRNLTSVTIGTGAAMIADEAFKSCEKLTSVTIGKGATHIYNNAFSSCKNLTDVTLPNSVKYIGNTAFADCGSLATIKIPSSAEYIGKSAFADCGNLTSITIPDGVTEILYETFIGCKNLTTVTIPKSVTRIGESAFMDCPSLTSITVKNPKPPEIDRYAFGFNDSWHVSLDWSRANLYVPISGFFAYRASDTWSAFENIKPIGVIRLALCILAATLILSAAVFGVIKKLRNHLNLDS

SEQ ID NO: 102632 - protein, 107 aa, Unknown
  Obtained from environmental sample
  DOMAIN (13)...(107): Clp protease
  misc_feature (1)..(107): Xaa is any amino acid
MSSLVPIVVEQTGMGERSYDIFSRLLKDRIVFLDGEINDISADLVVAQLLFLDGQDIDKDINLYINSPGGSVTAALAIYDTIQHLKSDVQNICLGQAASMAALILLP

SEQ ID NO: 102633 - protein, 194 aa, Unknown
  Obtained from environmental sample
  misc_feature (1)..(194): Xaa is any amino acid
AGLSERALESGRREAARAAAREAALNQAALDLEEQARRLGREEERRARNLADRAAGLGLALDLNRPEDERERLAEAERKAAELEGRLGEAEGLAGNAERLDAKIKDFKTALDRVSALEEEIERRAGAFRRALAEAGFDGEEAFEAARLPEEERLELERRARELEAASAALASAGKDNAERLLAERARNLTVQAR

SEQ ID NO: 102634 - protein, 112 aa, Unknown
  Obtained from environmental sample
  misc_feature (1)..(112): Xaa is any amino acid
VRVLRLRILNLNSLAGEFTIDFTHPAYWGGVFAITGPTGAGKTTILDAICLALYGRTPRLPRINKSVNEIMSRSRGECAAEITFETPAGRWRASWAQRRARSKAGGALQDPQ

SEQ ID NO: 102635 - protein, 280 aa, Unknown
  Obtained from environmental sample
  misc_feature (1)..(280): Xaa is any amino acid
MRHLRFPLGQNSLFTQELAGLLSASLPEFVQDMHLTVLHGQMLLHHAKFEAMIRDFSASVRFPGLFSGFLDLDFAELVMSRQAQNAGRLSDFRLRLHDIDLPEEGNIWPHLETGDLAGIFSLPDICDSLKLRLLLAADGDKKLFKGRLNLEGNLATAPAIPLRLHLPFTLSKNHEVRLQGVQIDLDADTATLDATLTPGSGLDMLLTALKPEPAPHAARNSQQPSSAPQSQAPNLKGTAHIRHLSLPRWFEFARKLPPGIEAALNNVSGEADFVLTPRDL

SEQ ID NO: 102636 - protein, 67 aa, Unknown
  Obtained from environmental sample
  misc_feature (1)..(67): Xaa is any amino acid
MFGHDLLVAPVLELHARERKVYLPAGAKWICCRSGKECMGGQTITADAPLDVIPLFTRDGAKLPINE

SEQ ID NO: 102637 - protein, 63 aa, Unknown
  Obtained from environmental sample
  misc_feature (1)..(63): Xaa is any amino acid
MGYGISQGNGLKMVTSMERGSSYGFAVLKGKNQDLLKMFDQGLVNVKANGTYQAILDKYIKTE

SEQ ID NO: 102638 - protein, 313 aa, Unknown
  Obtained from environmental sample
  DOMAIN (120)...(313): Glycosyl hydrolases family 38 N-terminal domain
  misc_feature (1)..(313): Xaa is any amino acid
GKPHSGLVIDNGLTHEGRVDFYVDAGANDLFGKMQRNAEVRELTIAIRNNNIRTLAYDVETLAYVAVHGADSGFSGKLRTVLTELARVYRHITEAEAETYVKLLRPFMQTKNAEGQDVFHYTAIGHSHIDLAWLWPIRETFRKGARTFTTQMLNLARYPDYVFGASQAQLYAWIKEKYPAIYADVKKQIEAGRWDVQGATWVEPDSNLISGESLIRQFYFGKKYFADEFGLDMQIFWVPDSFGYSACIPQVMALSGVRYFLTHKLSWNTVNKFPHHTFNWTALDGTTVFAHMLPESTYNAPMRGDLLSFGEKN

SEQ ID NO: 102639 - protein, 286 aa, Unknown
  Obtained from environmental sample
  misc_feature (1)..(286): Xaa is any amino acid
SRDTSVVAFLPAFSVIPLTQYPGGPADALVSVGDLVREGMLIGKGQTPDAANIHATVPGKVVRSVEWKDSDGRSNEALVIRMEGAFKCLGKREENFLRGSINHKELQQILTDYGIVEMEGSGRPVAGMLAELGGAGTAHTLVVRCVFDDPWLAADYVVCRERMQAVVEGSYIIAHSGVRIGRIIFAVSYKEKEMGAALLTEAAHAAAHIGAQNISSSVILTGSRYPQRNRRELELALRNYEKKEGVHLGSLLILGPATLAAVHDAVKYHRPILDRYVAVGGSAVQK

SEQ ID NO: 102640 - protein, 186 aa, Unknown
  Obtained from environmental sample
  DOMAIN (25)...(186): MatE
  misc_feature (1)..(186): Xaa is any amino acid
MPSQKELTPLTIGNPARRIVVFALPFLVGEFLYVFYSMTDAFVVGRWLGINGLAAVGATYSIIGFVSGFIIGLTAGFAVITAQRVGAGDAEGIRRSVAAGLTLCLFASIIITVLLLPFCRVFLLLTRTPAEIMDDAYAYLMIILSGTFIGVFSNMLAGIINAGGDSLTPTVFFVVGIVSNIFLDIL

SEQ ID NO: 102641 - protein, 283 aa, Unknown
  Obtained from environmental sample
  DOMAIN (5)...(282): Chorismate synthase
  misc_feature (1)..(283): Xaa is any amino acid
MVAHPGFAISEEYIQTFLDRRKPGQNALTTQRKESDLVKILSGVFEGKTTGTPISMIVENSDHHSEDYEHIKDWYRPGHADEVYDSKYGFRDYRGGGRSSARETIGRVAAGSIARKILNEKCKTEFNAWLDLDEKEIEAARKNGDSIGGVVNLNIKNPPKNLGEPIFDRTEALLAMAMMSIPATRGFEIGKGFEAAKMTGSEHNKFADGTYGGITSGEDIFCRIAFKPTPSILQLQKAKNKNGEVGEISVKGRHDPCVALRAPVIVESMAALVLMDLWMQLYV

SEQ ID NO: 102642 - protein, 79 aa, Unknown
  Obtained from environmental sample
  misc_feature (1)..(79): Xaa is any amino acid
MEEQNFQVTEEDIEKELEKITDESGENLEDVKKHYQEEQMAEYLKDDIKEHRLFEIMLAENTIKPGEKKKYLDLMENNG

SEQ ID NO: 102643 - protein, 154 aa, Unknown
  Obtained from environmental sample
  DOMAIN (27)...(63): Sigma-70 factor, region 1.2
  misc_feature (1)..(154): Xaa is any amino acid
MKAKQEKNLKVERAVNGKAGADRKNDENILSMYLKEINRIPLLTREEEDSIARCAANGSLSARNKLVKSNLRFVVNVAKRYQGHGMPLMDLISEGNIGLIKAVERYDADRGFHFISYAVWWIRQTILKALADQSRLIRLPVSRTNDLIQMKRRK

SEQ ID NO: 102644 - protein, 167 aa, Unknown
  Obtained from environmental sample
  misc_feature (1)..(167): Xaa is any amino acid
MHASKKTVYVETTIPSYATAKPSMDILSANRQAITKLFWEYEKDKYKLYISQFVFDECKQGNPEAAKRRLDFIKDIPLIPDKSSTANLANEYFNYLNIPERAKTDCFHLAVCVEAKIDYLLTWNCSHLGVEAYAKIYEYNNKKGIWIPELVTPEMLIQYERDKQNEL

SEQ ID NO: 102645 - protein, 234 aa, Unknown
  Obtained from environmental sample
  misc_feature (1)..(234): Xaa is any amino acid
MRQLQKKTGAGDFAHIVIHSSIIRPAANRFISEYVQRLKGKKWEPLHPRLEYILNETYGILCYQEDVSKTAVALAGFNEADADKLRKVIAKKAGSSKLRVYEKQFFEGCRQNGVGEETVKAVWAMMLSFDGYSFCKPHSASYAMVSFESAFLRVHHPAEFMAAVLSNQGGYYRAGAYISESRRMGLLIEGPDINASRWKYCGTGRRLVIGLMAIKGLSVCAAENIVTEREKAGN

SEQ ID NO: 102646 - protein, 236 aa, Unknown
  Obtained from environmental sample
  misc_feature (1)..(236): Xaa is any amino acid
MPEPEDFIFFDLETTGLSGGAGTIAFLAAFGRAVSEDKLRITQYLLLDYPGESDFLEAVLAEFANTNSVIVTYNGKCFDSQILKTRCLMQRIKPPEYFHIDLLHPARRLWKNILGGCSQGSIETGILGLNRGGDIPGALAPEIWFDFLKTGSTERLMGICDHNSADICGLAVIFAAMTAIAADPFTVKINYDIERLALYWRGFIRKQYVTTASELGGLQQTGNQLLHFASEKDYPD

SEQ ID NO: 102647 - protein, 288 aa, Unknown
  Obtained from environmental sample
  DOMAIN (1)...(288): 4-alpha-glucanotransferase
  misc_feature (1)..(288): Xaa is any amino acid
VNDTGYESSPYSSLTAFGLHPLYLRIEDLEEFKTADNSIKKRIKEAKNKFDKNERFSHYNVLKEKLEICRALYNANAKDIVKNASDGELAKWVEQNSWVKQYAVYRRLKEENEGKSWKEWKEHHTVTAADIENLWKDKNLQEDHLFWVWLQEALDVQFSKAAKAIAEAGIVLEGDLPILINEDSCDVWAHPELFIQELSAGAPPDQYSKDGQNWGFPVYNWEVHEKDNYAWWKSRLAAAGKYYQAYRIDHVLGFFRIWACSRSDYSAALGRYVPYAPITAGDFQKMNY

SEQ ID NO: 102648 - protein, 107 aa, Unknown
  Obtained from environmental sample
  misc_feature (1)..(107): Xaa is any amino acid
LTSRPEFNGLLVVPHLRVQNANAISSPLTWGFPAVTAFLGLMWALERKIAADCQLAFQGVAVINHSFTPLVTQGGYTRTFQLTRNPVDDKGESSPIVEEGRAHMEIS

SEQ ID NO: 102649 - protein, 74 aa, Unknown
  Obtained from environmental sample
  misc_feature (1)..(74): Xaa is any amino acid
MSHYIDLRIRPMPEVAPEHVLEKVFVKIHLALVTSRRSDIGLSFPKVDEKRPDLGDHLRLHGSEAALSELLKSP

SEQ ID NO: 102650 - protein, 284 aa, Unknown
  Obtained from environmental sample
  misc_feature (1)..(284): Xaa is any amino acid
LGTSLKLPLSTTYVTFMVAMGSSLADRAWGRDSAVYRITGVLTVISGWFITAFVAFFVTMIIALVLFFGEIYGVVGITALCIFLIIRSNAIHEKKVEAKSRIEEVREETIVEKCIGDVAKSLENAIIIYSETIVGLTNEDRKQLKSLHQQVSELLFEARELKQNVYYTLRQLQNDSVETGHFYVTIIDYLREVANALNFITKPSYQHIENNHKGLSPIQASELLSINNEVSKMYAHIRKMIAEGRYGDMQDVIKHQQQINEIIADAGKKQVKRIKTEESGTRNS

SEQ ID NO: 102651 - protein, 124 aa, Unknown
  Obtained from environmental sample
  misc_feature (1)..(124): Xaa is any amino acid
YNSYELSYTSKCIAALDVSTCTALKSLYCSSDSLTALDVSKNTKLTELDCSNNRLTSLIVNGATALTSLSCSNNQLTAAALNTMFQGLPTRSTSDNAYVYIYGNPGTATCDKSIAQNKKWNVNN

SEQ ID NO: 102652 - protein, 109 aa, Unknown
  Obtained from environmental sample
  misc_feature (1)..(109): Xaa is any amino acid
MLIVAAVILFGVNGCKQKKDAARNMDGKINVTVTVFPPYDFVRAVAKDKVNLKLLLPPGSESHSFEPSPRDIITVQNSDIFIYVGGESDAWVNRILESMNTDKMKILAM

SEQ ID NO: 102653 - protein, 287 aa, Unknown
  Obtained from environmental sample
  DOMAIN (2)...(233): Nucleotidyl transferase
  misc_feature (1)..(287): Xaa is any amino acid
MQVVIMAGGKGTRVSSIASDIPKPMIPICGRPILEHQIECLKKNGLTEIILVIGHLGDIIRDYFGNGGRFGCGISWYDETEPLGTAGALYKIKNLSDDFILLNGDIIFDIDFRRMINFHREKKAQITLAVHPNSHPFDSALIVTNDNNQVTRWLNKEDERTWYKNQVNAGIHILSAEFLINCPQSKEKVDLDRDMLKPSVSNGKIFAYSTPEYIKDMGTPERYAQVTSDIEKGIVRQKNLSVKQKCVFLDRDGTINKINNFIAKPEDFELLEGAAEAIKKINSLGYL

SEQ ID NO: 102654 - protein, 156 aa, Unknown
  Obtained from environmental sample
  DOMAIN (30)...(152): Bacterial flagellin N-terminus
  misc_feature (1)..(156): Xaa is any amino acid
MGSFSVLNNLPSVNGINQLNFNNINLNRTLNRLASGKRINTGADDAAGLQIADQLRGNVAALNQAIRNANDGISVLQIADSALEQITNLLHRAVTLAEEAATDTISVQGKEALNYEYDFIKREIGRIAHATNFNSQKLFDGKDIKDGKFNVFVGDL

SEQ ID NO: 102655 - protein, 185 aa, Unknown
  Obtained from environmental sample
  DOMAIN (14)...(183): Binding-protein-dependent transport system inner membrane component
  misc_feature (1)..(185): Xaa is any amino acid
MNFVEVMSGVFPLLMRGMVVTVETTIIALIIAIFLGLFFCLLGMSKYSQLRLLAKAYIWVIRGTPLLVQTFFVYFGIPQLVQYLGFDFRLSPLAAGIITLSMNAGAYIAEIFRGGIEAIDHGQMEAARSLGLSHYRAMFRIILPQAVRICIPALVNQFIISIKDTSIISIISLAEIVYEAKIYIG

SEQ ID NO: 102656 - protein, 103 aa, Unknown
  Obtained from environmental sample
  misc_feature (1)..(103): Xaa is any amino acid
FAEGIRAQYGFNLVYFDESPVMYEEVKSGNSAACFEDYPVMGYGISQGNGLKMVTAMERGSSYGFAVLKGKNQDLLTMFDQGLVNLKADGTYKAILDKYIKTE

SEQ ID NO: 102657 - protein, 161 aa, Unknown
  Obtained from environmental sample
  misc_feature (1)..(161): Xaa is any amino acid
MIYEHILNANKRFGTNSIDIVHSVFCCEPETIQGNVIIAPLWRPELFSGYFDSITQNLDGIFKIWTLSTENLKITYIITGIGSPNVSDIVLALGCTPCQKIIFIGSTGALDKNIEIGDIIVPEYSISGDGSCRYLTNKKLAENDSFGEKNYPNKELLTELF

SEQ ID NO: 102658 - protein, 278 aa, Unknown
  Obtained from environmental sample
  DOMAIN (188)...(278): Fibronectin type III domain
  misc_feature (1)..(278): Xaa is any amino acid
MIEYLVDGNSESIVYATSTGRESSEVFTPVTGKGGVFVIGGSFKGMMDEFKIHGVCAGRSSVQKYATAGGRAETTYIDLGGVNSAVVRVDVSGGRTGIKGTRISNEFRENGRFRFSDDSEMSFFIRAGENPWLLNDIKWTSFTPGSNITETIKGRYAQIAVDFYPSSDGETTPYLDEVRIVYQPNEPPLPPTNFTATAVDGGVMLRWKQSPDTSTTAGYLVYYSSVRGELFGSDAFLGPSPIDAGKVTSIMIDGLKNGTLYYFRVASYDLSYDSGSYN

SEQ ID NO: 102659 - protein, 84 aa, Unknown
  Obtained from environmental sample
  DOMAIN (7)...(80): HEPN domain
  misc_feature (1)..(84): Xaa is any amino acid
MTTLDLAKEWLRYAKSDLNTAKHMFKDVNPKENEISCYHTQQCAEKSLKACLIAREIDPPFIHDLVELIRLCTAQETSFFTIQP

SEQ ID NO: 102660 - protein, 248 aa, Unknown
  Obtained from environmental sample
  DOMAIN (30)...(215): ATPase family associated with various cellular activities (AAA)
  misc_feature (1)..(248): Xaa is any amino acid
DTKTHFPAKEENYSKVQERLSGNGMRKGFACLFSGAPGTGKTETAYQIARETGRNIMMVDIANTKSCWFGESEKKIKEIFTTYRYAVDNSEIAPILLLNEADAVIGKRKEFDSSSKAVDQTENAIQNIILQEMENLSGILIATTNLTQNMDSAFERRFLYKIEFTRPCLAARQSIWQSMMSSLTETDAGALASRFDLSGGQIENIARKAEVDTIINGSRPTIDILAQYCRDENLNNLNNEKKIGFGNS

SEQ ID NO: 102661 - protein, 291 aa, Unknown
  Obtained from environmental sample
  misc_feature (1)..(291): Xaa is any amino acid
EPIDEKQIKLPFSTDAHKKYLNDPLDFKKLPDGGIPNGKTAVVGSEACLFYPVASISSMSDLEKLPKGESIPLATIIPLGDKFICKNSEYNELFKFQDNYNFFYKTTWQGKQGIVFGADLYGNKHGIDSDNETNRMTALLYKDNGYFNNFYPYIGYNAINADTQKELKTNGLAIEEVRKSEYTLSAYSPDDMISLYMGRSKVTPVFVTTDLAAHANHLVFDKLLQYCEEEYFFPQLVTVIDKYIELIEQKKGEIPDAVYNSSKLYFQTAQALVALAPKKVVSEEYHTPYVY

SEQ ID NO: 102662 - protein, 217 aa, Unknown
  Obtained from environmental sample
  misc_feature (1)..(217): Xaa is any amino acid
MKPRLPALFIFLCFLFVCAGLYAQEGEKEEEHEKNKEKTVREYRPREQKLYIDIPLTIAENLFMNVVGNVNWRFWGADPKAAYVDFESMRRNIDPKGWSSWNFEDGRGHDTFLVNQFFHPYAGGVYFAAARSNNLNFYWSILSSIFGSFTWEALCEIEAPSANDFITTVAGGPAVGEMLHRLYIELDKKGGSAGKVGAFFVSPIDRINRRHQALWAG

SEQ ID NO: 102663 - protein, 93 aa, Unknown
  Obtained from environmental sample
  misc_feature (1)..(93): Xaa is any amino acid
VGEIWAEELQKIHRSCALVLTRGAEPLWYAENGELAEYAFDSVEPLNTTGSGDAFTAGLAAALEGGASLADAVAEGARCGALNAVLLKPGVIR

SEQ ID NO: 102664 - protein, 245 aa, Unknown
  Obtained from environmental sample
  DOMAIN (23)...(245): Lyase
  misc_feature (1)..(245): Xaa is any amino acid
METRDIFLNISPIDHRYSLSEKAVFDALVPWLSEEASVAACVKAEIALVKAHLTMRGKSPEELREALKKAGESVAPAEVYAEEEKTRHNIRALVNVIKQKVPLEVAPLVHLGATSVDILDTSLAYRMKGSCRGVVLPALRKLETALCDFTEREAETAQVGRTHGQHAVPITVGFAMAEYVSRLGKAILEIERLSAQLKGKLAGAVGAYNAASMLVQDPEELERLYLAEMGLEPSEHSTQLTEPEY

SEQ ID NO: 102665 - protein, 201 aa, Unknown
  Obtained from environmental sample
  DOMAIN (15)...(200): Phosphoenolpyruvate carboxykinase
  misc_feature (1)..(201): Xaa is any amino acid
MSCCESPSNHEKLNAWVKEIASLTEPDSIYWCDGTKAEYDEMVQSLIDAGLATPLKKRPNSYLFRSDPSDVARVESRTYIASKSQDDAGPTNNWIDPKELKKEMTALYKGCMHGRTMFVIPFSMGPIGSPIAKIGVELTDSPYVVINMHIMARVGVKVLDVLGTKGEFIPCLHSIGKPLLSCSDDNGKWPCAPLKKNTLLI

SEQ ID NO: 102666 - protein, 65 aa, Unknown
  Obtained from environmental sample
  misc_feature (1)..(65): Xaa is any amino acid
MRTNIVLDDKLVDEAFKYSQTLSTKRELIEVALKEYVDTRKRKNIKDLRGKIAFRKDYDYKAMRK

SEQ ID NO: 102667 - protein, 127 aa, Unknown
  Obtained from environmental sample
  DOMAIN (2)...(122): PIN domain
  misc_feature (1)..(127): Xaa is any amino acid
MILVDTSVLIGYFKGLNNAPNEKMNYIIDHEIPYGICHYVYQELLQGAANKQEYELLKDYLNTLPFYSLLYEKESFENAALMYIDCRKKGITVRSTIDLLIAEIAIENDLYLFHNDNDYTNISKICK

SEQ ID NO: 102668 - protein, 279 aa, Unknown
  Obtained from environmental sample
  DOMAIN (48)...(275): Domain of unknown function (DUF323)
  misc_feature (1)..(279): Xaa is any amino acid
VIVFSACGDGSSTGGGDPGNTDNPGSTTNPGNTTDPGNTTNPDTVPVSLIEMVSIPAGTFMMGQADIPAATPVHSVTLSGFYMGKYQVTQEQYQAVMNQNPSYFKAGMGGFAEGEIQDKRPVENLEFLDAVNFCNLLSLTEGLTAAYSTELVPGNDVQISIIAGSNGYRLPTEAEWEYACRAGTTTPYNTGDTITDAQGWFSTNSDGKTHQVGLKPANAWGLYDMHGNVREWCWPVWPVVYTEEAQTNPMYTEQPLRALTSHMCRGGSFSPLYGIERSR

SEQ ID NO: 102669 - protein, 273 aa, Unknown
  Obtained from environmental sample
  DOMAIN (58)...(166): Miro-like protein
  misc_feature (1)..(273): Xaa is any amino acid
MEIDKKLMPTINKRLDFETVEIIADEFGFKAQLMEEYQEETLGIQNDDVGNLKSRHPVVTVMGHVDHGKTSLLDYIRKTNVVRGESGGITQHIGAYEVATPSGKITFLDTPGHESFNAMRARGSQVTDVIVLVVAADSMVMPQTVESIELAKTAKVPIVVAITKIDLPTANTDKIMSQLSERGVQVDEWGGNVSCVKISVKTGEGIEKLLETLALESEVLELKANPDASARGAVIESRLDAGKGTIATILVPNGTLRIRDFFVCGNYSGRVRA

SEQ ID NO: 102670 - protein, 295 aa, Unknown
  Obtained from environmental sample
  misc_feature (1)..(295): Xaa is any amino acid
VEIGSEVFDCGEIPGTVTATLKNGTLTIRGNGAMKDHISWIIYDNQGDYRYLYGRDDFRDVIAELVIEDGVTSIGNAAFDGCINLTSISIPNSVTSIRRDAFRGCTGLTSISIPNSVDSIGLHAFFGCTGLTNIEVAEDNANYASEGGALLNKDKTYLMLYPASKQDTSYTIPDSVTIIESYAFSGCTALTSVTYLNATPPAIVENTFHSLSRTAHLYVPDGSVEAYDTAVGWRYFAYINDEYVGVSVASHDRVIPTANTGEKVTVIAPTAKLSAAFTAGPNPANKSSTSVNIFR

SEQ ID NO: 102671 - protein, 216 aa, Unknown
  Obtained from environmental sample
  DOMAIN (2)...(215): Nucleotidyl transferase
  misc_feature (1)..(216): Xaa is any amino acid
MKVVLLAGGLGTRLSEETELRPKPMVEIGGHPILWHIMKIYSYWGYNEFVILTGYKSHIIKDYFINYYTRYSDMTIDMASNSVQLHNIRSEPWKVTMLYTGPDTQTGGRLLRAKNFLGNERFMLTYGDGVSDVNIPELVRNHTQSGKTVTLTTVQPTGRFGSIEINEEGTIESFKEKPAGDGAWINGGFFVMEPGVFDYLTDGDATILERTPLERM

SEQ ID NO: 102672 - protein, 68 aa, Unknown
  Obtained from environmental sample
  misc_feature (1)..(68): Xaa is any amino acid
LKDSRVIIIGGGPAGMAAALAASKGGARVLLMDRNHYLGGILNQCIHDGFGLIRFEKSLTGPEYAGIL

SEQ ID NO: 102673 - protein, 215 aa, Unknown
  Obtained from environmental sample
  DOMAIN (135)...(192): BFD-like [2Fe-2S] binding domain
  misc_feature (1)..(215): Xaa is any amino acid
EYIDNREDYSTTSLMLDNLFQEAQILLPSLQKDMIIGAYTGIRPKLVARGQSNFGDFVIEESPKVKNLINLIGIESPGLTASMPIAERVSEIIAAKTKSGQNRQFKAEYKKPPYLYSLDRKEQDDLIAENQDYGEIVCRCKTITKAEVLQALHNPLKAHTITSIKNRVQTTMGRCQGGYCLTRLADIIMNEFDLPPEDVVFRHEGDVPFPGRVKV

SEQ ID NO: 102674 - protein, 248 aa, Unknown
  Obtained from environmental sample
  misc_feature (1)..(248): Xaa is any amino acid
MRRDILHPGAGKLKYEIREIVGFAKSLAKWNIPIHWENIGDPVQKGEPVSDWIKNIVRDKAGENLSYAYSETEGVRSTREFLAELANKRPVIELPGSNVQTPPQVKTDDILFFNGLGDAVAKVFGFLRREARVLGPSPAYSTLSSAEAAHSGYEHLTYRLDPQRDWMPDMNDVELKVKYNDSIAGILLINPDNPTGAVYPVEVLLEFIRIARNYGLFIVCDETYANIIYGGAKTAALSQSSATCRVWL

SEQ ID NO: 102675 - protein, 273 aa, Unknown
  Obtained from environmental sample
  DOMAIN (46)...(272): Glycosyl Hydrolase Family 88
  misc_feature (1)..(273): Xaa is any amino acid
LTENVTEQHEVNDWARGVWRKIETKMSAQRERLGACAPYAAINGRYADKMTDNVCWWTNGFWAGMLWIMYHASGEERYLQTARAIEEKLDVALASFEGLHHDVGFMWTLASVLDFRLTGNKDARRRAMHAAAILAGRYNPRGRFIRAWNRDCTGWIIIDCMMNLSLLYWAAQESADPRFKFIAGDHADTALKYLVRKDGSCNHIAVLDPQTGDLLETQGGQGYAVDSSWTRGQAWALYGLIISYIHTGKMHYLEVTKRIADYFCGESARNGYV

SEQ ID NO: 102676 - protein, 251 aa, Unknown
  Obtained from environmental sample
  misc_feature (1)..(251): Xaa is any amino acid
MTAESTRRLVKNPDAFAGSCRKYFDVLRRDWRLYCLLAPMLLWYLLFVYKPMGGLLVAFKDYKPDRGILGSDFAGFYNFAKLMFDATFRREFWGAFRNTFMISLYGLIFAFPIPIILAILFSEIIHNPYRKLVQTLTYLPYFLSEVTITGLALMLLKESSLSTGILARAMLDLGFTPDGKILETARYFRPLFCITGIWKEAGYSSIVFFAAIMGVSPSLYEALRVDGGNKIQELRYVTLPGISITLTIMII

SEQ ID NO: 102677 - protein, 288 aa, Unknown
  Obtained from environmental sample
  DOMAIN (164)...(286): GTPase of unknown function
  misc_feature (1)..(288): Xaa is any amino acid
VSYDENQKTVKRSPRADELEKQEVLDRIARLLSERRSLQFSAGTNAAATSGASHLQPSGADLQIPSARSGVTEEIAELKEMLSPLLRGAGLPKGRHGHFEQVRAFLESNDFTDEYIERALDHLGAKLTCKQSKEEGLVRKELETWLLGSVKTGKPDFDDETGPRMITLVGPTGVGKTTTLAKIGAELALTRGKRVAFITMDNYRIGAEEQIAKYADIIGSSVRMVHQRDELQWIIDEGNYDYYLMDTAGRNQKKEMQIGEIRRFLNAVPIPHDVHLVVSATTKYRDLV

SEQ ID NO: 102678 - protein, 254 aa, Unknown
  Obtained from environmental sample
  DOMAIN (71)...(147): Helicase conserved C-terminal domain
  misc_feature (1)..(254): Xaa is any amino acid
MTIYGDMDVSIINEKPSGRLPIITTKLPTDRMNALIERIKMQMPTKAFWVCPLVAESETSDMMNVEERAKQLAKYFKTGLLHGQMDKASRDAVMKDFAAGTMQVLVATSVIEVGIDVPDATIMVVENAERFGLSALHQIRGRVGRGERQSYCILLHGHGLSENGQKRLQVLCDTNDGFEIAEQDLIMRGTGEILGTAQSGWLSYHFVDVREHRTLFKLAVEKAKEMASRDALPEEARDLMWIFGQSDRMEFIKG

SEQ ID NO: 102679 - protein, 290 aa, Unknown
  Obtained from environmental sample
  misc_feature (1)..(290): Xaa is any amino acid
VKTSTALTLNEISLEDAGVGVRKGGINIFLNTGIDANLRAQHIGIQNLAVGMQTVNIKLSGTVDRFMENIKVVDLKVETNQINLAELINEIPAGINPELSKVKASGTMSLNVAVKGTVVPDKIPPVNGNVVFSNISVSHRDLPAGISSLIGNITFTENSVSIKPLTFSLAGQPTSILLEASNLLAPQPMLNNLSANVKLDLGALFALANKIISIPTLNSLAGVIDANLTAKGILDPARPENLSVNGGVNMRNILARTPLIPDAVSVNGAIAFSNTEISADPAVRIGPSDV

SEQ ID NO: 102680 - protein, 223 aa, Unknown
  Obtained from environmental sample
  misc_feature (1)..(223): Xaa is any amino acid
MERRMLEKIIRYFAQRHMLANFITIAVFLGAVVAWQQTAKEEMPNYELNYISVRTSYPGASPEDVEQLVTKRLERELKGIDGVYSIRSTSTSGSSQITIEFAPGYNNMNGALNDIRNQITDVKLPSEVRNQPSVRQYKTTRRAVMDVAVYLTNTILLTREDRAVLQQYAYNLSDQIGNLPQVSEVSASGYYKNELQVVLDPDKLHKYNVSTSEVIAALRRNNL

SEQ ID NO: 102681 - protein, 256 aa, Unknown
  Obtained from environmental sample
  DOMAIN (11)...(256): Phosphofructokinase
  misc_feature (1)..(256): Xaa is any amino acid
MPGNMLIAHGGGPTPVINSSLQGAIEEAKKHAAVKKIYGAHFGAEGILTDDLIDLGTLPDGAIKKLSSTPASALGSCRRKLSGKDYPTVLQCFKKHDIRYFFYNGGNDSMDTCHQISALAVESNYEINIIGIPKTIDNDLAETDHSPGFGSAARYAALSTLELAMDAASLPIHVVVMEIMGRNAGWITAASSLFRGSMPCEHLLFLPEHPVDRKLLLEQIESAWKKKKGLLVTVSEGIKDENGAAYGDTGIKDGFG

SEQ ID NO: 102682 - protein, 129 aa, Unknown
  Obtained from environmental sample
  misc_feature (1)..(129): Xaa is any amino acid
GRDYSNILPDIDRYGEYFASNDEYVRMYRYANAFHPFHGFSMMACGHLAEANTSAIYIVGAQQPGIARAMGLKTRASFDEAMDDAKKKYLPSNPAILALPKTFTTSAVHLCLKNEAYGGTKSGAFHVHA

SEQ ID NO: 102683 - protein, 148 aa, Unknown
  Obtained from environmental sample
  DOMAIN (2)...(148): Fructose-bisphosphate aldolase class-II
  misc_feature (1)..(148): Xaa is any amino acid
MPIMPMRPILDAAARKGYAQGAFNVNTVAQAQAIIEVHKMFRSAAIIQGADLANAFMGGRGDFMNGTVEDKRRGAKRIAEAVYRYAKDAEIPVALHLDHGKDLESVKAAIDGGYTSVMIDGSSLPFKDNVELTREVVKYAHPLGVTVE

SEQ ID NO: 102684 - protein, 280 aa, Unknown
  Obtained from environmental sample
  DOMAIN (185)...(274): Domain of unknown function (DUF814)
  misc_feature (1)..(280): Xaa is any amino acid
GSFNKKIDELYAEHGGSLSLEALKEQARRNFEGSIARINAALEKLREKETSFADAERLKVYGDLILSNIGVIKPADKWLETEEDNAVIYNAVIYNDVIRIELDPRLKPQENAAKYYEQYRKAKNGIADVRREIAEGEKELKEVTERLNRLLAETNPLVLAKLVKTGGVARTFAPVSKKEKARPGLTFRRGEWLIIVGRDAAENDILLRRYVKGNDLWLHARDYHGSYVFIKQRAGKTVPLEILLDAGNLAIFYSKGRNNGAGDLFYTQVKYLRRAKDGPK

SEQ ID NO: 102685 - protein, 93 aa, Unknown
  Obtained from environmental sample
  DOMAIN (7)...(91): Plasmid encoded toxin Txe
  misc_feature (1)..(93): Xaa is any amino acid
MKVVFRTNSVFDDFTAWALEDKHTYKKIVSLIKDINRDPYKGIGKPEQLKHELSSYWSRRITEEHRLVYQVIEGKDGEEDMLVIISCKKHYEI

SEQ ID NO: 102686 - protein, 276 aa, Unknown
  Obtained from environmental sample
  misc_feature (1)..(276): Xaa is any amino acid
IILITGEKYGRQYDWVTAMQLEDQYKTGKYGGNTKNHRGVCPADWHLPDTAEWRNLVTFAGAPTNDVNGRPAGRKLKTTTGWSPPNSTYNYNGTDDFWFSAMPGGYNNFSGTSARWWLAEDQTTANANYMSVGDSDSAFSKAQIAKTNNFFSVRCVGDKLVAVKPTVRNKTLIYKGIEQFAGIASAPKGEYQVTGDRGIDAGEYTAVVVLKDPIEWEWDDGTTDDLKLEWSIAPAAGEFLPLTLNEPYSDNLKLSDLDLPDGYAWATSVNAETLLK

SEQ ID NO: 102687 - protein, 269 aa, Unknown
  Obtained from environmental sample
  misc_feature (1)..(269): Xaa is any amino acid
MFVYPMNFFEFLNACNHQLLLQAIQKADCKNPLSDAVHKKAVELLRIFLIIGGMPEVVSAYVNNNDLLSCQRILDDLIISLRSDFTKYKKRVSTSQLSAVFDSITAQMGRKFVYTNMSNDYNSRQIKEGMELLIMSGLVIPVVHSASNGIPLGAEIDGKKKKLLLLDTGVFQRLLGLPLSDLLISNDFSLINKGNIAELFAGLEILKSTSCYEKKNLYYWHRENKSSNAEVDFVIQQGMNIVPIEVKSSSKGAMHSMRLFMEEKQSSFG

SEQ ID NO: 102688 - protein, 288 aa, Unknown
  Obtained from environmental sample
  misc_feature (1)..(288): Xaa is any amino acid
AFGIILAAAAIAFAMTACMEPPIPNQTPVEGDYTIGNLTQYMGSITAVSITPKSGKSGGARTIYYVGAGSTTYGRSTTLPSAVGTYTVTFDVAATSGWYAASDLNAGTLTINTGTPVVGDYDIGGLAQTTNSVKAVTVTPKTGKSSGTVKVYYTGTGTTDYAKSATVPTAAASGSTYAVTFDVAAATGWNEATGLSAGTLEVNDNKTPVKDDYTISGNDTFTYNGSTRTVTVTPKANASPGTVTVKYNGSATAPSAAATYNVTFDVAAATGWNAATGLSAGTLVIDGG

SEQ ID NO: 102689 - protein, 62 aa, Unknown
  Obtained from environmental sample
  misc_feature (1)..(62): Xaa is any amino acid
MNVSFSLPLQRIITLDRDRQVIELCAELYGTTDFIDDFIIQNNFNGNEIVLLPMGKKVSCYV

SEQ ID NO: 102690 - protein, 143 aa, Unknown
  Obtained from environmental sample
  misc_feature (1)..(143): Xaa is any amino acid
AQDFYSHITGFGKTDSEYDSASWTFENKYLIKKNIIRHLSLTIDDAETISDIENATKAHAGRMFADCVSFELLCEGHVNENSEVFTKGMTVCAYAPSAMIFKETNFTARNIKLIKTKEGKTSELELVLPGSYTGDIPEELPWE

SEQ ID NO: 102691 - protein, 220 aa, Unknown
  Obtained from environmental sample
  DOMAIN (3)...(159): YicC-like family, N-terminal region
  misc_feature (1)..(220): Xaa is any amino acid
MPIRSMTGFGLAETATPSGTYRVEIRAVNNRYQELQIRQPKFMLNLEPKIKKEITGAAVRGSISVYIGCDKGDTGPVSLSWDKAGVDAYMRIFNEIKKEYKLSGDIAISDLLRFGDFIKSESEVHDDEALWKHLRPTLAAAIKSFQESRETEGAQLVKELKKTLKDISKTLNLIEKRAPLRVKEYGAALSERIEKMLSGNLPDPQRIAAEVAMMAERLDI

SEQ ID NO: 102692 - protein, 289 aa, Unknown
  Obtained from environmental sample
  misc_feature (1)..(289): Xaa is any amino acid
VKRIAGNSLGYADNYSYLTMGTTYYYKLTAVNSGGESAASAVTAPHNYFTNYQLLEGVWRNDSITASYTDEVIYTFYAYTGNTYYLWWNEAGNSNHGDGKKTADITVSVCYQDGDEVISSADYAWEEEASVGFYASSSGNIQVKVSSSNTGTYGIVYNTSGFRPAYNTITFNGNTGTGTAPAPQMVTEGNCTWLPSGIGLTKNGYIVTGWNTQADGTGDSYEVMGYIEPAADVTLYAVWERPSTPLIYETWVTGYVSTEVYYSFDVYSGSTYYVWWSDSYRGPIGTLDV

SEQ ID NO: 102693 - protein, 284 aa, Unknown
  Obtained from environmental sample
  misc_feature (1)..(284): Xaa is any amino acid
PFALDDVGEDTFTEETVSPDTASEITTDLNFDDASFDLHVDDFPAENLSPPAEETVEQQTDADSSDFSAEIPISFEDEISLEEDEETPVPLEDEITIEETAETPVPLEDEITIEETAETPVPLEDEITIEETVETPVPLEDEITIEEPVETPASLEDEITIEETVETPVPLEDEITIEETVETPASLEEITIEETVETPASLEEITIEEPVETPASLEDEITIEEAVETPASLEDEITIEETVETPIPLEDEITIEEPVETPASLEDEITIEETVETPASLEDE

SEQ ID NO: 102694 - protein, 269 aa, Unknown
  Obtained from environmental sample
  misc_feature (1)..(269): Xaa is any amino acid
EVKNTSNNKEVIVTVTNRIGVSSSRIIDLSPAAYKALELKKGDIVSLSVNQPPETAPAPKVAEAKEPSSPPPAETAAPAPAPVQQAAPVQTAAAPSTAAPPAGAVVTSGQLPGINVVVTNSTPIYSGSGKESSENDKIIIINPNSQYPPPAPPAVPTPPVMIYTSPSQSNAAYLAWMMAMTMEARETRAAREEREIREAREAREVREARASRLAREEREEREYREAREAREMREAKEIREAREMREVRETREAQEAREAQEAKEAWKRE

SEQ ID NO: 102695 - protein, 216 aa, Unknown
  Obtained from environmental sample
  misc_feature (1)..(216): Xaa is any amino acid
LFSCTGKPKVKTTENNEQVKENVVEKLDKQAEKIDELAVEEKTPVDLAAASPEKPADTPADMTAEKPAEEPLNEETAQADSDKELIADVSPVKTEPAAQEPAANTPSVSTATSSQTQPPQTQTQPPQTQPSQTQPQTQPPRTQPPQAQTPQQAQTPQSNPPAQRQQTVTPPAQTPPEEKTDSSDTASSGDDSQEQKEPSFFIAGGNSAPAARIESL

SEQ ID NO: 102696 - protein, 271 aa, Unknown
  Obtained from environmental sample
  misc_feature (1)..(271): Xaa is any amino acid
VLSGRYAEIHLLPLSFKEFIDFGKFSQDTPKTDIFNRYLNFGGFPDIHALPKDTETAYNFLNGIYNTVIVKDILSRHSVKEVKLFEQLIKFLAQNTGNLVSPSNIANYINSSQRGQAVKSTTVSSYLDFLEKAYIVYPSYRYDVKGKELLKTLCKYYIVDTGLRNVVFEASGDIGSTIETVVYFELLRRGYKVFTGKQYDKEIDFLAVKNDERRYVQVALSILDETVRKRELAPLASVKDSYEKTILSMDTLKFPDVDGIKHRNVVEWLLE

SEQ ID NO: 102697 - protein, 217 aa, Unknown
  Obtained from environmental sample
  misc_feature (1)..(217): Xaa is any amino acid
MAAQWFDLVFDIPANQAFSYRVDEKGEAAVGKRAMVPFGNRGRDSLGYIIAERGAPPEGLSESVIKPIRRVVDAEPIFDERDIDLARWLAAYYLCGIGQAVAAMIPSGRRMVSFGSFFGEEDIAAATLELSVEQQAALDVIVEDSPSMLYLYGITGSGKTEVFLRAAESMLKDGKSVIYLVPEIALTHQMAELIGKRFGQAAAMLHSRMSPGARLTE

SEQ ID NO: 102698 - protein, 283 aa, Unknown
  Obtained from environmental sample
  misc_feature (1)..(283): Xaa is any amino acid
FLLLGINYGKPWGEYEEDNYASRLCLGIDRERGGIVMFESDMVEGTEFQIMFRSFDLEYMKPKFELLFDKLNGRKPVFAMYIDCAGRCAGYGGNDLEDALVMQQVVGNRVPVLGIYTGVEIASLAGRPRGLDWTGVFCLFSQDGDETPQDAVMPDDGANGPATRREARGSTPRESTLLDVAHRLCVQNAAKILSLDAHAISLRYELELKRRGFRLISELAVSFRRTDDYEGMFAYVARNINSALNMQKTVVLISDGTGMFVPSVLQGFTMEEKERLTGMPFAL

SEQ ID NO: 102699 - protein, 276 aa, Unknown
  Obtained from environmental sample
  misc_feature (1)..(276): Xaa is any amino acid
MRKKGILNDDDIYKLAFSKELGGYLGLDAASVYRNYDEMWQIFSEDMENRYAIPKSRYTAIKDSIQIAKNMNPMGLMGVELQNLHSRIKFSVGKEKQDLQKRADELWVEINALKSANDELGKRMPKGALNAIITGTIQSAPLTGKSIIGGVAGGLVSGGIGAIGGAAAGGVGAGPGFAAGWSMGYNLGSFLASSAEMTGLLYVDLLAAGVEQENASRLALVGGSINGFIESGLGIVFGWGKSAGKAIGGAVLSKEAQKKIAEAASKSFIKEFHKIA

SEQ ID NO: 102700 - protein, 75 aa, Unknown
  Obtained from environmental sample
  misc_feature (1)..(75): Xaa is any amino acid
LLKFFCPATVTDNNIYQALDLEWDDFEDSVQYIVGDGLSVDYIVTRNTKDFALSSIPAVTPEKFIETITYKTEHS

SEQ ID NO: 102701 - protein, 65 aa, Unknown
  Obtained from environmental sample
  misc_feature (1)..(65): Xaa is any amino acid
MKVLIDTNVVLDVLINNTVFFANSKKIFDFAEQKRITGFITASAVTDIFYIAQRKLGKKAIKEAI

SEQ ID NO: 102702 - protein, 285 aa, Unknown
  Obtained from environmental sample
  DOMAIN (190)...(259): RNA polymerase Rpb2, domain 3
  misc_feature (1)..(285): Xaa is any amino acid
MVIKENVEENNLIHNTLANDTSKDGEGARERIYQTTRSQPDRVDAMVAENHFNSLFFDNRRYEIGELGRYRLNSKVYGNGEQQFQVPAADTMTLTKEDFIRVIRYMIGLYNGEEGYSLDDIDHLGNRRIRSVGELVANQISIGITRILRSVRENFSSREREGVLTPTELINSRTVNSMVAAFFGSSQLSQFMDQINPLSELTNKRRISALGPGGLSRDRAGLEVRDVHHSHYGRLCPIETPEGANIGLINSLATFSIVNHFGFIETPYRIVGLLPFQDGSGKDYE

SEQ ID NO: 102703 - protein, 70 aa, Unknown
  Obtained from environmental sample
  misc_feature (1)..(70): Xaa is any amino acid
MAKEKSKGQELADKLFFNLKNCWEDIDEQTEKETEEFAQSYKKFLDRGKTERECVETAVELLEDNGFYKY

SEQ ID NO: 102704 - protein, 76 aa, Unknown
  Obtained from environmental sample
  misc_feature (1)..(76): Xaa is any amino acid
MISGEILSGSVVIEQVFGIPGIGKLLLTSITARDYLMIETIVIYIAFVVILANTLSDIILQIIDPRIRIGVCNANS

SEQ ID NO: 102705 - protein, 253 aa, Unknown
  Obtained from environmental sample
  misc_feature (1)..(253): Xaa is any amino acid
MAENANLEILSTRAGFNSAVRHIKKTMDIASKTNANLGDIIFELDDEELTSGKTGLLLRMLLVDKLGYKSASTNLSSTVNDLSVLAKEFGKWNGVDLVAAYFHPEMGLLIANPKVAEELAGFGQLNKRELLVVYAGLQGKETDENCQKAADLALRLFEGSRITAPSSLTRGKFTVKKVSKPKKISETQIEKKVKAKTASKGKTPAKRAAAAPAPTVKKAATIVQKSSGGPAKMTPRYAAIVQNELFHNGNVEA

SEQ ID NO: 102706 - protein, 264 aa, Unknown
  Obtained from environmental sample
  DOMAIN (168)...(253): Hpt domain
  misc_feature (1)..(264): Xaa is any amino acid
MIQMDKKTQIVCEYMPYGKVLIVDDVDTNLYVARGLMSPYGLTIETAKSGFELVEKIKNGAVYDIIFLDHFMPKMDGIEAAKIIREMGYTNPIIALTANAIVGQAEIFTKNGFDGFISKPVDIRELNATLNKLVRDKYPVEAVEAARLKASSNTQRTVKQADPASDPGLRAIFARDAENVIARLKSILANSFRRTDDITQYVIDVHSMKSACANMGEEEVSAFARRLEIAGQAKDIQLITSETPAFMEALSKAIEKLKPKEEAS

SEQ ID NO: 102707 - protein, 278 aa, Unknown
  Obtained from environmental sample
  DOMAIN (138)...(266): ATPase family associated with various cellular activities (AAA)
  misc_feature (1)..(278): Xaa is any amino acid
TLEELNGIAQEFIDKKRETEEKFAKEHRDSPRRNQFSNIDPKLAHELSSMCVGMSKDNFKQILEKAALEGEKNFGETVKPRAQKTKEQFIDKSGLLKYVKVEVDINNDVGGLDQLKFWLGRNKKAFEDPEGAKKMGISPAKGILLVGMPGCGKSLTSKAVAAFFGYPLLALDLGTLMGKYLGESEGNLRRAISLAENSSPCVLWVDEIEKAFAGVGGDESGVSQRLLGYLLTWLNDKKSQVFVMATANDVAVLPPEFLRRGRFDEIFYVDFPNERERK

SEQ ID NO: 102708 - protein, 130 aa, Unknown
  Obtained from environmental sample
  misc_feature (1)..(130): Xaa is any amino acid
LEGGKELVIFDRGYPSRELIQGLTGKKIDYVMRVRTKFSKAIDARGLGDHMIELEHGKKRLPVRVIKLELDSKELETLITSLTDTKYSVEDFKWLYFKRWPVETSNSEFGFANSLCYKELAKNGQKKAFS

SEQ ID NO: 102709 - protein, 156 aa, Unknown
  Obtained from environmental sample
  misc_feature (1)..(156): Xaa is any amino acid
MSVEAAEMETGVDSEQLNAFDQVDAGMGTGDAGGGEESALSAAAKEFDLPEDFMKNAIESDPEMKALIEGKKPVADKGGEDHATDDSSGKDSAADGQKQEPEADEKDSGKDEAPAAFADDVIPGLKGEEFGKLPEEIQGAIAEFYKEAQEKTQKAE

SEQ ID NO: 102710 - protein, 232 aa, Unknown
  Obtained from environmental sample
  DOMAIN (26)...(232): Respiratory-chain NADH dehydrogenase 51 Kd subunit
  misc_feature (1)..(232): Xaa is any amino acid
MSKLNKLLSKNAHFNPLSVDDYVKAGGFEALKQAATMKSEDIIAEVKNAKLLGRGGAAYPAGSKWEHLLHIHGTPKYIVCNADEGEPGTFKDKYILERFPLKLLEGIIIAGFTFKAKAGYIYVRGEYRKIQKQLIQAIKNTKDAGLLGNNILGTGLDFDIHVISGAGAYVCGENSALLNSTEGKVGRPRIKPPHLAEVGLFLKPTLVNNVESFAHIPAIIEMSGDEHLKIGH

SEQ ID NO: 102711 - protein, 64 aa, Unknown
  Obtained from environmental sample
  misc_feature (1)..(64): Xaa is any amino acid
TPVAKREEVIAFGDEENDIPMFESAGFSVAPSNAKDAVKAKAGIVVGSNADDGVAIFLEEFFKL

SEQ ID NO: 102712 - protein, 296 aa, Unknown
  Obtained from environmental sample
  misc_feature (1)..(296): Xaa is any amino acid
VASPRITAVNFTPSSVSRSEKARVTWDIPQDTSGILGFSWSWSQNPNDIPLEQVMIYNTGNASILNMENNAVNDGEWYFSVRSHDYAGNWSEAVKITYNRKSTPPPGVKIIDPQVDDDNYLLSNNFNLSWEPSSDPYIAGYTWNLQFLGINAEAVINSPSSGIMGTNTSVNYSNQDNGIWAFSVSAIDKAGNIGLPSSIIFKTNKFIPYTSVSFIDAQQNEQGILSIKIIGRGFSSDGRITSVVLQREGSPDLSADSFNILSDREITGLTFENMDEGRYRLRLYHSTRGWYTADSF

SEQ ID NO: 102713 - protein, 138 aa, Unknown
  Obtained from environmental sample
  misc_feature (1)..(138): Xaa is any amino acid
MRDRLITEIQTGMAPLLTVAQLEELRRVLTHSLHNVDVVERSVQGSRDGIENARLLGVFIAAKRVEGCSEKSLKYYHATIRHMINALGRPMREVSTDDLRGYLADYQKEKGSSRVTIDNIRRIFSSFFGWLEDEDYIL

SEQ ID NO: 102714 - protein, 85 aa, Unknown
  Obtained from environmental sample
  misc_feature (1)..(85): Xaa is any amino acid
RAPDVHEGNVDGAKKVFLTTKYSDGLSRVGDYFKSQSRPLEALQMYWLAPDRTKSEPIIEQVAALLQGLIKEDEGKDLIQEGQHD

SEQ ID NO: 102715 - protein, 158 aa, Unknown
  Obtained from environmental sample
  DOMAIN (1)...(158): Domain of unknown function DUF140
  misc_feature (1)..(158): Xaa is any amino acid
VLLMLRVFSKPQRWRIFYGQIVSEMMSLGMNSLPIVSIVSIFVGAVIAIQTAYNLQTAPTYMIGLATRDTLIVEFCSTMIALILSGKVGSNIASQLGSMRITEQIDALELMGVNSASYLICPKVIALVMLAPFITIFSIAIGIMGGLVGMALTDYITV

SEQ ID NO: 102716 - protein, 89 aa, Unknown
  Obtained from environmental sample
  DOMAIN (69)...(85): KWG Leptospira
  misc_feature (1)..(89): Xaa is any amino acid
MKKVTVLAALLSILAASICTYGQELEPVKCAKRKYGFKNKKTEEIVISCKYDDVWYFSEGLAEVKLNGKWGYIDETGKEVIPCKYDGAW

SEQ ID NO: 102717 - protein, 277 aa, Unknown
  Obtained from environmental sample
  DOMAIN (166)...(270): FabA-like domain
  misc_feature (1)..(277): Xaa is any amino acid
SPYIKDPAGFETADMVEILEDGRFLLKGRIDSVVKIEEKRISFPEIENRILQSDLVSDVCVIYLEDKRQYLAAAMVFNNKGKERFDGLEKIEINNFWREYLLQYFENIVIPKKWRYLELLPMDAQGKKKKEDILLLFSGEETTAESDGIKSAVCKNASSTSEGFKIDNEKIIEKTENSVVLEFSIPVTSPYFDGHFTGFPILPAVAQTELTLRFAMRHLGTSVTPSEIKRVKFTNFIRPEVPLLLKLSKKEKTLSFNLNSPEGETVYSSGTIIMGEK

SEQ ID NO: 102718 - protein, 91 aa, Unknown
  Obtained from environmental sample
  misc_feature (1)..(91): Xaa is any amino acid
IILRANMRLVIIPQSIRRLIPPVGNEFIMMLKDASLVSMIALVDITKATRNIEGSTRSALVYIPAMILYLIITAVFSYVFRKAENKYSVYE

SEQ ID NO: 102719 - protein, 190 aa, Unknown
  Obtained from environmental sample
  DOMAIN (35)...(190): ABC transporter
  misc_feature (1)..(190): Xaa is any amino acid
MSMIKTVEISKTFHGSNGRGPLDVLKNVSLTVEQSEVVCIIGPSGAGKSTYLRTLNRLETIDEGQIYIEDNLLFDCHNGVNSVKMHNDERNKILLEVGMVFQRFNLFPHRTALENVMLAPHNVRKLPLAQARAKSEQILERVGLKDKINAYPSQLSGGQQQRVAIARALAMEPRIMLFDEPTSALDPELV

SEQ ID NO: 102720 - protein, 279 aa, Unknown
  Obtained from environmental sample
  DOMAIN (105)...(257): ABC transporter
  misc_feature (1)..(279): Xaa is any amino acid
EGLGKSYQIEVSKLINPELSINEGAVLASAADGRLIFSQHGMAEYKAIARKTGFSLNTKWKDLPPNAQNAVLEVIVPILQGLWDQWHISLLQKYMLIEPCSECHGERICAAARAVKFHGKGISEISSLSVEASVKFFDELELSEKEKRIGAEIFREIKGRLGFLQAVGLGYLTLSRGSATLSGGEAQRIRLAGHVGAGLQGVLYVLDEPSIGLHARDNERLLALLEKLRAQGNSLIVVEHDEETIKRADCIADIGPGAGSEGGLLVALGNIKDCKKIPP

SEQ ID NO: 102721 - protein, 94 aa, Unknown
  Obtained from environmental sample
  misc_feature (1)..(94): Xaa is any amino acid
MVTIREWNVLEYLDSEEEITGYLEAVLEEGGPALFMRALPEVAQARFINQFVKETGADRKALCDMFLGSRDDAAPANHDVVEKLARAFSVAVPV

SEQ ID NO: 102722 - protein, 51 aa, Unknown
  Obtained from environmental sample
  misc_feature (1)..(51): Xaa is any amino acid
DYDNEGRYRLSIAIGCTGGRHRSVALVEALAAALKKQDYTVSVEHRHMELG

SEQ ID NO: 102723 - protein, 300 aa, Unknown
  Obtained from environmental sample
  DOMAIN (3)...(141): ABC transporter
  misc_feature (1)..(300): Xaa is any amino acid
MAAGVSMIHQELSNVPERSVAQNLWLGREPENALRLIDHKKMYRDTKTLLEGLNYHFDPNARMASLSISQQQGCEIARAVSYNASVVVMDEPTSSLTEHEVSHLFGIIKDLKEKGVAIIYITHKMEEIFKIADDVTVMRDGKVIGTYPAGEMNGNKLISLMVGRDLTHRFPPVESEIGEVCLEVKNLRSGDPRSFKNISFELHKGEILGIGGLVGAQRTELVESIFGIRHIVSGEILVDGKPLRDVRPRKAIEAGIGLVTEDRRNTGIFPLLNITINTALPSLGNYKTKIGLLDHKTITE

SEQ ID NO: 102724 - protein, 79 aa, Unknown
  Obtained from environmental sample
  misc_feature (1)..(79): Xaa is any amino acid
MGCHMILPVQFANEVRIGEEFVFCPYCSRILYYEESTEGEEDFFNTEDTGSLSDLDEIEEDEEDEDEEDEEKVNIDYEE

SEQ ID NO: 102725 - protein, 133 aa, Unknown
  Obtained from environmental sample
  DOMAIN (27)...(133): Bacterial flagellin N-terminus
  misc_feature (1)..(133): Xaa is any amino acid
MIINHNMSALFADRQLGVTQGEMTKDVEKLSSGLRINRAGDDASGLAVSEKMRSQIRGLHQAERNIQNGVSFIQATEGYLQETQDILHRLRELAVQSANGIYTDEDRMMIQVEVSQMVDEVNRVASHAQFNGM

SEQ ID NO: 102726 - protein, 295 aa, Unknown
  Obtained from environmental sample
  misc_feature (1)..(295): Xaa is any amino acid
VGQSYGTVTIANAYVIGNVIGNATTGGIIAYYSTLTNNNVSTITNVYVIGNVTGGYNTGGIVGNVITESKCKFTIDNVYVIGDVTGVQDIGGIVGYLFSRLGSEFTIANTYFIGNVTGVQDVGGIVGGRYIRDDNVSDPYVPNSIYNSNLASGIYGTSKTIEEMKNFLTYFENGWDFNSIWAIDPNINNGYPFFQNSTYTQNKKNIASVYISGVMESYTGLPIEPDVDITYEGTKLIKGTDYDVLYHNNVNVGSEAKIIIVGKGDYYGAKIVNFRIANQKRDIAYATIEPIFPEP

SEQ ID NO: 102727 - protein, 287 aa, Unknown
  Obtained from environmental sample
  DOMAIN (142)...(180): RHS Repeat
  misc_feature (1)..(287): Xaa is any amino acid
RFIKETGRPGIEKEYKYDAIGRVVEVKSGGEIVERYDYSNRGREVVFTDALGANYTQQKNAFGDFTGEVNRLKDSQRYSYDSEGRMIGSTAYSGKQTKIEYRDSEGITITTYPDGKQSVIERDMLGNIIRVASETGTIRYKYDAGGKLIEQNDESAGEITRYVYNKAGQRIRMQSGNRDIIYIYGKNGELLKVTDNSQRLEVSYEYDVRGRETRRTYGNGIRQETFYDQIGRIILIRETDSRSGLLRAEGYLYDEKGRRSHSVNEEGRVTKYEYDKQSRLSTVLYPW

SEQ ID NO: 102728 - protein, 279 aa, Unknown
  Obtained from environmental sample
  misc_feature (1)..(279): Xaa is any amino acid
IFGMISIQGEGPAIILCGSGPQDVLDAGGRGRVLFIGSGNRVTLENLTLTGGKESSGAGVYVSNSSLVVGNGIVIRDNEAGFGGGICVEEGTLVVRGSVTCNRAENGGGIALLGKSILDISGTISGNHAANSGGGILLDGGTGVITNSEISGNTAEGGSGGGICLNGQGANLVLNNVDISGNHAANGGGGGVVVLANASLRINSGHIRNNDAEAGGALYLSNSSLDAQGCEIGGNAAQSGGGVYLAASKFTMSDSLIQNNRSSGPGGGIIMGAVREIPA

SEQ ID NO: 102729 - protein, 295 aa, Unknown
  Obtained from environmental sample
  DOMAIN (1)...(138): Phosphoglycerate kinase
  misc_feature (1)..(295): Xaa is any amino acid
KGVEIVLPVDHVGAEKFDAAAKPVAVASVNVPDKLIAMDVGPKTLALYKKVISTAKTIVWNGPVGVFEFDAFAKGTEEVAKLVAAATANGVITVVGGGDSVAAVNKFKLASKMSHVSTGGGASLELLEGKKLPGIEVTRCRDYFIAGNWKMHMTRAESANLAKALVKSLKGGKHKYMAAPSFTSLETVGEILKGSNILLGAQNCACEEQGAHTGEVSVLQLKDLGVGVIILGHSERRHTYKEDDALINKKVKLALKHGFEVILCIGETLEEREKGKVEAVCKGQTEKGLSGVTAD

SEQ ID NO: 102730 - protein, 253 aa, Unknown
  Obtained from environmental sample
  misc_feature (1)..(253): Xaa is any amino acid
MSGKVIHTSDTKTLVKNNIRNYSMFIMLALIMLIFGPMTKWNNWNPRNFTNILFQNSYVLILAVGMVQVIIVQGIDLSVGSVCAFVGALSAMVYNTGVGMPIALLSALAMGAGIGAFQGAWVAFARMPAFIVTLAGMLLFRGLTYIVTNISPVSFADDGYALISTGTLDEALGTGRIGPYRPMSFIVAVIVLAVFYLAEFAGRKKKIDNEFEVSPQLIFIGKLVIISLLVLGLADRFARYRGLPIIVLVLGIT

SEQ ID NO: 102731 - protein, 301 aa, Unknown
  Obtained from environmental sample
  DOMAIN (248)...(280): Ankyrin repeat
  misc_feature (1)..(301): Xaa is any amino acid
TVLAAVVFCACTSAPKKVVHNNVWSLLAQGDERAKAFFLGEVDVNARDFNGRTPLHYAAEQNDSALAAFFIAMGADVNAEDKSRETPLGVCAEKGSIKAAKVIASSGADIHKATKNGVSIANTALLDIPFLEAILTPATMESEDRNGKTILHNASEAGNVKAVQTILAAIDADINKPLAAAGNRNGPLDKRDPNGNNALDIALSRPDSRDHMETAEQLILAGAVSAHPIYYYFAPAARSANYDVRRADGLAPLHFAAREGHEGLISFLIERKANVNIKNSSGATPLHEAARSGQVSVINLI

SEQ ID NO: 102732 - protein, 259 aa, Unknown
  Obtained from environmental sample
  misc_feature (1)..(259): Xaa is any amino acid
TGDQQYDPESDFKADILPGEQVRITRYTGSKQAVRIPPTIQGLPVTEIGIQAFTMMPGLTRNITSVTIPDSVTNIMNNAFQACELVRVTIPNSVTRIGDYAFSHCISLASVTIPDSVARIGDYAFSNCIGLTSVTIPNGVKKIGHFAFAHCYSPFIPASVSGIGEGVFYYYRRFAIVIPASVESIGEGAFANCDRLYNVTFQGKIDKENFGFAYKGGTMYEGKSPFDGDLKEKYLAGGAGSYYMESGSGSTAVWTKILK

SEQ ID NO: 102733 - protein, 148 aa, Unknown
  Obtained from environmental sample
  DOMAIN (6)...(119): Response regulator receiver domain
  misc_feature (1)..(148): Xaa is any amino acid
MSDERKKIIVVDDTLDDLSVLKTILKDIYMVYPCPSASEMFDLLEHIQPDLILLDVEMPEMNGYEAAKKLKSVDEYYDIPIIFLTAMTDDQSEITGLKTGAVDYIRKPFITPLLLKRINIHLSLMEQRKIILDRNKEIEKLLENKIEE

SEQ ID NO: 102734 - protein, 290 aa, Unknown
  Obtained from environmental sample
  DOMAIN (211)...(290): Histidine kinase-, DNA gyrase B-, and HSP90-like ATPase
  misc_feature (1)..(290): Xaa is any amino acid
IKKLKSDDKYREIPVIFLTSMTDEQSEMEGLKLGAVDYIHKPFVTPLLLQRIKTHLSMMEQQKMILERNKEIEELLEIKTKEGGLRQAAELEAQNASRAKSDFLSHMSHEIRSPLNAVIGMINIATDANDVQTIKRHLEKAGNASKYVMGVINDILDMSEIEANKLELSFDDFNFERMVLNIIDVISIRAQEKHQQLIVNINENIPQFVISDELRLSQVITNLLTNAIKFTPEKGKIELNAEKLYEQNDEITLRIEVADSGIGISPEQQKKLFKSYNQADSTITKKFGGT

SEQ ID NO: 102735 - protein, 70 aa, Unknown
  Obtained from environmental sample
  misc_feature (1)..(70): Xaa is any amino acid
LGQHPYELAVYKIATVQFNYHITVKDGNYSVSYEYIKQKVNVRLTKRLVEVFFGKPDCKPPAPVREARPI

SEQ ID NO: 102736 - protein, 289 aa, Unknown
  Obtained from environmental sample
  misc_feature (1)..(289): Xaa is any amino acid
IAAVFNQYKVTSKDKRKKIGNETINSYYIRAIIELSKEDYIEILSRFEKQYTNTECIKLKNENTLIKFIECSFVNFLIRIDIADNNKPYYTYWIYSGSHDFELENVLYLDEMSFNTEELGTKQGIVEIRSLIFDILKKMYNEKPYICHFWQYTNSLLLPSSVNISEFISNPKQFLSLYNIFLTCNRFDIKKEFEDAISQDGDYSNLLDQVSKTITKLFREIWKDFKDTSIELMAGESEMIIKVSNKTKYSFEDRSDGFKKFISILLMLSTQARSKRLGERDIILIDEPD

SEQ ID NO: 102737 - protein, 297 aa, Unknown
  Obtained from environmental sample
  misc_feature (1)..(297): Xaa is any amino acid
FGRLRNDGTGPVVAGTTIASDGTLAIAAAETASSLYVKAVSNSDATKFDIKEIKVVTVTGVTVTAEGGTAKVARGRSLKFTAAVTGNNGPANTVTWKVSSNAAGDGAVTAGTAIAGDGTLTVAATEAAATLYVIATSTLNTTKSGSVTVVIPTVTRVTVNPVNPTIKRGEGATFTARVQGMGDPSQEVTWKLDGVGGVPSATTITGNGMLIVSKEETLSGLIVTATSVDDPAKSGTSMITIPAVPAAVIPVAPQTTSAIELTAGKWADGSFSAGNQEQWFKFTATAASHYIQFMPNT

SEQ ID NO: 102738 - protein, 310 aa, Unknown
  Obtained from environmental sample
  misc_feature (1)..(310): Xaa is any amino acid
ENIDQLKNKLAKIFPPAELFNTEIDERWIALKNKLSKETRKEYYLSERQFIDFCNESGLTKEQEQQDAIRFLHDLGLVLHFDFENPNLAEYYVLDPYWITYGAYQILTSKYVGDNGGIVDMDKLEFVLNEEEDKQEIFQPTYYKKLKYTRSERRFLLDILCQFKLGFVLSNSHKFIIPDLLVTMEPLDIATAIRTSVKRVIFVYEYDYLPKSVIPNIMVDMHRIMVRMWRTGCVLKYDGCDALITSYRNRVSIIVTGKDKKMRGFMSVIRYTVDLINQNLCENNKIIGLIPLPDIDNTYVEYETWCQKKK

SEQ ID NO: 102739 - protein, 132 aa, Unknown
  Obtained from environmental sample
  misc_feature (1)..(132): Xaa is any amino acid
VPDAHPTPGEPTVTHVPPFTPIDVDREGLTIMGVSFPDPRTLDGVARALGSNMYEGLEPTARDIEAIRDHCTGTTTFEEMVAATREQYGTKGWPRKTGAAQKDERWDSEYTEADTGVFYNMLNEANWGTLAA

SEQ ID NO: 102740 - protein, 244 aa, Unknown
  Obtained from environmental sample
  DOMAIN (9)...(244): Iron-containing alcohol dehydrogenase
  misc_feature (1)..(244): Xaa is any amino acid
MISYFNPLPHLWTGEGAVKKIAGHLRERGLRNPLIVTDKGVTALPFFSRLAAELETFALFDKTLPNPPDTQVHEGAEQYRRENCDCLMAVGGGSPMDCAKGIGVIVSNGGNIHLYTKEPDTVPKAIPYFIAVPTTAGSGSECTSAAIITNTEGHHAKMALISPKVLPSAAFVDPEIMIGLPPFLTAMTGLDALSHAIEAYLAINANEYTDGLAFSAIRLIFRYLPRAVANGEDLLPAKRWCTPR

SEQ ID NO: 102741 - protein, 154 aa, Unknown
  Obtained from environmental sample
  misc_feature (1)..(154): Xaa is any amino acid
MKKKNIYCLLYLFLLVSVFFHLSSCKKKKEEPEEIKKPDAVITFISGDAYILSEKGILPAVIGNILKEGDSVKTANDSYIEILITGNSVIRIDENTELSMDRLEHTGKDPDIAVSILNGSIINKVEKIASSENYFVKTKSTAFGVRGTEFMVSS

SEQ ID NO: 102742 - protein, 290 aa, Unknown
  Obtained from environmental sample
  misc_feature (1)..(290): Xaa is any amino acid
TAFIKRGDELRISGWAFAGLAALEMGQKDLAASARDRVRRFIRPGTRSLDLTDTYERQGNFWGYDSDRYALALMLLHSLNPQGDDMTTRLATSLIERQRRGVWNNTASSFWPTLAFGMLGDSESSEWKTANGAPLAVTTSLGGTSLFNAEFKTYGGVPVSFNGHFAEKPVLDLPRDTLLPLRIERSGPGRLYYTASLRYGIPVELAGARDEGISVFVETFDAEGKPVRNGRLRAGKTYTRRVTVSTSRDRAFVALRSPIPSGAEIVDAVFVTSSTVPPSTKNESDDYDSD

SEQ ID NO: 102743 - protein, 127 aa, Unknown
  Obtained from environmental sample
  misc_feature (1)..(127): Xaa is any amino acid
MNLPQGWTLTTFNTILSYEQPTAYIVKSTEYNDTYKTAVLTAGKSFIIGYTNEKDGIYSDDLHTTISKQKAKDLSSYRLQENDIILARRGEMGRTAPVTEKEVRWLCGTGSMIIRLKTGNLNSLYSL

SEQ ID NO: 102744 - protein, 64 aa, Unknown
  Obtained from environmental sample
  DOMAIN (1)...(55): DHHA1 domain
  misc_feature (1)..(64): Xaa is any amino acid
MIKESQKGKVKCSLRSKGSIDVSKIAHDFGGGGHVNAAGFNSDLNIDQTLALALTKINVCLGKK

SEQ ID NO: 102745 - protein, 96 aa, Unknown
  Obtained from environmental sample
  DOMAIN (1)...(95): ABC transporter
  misc_feature (1)..(96): Xaa is any amino acid
MLARIGLDLSCKTRRVHELSGGQKQRVCIGRALMLQPKILIADEAISSLDVSAGAQILNIFRELREGLGLTIIFISHNTGAVEYLCDRVFELAENR

SEQ ID NO: 102746 - protein, 302 aa, Unknown
  Obtained from environmental sample
  DOMAIN (21)...(301): Aminotransferase class I and II
  misc_feature (1)..(302): Xaa is any amino acid
VAPSATLSISAKAKELAKAGKNVIDMSAGEPDFNTPDFVIESAYAALKAGKTKYTAVPGTPELRQAIAEKLRRENGLEYPAAAISVANGAKHTLYNILQAILNPGDELLVPVPGWVSYKEMAHLAEAIAVEVPCSQADGFYLHSDALEKACCSKTRALIINSPSNPTGALYNRKNLEEIADFAVRHDLLVISDEIYEKLTYDNAEVSSIASLGKDIFDRTVTVNGLSKSHSMTGWRIGYAAGPKDIIEAMNVLQSHSTSNAVTFCQEASITALRDTSDWVPRSREIFNKRRDLIFDGICAIP

SEQ ID NO: 102747 - protein, 267 aa, Unknown
  Obtained from environmental sample
  misc_feature (1)..(267): Xaa is any amino acid
VYSRDYSGNPAVSRTGSFTIKRGAELSAPVLTAPADETVFNIEEGRRDILFSWKKENEATSYTLTISSYKDMGSPIIEKTSSDTFYRYGADETVITAGIWYWTVRQTSSDGDISPASQPRSFTALRGEIIQSPIFPPDDYVVAENLLPNTRFTWKTNLTDTYFQISNNANFSPLVIDESAPGEAYTVYSLKAGVYYWRINSGSETQRHNSKPKRFTVAESLPPPVLGLPKSGSLTAQSGKITVREGQPLDFSWKSTDADYYTFRMFK

SEQ ID NO: 102748 - protein, 78 aa, Unknown
  Obtained from environmental sample
  misc_feature (1)..(78): Xaa is any amino acid
VYKYATGISASLALAQRVASGGRQEREDYFAFLKSGGSRFPIESLKIAGVDMSAPEPVRAACQYFARLVDELEKLLLS

SEQ ID NO: 102749 - protein, 136 aa, Unknown
  Obtained from environmental sample
  DOMAIN (76)...(108): Ankyrin repeat
  misc_feature (1)..(136): Xaa is any amino acid
NIHQSDNEGKTLIFTATGLGKTEAIKCLVSLGLDVNTKDNDGYTPIFSAISSKSEQIASMKCLVELGADVNARTNQGFTPVFMAVSENKVESLKCLKELGADINAKSNDGRTPLSLGINFGDVPEAVNWLKANGAV

SEQ ID NO: 102750 - protein, 286 aa, Unknown
  Obtained from environmental sample
  DOMAIN (163)...(286): Domain of unknown function (DUF323)
  misc_feature (1)..(286): Xaa is any amino acid
ITFTVDVIPAQTYTGSAISPAVTVRDGSMALTLTTHYTVTYTNNLNVGTATVTISGVGNYAGSSGSGTFTINKAAGAIVSSPSGTSFVNGTSITINAVSVPSNGQTVEYAINTINTAPSTGWQNSTIFSGLNVNTTYYIFARSKENTNYNAGMHSTSLQVITSLVEMIYVPGGSFQMGKELGTFIEGDQTPVHLVTLTGFYMGKYEVTQVQYQTVMGNNPSTFSSNPASGEVQGNRPVDYVTWYEAIEFCNALSLKEGLSSYYTIDKVNKDPNNTNSSDTMKWTVT

SEQ ID NO: 102751 - protein, 162 aa, Unknown
  Obtained from environmental sample
  misc_feature (1)..(162): Xaa is any amino acid
MAENLNYAVEGSKCGGNDCLLYDENTINCDKYGRLYDWNTAITVCPNGWHLPSDVEWITLIDFVGGRKTAGAKLKATSGWNDYEGKSGNGTDDFGFAALPGGTTTSDGYFLGVGSTGYWWSSEERSNRVEAYFRIMGSGSEEVSYSYNHKGKFLFSVRCVKD

SEQ ID NO: 102752 - protein, 146 aa, Unknown
  Obtained from environmental sample
  DOMAIN (1)...(146): Flagellar P-ring protein
  misc_feature (1)..(146): Xaa is any amino acid
IPISPEDKEDTVGFVARVQEFMVVPDAVAKVVVNQRTGTVVIGENVRLAPVAISHGDVDIRIESEEPTANETSADTYLALNNNQESGGANTTTKTTTIKLVQLKEGATLSSLVKALNSVGTSPQDLIAILQALKTAGALSAEIEVI

SEQ ID NO: 102753 - protein, 88 aa, Unknown
  Obtained from environmental sample
  misc_feature (1)..(88): Xaa is any amino acid
TSCFNYRKITGGQNLSFHASGRAIDINPVQNPYIKRNVILPFNSVYDPSVRGTLTKDSVIVKSLISRGWIWGGNWTDLKDYQHLEKMQ

SEQ ID NO: 102754 - protein, 155 aa, Unknown
  Obtained from environmental sample
  DOMAIN (1)...(150): Methylpurine-DNA glycosylase (MPG)
  misc_feature (1)..(155): Xaa is any amino acid
IIVETEAYLYKDDPGCHACKGLTARNAPMFAAAGRTYVYLIYGMYHCLNIVSGKEGEGEAVLIRALEPVIGIEVMQKRRKTEKIENLCNGPGKLTQAFGITKKQNDKSLFDGPISIHNSRIKPEICSSRRIGLSAGKELELRFFIKGSRFVSKYV

SEQ ID NO: 102755 - protein, 242 aa, Unknown
  Obtained from environmental sample
  misc_feature (1)..(242): Xaa is any amino acid
GFENIIITGGNTEKKGGGIYADNGAVIVLAKNAELSENKASDGGGIYALGSDITFIDNALIYKNEAEKQGGGISLKKSSLIVRGDAVISGNTGPVDGGGIYAYESYVVLDDNALLEGNTSECGGGFCIEHYSSAIVRGKVIVRGNKSWGSQGGGGLCAGVLSNIHMTGGTVTDNASSNGGGVYLGGAVFTFSKGSITDNAAKTGGGIYSGIGSAIHIENDSLVYDNFPDDIFEYEYNYGFYF

SEQ ID NO: 102756 - protein, 88 aa, Unknown
  Obtained from environmental sample
  DOMAIN (9)...(86): Plasmid encoded toxin Txe
  misc_feature (1)..(88): Xaa is any amino acid
MPFAVDLVPEATNEYLWLQHHRPNLAEKVDDLIAAIEVDPFRGIGKPEPLKHGLHGFWSRRVTKKHRMVYHVSGDMVYVHRCYEHYDD

SEQ ID NO: 102757 - protein, 197 aa, Unknown
  Obtained from environmental sample
  misc_feature (1)..(197): Xaa is any amino acid
MKRTYAIAALAMLALLSACKNSTNPNPGGQPVSYTITIKMSDNVEGDSVTASPASGQAGKTITINYTVANDKIHNRLVFSGTKKAIAQVDSAGSGTRQYMINEADAAENVITINAVFAHSDKQFDTIAFADTGNETRVYGDPPFTKAITNNGSGTGAISYSSSDETVATVTNAGAVTILKAGITTITATKAEDANYA

SEQ ID NO: 102758 - protein, 292 aa, Unknown
  Obtained from environmental sample
  misc_feature (1)..(292): Xaa is any amino acid
RDKAEDTNTYTPAEYLLTVTPLQLVLADPSVTTTKTYNGTTTAAVTAGTLTNKVGDDDVTVTAAANFASKNAGSSQITVVYTIGGENAGNYIKPVDYTISGTIEKLQLTVTESITDSKPYDGNTNAAVSISSSNKISTDTLTVTAIGTYNAATVAGASQITVSYTISGADVDNYNKPADHSVAGTITKAAGSAVSIPKTASKTDNSITVRAVTMQSPTLGQTAEYATGTTSSAPTIPWQDGRIFSGLTKDSTLYIFARSKANDNCDAGTQQVSAEIKVMDDSYRNTVIDFET

SEQ ID NO: 102759 - protein, 88 aa, Unknown
  Obtained from environmental sample
  DOMAIN (1)...(85): Response regulator receiver domain
  misc_feature (1)..(88): Xaa is any amino acid
LVVDDNLSSLKQISAQLADKYEVSLAKSGELALQICVEEKPDLILLDVEMPGMDGFETISHLNNDPELNQIPVIFLTSSNDSATEAQC

SEQ ID NO: 102760 - protein, 256 aa, Unknown
  Obtained from environmental sample
  misc_feature (1)..(256): Xaa is any amino acid
MLKQCIIESCIDNNIKEIIKRLDYAALDIKAKTMSGEQLIAEIEKDIDSLVAQFDQNKISTANRRYEMAAALAQFSTYNFFGFFKRFDPHFADGSFIVEPRFPAVKIILIINELEKFLTVSQPLKPEDDWESLFVIMNKCEGQALVHIDQFTSMVTTVREIHSTKAIELMVQYTLRNPVWTWKQVAFREAIGEEWLEQKKAEAGAYILKINTAQKNGQISALTKQIFEATDLVRLDNYTVQLSEQYKRRNLEYFAY

SEQ ID NO: 102761 - protein, 197 aa, Unknown
  Obtained from environmental sample
  DOMAIN (1)...(190): Glycosyl hydrolases family 38 C-terminal domain
  misc_feature (1)..(197): Xaa is any amino acid
MQDRARFEICAHKWISLEEEGGGIALLNNCKYGHDVEGGRMRISLLRSPVAPDPEADRGEHYFTYSILPFAGHFGDSGVVRSAYELNSPAQALFVSGAKTVGTAAASLCTVDGNQIIIESVKAPEDGAAGELILRLYECLGGKSRTTLHFRRELRAAFQTDMLEDNPVALPVQGCDIALEFRPFEIKTIRIQIAKSK

SEQ ID NO: 102762 - protein, 129 aa, Unknown
  Obtained from environmental sample
  misc_feature (1)..(129): Xaa is any amino acid
LKIIIIINFEAINHHLEQIAQSIFKAWFVDFEPWGGERPTNWHIMTLGDLCLTVTKGTTPTTLKKQFVTQGINFVKAESILDDHSLDFSKLAFIDDETNYLLSRSIIQANDIIFTIAGTLGRFAFVEKI

SEQ ID NO: 102763 - protein, 126 aa, Unknown
  Obtained from environmental sample
  misc_feature (1)..(126): Xaa is any amino acid
MLFTELFDEKHYENALIDVFRNALGYGHVYAPGLTRDYADPLYTAELQAALRRVNPKLPEAALTEAVYKLRNIEGGTLFQKNVTFMDYLQNGVSVSYFDDEAGHPSDPSKGGEQRSALVYLVDYEH

SEQ ID NO: 102764 - protein, 140 aa, Unknown
  Obtained from environmental sample
  DOMAIN (1)...(131): Formyl transferase
  misc_feature (1)..(140): Xaa is any amino acid
RSIPRDERRQELSDRILKLAGTYHIDLIVLAGFLSILKGDIVTCYSGRIINLHPSLLPKFGGDGMYGGRVHRAVLDAGEEESGCTVHLVDAGVDTGPILLQRKVPVLPGDTPDTLAERIHTEEHIAIVEAVKIMTERIVN

SEQ ID NO: 102765 - protein, 148 aa, Unknown
  Obtained from environmental sample
  misc_feature (1)..(148): Xaa is any amino acid
MRKFLPLLLTALLLIACGQKEQTKAEQNLLATELIGQKIALTDFVSAKPAAILSSRSTIELEFKQNMVLQDAVGQELSAIPIDFEPAIKGKAKWLTTSLLQFVPEVPLQGGQAYKAKFNGKKAFGKEASVDNYSFEFQVIPNEILEIN

SEQ ID NO: 102766 - protein, 250 aa, Unknown
  Obtained from environmental sample
  DOMAIN (1)...(248): Gamma-glutamyltranspeptidase
  misc_feature (1)..(250): Xaa is any amino acid
SYDAEWVDPVSINYRGYDVWEIPPNGQGVAALAALNILSNFEFVSRENPDTFHRQWEAMKLAFSDVLAHVTDSRFMKEDYREWLKPEYGKKRASEIGERACMPGPLHPPKEGTVYLATADGDGNMVSYIQSNYKGFGSGVVIRGTGIALQNRGADFSLDASAPNALAPGKKSYHTIIPGFLTKDGKAVGPFGVMGGYMQPQGHVQVITNMLDFGLNPQQALDAPRWQWIEGRKIHVEAGFNPAIARVLAK

SEQ ID NO: 102767 - protein, 302 aa, Unknown
  Obtained from environmental sample
  misc_feature (1)..(302): Xaa is any amino acid
LANVVLSDGLAKFEHSDYKGKLRYTDKDFPNENRQFDILVSNPPYSVSAFKNTSVEYYSEKNFELYNSLTVNSSEIECLFIERAKQLLKEGGMAGIILPSTILSNEGIYSKAREIILKYFKIVAITELGSNTFMATNTNTVVLFLRRRNNYEFQNFAASLENSLNTYKDNTINGIEKPITKYLNHVWENISFTDYVFMLKKKPKNDITSHEIYKEYKKEIKAKTEVDFWSVLLDIEKEKILYFILTYPQKVVLVKTGEKDAEKSFLGYEFSNRRGSEGIHPIQRGKTIDECTQTFDEERLDN

SEQ ID NO: 102768 - protein, 158 aa, Unknown
  Obtained from environmental sample
  misc_feature (1)..(158): Xaa is any amino acid
METGSITEMMAVLALQLGIILFAVKICGKLAKKVKIPQVLGELIAGVIIGPFALGGIPLPGFSQGLFAAGHGSLAVTPELYAFASIASILLLFVSGLETDIGLFLRYSVAGGVIGIGGVLVSFSAGALTGVFLFDKSFMDPVCLFLGILSTATSGELP

SEQ ID NO: 102769 - protein, 111 aa, Unknown
  Obtained from environmental sample
  misc_feature (1)..(111): Xaa is any amino acid
AGIYKGEQPAIFAGYLIRVNYKKDLLNPTFLVYVLNSETIRNHGFSVMAKSVNQANINGTLLKAYRIPFPPLSEQKKIALKIEKIEVQIQEMQEELEQLSIQKGLVLKKYL

SEQ ID NO: 102770 - protein, 274 aa, Unknown
  Obtained from environmental sample
  DOMAIN (125)...(213): PPIC-type PPIASE domain
  misc_feature (1)..(274): Xaa is any amino acid
LFSGRTGAFDTSKYVQWLKTPQTYSIYPWMIDVEKQVSGQIMPGQKLDALLKAGIFVSKSEVAYEYAQRNDKASFEYYLVQSKDHRSDSGAAITDKMISDYYAANQSRFRRDEQADLYFVRIPKIATEADLELNRNNLLEIKKKILAGDSKFELEAEFESDDEGSRPSGGDLGWFGKGAMVPEFEAAVFALKPGEISDPVKTAFGYHIIMLEERGEPDSSGAFNVKARHILRKNNPSDETLGALSDLAEQVKMAVTNKGFVAGVADIPNVTLDS

SEQ ID NO: 102771 - protein, 170 aa, Unknown
  Obtained from environmental sample
  misc_feature (1)..(170): Xaa is any amino acid
MKIVKKILIILPITIFAIFLILLVTPVLFKGKILNIAKTELNKMLDAQVDFSDLKLSFIRNFPNAYVALENLTVTGKGEFDGETLAAFKSFSVTVDIKSVIKMDNIRVKSILLDQARLNAHIAENGNANWNIIKPGKEEEKPAEETPAEKSAPEKSSSLKVALNKFEIRG

SEQ ID NO: 102772 - protein, 226 aa, Unknown
  Obtained from environmental sample
  misc_feature (1)..(226): Xaa is any amino acid
LPDGAHPLGAFTDSIRYRGTLKDGASVSHITSWISPSAGQVKQVSSGRGLVVVTQRVELGPPESFGPALFEWTLRKLPKTPFLAWRDEFLVSGLPDLVETPQQKKVGSCEYLLSRAAPPSLEEARQLPYRSAGDAGTADARYLADSPLLGMNDPAVEGLLARLGAGKGATRWELACLVNTFVFNHIRDKGLEVGFAPAFDVAKNPSGDCTEHTVLMVALLRRLGIP

SEQ ID NO: 102773 - protein, 265 aa, Unknown
  Obtained from environmental sample
  DOMAIN (140)...(265): S-adenosylmethionine synthetase, C-terminal domain
  misc_feature (1)..(265): Xaa is any amino acid
VHRQSPDIAQGVDAGRGLHKEQGAGDQGIMFGYACHETKVYMPLAIYYAHRLVEELTALREKGKIPYLRPDAKTQVTVEYDGLKPKRIDTVVLSTQHDEKVKYATIKEDMIAKVIQKVIPAKFLDDKTVYHINPTGKFVIGGPHGDTGVTGRKIIVDTYGGYGAHGGGAFSGKDPSKVDRSAAYAARWVAKNLVAAGLATHCVIQLSYAIGVAKPISIHVDTYGSGKIPDVEIAGIITKLFDLTPAGIIKRLDLKRPIYRQTARN

SEQ ID NO: 102774 - protein, 207 aa, Unknown
  Obtained from environmental sample
  DOMAIN (27)...(99): Surface antigen variable number repeat
  misc_feature (1)..(207): Xaa is any amino acid
MKKLFIAAAPFFLLILASGNFAGAEAKILDTIKVEGLLVANPDAVSDAIILRPGSAFTPADLQESVRRVYKLGHFRNVDFFVDEESDSSVSLKLVVEEFPIVDKVEIFGNKKIKKKDLDEKLPLRFYAPLSDALLYKSKQTILDMYAEKGYLLAEVDAQVINTSVPGNVIVKYDIKEGPRVRVRSIVFHGNRDVTAKWLARRFKTKE

SEQ ID NO: 102775 - protein, 253 aa, Unknown
  Obtained from environmental sample
  DOMAIN (63)...(110): Regulator of chromosome condensation (RCC1)
  misc_feature (1)..(253): Xaa is any amino acid
MSACQRKAEPKWGALNLKNIIFAAAAKLLVALVLFAGQGMSAQNQDWAAVAAGGMHTVAISKDGTIWAWGANGYGQLGDGTKTDRNTPIQVGYSKDWKAVMAGLAHTIAIKTDGSLWAWGNNQLGQLGDGTKTDRSAPVQVGSAKNWAAVMAGAGHTVALRTDGTAWAWGYNEFGQLGDGSKTNRSVPVQVGSARNWATIMAGSAHTVALRADGTLWAWGYNDSGQLGDGSKTHRSVPVQVGSARNWKAVMAG

SEQ ID NO: 102776 - protein, 251 aa, Unknown
  Obtained from environmental sample
  DOMAIN (159)...(216): Regulator of chromosome condensation (RCC1)
  misc_feature (1)..(251): Xaa is any amino acid
MAIKADGSLWAWGLNYYGQLGDGTTTDRSYPVQVGNSKNWAAVTAGSGHTVALRTDGALWAWGSQFRGLLGNGISGDTKRNTPVQVGSSKDWAAVAAGSSHTMAIKVDGSLWAWGENEYGGRLGDSTTTDRSYPVQVGSAKDWKAVSSGAMHTVAIKTDGTLWAWGNNQFGQLGDGTETDRSTPVQMGSSKGVPVQLDTSNGRAAVMAGGTHTVALKADGALWAWGLNEYGQLGDGTKTNRNAPVQVGSVK

SEQ ID NO: 102777 - protein, 269 aa, Unknown
  Obtained from environmental sample
  DOMAIN (1)...(269): Pyruvate phosphate dikinase, PEP/pyruvate binding domain
  misc_feature (1)..(269): Xaa is any amino acid
KNKYPAGVKEEVESVLKRLEKVMKRKLGDPNDPLLVSVRSGAAASMPGMMDTILNLGINDLAVQGLAHKTKNPRFAWDAYRRFIQMYGDVVMGVDHDKFEEVLSSVKKAHGFEQDTQLTAKDLEHIVGEYKKVVREHCGKDFPQQPLEQLWGAINAVFGSWMNERAIKYREINNIHGLKGTAVNVQSMVFGNFGEDSGTGVCFSRDPSTGINIFYGDFLMNAQGEDVVAGIRTPDKISDLEKHNPAIYGQLVKIKNKLEKHFKDMQDME

SEQ ID NO: 102778 - protein, 268 aa, Unknown
  Obtained from environmental sample
  DOMAIN (1)...(268): PEP-utilising enzyme, TIM barrel domain
  misc_feature (1)..(268): Xaa is any amino acid
MIVADTDEDRKKRLNEILPLQQKDFIGIFKAMEGRPVVIRLLDPPLHEFVPHTRAEVEELAADLGISADSLQPKIDRLKEQNPMLGHRGCRLAITYPDIYDMQVEAIARAAVECVKQKIPVNPEIMIPIVITARELKFLRPNAEKVIEKVFAETKMKFPIKIGTMIEVPRAAIRAGHIAQYADFFSFGTNDLTQMTFGFSRDDVASFLPVYLEKNVLEVDPFKSVDEDGVGCLMEVAIHLGRSVKPEMTIGICGEHGGDPTTIDFCYR

SEQ ID NO: 102779 - protein, 179 aa, Unknown
  Obtained from environmental sample
  DOMAIN (110)...(179): Uncharacterized BCR, YitT family COG1284
  misc_feature (1)..(179): Xaa is any amino acid
LVTFKRLFLVVFAGALMSFNIKTFVHAGGLIPGGFTGLSLLLQQICLRFGHFNLPFSVPLYILNAVPAAICFKFIGKKFTLYSVLAIVVTGLLADWMPVMFIDIIKLHDTLLSAIFGGFINGLSIALCLYADATSGGTDFIAIFISERYHRDAWNYIFMGNCVILAVAGVLFGLDKALY

SEQ ID NO: 102780 - protein, 264 aa, Unknown
  Obtained from environmental sample
  DOMAIN (50)...(261): Phosphofructokinase
  misc_feature (1)..(264): Xaa is any amino acid
SIDEISVEFGSPTEAISDKDKIREIFKNTYGKPLATFKKGKHDTIRRELKVGVILSGGQAPGGHNVIAGLFDGLKKANPSSTLYGFKGGPSGLIDNKTVVLTKEHIDEYRNTGGFDIIGSGRTKIETPQQFASSLQTAKTLGLDAVVIIGGDDSNTNAALLAEYFAANGSGTQVIGCPKTIDGDLKNENIETSFGFDTACKTYSELIGNLCRDTNSAKKYWHFVKLMGRAASHIALECAFQTQPNICLISEEIEAKHYSLDHIV

SEQ ID NO: 102781 - protein, 287 aa, Unknown
  Obtained from environmental sample
  misc_feature (1)..(287): Xaa is any amino acid
LSVNSASLSVIGNNLANLNTMGFKGSSTLFQDMFSTNLGAASYQGNGNPFQVGLGAKVGGVHQNFAQSTFQSTSNPIDMAMMGAGFFYMRLASGGFGTERGGQFGHTRAGAFEVNQFGFVVDPSGNRLQGYNRDSKGDIDVTMGATDIKLPVGQTVPARATTQMAFTTNLDSTAQPPNDRHTASMQIYDSLGEKHTVMITYELVAPSSNQWRYYVWAPDTDTTTNLPPPGYLTSPVPVPPYTGWGVDIYPVDSGNGNPMVITMGILQFDTNGTLLGIDDAIANSGRL

SEQ ID NO: 102782 - protein, 192 aa, Unknown
  Obtained from environmental sample
  misc_feature (1)..(192): Xaa is any amino acid
VTIDFNNSLPSGNSYAEFAGLTGKEFSWNLSGEASFSINPDKLISLVSVNNITDQESLDAYLQDIARNMKIIILRTLTSVDTDIARLEKILSGNHDIQIEQEIKSRFPEIRDFSFVITSAVFPDFVLYRQVRLLYEEFLAMQREYVTAGFAKRAENHIETQLRFGELERYGELLTKYPILMDYLAMTRGKEE

SEQ ID NO: 102783 - protein, 278 aa, Unknown
  Obtained from environmental sample
  DOMAIN (27)...(276): Glycosyl hydrolases family 18
  misc_feature (1)..(278): Xaa is any amino acid
ESEEEEDDFPPLFIPVYDSKLPITTFNEVWAYVIGGAENTLKKGLPITDIGHFGAEIDSYGKLAELPKRQSIKFEGRVHLVVASNGRAVTHFSLMPDSNERKALVADLLAATKNYDGLQIDFESIPARDGEVFLSFLRELRAGLGNKMLTVALPARTKKIANDVYDYEKIKPIVDRILVMAYDEHWSGSSPGSVASLQWCRNVAAYSLRVIGQEKLIMGLPFYGRAWGNYSPSRALIYTTIERIMKDENVKDIRYENGIPVFDYNKNVSIKVYFEDGK

SEQ ID NO: 102784 - protein, 79 aa, Unknown
  Obtained from environmental sample
  misc_feature (1)..(79): Xaa is any amino acid
MPYNVQDLLTQMVNMGSSDLHFTVGVPPLVRLHGELKPIGEEKLTPQETMRMSYSLMNEMQRTSFEQSKECDFSFGINI

SEQ ID NO: 102785 - protein, 84 aa, Unknown
  Obtained from environmental sample
  misc_feature (1)..(84): Xaa is any amino acid
GGVTASFAMLADVTIAEPGALIGFAGPRVIEGTIKQKLPEGFQTAEFQLEKGFVDIISPRKEQRKLLSRLIDFHRQPAAAGEAK

SEQ ID NO: 102786 - protein, 193 aa, Unknown
  Obtained from environmental sample
  DOMAIN (1)...(135): Acetyl co-enzyme A carboxylase carboxyltransferase alpha subunit
  misc_feature (1)..(193): Xaa is any amino acid
MSNELLEKKLSELKKLACESGIDITDELDVLEVSLNETSKTEAAWKKVELARHQERPYSLDYINRIFTDFTELHGDRAFGDDPAIVGGLAFLDGLPVTIIANQKGRSLQDRVHRNAGMANPEGYRKALRLAKEAEKFHRPIVTFVDTVGAYPGLGAEERGIGESIARNLRDFSQLKTPIVCVIIGESGSRRAL

SEQ ID NO: 102787 - protein, 287 aa, Unknown
  Obtained from environmental sample
  misc_feature (1)..(287): Xaa is any amino acid
EFLGYVHYADGTMLGRKKGDVPQFDPGVLTEGENTYLYSGQCSGIVKTVEDYRSHSIAVVLGPDMLTVRDGPFPIIPGTSASKGTGFEGHEFFEASSIRKKGDTYYFIYSSFAMNELCYATSKNPLAGFSYGGVIVSNADLHIDSYKPAGKLMYCGNNNHGSIAEIAGKWYIFYHRHTNGNEFSRQACLEPVEIKEDGSIRQVEMTSCGPNGGPLSGRGEYPAFIACNLFRVEERRSVFADTPSKPWPCRSPEMPYITQDGKDGEEEPGFIANIMDNSGVGFKYFDC

SEQ ID NO: 102788 - protein, 220 aa, Unknown
  Obtained from environmental sample
  DOMAIN (66)...(206): SIS domain
  misc_feature (1)..(220): Xaa is any amino acid
EIAVATTKAFSAQLVLLYILAVWFAVKLGKVSPEAERELLSQIAALPEKAAGLLKQVDSIQKYASTCVGYKSIFFIGRNIDYAIALEGSLKLKEISYIHSEAYAGGELKHGTISLVEEDTLVVALSNCAGLYGKIISNVEQVKSRGAKVLLIGFDHLQAVRRQAAETNDKLFHIALPESPELFSPSLSVIVLQLFSYYVAANKGLDIDKPRNLAKSVTVE

SEQ ID NO: 102789 - protein, 204 aa, Unknown
  Obtained from environmental sample
  misc_feature (1)..(204): Xaa is any amino acid
MEADLRTAIAAALEQKVPVKDICFSGNGEPSLSPDFPEALKQADSIRREVVPAAELVLITNGAGLLQPDIFSLLRDTAALNIWLKLDAGTSDWYQKINRAAIPFEQLIAKIKEFAASSPVTIQTMLCAVDGKGPPDEEAQSWETLMLELAAIAAAAGGIRKVQMYGKARSAPEDPKAQALPVEYLEEAGAHLCAGRLRRQMPAR

SEQ ID NO: 102790 - protein, 106 aa, Unknown
  Obtained from environmental sample
  DOMAIN (12)...(106): MGS-like domain
  misc_feature (1)..(106): Xaa is any amino acid
MRALVSVSDKTGIVEFCQGLAALGFEIISTGGTSKTLKENGIKTGDISDITQFPEMLDGRVKTLHPKIHGGLLALRDNPEHVATCQKHGITFIDLVVVNLYPLKKP

SEQ ID NO: 102791 - protein, 118 aa, Unknown
  Obtained from environmental sample
  DOMAIN (30)...(86): Helix-turn-helix
  misc_feature (1)..(118): Xaa is any amino acid
MKAKNSKLLLEQLDKKLAVQYARPPEGGWIRAVRQALNMSQRQLGKKLGITAQGVRVLENNEARGRISLQRLAEIAQALNLELSYTFRSRDGSLQKLLEKAARKTATEIVRRTAVSMS

SEQ ID NO: 102792 - protein, 291 aa, Unknown
  Obtained from environmental sample
  DOMAIN (2)...(291): Carbohydrate phosphorylase
  misc_feature (1)..(291): Xaa is any amino acid
AVGAHNQGALPDEDVRRAHDLRIRQQYFLVSAVIQDIIRRHKQNGNNIADLGAKTAIHLNGSRCALAIPEMMRLLVDQEGMEWKEAWKMTQNIFSYSSSAVQREHVETWPVFKITQLLPRIMQVIFDINLEHLDLIRSRGCNDLELLRNLSLIEEGEVKRIRFADMAVLGSNSVNGVSAAHTEILKKHLFPNYYSQYPEKFYCKTNGVSHRRWLYCANRPLSALISRPIGDGWVRRPEELSKLEFYAESPEILKGFGNVKSRAKLELCTVLREKVGVAVDPGHALRRQLPA

SEQ ID NO: 102793 - protein, 284 aa, Unknown
  Obtained from environmental sample
  misc_feature (1)..(284): Xaa is any amino acid
VIANTTSSVFESLNAVLTGIKDIREVIDRSDERRRLYSRRTILFVDEVHRWNKAQQDALLPWVENGTVILIGATTENPFFEVNRALVSRSRIFQLKPLETGDLIKAARRTLSDKENGYGKWNVTFEEGALEHLAEIAGGDARSLLNALELAIETSGITDEVSSSWPPPEGADIFVSLEAAEESIQRRALLYDRDGDYHYDTISAFIKSVRGSDPDAALYWLAKMVRAGEDPAFIFRRMIILAMEDVGLADPTVISTVISCAEAFDRIGFPEGNFALSEACLCLA

SEQ ID NO: 102794 - protein, 127 aa, Unknown
  Obtained from environmental sample
  DOMAIN (27)...(127): Bacterial flagellin N-terminus
  misc_feature (1)..(127): Xaa is any amino acid
MIINHNLSAMFADRSLKVTDLNLTKGMEKLSSGIRINRAGDDASGLAVSEKLRSQIRGLNQASTNASNGISFIQVTEGYLQETEDIVQRIRELAVQSANGIYTAEDRLYIQIEVSALVDEIDRIASH

SEQ ID NO: 102795 - protein, 268 aa, Unknown
  Obtained from environmental sample
  DOMAIN (1)...(51): Helicase conserved C-terminal domain
  misc_feature (1)..(268): Xaa is any amino acid
DFIYDNKTVMVATNAFGMGIDKSNVSYVIHYNMPKNIESYYQEAGRAGRDGSPADCILLYNGQDVRINQYLITHNEDEEAADEELQAHNLELLKQMTFYAAGHDCLRRRLLAYFGEKSPANCGNCSNCLTEFEETDVTVEAQKIVSCVYRLKQRGRNFGKTMIIDILRGSKNEKLRRLRFDTLSTYAIMPDTSAHRIRLIIDHLIDKGFLLLEEGDYPVVMLGNAERLLKEEDRVLMKLPQEREKASDKKLSKQKSAQIIDTQNGSDE

SEQ ID NO: 102796 - protein, 271 aa, Unknown
  Obtained from environmental sample
  misc_feature (1)..(271): Xaa is any amino acid
MAKLKYTFKHDTLFKMLFTKYPELLKRLVAKLLGIRLESIGQFVITNPEMPPEVLGDKFCRLDINMTVDGQRVDLEVQVSDEKDYPERSLYYWAREYSSALSEKQKYKELPRTIIISIVAFALFACKEFYSEFQALEISRHTPLTDKMRLCYFELQKLPDIVDIHDELMLWLRLFKAETEEDLQKIEALGVPVMEQAIEAYRHISSTNELKEIERLRSLARHNEASALAHAADVAAEAEREKWQKVVAEKDAAHTAEIAALRARLARLDPS

SEQ ID NO: 102797 - protein, 278 aa, Unknown
  Obtained from environmental sample
  DOMAIN (1)...(76): CTP synthase N-terminus
  misc_feature (1)..(278): Xaa is any amino acid
MGISPDVIITRADEPVSRNIKDKIALFCNVKPDCVIENITLSTLYEAPLMLHRNGLDGVVCRGLSLDVPEPDLAEWQSMADRIGSRERAVNIAIVGKYIKLRDAYLSIIESLNHAGFETAANVHIHWIDSENLIGQNVADALSVVDGMIIPGGFGDRGIEGKIAACRYARENDIPYLGICLGMQVAVIEYARGVCGLDGANSSEFDELSPHPVIDFMSGQTGKMGSGGTMRLGAYPCKVAPGSLLSRLYGEGEISERHRHRFEVNDGYREVLRQNGWR

SEQ ID NO: 102798 - protein, 244 aa, Unknown
  Obtained from environmental sample
  misc_feature (1)..(244): Xaa is any amino acid
MLRPMILDCLKGYNRKQLFTDLTAGLIVGILTIPLSIAFAIASGVSPEKGLVTAFIGGFILSLLGGSRVQICGPTGAFVIILFGIVQRYGVDGLATATLMAGLILAVMGISGLGSVIKFIPYPVTVGFTSGIAVIIFTSQISDLFGLSINDIPADFIGKWAKYAGSVSGVNWHAAAIGGITLLILIFWPKISRRVPGALAAIIISATAVKLLGLDVETIGSRFGDISSGLPAPVMPNLSYSVIR

SEQ ID NO: 102799 - protein, 204 aa, Unknown
  Obtained from environmental sample
  DOMAIN (1)...(194): Sec-independent protein translocase protein (TatC)
  misc_feature (1)..(204): Xaa is any amino acid
VAICAVPCGVYWRRIFEFAALRPLRLGGHEAKLIYTAPAEAVMLSVKVALVCGLVAASPFLFWEAWRFVSPGLYKKEKAVILPAVLASTVCFLLGIAFCYYTLPLVLSFLTGFAAGQIDPYFKVDEYLGFLVNMCLAFGAAFELPVAAFVLAKMGVIDRRFLVRYFRYAVVAIFIVAAVLTPPDVLSQVLLALPLLALYGVWGA

SEQ ID NO: 102800 - protein, 243 aa, Unknown
  Obtained from environmental sample
  misc_feature (1)..(243): Xaa is any amino acid
MLDETSKCCNFLVHPSVRIADHKQAEEKIREFLNEVKASLEENDLEIINNLKEEWQDLFKTKPEIKKFDEILEAIRNILFKQEIHFVQLNSVSDSSIDISKRNNIIIGGNSLGRGVTIPFLQTTYYSRTAQVPQADTFWQHCRMFGYDRDRSTVRLFIPEFVHKLFQELNNSQQVLMKQLVENGIDETHLVYIDGVRPTRRAVIDSSKLLLIAGGVNYFSAYPVNTTFEDLNKLLLPFVFQGI

SEQ ID NO: 102801 - protein, 236 aa, Unknown
  Obtained from environmental sample
  DOMAIN (1)...(235): ThiC family
  misc_feature (1)..(236): Xaa is any amino acid
MQAHKQENFLFTHFKEICEILREYDIAVSLGDGLRPGSIADANDEAQFAELKTLGELTKIAWDLGVQVLIEGPGHVPLNKIKENMDLQLKYCHGAPFYTLGPLVTDIAPGYDHITSSIGAAVIGMLGTAMLCYVTPKEHLGLPNKDDVRTGVITYKLAAHAADIAKGNEQALLRDRALSRARFDFRWEDQFALSLDPETARAFHKESLSSQTGDSKFCSMCGPDFCAMKNTQKLKT

SEQ ID NO: 102802 - protein, 218 aa, Unknown
  Obtained from environmental sample
  misc_feature (1)..(218): Xaa is any amino acid
DGAKLVIDKKGSIAAWTNTPSGGEISYDQDIITITEDFINKHPDFSIRGAKGIIALTGFEGVLGYRTQGENSKAAWYKEEVGNAVKVANKLKELGWRFASHSYGHLNMPKVSMKRFINDAQLWDKEVRPILGETDLYIYPYGANLGKQEEKHKILRDRNFMVFFGVGNGWGYKVGPRSDYIFLTRRNIDGTYFRAYRYSSKQLFDIDKVMDKENRGIR

SEQ ID NO: 102803 - protein, 238 aa, Unknown
  Obtained from environmental sample
  misc_feature (1)..(238): Xaa is any amino acid
MLDRTGPAYASIQAGREFIGRAVILGRDYLTEYRPIFAPGSRDVIGILFIGIEIHTIQEVIAQNSRAETIKISLVAMVILLVSVFLTGLSSWFVVLKPVQSAVSMLKEIAQGEGDLTKRLTVSSKKEKKFKDAMVSADSIFSREYGSLSLNGKNLIDKNGKSLYRQYEVVDRISRELGVVATIFVRDGSDYRRISTSITDVSGNRVIDTVLDPKGAVYPYIHSGRKYFGNAVILGKNY

SEQ ID NO: 102804 - protein, 62 aa, Unknown
  Obtained from environmental sample
  misc_feature (1)..(62): Xaa is any amino acid
EEVIQESENLEKVTDEISGGMNKMATGADRINQAVGVVNEISAKNQQNIKQLVEEVSRFKVD

SEQ ID NO: 102805 - protein, 267 aa, Unknown
  Obtained from environmental sample
  DOMAIN (1)...(267): Ethanolamine utilisation protein, EutH
  misc_feature (1)..(267): Xaa is any amino acid
MAMGALALAMVGVIALAPVLASLLGVIVTPVYKALGANPAMFATTLLAIDMGGFPLAKELAGGDTAAWMYAGVILGSMMGPTIVFSIPVGLGIIDKADRRFLAMGILAGIVTVPIGCIAGGLVAMASGVVIDGQPVNFTLSMIFLNMIPVIIVALLIALGLKFVPEALISGFQIFAKILVGVITVGLAVAVFKDQLGIALIPGLDPIFSDPAVAAGDIRAMEVIGKIACVLLGAYPMVFLITRWFGEPLMKIGALLKMNEAAAAGMV

SEQ ID NO: 102806 - protein, 70 aa, Unknown
  Obtained from environmental sample
  misc_feature (1)..(70): Xaa is any amino acid
MKLTTRLFGQTYQFTSVKDVLAKAGDARSGDVLAGVAAQTAQERVAAQYVLSEATLADLRMNPAAPYEED

SEQ ID NO: 102807 - protein, 184 aa, Unknown
  Obtained from environmental sample
  DOMAIN (1)...(183): Ethanolamine utilisation protein EutA
  misc_feature (1)..(184): Xaa is any amino acid
GKREILSRATTQEPRQTLRATVIGAGAYTLSLSGSTIWLNAERLPIRNVPVLQSGLEWKRAAPDQLARSWSAAAKRMDLDPVADLYALAIPGDMPAAYKEVLAVSLALRQFNEHHPNREHPLIVIARQDFGKALGMELQPQLAGRELAVIDEVETRDGDYVDIGKPFFGGEIVPLTVKSLAFPA

SEQ ID NO: 102808 - protein, 84 aa, Unknown
  Obtained from environmental sample
  misc_feature (1)..(84): Xaa is any amino acid
DAGRVEKTESVARLGEDMIVKVIEINGDRIRASRRAVILEAQGHPWNPEETARPAGPRPDRGPRPDRGDRPDRGDRDHRPRRKD

SEQ ID NO: 102809 - protein, 201 aa, Unknown
  Obtained from environmental sample
  misc_feature (1)..(201): Xaa is any amino acid
VAHVRIGEIARIEEIAIIVPAARIRAISRLAAGTALPPGAAMRVLPLFLVLLFALWLSPCPAAAQTVPLAIWLEYARPDIVPDALPDPLARPLLIAVLTPHAGYYAYAHHSDALQPTRIGLLEDGRPLDASVRYPLGVVRKDALSGKNVAVYAGPTPVFLSLPAASAALSLRVSLLLCSAEHCIPVDETVPLPPSPDALPF

SEQ ID NO: 102810 - protein, 211 aa, Unknown
  Obtained from environmental sample
  DOMAIN (10)...(161): SpoU rRNA Methylase family
  misc_feature (1)..(211): Xaa is any amino acid
MNDPDPPLSGLSVILVGARFSENVGMTARACANMGCPNLILVAPERWLPGKARPLATPKGEPLLDSIRIADDLDQALADQTMVVGATARIGGWRRNVLTPEEAAAEIAPVLNEREPAALVFGREDRGLSNNELARCSHIVTIPTAGAASLNLAQAVLLVLYACLRAVEKPRLPDPGHLSRRATHAEMEMVYAALREALLDIDWLHPDNPDY

SEQ ID NO: 102811 - protein, 245 aa, Unknown
  Obtained from environmental sample
  misc_feature (1)..(245): Xaa is any amino acid
MPHMPKNVVGLLDLRGVVLPVITLRMRMGLPLKESHAGDMILLLAHQNSRIGVLVDQVESVITATEEQHGQISPLLEGDNGKWINAILLLGDRVILVLEPSALLQMPPEEDPRDDGSGGPEHSGIDVNDIERRMDEGLRNLIAMAGTREEGKIVPILDAVIGHNETEVTKVLDRVEKMLTSTDSAAVGVSKFKQEVAMCGINAFDGVITELEKSVQGVQATIFEVFDQLQFQDIVRQKLEKVLHH

SEQ ID NO: 102812 - protein, 282 aa, Unknown
  Obtained from environmental sample
  DOMAIN (1)...(282): Carboxypeptidase Taq (M32) metallopeptidase
  misc_feature (1)..(282): Xaa is any amino acid
GLLDIYEPGMGEAEISALFSVLRNRLAALLKKIQRCASPDTSFLRQIFPIERQVIFNRKLMDYIGFDCRRGRLDISAHPFTTTLGSDDIRITTRYFPGNLLSGIFSVIHESGHALYEMGFPPELRGSCLADGASMAIHESQSRFWENVIGRSRPFWDGLFPLLRDFFPDQCAGVDTEHFYRAVNEVKPSLIRVDADEVSYSLHVILRFELEQQLIAGALEPEDLPAAWREKTRKYLGLEIETLSPRSDADGVLQDIHWSMGSFGYFPSYVLGSLYGLQFTHK

SEQ ID NO: 102813 - protein, 301 aa, Unknown
  Obtained from environmental sample
  DOMAIN (122)...(266): Type III restriction enzyme, res subunit
  misc_feature (1)..(301): Xaa is any amino acid
VQICAAPTHDDTEEADDDEAAPLTEADIAFFAAMVMRSSQRIPDGSCLFSRIEGGADISDRLNPVVIYRAHPGAAPRVYWQRYFTAERALETVFRGRAAFSAHSFTSEDEERITKRACAFLNMELNKEQREAISLALRKNTLIISGGPGTGKTTTVAAILRALFAAGLSDSQRIVLAAPTGRAAWRMQEALREQSGRMADISQPEREFFAGLSAATIHRLLENTRHGMGFRRSRNYPLTADLLIVDEASMVDAELMLFLLDALPEHCRLILIGDRDQLPSVSAGAVFSSILPELAALSDGA

SEQ ID NO: 102814 - protein, 281 aa, Unknown
  Obtained from environmental sample
  misc_feature (1)..(281): Xaa is any amino acid
MRAFRKSKIPFLQYKHGGLWASPEAEALIAVINALASPDAGDASRALVSPFFDCPFPQLHAALYEQRILQDWRALASERKWAILAARLEEQYFVRARFGSDTEGIDQRDWERKTANMRQLIAISLLAKDAHLLSPQAMALSLRHRAEQARAAREDEDIQPLSSEADRVHIMTMHMAKGLQYPIVFIHGGLGIFRTEDYLEYYAGDGEKQYLPGNAGDEEKRKLAMGYWQAELARLMYVAVTRAMLRVYLLSNVHEEPSVPMYPCLHESLGEISQKDSPLFQ

SEQ ID NO: 102815 - protein, 173 aa, Unknown
  Obtained from environmental sample
  misc_feature (1)..(173): Xaa is any amino acid
LSCSISPGAYKEIDNAIDQSNFHQAIEAIVKKQKNQNAMYSQKNAIMLFLDKGLLEHYAGNYAVSSADLQNAERLIEEAYTKSISEDFLSYIVNDNIKEYPGEDFENIYINVFNALNYYNRNNIEGALVEIRKLSNTNGKLDMISRKYDYKDPKTGSGLNDILNNETGISELP

SEQ ID NO: 102816 - protein, 152 aa, Unknown
  Obtained from environmental sample
  DOMAIN (1)...(130): Leucyl/phenylalanyl-tRNA protein transferase
  misc_feature (1)..(152): Xaa is any amino acid
MRKILNGNIFKITYDENFEEVIRNCAKKKRPNQDGTWITDDIIEAYIELHQLGFVHSAEAWQDGVLVGGCYGLLLGKVFCGESMFANVPNASKAAFLTFAELLFERGLAFIDCQIPTKHLISLGGEEMARNDFLVLLKNNLNFSQRDSHKDH

SEQ ID NO: 102817 - protein, 76 aa, Unknown
  Obtained from environmental sample
  misc_feature (1)..(76): Xaa is any amino acid
MDDNVNFALVTGASSGIGLAISRELARRGHHILMVSNEEEKLARLAGEIRAEYKIKAVPFFMDLALADSAQRSLIT

SEQ ID NO: 102818 - protein, 287 aa, Unknown
  Obtained from environmental sample
  misc_feature (1)..(287): Xaa is any amino acid
IGGALPSDGEVTADLAAKPLYNGIWAMGGGATWTVGVADKNPPVIILDYPETMWISPNNDGKADYLEFPISITDERFITEWVFEIIDENGAVARVYRNKENRPETRNVQNLIEMLRSINSGVDVPESMRWDGTLDIGGIAPDGKYFFTVTAKDDNGNTSTVGPYEVNIDNTDPEITVNAFAGEMNIFAPGSGGGRNTLSIIQTGSQEDLWEGGIYNSSGDKVKTFNFIDSQPAPIVWDGTDDSLSIVSDGVYSYRIAATDKAQNSAEASLANIIVNTVRPIVGLAIT

SEQ ID NO: 102819 - protein, 276 aa, Unknown
  Obtained from environmental sample
  DOMAIN (1)...(98): Elongation factor Tu GTP binding domain
  misc_feature (1)..(276): Xaa is any amino acid
SQVTDVIVLVVAADSMVMPQTVESIELAKMANVPIVVAVTKIDLPTANPDKIMSQLSERGVQVDEWGGSVSCVKISVKTGEGIQKLLETLALESDVLELRANPNASARGAVVESRLDAGKGTIATILVQNGTLRVRDCFVCGNYSGRVRALFNEHGDSLKEAGPSTPCQVLGFNGTPQAGDDLVVVESDQAASEIAAKRQQTAHERALRFKTHMSLEQVYDEAKSGKISELNLVIKTDVAGSCEALAESLTNLSNNEVKIKIVRKGVEQSTTMTCV

SEQ ID NO: 102820 - protein, 219 aa, Unknown
  Obtained from environmental sample
  DOMAIN (37)...(145): HD domain
  misc_feature (1)..(219): Xaa is any amino acid
CNYGKIYIEIYKDVKKYLGKNNINGTELSINFPFRKRSEHIWRVFIWVNRLLEKIDFEKVNKKSILIAALFHDIDYALSIDSKEHAENSVIIFEEYCSKRKDLKNEDIEFIKYLIRNHSKKEIMQDCNIPIELIILMEADLLDETGALSIVWDCMAEGSQDKQSFIKTLEHIKEKSCKILDRNPMVTKVGKEMWEIKQKIVKEFTEQLSYDLCTNDITI

SEQ ID NO: 102821 - protein, 240 aa, Unknown
  Obtained from environmental sample
  misc_feature (1)..(240): Xaa is any amino acid
LDYPGESEFIESVAADFVPAGGGLPLVVSYNGKCFDSQILKNRCLLNRIRPPEYYQADLLHPSRRLWKNILSDCSQATIEVQILGLDRTGDVSGAMAPEIWFSFLREGDNAASRGKLLSICDHNTRDVAGLAVLFLALAQIASDPFKSRGTFRFDEKALALSWWKALKRHPFFFEDNESYTETAFSLLEAAAKNGSSQAAIVLAKDAEWRLRDLKRALHYTNMALVATETASGFRDEIEK

SEQ ID NO: 102822 - protein, 234 aa, Unknown
  Obtained from environmental sample
  DOMAIN (6)...(234): BsuBI/PstI restriction endonuclease C-terminus
  misc_feature (1)..(234): Xaa is any amino acid
MGKLEEAKGILSAIGMPNAQTNDRSAYVLLALADVKDDTKWANAKKPDMRIVDMMNFMAANYEKKYKPNTRETIRKDTIHQFVDGAVAERNTDSTDRPTNSPNFCYCLTDEMLKLIKSYGTRTWQSQLQSFVADKGMLIEKYCQQRDLSRVPVKVNGQEFSLSAGEHNVLQKAIIEEFASRFACGAEVLYIGDTENKDLVKNREILENICVDITDHDKLPDVVLYSAEKGWLYF

SEQ ID NO: 102823 - protein, 274 aa, Unknown
  Obtained from environmental sample
  misc_feature (1)..(274): Xaa is any amino acid
ITVTSTTGTVNTPLTLTGTVAPSDATYNTITSWTVTDAGGTGIAVGSLTGNTVTATAPGTLKVKATVANGTAQGSDFTSTVETSITFTNAFKPVTGITVTSTTGTVNTPLTLTGTVAPSDATYNTITSWTVTDAGGTGIAVGSLTGNTVTATAPGTLKVKATVANGTAQGSDFTSTVETSITFTNAFKPVTGITVTSTTGTVNTPLTLTGTVAPSDATYNTITSWTVTDTGGTGIAVGSLTGNTVTATAPGTLKVKATVANGTAQGSNFTSPVK

SEQ ID NO: 102824 - protein, 294 aa, Unknown
  Obtained from environmental sample
  DOMAIN (2)...(261): Salmonella virulence plasmid 65kDa B protein
  misc_feature (1)..(294): Xaa is any amino acid
MPPGRAGMTPSVAVTYSSEGGNGIMGRGFELSAGGRVSTDTRWGVPRFNGKEEYTGFLDKDEYLLDGVKLKEKSGERTARAIRYKAQKEVGQEKIERVTSDDGGACDYWVVTDRRGTRRTYGKGSTSWGGADGWHKYVWELEEERDAYGNTIRYEYEKADEQVYLKAIRYAGSEKKLGMDAYGVEFEYGGREDVRVDGRGGYASATGKLLTGIVLKYRGAETVRYKAEYRCNMFGASQMARFGQLRYGDDTIYRWSYRFEYEELKGEVFADAVKWAGVSSGIGVQDGKTSGGQG

SEQ ID NO: 102825 - protein, 282 aa, Unknown
  Obtained from environmental sample
  misc_feature (1)..(282): Xaa is any amino acid
TQIMGVLETRNLDFKHVIMLSVNEGMLPKSANDGSFIPYTLRKAFGMTIPEHKTAVYAYYFFRLMQRAEHVALVYNTATEGLNRGEMSRFMLQLMIENGFKIEHRTLSSSAVELQQPRKIDIPQTSEIQTILMEKYGKDTECSGLSPSAINTFLACKLKFYLRYVVGLEAKKPDVSDLDAATIGTWFHRSAEILYREISNQLTFDDQHKLVEFSESLINAEQLEVYKNDSKCEQLVDMAFIYEKHLDDNSCKTIDWTQNPEYSGEELIVRRLLRDNLKRLIA

SEQ ID NO: 102826 - protein, 98 aa, Unknown
  Obtained from environmental sample
  misc_feature (1)..(98): Xaa is any amino acid
MKVFDPELKLTRQSFPLILVHTDYDFTGQLYIQPDIEVKTWVSKIGTKSFTITHEAWQEDRLGVKGNAVVVYYDFNSEQSMPIPEDKRKLLEEHLESK

SEQ ID NO: 102827 - protein, 267 aa, Unknown
  Obtained from environmental sample
  DOMAIN (115)...(191): Helicase conserved C-terminal domain
  misc_feature (1)..(267): Xaa is any amino acid
MLAVDEAHCISQWGQDFRPSYTRIPDFIARLSKRPVVSAFTATATPKVRDDILAQLKLRNPQILVAGFDRKNLYFGARKPKNKYDALTAFLKEREGRSGIVYCGTRSYVEILCKRLRTDGYSVSRYHAGLPDKERHDNQDDFIRDRVKIMIATNAFGMGIDKSNVSFVLHLNMPKDIESYYQEAGRAGRDGEPAECILFYSDRDIRMNAWLLENEKESRYPNRETERLLKERSRERMREMISYSTTKECLRGFILKYFGETPPVTCG

SEQ ID NO: 102828 - protein, 283 aa, Unknown
  Obtained from environmental sample
  DOMAIN (84)...(163): 3-Oxoacyl-[acyl-carrier-protein (ACP)] synthase III
  misc_feature (1)..(283): Xaa is any amino acid
KGLRPNDEWIASHTGIRERRIIKDANTLTADIGYLAAKNAIEKAGISPDEIDGIIAGTMSPDKQFPALACYIQAKLGCGKAFAFDITAACGFIPPALNTAALMIKSGQAKNILVIGAEICSRIMDWSDRNTCVLFGDGAGAILLSAGEENGRGFAGSALAANGNLANILYLNTLGAEAAFLRMEGTAVYKLAVSELATVTKKALENANLSLNDIDLFVPHQANIRIIQSVGKRLGLPDEKVMVNVDKYGNTSSASIPIALYEAEQQGRLKPGMLVAMPAIGGG

SEQ ID NO: 102829 - protein, 233 aa, Unknown
  Obtained from environmental sample
  misc_feature (1)..(233): Xaa is any amino acid
MNVLSLGKVGNFHGHFREPGMLEFKGAVEEAAYYSLVINMMNWKEELDISDIGAARMKIKTFLTAVLKSEPECNVFLMPVLGKNMKPEQLQNFLQNIDDLRIVGFKLFPPGQSTNSGYAPSTEQAGELIDVLSKSNMTLAYHLEDPNASVEDKERSAVENILPQLEKHAGDMRRTIEHVSTEEALKYVLAHPNMYCTITPQHIGLSLEMLESVKPRQEDDAALYLQRHFPAFY

SEQ ID NO: 102830 - protein, 276 aa, Unknown
  Obtained from environmental sample
  DOMAIN (17)...(276): Dihydroorotate dehydrogenase
  misc_feature (1)..(276): Xaa is any amino acid
MNLIQSLKGLSLEQQENLAVEIAGVKLKNPVMNASGTFGLDYKQYEPLDFLGAYVTKSMSLKPREGNAVPRICETPSGMVNSIGLENLGIDHFIAEELPVLYSMLGMKGTKIVVSIFGSSMDEYAEAAGKLNIDGVDMIEVNISCPNVKGNGMAFGVNPDVAHDVTAAVARNTDKPIMPKLTPDAGALIGDVAEAVRTAGAKAISLVNTYAALPLEVNSKGEVVYSVANKNGGLSGPAIMPAALAIVDRVYNRVSFSGVPIVGMGGISTWQDALCF

SEQ ID NO: 102831 - protein, 288 aa, Unknown
  Obtained from environmental sample
  DOMAIN (68)...(288): Amidohydrolase family
  misc_feature (1)..(288): Xaa is any amino acid
DKETLKKLIDVAAGRIQADLVIRNGIVADVYTGRFIEKDIAVSGGLIAALAESGTCEGLETFDATGLYALPGFIDSHIHIESSFLSPGELGRLLLPLGTCTIIADPHEIVNVCGVAGLDYMLAASEDTAMDIKFMAPSCVPATPFEHSGAVLDTKSLAGPLRYENILGLGEFMDYAGVINGDPVILEKILLAKSRDRLIDGHSPGLKGRALNAYAAASIRTDHECSTIEEMEERLSLGMYVMLRQGSASHDLENLIPGITPENSRRSLLCSDDYQPRTIFEKGHINND

SEQ ID NO: 102832 - protein, 292 aa, Unknown
  Obtained from environmental sample
  DOMAIN (112)...(195): Cache domain
  misc_feature (1)..(292): Xaa is any amino acid
DIIGSFYTSSQGWNPKHLPRVMAGEIPPPRSYMYIPPGVDYSRIRAEVELAGNISEMLRQITVVDRGIATTTIAGESGYVIAMDAYPWPWADYDPKLFQWYQTAKDMGDLYWTDLYEDHRGRGPVITCAVPFYDQSRGNRILKGVARSTVLLSDFSRIIGSTEAGKNGRLFILNREGIKIYSSEGAAITVGEGGAVTGDNFLESQNPRQRSLGHSMILGASGMTELEMDGLPVYVAYAPIRTLGWSLGVAVSVQEVSAMAMLIENQIWKITDNTKAGMDRYIFISAGIIALL

SEQ ID NO: 102833 - protein, 240 aa, Unknown
  Obtained from environmental sample
  misc_feature (1)..(240): Xaa is any amino acid
VAVATPDAKAYAIKDSPKKATIFYKAGSIQTAKLESVTANGDDTISTTALTLTFDKAITGLAATDITLSGVSVTKGTLASGAIDGVYNLGVHVNAAGSLTVVVAKDGWDITDGSKTVNVIYVEGSVTETEVQFTALTANGNGTTQRTTALTLTFSQAINDFTADDIAITSENVEGTIVKGELAAGATAGVYTLPISGFTTEGILTVTPSKLDYIFSPEDRDVAVKLSTFDKTVAYKDITV

SEQ ID NO: 102834 - protein, 184 aa, Unknown
  Obtained from environmental sample
  misc_feature (1)..(184): Xaa is any amino acid
MKEIRESYKEIRESQKETDRQMKETDRQMKETDRQMKKTDSELGRLGRRMGEVVEYMVAPNLCEKFREFGFDFSQSNQNTIVSDKKNEISFEIDVFLQNYSKAMLVEVKTKPTTENVREHIERLEKMRKYADLHGDKRTFLGAVAGVVVSDNVKKYILKQGFFAIEPTGDSFTIICPNNKPKEW

SEQ ID NO: 102835 - protein, 279 aa, Unknown
  Obtained from environmental sample
  misc_feature (1)..(279): Xaa is any amino acid
MDIGGHRFFSKDERVMEWWARLLAPQGKPSKDELLLKRFKKYSQDGTDPETNDRVMLMRERVSRIYYRNVFFDYPVSLNWNTIRNMGIVTTIRAGFSYMATIIRKLPEDNLENFYINRFGKVLYSMFFEGYTEKLWGRHPRDISAEWGAQRVKGLSIRAVLKDIISKLFHIKNRKIETTLIEQFYYPKYGPGQLWTIAADEIRRLGGIILNGKSVVRIERDKNNHINKVVCADNSEFPCNVLISSMPVKDLITAMDNLSPDTRQIADGLPYRDFKLWRA

SEQ ID NO: 102836 - protein, 78 aa, Unknown
  Obtained from environmental sample
  misc_feature (1)..(78): Xaa is any amino acid
MDIAEACQFLDGQISDKTVGLPDEIFYFISRVTPLVNTDLLIKDKKGRSLLAWRDDEYCGKGWHIPGSIVRFKESLEH

SEQ ID NO: 102837 - protein, 239 aa, Unknown
  Obtained from environmental sample
  DOMAIN (151)...(174): 4Fe-4S binding domain
  misc_feature (1)..(239): Xaa is any amino acid
VICPLGIFQDCVSNVAGRRKGKNARFSFSPPKTYVRYAILGLFVVAIIFGISAAVSVLDPYAAYGRIASNLFAPIYRLGNNLLALLAESVNSYAFYSTDVWQKGWPTFGVAAVTLIVVGTLAWRNGRTYCNVICPVGAALGFISKVAIFRLMLAPDKCTKCKACERGCKASCIDSEAMAIDGSRCVNCFNCIENCKSGAIKYAREKFAHEKKMPAETNQTNQNGVTRRDLISVVGAMAI

SEQ ID NO: 102838 - protein, 102 aa, Unknown
  Obtained from environmental sample
  misc_feature (1)..(102): Xaa is any amino acid
VATRERDEYAFASIFSDAVYNFRDFDDRLDEFDAIVNTVPAPVLRADKLSKVSKGCFILDLSSKPGGVDFDAAKAMGIKTLHLLGIPGKIAPKSAGEQIKAA

SEQ ID NO: 102839 - protein, 231 aa, Unknown
  Obtained from environmental sample
  misc_feature (1)..(231): Xaa is any amino acid
GNEQTQRIEKADIDFVTSYFSVEFNISFLSAAARDLFELSANAFYSIILAWLSELPIEKEIISFGRGIFAAAQNFNNLDDKRRAAERAADNRADCDTLTVLNTAGKVQIEVHRMQGLLRFSVNEDGEYVARCEPDHFILPCIKEFFTARFGDTPWAIIDEKRGLRLSRKPGERAKINILDKSPENVPCAKNDEWEELWKHYHKTINNEDRKNTDLQRQLMPKRYWKHLPEM

SEQ ID NO: 102840 - protein, 80 aa, Unknown
  Obtained from environmental sample
  misc_feature (1)..(80): Xaa is any amino acid
MENRVAIIGIIVENKESVESLNGILHEYAQYLLGRMGIPYHKKNINIISIAVDAPNETISAISEKISKLDGVSAQVVYSK

SEQ ID NO: 102841 - protein, 97 aa, Unknown
  Obtained from environmental sample
  misc_feature (1)..(97): Xaa is any amino acid
MGQDLREKISVLSGAAKYDASCATSGSDGFKGKGGKKFGTSLPMGVCHSWTQDGRCVSLLKVLFSNVCKYDCAYCVNRASADIKRSSFTVRELAELT

SEQ ID NO: 102842 - protein, 293 aa, Unknown
  Obtained from environmental sample
  misc_feature (1)..(293): Xaa is any amino acid
FSKDQADALSALQAAMARAEKSRKDAQDNQAPNYFPDDWAVAEAVRQNGLDAKKDTITEMKAAAEVFLSAADSYDAIAGQSKQLIAKEKEDANKELQEAMANAEKSRQAAMAVNGQTYFPNDWRDAEAKNTSGKNAKKTTAEEIRAATALFVSASAAYDDIAAKSQQRYARELDDANKALQAAMARADKSRQAAVSADAQTYLPNDWRNAETKNTSAKNAKKTTMDEIKAATALFVSAADAYDDVARKSQQQAAKDKDDANKALLAAIARAEKSRTDAQDANANVNLPADWNN

SEQ ID NO: 102843 - protein, 147 aa, Unknown
  Obtained from environmental sample
  misc_feature (1)..(147): Xaa is any amino acid
VVQLFQAEKRSHSEFSERNIELLKAKLGEMYVFATFRPVVEWFSTLTTAVIISVGAMMILDFSISLGVLIAFINLVGMFYSPVMDIAEKYTLLQSAMAGGERVFQLLDTDERISDNGTHGVEGMVRGHIEFRDVHFSYNKGEEVLSG

SEQ ID NO: 102844 - protein, 66 aa, Unknown
  Obtained from environmental sample
  misc_feature (1)..(66): Xaa is any amino acid
MGKKEAVNVQSKNYNTLISQIGDLLQQGRKQAAYAVNNILVQTYWQIGKYIVEYEQGGSKKSEYGS

SEQ ID NO: 102845 - protein, 113 aa, Unknown
  Obtained from environmental sample
  misc_feature (1)..(113): Xaa is any amino acid
MSKKLPKFAPLTLDFTFKKAFANEQCTELLLFLLNTFLERVLKEPIIDVKVIHTVQLGKTRKKRGAVFDIQCEDASGARFIVEMQVEEQKHFIKRSLFYMCMAVANLAKKGKM

SEQ ID NO: 102846 - protein, 207 aa, Unknown
  Obtained from environmental sample
  misc_feature (1)..(207): Xaa is any amino acid
VVSVQAKAVSPPVTSGISGVQSVGDVSGGSLVDSRDGKRYKVVKIGTQTWMAENLNYNANGSKCYSNQESNCQKYGRLYNWKTAKTACPNGWHLPSDADWNVLMKFVNPSCSDNKDCAGAGTKLKATSGWNKNGNGTDAFGFSALPGGYGGSDGSFSSVGDYGYWWSASEDDSNGAYDRIMYYISEDAGYNYYRGKSSLQSVRCLQD

SEQ ID NO: 102847 - protein, 255 aa, Unknown
  Obtained from environmental sample
  DOMAIN (98)...(204): TonB-dependent Receptor Plug Domain
  misc_feature (1)..(255): Xaa is any amino acid
VPFVNDATALIRALAIALPLAFAAPSQVLPAGGNIHGDSVIVDKDVNTVISGDDAVDAIIAENPSIINLGDSVIMKDDHDDAIVIDGEFEITVKHRAAAALSPSRRIIKVSEFRGKFADLPSALESVSGVDIRSMGGYGQYAESSIRGGTAKGLRVYLDGVPLNSASGGAVDLSKIPLDKIAEIRVTKSVSGLRQMGAGMGGVIELFTYDEEAGRDIVGVNAEAGSFGYLKEGVVIKSNIGNVIHQHDNNKSISS

SEQ ID NO: 102848 - protein, 288 aa, Unknown
  Obtained from environmental sample
  DOMAIN (76)...(193): Phage Mu protein F like protein
  misc_feature (1)..(288): Xaa is any amino acid
ALITPALLLGMDHVSRKLDAADEEIPPLPFEKAISFMKGRIPMIKTEWNALEPKLRFRAFTVARLAQCDYIDTARQILYKAVETGKGIGETYKQWQTLQTLVQDDAMKLRPGYWENVFRTNTQTAYTAGKLMQFKNNPPPAWRLLIVDDSRTSDICRGLMRDGKQSLTMASGHPFWETFGFPPYHFQCRTGLQAVYKSEIEQGAIVENPSMESLSKQFTPMDGFGGNPVDKESWWMMTENMALRAAHYGIFNDVESFAKENGLYNFAMNLVKGKDVERLLELTIWQGR

SEQ ID NO: 102849 - protein, 175 aa, Unknown
  Obtained from environmental sample
  DOMAIN (23)...(133): Beta-ketoacyl synthase, C-terminal domain
  misc_feature (1)..(175): Xaa is any amino acid
EGINLGEGAAFFLLDSEKNSDVEILGAGESADAYHMTAPGTEGTGPAKAMKAALADAELKPGQIGYINLHGTGTELNDKAEALAMKAVFDEMPPISSTKPVTGHTLGAAGALEAAICWSALTEQRGLPVHCWDGVKDEEIPVFPSKEDGQKKPSICMSNSFAFGGCNVSLILGRR

SEQ ID NO: 102850 - protein, 269 aa, Unknown
  Obtained from environmental sample
  misc_feature (1)..(269): Xaa is any amino acid
VEAIALGHDVGHAPFGHTGERFVSAFLKEKKEGCFCHNAQSFRQLHEIEKNDAKEHVNLCIQTLDGILCHNGEWLVEKYIHNPEKTGEMLFAEYQKCLVEEETRNLRSMTVEGCIVRVSDVIAYIGRDIEDSIAVSLINREDIPADICEVLGNTNKQIVNSLVLDIINNSYGKGYIAFSKDVFNALDKLKSWNYKNIYNNPKKMSEDGKIQAMFNYMLNSISTENLCGNIKLQYEKWKNEQNKEYFKENGHARIAADYLSGMTDDFLMS

SEQ ID NO: 102851 - protein, 248 aa, Unknown
  Obtained from environmental sample
  misc_feature (1)..(248): Xaa is any amino acid
DTTQGPFYVTIRAGTPAPGGSGGGGGGSGTFLYSAKGFFLCAGGGGGASGQSLLTPGGAGGAGGVVGPGAGGGSGGFLQQPGGFTAVGSPGGNGGGFGSGSGGLYLSLTSYTSAEDGMQIQLYEPDGDPLVHVTGSTRAQSAAPYLASDLLVPSPTFKHNGGAMQVSKDSSSLFVDPFSIKALKSVIPPEFNKIGGGNGGAAYWYLHGPNPWLNANNAGGAGADAPPLNPPSFPESSLVIDLSAKTPA

SEQ ID NO: 102852 - protein, 268 aa, Unknown
  Obtained from environmental sample
  DOMAIN (31)...(265): NLPA lipoprotein
  misc_feature (1)..(268): Xaa is any amino acid
VGRLLIAGALVLALNHTVEARGNTQSSDSVLSVGATPVPHAELLNLVKDDLAAQGITLKVVEFTDYVQPNVAVLSGDLDANFFQHIPYLDSNEEWKTKMVSAFGVHVEPFGLYSAKYKNIKDLPNGATIAIPNDPSNGGRALLLLQAKGLITLKEGAGLNATPRDVVGNPRNFKFEPLEAAQLPRSLRDVDAATINGNYALEAGLNPLKDSLIIEGADSPYVNIVVVLKGKENDPRIAALKKALLSQKVKDYINGHYNGGVAPIFNTM

SEQ ID NO: 102853 - protein, 262 aa, Unknown
  Obtained from environmental sample
  misc_feature (1)..(262): Xaa is any amino acid
MYEYDERPDLTAGGPSLSDKVISEALGSAAARPPLKAALVEDFCSRLRREIPGWAPEDELTFCEWVKERIAIPADEWEKLLQCLPSELLDAIHEDKSLGGKLEYFGQENSENSVVVHREWAKKWKGENRKKLAEDCLGQWLRYQGPVQISIIANVFALSVNEAREAILLLSEEETLVPDVTVEDIGKDLVCDRENLGMLLRLGRRKRRPEIKEKPAALLVPFIARRQGLIRGTPQTESGRPCERLVGIAAPVKLWETEFFPC

SEQ ID NO: 102854 - protein, 298 aa, Unknown
  Obtained from environmental sample
  misc_feature (1)..(298): Xaa is any amino acid
YNSGRPNPEFIDPETGKILKPPEQAPPSKPGDRYPDPYADEYYRYFKVMVAEHRDRAVIDFRKDLRNSGYAPRNFENRGDYWIFDGFHVRNADDNLGGFRTSGKNLLIRWVKTYFNGDTGLWVSGSSEEPKSMWPTNVRVEYCESFGNADQSRTNADGFACKLTTWENIVFYRCISHHNIDDGWDFFAKKETGPIGANRIEQGISYSNGRYLNNEMGRNYSEADMPVTRNDSAGVGGNGLKMGGEGIPVLHLAVDCLSFGNDGDGVTSNSDPAIRITRVSAYNNYNRVDNNPGSNFSI

SEQ ID NO: 102855 - protein, 70 aa, Unknown
  Obtained from environmental sample
  DOMAIN (1)...(70): Adenylate kinase
  misc_feature (1)..(70): Xaa is any amino acid
AKAIEILGLPHISTGAIFRTAIADKTALGLKVKAIIDSGKLVDDDTTIELVKERLAKDDAQKGYIRTAPA

SEQ ID NO: 102856 - protein, 307 aa, Unknown
  Obtained from environmental sample
  misc_feature (1)..(307): Xaa is any amino acid
GKAHLDDLSIDSRIKYVEDTFKKLTDDININAEGRLRLAETFAVMNEPAKALDQISRAWKRRDEVIRTVSASSEVRTKRELLLAARMSFRLGQYSQAEEFINSILDQWPDSAEGKVAYTEKIKILNELNKFEELNEFIINNPFKIEKNIDFYTLLAKCRWELKNYVDSAEAWDAAFEMSGQNGVYAVNAANAYEMAGEEKEALTRYITAGKIFLNQDNMPELAALMQKLSVLGRNDWEAHALAGKWAFSIEDYDKSAKEFEISHKIRCALRPRPKPDPALYYLWGIVFYIKGKIKTAIRLLRKACAL

SEQ ID NO: 102857 - protein, 273 aa, Unknown
  Obtained from environmental sample
  misc_feature (1)..(273): Xaa is any amino acid
AGKACIFALNETKEAICHISRIILLTLLNAANAIYNACKKITGIVRKIAAKVKGSMHPVSKTDIFILAALLIIILIPIIINLFFKLEAKAKQVNLYLSVNSEELFGKELMETLIREFEEKNLDIQLKFVNNASAPEPDILFFNEGDFGALISANALTELNTFTNYDSGAKQMAIPLVSFMDMLFYNINILSAAGFDHPPKTREEFLTYAKAVSRGSSGAAGYALSLSPKDHQALARDVFSWILASGGSLFSVNEDGVPVLSKTRNKRFAFSEL

SEQ ID NO: 102858 - protein, 280 aa, Unknown
  Obtained from environmental sample
  misc_feature (1)..(280): Xaa is any amino acid
TLLMIMGLAYDSEEGRSVAAALSALLSGEAYAQSARMAAQHGAFARYGENAQNMMRVIRNHRRAVNNAADSEYEGLHTTPKGIDPARCPAYLLDAAKAAWDRAHDLGSAHGYRNAQVTAIAPTGTIGLLMDCDTTGIEPDFALVKFKKLAGGGYFKIINQSVPPALEALGYSPQAIEEIVAYATGRKTLSGSPAINFETLKVKGFTQDAIAAAEEAVKTALNLEGVFNPYILGKAFVENVLKVPEATWSLQGFSLLKHLGYSDQDIEDAELYTCGNMGLE

SEQ ID NO: 102859 - protein, 202 aa, Unknown
  Obtained from environmental sample
  DOMAIN (26)...(202): Domain of unknown function (DUF323)
  misc_feature (1)..(202): Xaa is any amino acid
MVSNSANSGVVTAVFPATAGTTINPSTIEMVYVPGGSYEMGDVKNESYFSHEKPVRTVTLTGFYMGKYQVTQAHYQAVMGSNPSYFSSNPASGEVQGNRPVECVSWYDAIVFCNKLSIAEGLSPAYRISGNTNPSDWGTVPTSSNSTWNAAVIVTGSTGYRLPTEAQWEYAAKGGNGTPGNYTYSGSNTVEDVAWYSSNSNR

SEQ ID NO: 102860 - protein, 252 aa, Unknown
  Obtained from environmental sample
  DOMAIN (181)...(251): Sporulation related domain
  misc_feature (1)..(252): Xaa is any amino acid
GEAREAREARELREIREEREIREARAAREAREARELKEAREVREAREARAAREAKEAKEAKERREAAARTAIAQKEAKTAQTAQPPISANAPENVPKANSQTNQPAINLPSTERPIKDTWPLNLDMFEPTSKAAPSSDLRVSANQSQAIQNQQSAQKQDGRLEPVKPEALKIIPGLPDRHSGKFYKLQIGAFSSQDTANRTADILKNSGFEAEIEYSGAIYRVFASKISSADVHSASVRLGTLGFGQIGLKS

SEQ ID NO: 102861 - protein, 245 aa, Unknown
  Obtained from environmental sample
  DOMAIN (29)...(226): 60Kd inner membrane protein
  misc_feature (1)..(245): Xaa is any amino acid
MANIFYTVIINPIVQIIEFVYVFFFKIFKNAAFSVFGVGLTVSFLSLPLYIMAERWQIIERDIIKRLKPTIKKIKSVFSGDEQFMILSTFYRQNHYHPLYSLRSSIGLIVQIPFFIAAYSYLSNLEALKGVRFFSISDISLPDSLFHIGNITVNILPILMTLINCAAGFVYTHNLSARDKIQVYGMAAIFLILLYNSPAALVLYWTINNIFSLVKNIFYRIKNPLKVLYIILCVVFSLFIFYLLF

SEQ ID NO: 102862 - protein, 169 aa, Unknown
  Obtained from environmental sample
  misc_feature (1)..(169): Xaa is any amino acid
MKRTVFLALALFALMAVGVYAQTDADFVVKKSADGKSITITDYKGSATDVNIPARIQNLPVTKIEMGAFSEIEKITSVRIPSGVTSIGDHAFYRCTSLSIITISSTVTTIGNMAFRDCPKLTNVTFGGGIPASGFDDDAFYKLGDIRDKYLAAGGGAGNYTRPAGGTTW

SEQ ID NO: 102863 - protein, 152 aa, Unknown
  Obtained from environmental sample
  misc_feature (1)..(152): Xaa is any amino acid
MDSMEILKKSDYKRWISELKLRIQRSQIKASVRVNSSLIELYWSIGADIVAKQAEAVWGSGVFAKISNDIREAFPNIKGFSKSNLYYMKQFYLFYNQEKLIFHQVGGKLESKSNLHQVGIKMQSLALIPWRHHVEIISKCKNTKEAFFYIQK

SEQ ID NO: 102864 - protein, 277 aa, Unknown
  Obtained from environmental sample
  DOMAIN (10)...(265): Relaxase/Mobilisation nuclease domain
  misc_feature (1)..(277): Xaa is any amino acid
IPRRIDIKPENDNYRRLALYAADAKTGRPKDSGEKAMYSWCAGCLAEDDYEVAIVEVEATQAMNTRATGPKTYHLMVSFRPEDEAKLTAENLREMEKTIALNLGFQNHQRHIGVHWNTDNLHLHMAYNMIDPVKFTKHQPYFDFHKLSRVCRELEAKYGLAVDRGCEDALTGPKTNVKARTLEAHSGQESLYSYVVRQKEKILSAREASGSWPEFQEALLKLGLEMKLRGHGLTLKDRYGKHQVKPSDINRNLSKNMLETLWGPFQEHPNTTQVTSE

SEQ ID NO: 102865 - protein, 87 aa, Unknown
  Obtained from environmental sample
  misc_feature (1)..(87): Xaa is any amino acid
MKQSEIWSINLDPTVGAEMKKSRPALIINVDSLGKLPLKIIAPITDWKDHYKDNRNIVSKKDYRIKTPCYSVVISPLVFLRAFVIFV

SEQ ID NO: 102866 - protein, 230 aa, Unknown
  Obtained from environmental sample
  misc_feature (1)..(230): Xaa is any amino acid
MTQILLYDKENDKKFLFRKIKPGTGRMLPQSLANSSMDSYSSGFNFRIHTWLDADTVRLDIDIGATRKHAPLTVHLAYNLNSQEVTPMVVSIGISGRRSMYAYKALAPVRGDIAFGGRHIRLKQDSCSGFFCDYKGYFPYRMQTTICSAMGFDEENRRFGFNIAENQNRDTNKNNENALWLNGQLTPLPPVLITTPNGIEADWVIQDVEGMVDLKFTPNEQNKNSMNLIL

SEQ ID NO: 102867 - protein, 82 aa, Unknown
  Obtained from environmental sample
  DOMAIN (8)...(82): L-fucose isomerase, first N-terminal domain
  misc_feature (1)..(82): Xaa is any amino acid
MTKKRLQGDWPKIGIRPTIDGRMGGVRESLESQTMNMAKSVVDLLTATLKYPDGTPVQCVIADTTIGRVAESAACAEKFKRE

SEQ ID NO: 102868 - protein, 60 aa, Unknown
  Obtained from environmental sample
  misc_feature (1)..(60): Xaa is any amino acid
ADEGTYQFYNSPPLSTIRNADLILVLKNGEIIEQGKHRELLDSGGFYAELYNSQFAGREI

SEQ ID NO: 102869 - protein, 188 aa, Unknown
  Obtained from environmental sample
  DOMAIN (8)...(175): Methyltransferase small domain
  misc_feature (1)..(188): Xaa is any amino acid
TAVNMLNSKKTETEIIRVLDLCTGSGVIAVSIKSGMPQAEVWATDICEQALETAKTNAVRLLPPDADIQFYLGDLYNALPDNKLSAIKFSVIISNPPYIPTEEIKTLAAEVQNEPRIALDGGQTGLEIIKRIIEGAPDYLISGGALLLETAGPNQMGKIAALLENRGFKDINIYKDLSGQERVISGIL

SEQ ID NO: 102870 - protein, 290 aa, Unknown
  Obtained from environmental sample
  DOMAIN (43)...(289): Amidohydrolase family
  misc_feature (1)..(290): Xaa is any amino acid
KACPFIENGAVAVDGKLITETGETASLRSRYPGAEYIDAKGRLVMPGFINAHMHYYSTFARGISLGGRPATTFGEVLSGLWWRLDKLLTLDDVYYSCIGPMIDEIRAGVTSVIDHHASPCAVEGSLFKIAEAAKLFGIRSNLCYETSDRDGEKIAQAGIRENIDFAKHCKEQKDDMLGSLFGMHAQMTISEKTLNKCVEAAAGEGIGFHIHAAEGIEDVVDALSKYNLRVIERLHKYGVLSEKSIAVHCVHVTEEEIGLLKDSGVAVVHNPQSNMGNARWGFAGSRHDEE

SEQ ID NO: 102871 - protein, 290 aa, Unknown
  Obtained from environmental sample
  misc_feature (1)..(290): Xaa is any amino acid
AWFLCHAFAKEFGITEKRDFIFNMSAGYSLEGIMSPKIDSFITGLRDARNTAVWKRCYEYLAATIGLFKRFNLNDLGAVSPAVSESITLSTLHGCPREEIEKIAAYLLAEKGLHTYIKCNPTLLGYESARGIVDEMGYHYLSFDDHHFKNDLQFDDAVKMLGRLRAQAAERKLGFGVKITNTFPVQIKRNELPGGEMYMSGRSLFPLSINVAKKLSEAFNGELPISYSGGADFFNLKEILETGIRPVTVATTILKPGGYEKLRQLAELSEKFPAEKLPDGNGPINVKALN

SEQ ID NO: 102872 - protein, 270 aa, Unknown
  Obtained from environmental sample
  DOMAIN (1)...(143): Domain of unknown function DUF21
  misc_feature (1)..(270): Xaa is any amino acid
MEAVDKPNRYLASCRIWISVLRTLAALLAGFYLEHLIYGAHNAGIPFPIAVAAITAALALAILLFSDLAPGIIVRIAPERITVSLLPLFEALILPMRPLLFLARTAGKGLRPMFKTRQSTMTEDELRNALMEGEKSGIVESKERTMVEGVFYLGDRSLGAFMTHRSEIQWLDINDPPQDIRAKVLEFRAQRCFPVADGTLDAIIGAAYLEDIILDIASDQPAGLRSIMKKALFAPETMPALKAFETFRRGETGYIFVMDEYGGFCRHGLA

SEQ ID NO: 102873 - protein, 240 aa, Unknown
  Obtained from environmental sample
  DOMAIN (1)...(231): Domain of unknown function DUF28
  misc_feature (1)..(240): Xaa is any amino acid
ATIKHAKGAADAKRGQIFTKLIKEISIAARMGGGSPDSNPRLRTAILKARGANMPKDNIDRAIKKGTGELEGVSYEELVYEAYAPGGVAIFIEVLTDNKNRAAADIRNILTRAGGQLATSGSVSRLFKRQGVITLDGEKYTEDAVMEAAIEGGAEDVSTSDGIIEVTSAPEDFESVMNALQSKNFETMSAEISMVAEVEVSLENEATAKVLKLVDKLEDNEDVQNVYTNISIPEGYEGDA

SEQ ID NO: 102874 - protein, 276 aa, Unknown
  Obtained from environmental sample
  misc_feature (1)..(276): Xaa is any amino acid
RIRDYYDIAERAPAAEDGKRKIITIESARTTEYFKIEVVDEEYARLTGEVRISLKDGDAVHKITAWNILFNRTRNILTASGGVEYIKTEGEKTETFRGDSITVDIDNWSSVFLGGVSERSLQGDNTTYLFAGTVISRDEEEVTVLNRATISSANNPESHWSLGASRVWLLPGSDFAILNAVLKVGEVPVMYIPFFYYAADEVIFHPVIGSRTREGPFIQTTTYILGRPKATSSTQSSLTKILGNSSDMEKKREGMFLRSTGKKAGGYRQGQLKGDA

SEQ ID NO: 102875 - protein, 289 aa, Unknown
  Obtained from environmental sample
  misc_feature (1)..(289): Xaa is any amino acid
DSWTVKALLEAIAVHSVDFDLSYFAWADCPFLDPQLAGRLAERHLLYAAEYSYADGWPYGLAPELLSPGTAAILAKILGDSDGGPVGRDALFSVIQKDINAFDIETEISTVDLRYHRLNLCADSQRNLLLLRRFIDCAANGIPDTAAVQRIVAEKPEILRTLPAFYPVQVYGGCPQSCVWCPWPQADGASGAVTERRDYMGVQQFESLLEKISAFSGDAVIDLSLWGEVSLHPEKMALIEMTLRRPELALIIETSGIGWKKSELEYSAQLAQKAASVRRKITLPALSWI

SEQ ID NO: 102876 - protein, 271 aa, Unknown
  Obtained from environmental sample
  DOMAIN (4)...(120): Aldehyde oxidase and xanthine dehydrogenase, a/b hammerhead domain
  misc_feature (1)..(271): Xaa is any amino acid
VTGIAEYGADAAVRMPCNTLHLALAQAKVSHAKIKSIDTSEAEKMPGVFKVLTHKDVKGKNRITGLITFPTNKGDGWDRPILNDAKIFQYGDALAIVCADSECHARAAAEKVKVDLELLPEYMNAPDAMAPDAIEIHPGTPNVYFEQSLEKGAETAPFFKSGDMVTAEGDYYTQRQPHLPIEPDVGYGYLNDDGKLVIHSKSIGLHLHGLMIAPGLGLEFDKDLILVQNTTGGTFGYKFSPTMEALVGVAVLATGRPCHLRYNYEQQQQYT

SEQ ID NO: 102877 - protein, 64 aa, Unknown
  Obtained from environmental sample
  misc_feature (1)..(64): Xaa is any amino acid
MDQAKLREIEARCTQEAMPQCRARCPLRMDVRAFMEHLAGGKPQEARKVLERHLPLPEILTRIC

SEQ ID NO: 102878 - protein, 298 aa, Unknown
  Obtained from environmental sample
  DOMAIN (1)...(298): Inorganic H+ pyrophosphatase
  misc_feature (1)..(298): Xaa is any amino acid
NLLRSLLIGTLGSSVLILITVAAMAGFGLITWGIFGSVASGLIVGVIIGQFTEYYTSDIYKPTQSIALQAKLGHATTIIEGISVGMKSTGFPVVCIAVGILLAFGFAGGFGNLSMGLYGVSFAAVGMLSTLGVTLATDAFGPIADNAGGNAEMSGLPPEVRKRTDELDMLGNTTAATGKGFAIGSAALTAIALLAAYIEEVKLWLGKIAASSNGTFKAGTIVFASSEENLANYPFGSELAIRIIDNGNRAINEDGTLMGLVAHNANISDFLVAYNLTLMNPTLLCGLFIGAMMAFLFC

SEQ ID NO: 102879 - protein, 176 aa, Unknown
  Obtained from environmental sample
  DOMAIN (1)...(171): Branched-chain amino acid transport system / permease component
  misc_feature (1)..(176): Xaa is any amino acid
MTISFVGMRQVDFTNPVETTLARMRLFDDFLPIIVLILIAALIIGQLILVKTSFGRQLFAIGNNKTVAQKMGIKVERNIFISYILCGAFAGLSGLISGAQVGGISPTFATGTEFIIISATVLGGVSLFGGKGSDFPGAFLGVLIIMCIENGLVMASANTKMLCHFRFKGSLEYSSC

SEQ ID NO: 102880 - protein, 116 aa, Unknown
  Obtained from environmental sample
  misc_feature (1)..(116): Xaa is any amino acid
VTREPDLTARLGPLTLKNPVLTASGTFGYGLELQDFCPPAALGAVIVKGLSLSPWPGNPGPRMFEIPGGLMNSIGLENMGVEAFVDRALPPLLAAGATVGVNILGRSPEEYGRLAA

SEQ ID NO: 102881 - protein, 284 aa, Unknown
  Obtained from environmental sample
  misc_feature (1)..(284): Xaa is any amino acid
MEYATYDKDGKRILFHNVKGYEDAWRKHHTSSVTRDVCVYDVATGSFKILTPEGSEYRNPVFGDGDEFFFLAERGGAFNVFRGSFGQAQTFKQLTRFEKHPVRFLSRASDGTLCFAFDGDIYTMRGNGEPNKINVRMQIDRRPETERITPINGGITEFDVTPSGKEVVFVVRGEIFASNADGTVTKRITDTPTQERSVWFGPDGRTLVYAAERDGRWGLYTMALTRKEENYFYASTLLKETCILSGEKDVFQPLFSPDGKEVAYLENRTILKVLNLASGKTRTI

SEQ ID NO: 102882 - protein, 114 aa, Unknown
  Obtained from environmental sample
  DOMAIN (5)...(71): 4'-phosphopantetheinyl transferase superfamily
  misc_feature (1)..(114): Xaa is any amino acid
MIIGVGIDIVHIKRMERWLINSKLLERFFHPDELEYVLSLGKRAAQSLAARFAAKEAYGKALGTGLANIKLAEITVINKNNGKPEIRLFGTAQEVFKNSGADKIHISITHEREL

SEQ ID NO: 102883 - protein, 181 aa, Unknown
  Obtained from environmental sample
  misc_feature (1)..(181): Xaa is any amino acid
VSINLRGEADSINPINAGDIEAYISLDKYTEEGTYRIPIQIRKKGNAVGVEPLEISVLPIEISIMLEQKIRRNIPVFPVFSGEVAQGYELTGQSIIPESVTAEGPRSSIEKQYEFNTEIIDFEGRTEDFTVFVQIINKNQSITVYGNKMLEYHGIIRKKEIKIDIPLPDIEDESRDGDDEQ

SEQ ID NO: 102884 - protein, 92 aa, Unknown
  Obtained from environmental sample
  DOMAIN (6)...(66): 2Fe-2S iron-sulfur cluster binding domain
  misc_feature (1)..(92): Xaa is any amino acid
MIKKTIKVNGRIRNLTVDPKETLVNVLRTQLSLTGVKVGCGCGECGACTVLWDGKAVRSCNYLMERIPDGAEIITIEGIGNRENLHPLQLSW

SEQ ID NO: 102885 - protein, 272 aa, Unknown
  Obtained from environmental sample
  misc_feature (1)..(272): Xaa is any amino acid
VEVEISAPSPVSGKIMSVEYRSRHFSASGVEISDPWLSLYTEQGIKMFGFTEITAIKFKDPAIEADLKRALDLIAASRNNNSRDLTINLPGNGSRRASLSYVIPAPVWKVSYRLDLGSGNAKPRFQGWAIVDNDGDVDWDKVELSLVAGRPSSFIQNLYPPYYVYRPTLPLAIAGTAGAVTHDQGYVIAEAPPVPRPESASSARAPKAAADRVMSFFAEPEEDYERQRAPADVIGTTISGAAAAAAGEQFEFTIKTPVSIARQMSAMLPLTD

SEQ ID NO: 102886 - protein, 266 aa, Unknown
  Obtained from environmental sample
  misc_feature (1)..(266): Xaa is any amino acid
MYNLETALKACPNGWHLPRNAEWEKLFSFADSTKKETGKRLKVKNGWSNYEGKSGNGTDNFGFSALPGGRRDLVAGFVDVGSTGSWWSAQESDGLVAYDIWTINSWGDDVFFKRVDKTGLNSVRCVQGDEEVGIKAEAEARAAKEKAEAEAKAAKEKAEAPAKAAKEKAAAEAAAKAKVETEAYVKANGGTFTDTRDKKTYKTIKINGQIWLAENLNYAAENSKCYEDKPENCTKYGRLYNWETAAKSCPAGWHLPKNAEWDKLYR

SEQ ID NO: 102887 - protein, 196 aa, Unknown
  Obtained from environmental sample
  DOMAIN (27)...(102): OB-fold nucleic acid binding domain
  misc_feature (1)..(196): Xaa is any amino acid
MDKTGKLTVSALTELIRETLEGSFPTVVVEGELSNFRPSSTGHLYFTLKDSAASISAIMFRNRIRSLSFEPRDGMLLRVRGSLSIYAQRGTYSIVVEEMERAGEGDILAMLEDRKRKLAAEGLFSEDRKRSIPRFPETVGVVSSPTGAAVRDILNILKRRARGIRVVIFPAPVQGAEAGEIIARRIRQANFWKLVD

SEQ ID NO: 102888 - protein, 230 aa, Unknown
  Obtained from environmental sample
  DOMAIN (71)...(230): DHH family
  misc_feature (1)..(230): Xaa is any amino acid
MKWNKSYLAPDDVKAVAEKYGCDLLTASVLLRRKIRSGDEIRYYLENDLRHLRNPFDLPGMEDAVDRILAAKEEGEKVMVFGDRDVDGITGTVLLTDFLRRSGFDVRWRLPMGDDPYGLSIKAVEEFAADYGTLIITVDCGISNREEIARAAELGVGVVVTDHHNPPENLPEADALIDPKLPGRYPFQQLSGCAVAYKLVSALRFALKSEVYGDPICLLNARPSNDAVII

SEQ ID NO: 102889 - protein, 117 aa, Unknown
  Obtained from environmental sample
  DOMAIN (29)...(61): Ankyrin repeat
  misc_feature (1)..(117): Xaa is any amino acid
IINASYRGDIKSIQEILAAGVDKDVRDDMGATALHEAMLQPNIAVVKLLLDNGFDPNARATKNGYTPLHFAVAANNVAAARLLLQYGADKRIKCLKGMTPLDIAKQSEKGALISLLR

SEQ ID NO: 102890 - protein, 86 aa, Unknown
  Obtained from environmental sample
  misc_feature (1)..(86): Xaa is any amino acid
VRALEGCFAACGGQLAAFRGWTDIFLYPGCEFQVVNGLITNFHLPESSLLILVSAMAGREHVLDAYAEAVKRNYQFYSYGDAMLVV

SEQ ID NO: 102891 - protein, 121 aa, Unknown
  Obtained from environmental sample
  DOMAIN (18)...(121): Pyruvate flavodoxin/ferredoxin oxidoreductase, thiamine diP-binding domain
  misc_feature (1)..(121): Xaa is any amino acid
MKGTPERILTRGNEAVAYGAVDAGCRCYFGYPITPQNEISEMLSSLLPEAGGQFVQAESEIGSINMVLGAGACGIPAMTSSSSPGISLMQEGLSYMACSMLPGVIVNMQRGGPGLGGIGPS

SEQ ID NO: 102892 - protein, 154 aa, Unknown
  Obtained from environmental sample
  misc_feature (1)..(154): Xaa is any amino acid
MKKNWGCYASGSKCYGNDPANCDTYGRLYNWSTAMGIDSRYNSEVWGGSDVNHQGICPSGWHIPSNADWDKLMRYVDGTNGTSSPYDSPTAGRYLKATSGWNSNGNGQDTYGFSALSGGYGGSGGSFYDVGNLGYWWSASENYSGYAYFRYMYY

SEQ ID NO: 102893 - protein, 268 aa, Unknown
  Obtained from environmental sample
  DOMAIN (1)...(144): DEAD/DEAH box helicase
  misc_feature (1)..(268): Xaa is any amino acid
MAFALEHAKQHGKKRIIYVIPYTSIIEQNANVFREIFGEDEIVEHHSNLDDDETTVRARLAAENWDAPVIVTTSVQFFESLFAAKPSRCRKLHNIVNSVVVLDEAQLVPTDYLEPILETMRLLTEHYRVSFVICTATQPVFEKQKEFRDFPGLPEGSIKEIIQDVSGLYKSLERVKVETPQDLSVSVGWKELAEELSQYNQLLCVVSDRKSCRELFALMPKGTYHLSALMCAQHRSDVITEIKEKLEKGENVRVISTQLVEAGVIWIS

SEQ ID NO: 102894 - protein, 113 aa, Unknown
  Obtained from environmental sample
  DOMAIN (1)...(93): Leucyl/phenylalanyl-tRNA protein transferase
  misc_feature (1)..(113): Xaa is any amino acid
LIAAIKNIRRDKPHGVYPTSFALYQNGKLVAGEFGVISGRVYTSYSGFYDESNAGTVQLILTTRYLQEHGFAFFDLGMPLDYKADLGATDVSPQEFVKFFRSNQELEIVIPDM

SEQ ID NO: 102895 - protein, 114 aa, Unknown
  Obtained from environmental sample
  misc_feature (1)..(114): Xaa is any amino acid
MRDRYGITQVTVDTTGSQAGLADICAELRNEFCIAVEGTVRSRPDDMVNPAMATGEIEVLASKITILNRCEVLPFQIDEESTAGEELRLKYRYLDLRSAVMQDRIRLRSEVTFA

SEQ ID NO: 102896 - protein, 95 aa, Unknown
  Obtained from environmental sample
  DOMAIN (58)...(88): PAAR motif
  misc_feature (1)..(95): Xaa is any amino acid
MPAVTRLGDLCTGHDSCPPRPSSEGSPNVFVNGIPAHRQGDGWGPHGCTNHAVHVSVLAAGSGTVFVNGKPLGRVGDPVACGSKVATGSGDVFAG

SEQ ID NO: 102897 - protein, 124 aa, Unknown
  Obtained from environmental sample
  DOMAIN (3)...(124): LytB protein
  misc_feature (1)..(124): Xaa is any amino acid
MKCILAKPRGFCAGVERAILTVEKSIKKFGKPVYVKHEIVHNRFVIDSLRKIGTVFTEDLSEVPEGAVIVFSAHGVSKDVYEKAKKLHLRVIDATCPIVESVHKSAIQYANSGYSIVLIGHQSH

SEQ ID NO: 102898 - protein, 212 aa, Unknown
  Obtained from environmental sample
  DOMAIN (46)...(211): Methyl-accepting chemotaxis protein (MCP) signaling domain
  misc_feature (1)..(212): Xaa is any amino acid
VVYRVKKKNGEYVWLKADGSTLRSATGVPIRVVGSVEDISDRLKKEEALSHFNEFTSMTHTVATMLDTILKATKNLKLAQEQNYNNALNSQKSADETTSIVTAIKDIAFQTNILSLNASIEAARAGQYGRGFAVVADEVRSLADQTASSVAQIETRIKTIQNSSVIMTDDIKNTVDLVNEQTETATEVRKIVDQIEAMYNEMMGFMGNQINI

SEQ ID NO: 102899 - protein, 175 aa, Unknown
  Obtained from environmental sample
  DOMAIN (75)...(108): Tetratricopeptide repeat
  misc_feature (1)..(175): Xaa is any amino acid
MVMMSNVNDFLQQAKILLRAGDLSAAEYFYSRATQIDAKSTAAFLALGTIALRKKNLEQAKVNFRAALLLDNSLIDALLALGAIAMEEGSYQEGLFYYEKALALDAECLTAYNDLCLFYYHATMELDQALFYAEKSIALDPNQIWVSSVLAELEIMRGNWQKGFSSHARNYPFYE

SEQ ID NO: 102900 - protein, 290 aa, Unknown
  Obtained from environmental sample
  DOMAIN (152)...(222): TrkA-C domain
  misc_feature (1)..(290): Xaa is any amino acid
IVGAGYTGTQLARHLIHEKHDVSLIESNEERARHASNRLDCLVLHDEGNNLKSLEAAGIAKADALVCVTESDEINMIICGLAASSYPNVIKIAEVRNDDYMKINSSELRGSGILGIDRFIHSDIEAAKAVLNAISHGAQGNILQFSGTPYELASVNIAKGSVFDGLSLLDFHSFVREEGLITLVERGKECFLPSGSTVLSPGDLIHIITREENMDQVFQLAGKTETPPINRIGIVGGGRLGELIAEELLTNNDISFEAKKTKNNFFMSFIKSFLPKNKRSVIIIRKDYNI

SEQ ID NO: 102901 - protein, 99 aa, Unknown
  Obtained from environmental sample
  misc_feature (1)..(99): Xaa is any amino acid
MVNLAWDAGGAATGAVTVPIILALGLGVVKIGGKSSSSSGLGLVTLASALPVAGVLFLAAAVGPKVPMPSTEAALFFSAEPEQRAKAVYVAGSAEELVK

SEQ ID NO: 102902 - protein, 224 aa, Unknown
  Obtained from environmental sample
  misc_feature (1)..(224): Xaa is any amino acid
MGQCRLGQIISFIRNINIHRKTTYATADSTISDIINKRLFAGFGQFIFPIKNNPNFDPNMRLRNIHSLLPYHNPSCIKTRTTINVINHMLDEANKCKKIFYDFYTDAQKRDDPEKESTGLFFFRGQWKAPFAVICAGGGFNYVGSIHGSFPIALELSKKGYNAFAIEYRIGESQKAIDDLAAALSYIFDNAETLGISTDNYSVWGGSAGAKMADAVASGEIKFE

SEQ ID NO: 102903 - protein, 284 aa, Unknown
  Obtained from environmental sample
  misc_feature (1)..(284): Xaa is any amino acid
HWFINGNDSGVKAQGEKGEKGDTGNDGTGTLGSVIAIGDNGNWFIDGVDTGKKAQGDRGDAGTPGSIITIGANGNWFINDVDTGKKAQGDKGDPGAAGTLNSVLTIGANGNWFIDGVDTGKKAQGEKGDAGTPGTPGSIMSIGANGNWFVDGVDTGKKAQGEKGDTGAQGTGSIITIGANGNWFIDGRDTGKKAQGEKGDKGDSGAAGTLDSVLSIGPNGNWFINGGDTGVKAQGAKGDSGSTITVGPNGNWFFDGIDSGIEAPVTVTFDLNYPGAPAPVLRTL

SEQ ID NO: 102904 - protein, 275 aa, Unknown
  Obtained from environmental sample
  misc_feature (1)..(275): Xaa is any amino acid
MIGDSWADLLKVAGGVVTDGRTAVADVIAVGTAAGDYDGAGTLANPYVPKAATIANATYAVYYDALADGKAIVKSTSGNAVTVTGGKVDFVAGEVKSEGKVAPQTGTFIAAINITDGTQYGVNVGTQKISTNVTKTAKITSEGQALGVYSSGATTCQTTVGEGGILEVKGSVANAGGIKVTGYSKVEFRGNLNVSTADSKAYAIEAATGQIDISGDARVKTEACTDGAIRSTGAPINLNSGFLSANSGILVWAKKNTSTTRAGKVTVATGSHTQD

SEQ ID NO: 102905 - protein, 266 aa, Unknown
  Obtained from environmental sample
  DOMAIN (81)...(266): Branched-chain amino acid transport system / permease component
  misc_feature (1)..(266): Xaa is any amino acid
MSKPNNSFPYSKWQKAGGPPEIQRQDRLTAALYSGLASQAGIIVIALIALLVLVALACILSKTPGRTLFFFFIGPFRNVYSFGNMLNSSVPLIFGGLGVSIAMQAGSLNLGGEGQIYSGAFIATITALPLAFLGLPGGLISILAGAFFAGALAALSGFCKARWNTNELITSFLLSNAIILIVNYLVTGPFHDPETNLQSTKKIAVNLRLPLLLPPSNLNMSLVIALVTAATVYLFLKRTRLGYEFRIAGSNEVFARYGGINTRLNT

SEQ ID NO: 102906 - protein, 289 aa, Unknown
  Obtained from environmental sample
  misc_feature (1)..(289): Xaa is any amino acid
AAEVMGYLDNPSPVSIIDIDDPSGAEVRGYAESVTASKSAKGPAITLKPIKKDNDYLKKLTGKTAKDYQIYLKLREEYIGSPTFYFDMADWFYTHNDRKLALRVLTSIADLDLENASLYRLLGYRMKEYGEYALEKFVCQKVIKWRPMEPQSYRDYANALADNGEEQAALDSLYGLLTTTHQVYIRDGVKDVVITEMNRLIAKNANLNISKIDTNLIINVAVDVRVVINWNMNNTDIDLHVKDPTGEECFFRHRETRIGGLISADITTGYGPEQFLLKKAVKGKYRVYV

SEQ ID NO: 102907 - protein, 183 aa, Unknown
  Obtained from environmental sample
  misc_feature (1)..(183): Xaa is any amino acid
MKRAAVVLALLSFTAAAWGDIFDNPLKQETLESFKKTCAALAAYPVVKGSFEQEKVLNRLNRSLKSSGNFIIASGQGMVWDTVKPFPSALALGKDYLVQSRPGGERTVLSAAGNETFIRMAEVISAVFSGNINGLMENFRVFYSGAPSAWELGLLPLDRAINNFALRIVMKGDSVIKSITVYE

SEQ ID NO: 102908 - protein, 282 aa, Unknown
  Obtained from environmental sample
  DOMAIN (14)...(57): WD40-like Beta Propeller Repeat
  misc_feature (1)..(282): Xaa is any amino acid
IYTTTYERGNWSIPQKFHINGIGATNPVGQPAISPNGKRLLFVSKAPDGKGGNDLWMIERLNHPQTSTPRRAPDVSSDVTLKLATSKRTSKAATKQTAKYNAAPTSSTYKARGKDRRSDTPPMNNSDWTVPVNLGKMINTVADEQYPVWVNDDAFVFSSNGHVGYGGFDFYLAVADSNGEFTDVKHVQAPVNSSFDDYSLAIDPEIGHFFFASSRYLGFGHTDEIYSYPKTASTIELNFKVTDAKTELPLANSTITVCGNDNCLVLSTDSSGRATYAKPKMA

SEQ ID NO: 102909 - protein, 262 aa, Unknown
  Obtained from environmental sample
  DOMAIN (168)...(262): Peptidase family M41
  misc_feature (1)..(262): Xaa is any amino acid
MSGSDFVEMFVGVGASRVRDLFETGKKNAPCILFIDEIDAVGRQRGAGLGGGHDEREQTLNQLLVEMDGFAPNEGVILVAATNRPDVLDKALLRPGRFDRQVVVGLPDLVGREAILRVHLEKRKVPLDKEVNVKDIAKGTPGLAGADLENLVNEAALMAARFGNPTVTQLDFEEARDKLWMGAERKSLLMSEEDRRMTACHEAGHALINLLCKNADPLHKLTIIPRGRALGVTLSLPEKDKVSMSKEAAEDQIAILMAGRLA

SEQ ID NO: 102910 - protein, 283 aa, Unknown
  Obtained from environmental sample
  misc_feature (1)..(283): Xaa is any amino acid
TWREIDQVKYSREEVHFISGGNKLQAFIYGGSNNNGLIVISNGIGSTSDDYLPMIMYFVDKGWRVFCFNNTGVGGSEGESIRGLTQSVIDLDTALIYVKNSGRFNGLPVMLVGHSLGGFAVCAVLNLNQKPNAVVSFAAFNSSKEISEEQGVAMAGNAFYLFTPQTWAIEQQLFGDKVKLTAVDGINRAGIPVMIVHSSDDEIISAKKSSIYAHRSQINNPNAEIVFFDGENASGHERVYGSKKATEYMKLATKSWEAYIAEHGNASKATLAQWAKEFNFDKI

SEQ ID NO: 102911 - protein, 293 aa, Unknown
  Obtained from environmental sample
  DOMAIN (5)...(292): Major Facilitator Superfamily
  misc_feature (1)..(293): Xaa is any amino acid
MSVAFVPIMMKQLYTEFLDSGAAPLFGLPTDVVIALPISVEMLFFGIALLAGGMLITKFGWRPLQVIGIALALAGLLLSGRSADVYLFLISRAVVGFGAGFVLLASRKIINMEKDPVMKSGAYANFYSGTLAGITVGAVFGGFFADHLGFSAVFYIAFCFGLIAFAFAYLILIRNKDIANRTERSVSEKIQIASVFRFLCNIKIISYFLLIILPTYAAGMFLQYYLPLFAESEGLALSNIGRLFMLHGLIIIYLGPAVSLLAKKSFKNERRALLVGSLGWALSLIIFAVTGNT

SEQ ID NO: 102912 - protein, 166 aa, Unknown
  Obtained from environmental sample
  misc_feature (1)..(166): Xaa is any amino acid
MEKRETAARDFSGIFSTLYEEVSGISNITVRYIPSWKTDDIPSHLQERRATEIAAGLSLSGPHRDRYQFTHNGSDFTVKASTGQRRLLALLLRTAQALRYSQETRLNPILLLDDVLLEMDGEKRRKFLSALPSYDQAFYTFLPEEPYQRYKKVDTLIYNVKEGKLF

SEQ ID NO: 102913 - protein, 230 aa, Unknown
  Obtained from environmental sample
  DOMAIN (1)...(87): RNA polymerase Rpb1, domain 2
  misc_feature (1)..(230): Xaa is any amino acid
MVERESEEVWGVLEEVVREHPVLLNRAPTLHRLGIQAFEPVLVDTKAIKLHPLVCHAFNADFDGDQMAVHVPLSPEAQIECWVLMLSSKNLLNPANGQPIVGPTQDMVLGICYLTKEDSRLAKARKLPFANFQEVMIALEFRDVHLQEPIKVRYNDGYLITTPGRIIFNELLPDDYVFVNYELRKKEISTIIADVFNKYGAARLVAILDDIKDLGFRYATLFGVTIGVDD

SEQ ID NO: 102914 - protein, 254 aa, Unknown
  Obtained from environmental sample
  misc_feature (1)..(254): Xaa is any amino acid
MATKKFAPMLASNPAFAPIFNGVRNNMASSLNSIPITYPSTDTFDYFQAGLRYTTTIGSVDIGGQYFYGNLFRPSFTIAGVDAFLDDLLKGILSPNPPLPYNPFYQGKPTLISPQIKYTRYHQIGIDYAQVLFSLNVRAEAALHLTEDIKGDDGSLQNPFIGWSFGFDRDLFLGINLNLQCNETIRLFNDKIGDNPILDAEAGTNAVSTRLTMQLSKKFFKDNLETKATAIWDIENSDFYIIPAIVYTIGSLTT

SEQ ID NO: 102915 - protein, 284 aa, Unknown
  Obtained from environmental sample
  DOMAIN (67)...(125): Collagen triple helix repeat (20 copies)
  misc_feature (1)..(284): Xaa is any amino acid
GLNVWTTTSQILNQSAEQSVSPTAVSGITPKVGDLVISSNSNTLGFYGQITRVSATPTYYVTYISSLRGATGATGAQGPTGAAGATGATGAQGPTGATGATGATGATGAEGLNIYSTSTTLATSGTTSNIAITAISGRTIKVGDLVVSAAGVVHRLTTVSGTNYTGTYALTLSTGGGNSIPAPTTGYQVFQSRYSAGSMIATGWDKLPLNSHTEGILDIYHGGTGAETGAVVNAITTYQGSGANFNNIRESGVYKVYASTSYSSSSTNAPASPGSSSVTGGWTF

SEQ ID NO: 102916 - protein, 270 aa, Unknown
  Obtained from environmental sample
  DOMAIN (44)...(145): Divergent AAA domain
  misc_feature (1)..(270): Xaa is any amino acid
MNPDKKYLVDMIKELCTLPCETEWVEFKHNNVDPNEIGERISALSNSAAIQGRDYAYLVWGVEDISHQIVGTSFVPSCSKVGNEELQNWLLRLLSPKIELTFHAFEVDDNPVVLLEIQAASNSPVSFRRQEYIRIGTYTKKLEEFPGKERVLWRVFDRTPFERGIAVKNLSDEEVLSRLDYSVYFDLLNLPLPDGRGAILEALESDTLISRCETGKWNIFRLGALLFAKQFNDFPDLKRKAIRVIQYKGHDRIETFKEQVGGKGYASGLK

SEQ ID NO: 102917 - protein, 251 aa, Unknown
  Obtained from environmental sample
  DOMAIN (30)...(63): Tetratricopeptide repeat
  misc_feature (1)..(251): Xaa is any amino acid
MGEYAKTERYYLEAAAILEKALGKEHRDYAASLHNLGVLYDQMSDYAKAERYYFEAAAIKEKALGKEHPDYATSLHNLGVVYEEMGDYAKAERYKLEAAAIIEKALGKEHPDYATSAVGLGVLYEKMGDYAKAKRYYLEATAILEKALGKEHPDYALSLNNLGILYCNIGDYAQAERYYLEATAINEKALGKEHPSYAVSLNSLGELYRNIGDYAKAEPYYQEAKTVFEKALGKNHPWYAASLNNLGELYQ

SEQ ID NO: 102918 - protein, 248 aa, Unknown
  Obtained from environmental sample
  misc_feature (1)..(248): Xaa is any amino acid
ALEQELEGVSTIYYSPSALLHKIAFGALPTGDDEEIDYENFDFESEDKGANRLADKYDLNLVSSTREVARLPRGQTEAAPSSAVLYGELDYNADPEAMREAAQPYRRDDGEATIISGLPEWLLHDWKWEILKATREEALGVQGYLERKQVPNIVYLGSAGNEESFKALSGRKTGLIYLATHGFFQPDAERKHEEREREQTRRGSVLKASENPLLRSGLVLAGGNNAWTNQPVEGVESGILTADKIAGI

SEQ ID NO: 102919 - protein, 154 aa, Unknown
  Obtained from environmental sample
  DOMAIN (3)...(154): Uncharacterized protein family UPF0007
  misc_feature (1)..(154): Xaa is any amino acid
LRIGAIITAGGLGKRASGEVPKQLVKLGGKAMWLHSVETFLNNKEIKAVVLTVPENWQSHFAEEAKSLSVIVAIGGKERWQSVKNGIEALPENISHVMVHDAARPFVSDEIINSVAASIETDCCMVAKPAFDTVKIAENGYVKNTLDRKTGVAC

SEQ ID NO: 102920 - protein, 263 aa, Unknown
  Obtained from environmental sample
  misc_feature (1)..(263): Xaa is any amino acid
MEISSGSYVIRFLNGGTEVLKGNAVLYFNRRPMYAFIKTALSITEFYDAPYNEITENGGCVTAKGVLKTPTGSELAFHDTYEPARTGFKVCRTVTVLKNISDYGFASKIAFVMAASDDICDYDCFAPANWYRQNEFAKPHVMGYDKNCEYFWRREVNYTLPLFAAQNKANGETVMLSRWAADVTMRDNNFVQSEHIVDRKFSIGSIGISKPESKTINYLYYGFPLRKEINTIRDGLTIDYVYPGVDGQMPRMGQGYNVDYMMQ

SEQ ID NO: 102921 - protein, 111 aa, Unknown
  Obtained from environmental sample
  misc_feature (1)..(111): Xaa is any amino acid
MTGTTKIFIHPKFVIGGISPRLYGAFLEPIGTMVNGSMYNPKHPTADAKGFRRDYMDALKESGVPVIRLPGGNFVSGWSWKDSIGPMEKRKTQLTPPGFSITQTRVGLDEY

SEQ ID NO: 102922 - protein, 180 aa, Unknown
  Obtained from environmental sample
  DOMAIN (8)...(121): Homoserine dehydrogenase, NAD binding domain
  misc_feature (1)..(180): Xaa is any amino acid
MQRIGVVGIGNISKIYLDNLTGMFGKRVKLTAVMNTAFEKAQKAAEDYNVKAFKTLDEILKSADVDILLNLTPPKQHYEIALAAVKAGKHVYNEKPICIKRKEAAQLLKTAAKKGVRVGSAPDTFLGAGIQTCKKLIDDGKIGTPVAANAFMMSHGPEDWHPSPHFFYKDGGGPLFDVGP

SEQ ID NO: 102923 - protein, 104 aa, Unknown
  Obtained from environmental sample
  misc_feature (1)..(104): Xaa is any amino acid
MWFGKLSNKPLADLAGEAVRTTDNFNWTFIAILAVVVYIYATEFQRKNFKGIAAGLALYMVHWFYEIMNAVICSATGYALWTVSPQSTSFIILIGVSWELSMMF

SEQ ID NO: 102924 - protein, 78 aa, Unknown
  Obtained from environmental sample
  DOMAIN (6)...(51): SpoVT / AbrB like domain
  misc_feature (1)..(78): Xaa is any amino acid
MEAVMKKWGNSLGVRIPNLIVRELSLKDGSSVDITDKGKVIIIKPIEKNKLSEMLSNITEQNIHKEIETGGPVGKEIW

SEQ ID NO: 102925 - protein, 95 aa, Unknown
  Obtained from environmental sample
  misc_feature (1)..(95): Xaa is any amino acid
KVQTADETILPGGTAVISDAGRTGSAESVGGCEIASRVQEYISGIPDWTKDAWDQPVIQGVCLDIGADGKATSIERIRIAVDAPTHAETKEEEEE

SEQ ID NO: 102926 - protein, 278 aa, Unknown
  Obtained from environmental sample
  misc_feature (1)..(278): Xaa is any amino acid
MGGKAETDVIRSGSDEAGVSAVISIGRNGADVTEWLRSHDISCDEDTVIVRRNVKTNGRSSIFIQDTPVTRADLSGFMSLLFDLHGQHDHGSLLKKENHRVYLDRYAGIEDEVAAYNKIFLELADKRKALDASFSSQKERESRLELLRYAADEIRAASLRSGEMKELENEAQILSDFEKLATHANGAAGFLFDGEGSVLDSARKARSAMDSAVNIDSSLAGLQKRLEDLYYEAEDIAGEFRHYRDNLNFDPQRQQEVDERLALLYKLNQKYGTPVSKN

SEQ ID NO: 102927 - protein, 163 aa, Unknown
  Obtained from environmental sample
  misc_feature (1)..(163): Xaa is any amino acid
KEPKAFFLEPAEPGAANILHGLESYEKNLEIMGGSPIKKSKAGVETAEAARIHQAGENSVLGSFSLNESEVLTQAIRFGARWRGVPEAITEKFSYKLNLDYEGELSVPDEKNIAMREVDNDLMSSFRYLTDIEGLSEDEAKAEIQRINEKKTVDVYNLGGEND

SEQ ID NO: 102928 - protein, 206 aa, Unknown
  Obtained from environmental sample
  DOMAIN (1)...(206): Quinolinate synthetase A protein
  misc_feature (1)..(206): Xaa is any amino acid
KANAEVILFCGVRFMAETAKILNPRAKVLLPDKKASCSLVDECRAVDFRDWLTSHKDAIVVSYVNCSAVVKSLSHIICTSANAVRVVESLPADKEIVFAPDQNLGRWVQAKTGRKLTLYPGSCEVHVGFRPQAIETLRAQRPAAKLVAHPECDPAVVSLSDFAGSTSAMLDFVAKDGAQEFLVATEVGIIHQMLKLRPDAEFVPVP

SEQ ID NO: 102929 - protein, 164 aa, Unknown
  Obtained from environmental sample
  DOMAIN (13)...(164): haloacid dehalogenase-like hydrolase
  misc_feature (1)..(164): Xaa is any amino acid
MLNLPKPCNIKALAFDLDGTILAPDAVLSERTINVVNKCVKRGVKIIIATGRAIESAEPFRTSLGADGPMVYYNGAVIAEMPESRILRTTLLDKKKAEICVDISREMGVYCQIYLFNEKRIPLLAERDRPEKEMYHKHTGILAELVDLKEAIGRTEAPGCVKSC

SEQ ID NO: 102930 - protein, 252 aa, Unknown
  Obtained from environmental sample
  DOMAIN (4)...(250): BadF/BadG/BcrA/BcrD ATPase family
  misc_feature (1)..(252): Xaa is any amino acid
MLSIGINIGSTSLKMALYEYEGTPESGKTVWSASVPHEGDFVAAVHRLLAEGKIPAGVPALVTGNEGRFMFDVSGTVEPLCVEAALRSLGLKADAVVSMGGEDLIVYSLDPDGKIINNFSGNKCASGTGEFLKQQLARMDMTIGDIEKVPDTATVYPLSTRCSVFMKSDCTHRLNKREATKDDIVLSLSDVMAVKVIDFLKRAKVTSGRVVLTGGITLNRHIIRFIRQKAPEIEFIIPHTAPVFEALGAAIL

SEQ ID NO: 102931 - protein, 149 aa, Unknown
  Obtained from environmental sample
  DOMAIN (9)...(149): Type I restriction enzyme R protein N terminus (HSDR_N)
  misc_feature (1)..(149): Xaa is any amino acid
MYTYRSKGKLVEDDLEKAIIALFCKQGYKHVEGKTIHRKLDDVLLEDDLRAFLSRRYPDLLDVEAEKIVSRLKNISVAPLYAGSRESFRLLNEGFPLTREGQGKTATHIGYIDFDNLENNSFKVVSQFEVQGDILRRPDLLLFVNGIPV

SEQ ID NO: 102932 - protein, 294 aa, Unknown
  Obtained from environmental sample
  misc_feature (1)..(294): Xaa is any amino acid
RKAEDESSLTEEALAKLEPLEKIKLVATQGANDEKELFDLCGPKTYRKMLDDQFKDTDSNFKVAIVVDMWITGFDVPSLAVMYIDKPLHRHNLIQTISRVNRVFEGKDRGLVVDYIGFRKDMLEALKTYAGGQKSPGDNPPVEESIITLGVVRNHLDMLGALMHGFDDEKFFYGSPLERLECLNNAVEFVQRSKETLNRFMDLSLKLKAAYDICCPSGELTDAEMTTAQFYLAIRAQIYKQTKGDSPDAYVMNSVVEKMVQEAITCYEIENVINMDKQLDIFSDKVLAELKNIR

SEQ ID NO: 102933 - protein, 170 aa, Unknown
  Obtained from environmental sample
  misc_feature (1)..(170): Xaa is any amino acid
MKKILYDHQIFSGKIGGISRYFYELIKNSSDLYLTEVSGVFFENAYLKSLEGFNKEFPLKANFKGKGRIISILNTKNSLHKIAASNYDILHPTYYSLYCLDKIHSPLVITVHDMIHEIFTHYFHTSMETLKNKRILMEKADKIIAISQNTKEDILKIYPEIDPGKNRVIY

SEQ ID NO: 102934 - protein, 177 aa, Unknown
  Obtained from environmental sample
  misc_feature (1)..(177): Xaa is any amino acid
VDFASWLTGQPENDLNSVYQVKLNVNDLGRGRDDAGSVGYILKNNDKKLIRLDLSGSTFTVIEEKAFNSCDNLAGVTLGNSVKRIEEYAFYRCEGLTVIYIPANIEFIDEFAFDSCINLAAINVAPDNSTYSSEGGVLFNKDKTILFNCPEGKTGSFSIPNTVNKIEPYAFFNCAKL

SEQ ID NO: 102935 - protein, 272 aa, Unknown
  Obtained from environmental sample
  misc_feature (1)..(272): Xaa is any amino acid
CFFPATTIGRMDYVNVMYPTSDYYDEGYPPERYPNERYPRGGHEYPEEEIPAPRDERRHGPGTIRTARIALLIVSVALWALGLATTNTSSLGLYGLPGSLSIFFYAGLALLIASAGLELAARELSSFRLGLHAAVLALMLYGTGAIVYPEGRYSWLYKTIGVVQYIDTNGHVTKGIDIYQAWPGFFALAGWFDHVAGVGTPMDYAKWAQLIFELAALPLLYSIYDSLALPVRHRWLALFLYLGGNWIAQDYFSPQALSTLLSLGIMALALRW

SEQ ID NO: 102936 - protein, 85 aa, Unknown
  Obtained from environmental sample
  misc_feature (1)..(85): Xaa is any amino acid
MPSTRFSVVICAYTEDRLAQIFEAVDSVRAQDRDAEIILVVDHNPALHAKLLSGLPGITITENAEAPGLSGARNTGVALAQGEIV

SEQ ID NO: 102937 - protein, 219 aa, Unknown
  Obtained from environmental sample
  DOMAIN (6)...(152): Respiratory-chain NADH dehydrogenase 24 Kd subunit
  misc_feature (1)..(219): Xaa is any amino acid
MSNLPHVVKQVIEKYSGERENLLDIIRDIQTELGCVSDEAIAGIAGQLEISALDVEGVVTYYHFFSKTPTGKYAVYLNNSAIANMKGREQVAAVFEEKAGTKFGTVSPDGLIGLYNTACIGMSDQEPAALINGVVFTNLNAEKTADIVAGMKAGKKVTELIKDYGDGQNQTDLIKSMVRNNIMEEGPVILAPFERGAALNKAIAMKPDEVINELKKSML

SEQ ID NO: 102938 - protein, 77 aa, Unknown
  Obtained from environmental sample
  DOMAIN (11)...(73): 2Fe-2S iron-sulfur cluster binding domain
  misc_feature (1)..(77): Xaa is any amino acid
MNIDMEATITFNIDGKVCTAKPGQTVLQAALDNGVYIPNLCHYERLKPAGACRLCSVKSAGRYMAACHTPVSAGMMI

SEQ ID NO: 102939 - protein, 206 aa, Unknown
  Obtained from environmental sample
  misc_feature (1)..(206): Xaa is any amino acid
EIGTEQSRGTKLLSISGDCKKPGVYELPFGVAVSEILKKAGAKKAAGVQVGGPSGTCISPSEFERKICYNDLSTGGSIIIFGADTDILEAVGNFMDFFVAESCGWCTPCSVGTTILTNKLKKIIRGNGTQSDLTEIESWCKTVKNLSRCGLGTSSANPILSTLKNFRHLYENRLKKDIDYCSEFDLASSVKESCLVVGRKPETGEH

SEQ ID NO: 102940 - protein, 95 aa, Unknown
  Obtained from environmental sample
  misc_feature (1)..(95): Xaa is any amino acid
MILAPIFFIEYMLLKNFQKELAGYMIWLVALLWIIAIAAELSDMFDGMAARHYNLTSDFGRLFDPFADTIMQITAFLCFVIDGILPAFLFIIVLY

SEQ ID NO: 102941 - protein, 292 aa, Unknown
  Obtained from environmental sample
  misc_feature (1)..(292): Xaa is any amino acid
RPATPLEHMPEALITPELCLAAVQHTGGWVLTYVPEAFRTPELCLVAVQENGNALEHVPEALRTPEICRAAVQRHGGALEYVPKALRTPEICRAAVQKDGRALKYVPRSLKNPELCHTAVQNDGETLRFVPKALKTPELCLAAVRHNRGGWVLQYVPEALRTPEICRAAVQKDGRALKYVPEAFKTPELCHAAVQKDATALEYVPEALTTLCLTAAPHEHKDYWGWLGDVPEDLATPELCLTAVQQHAGALELVPDELMPTLFIMGFEGPAAVAERLERSYDAGEQRLYCAL

SEQ ID NO: 102942 - protein, 248 aa, Unknown
  Obtained from environmental sample
  DOMAIN (58)...(193): ThiF family
  misc_feature (1)..(248): Xaa is any amino acid
MQKYCGCIFSEEESFKKKKDKKQSKNTNETARTLSVNDEHIFHRLELITGKEGLEKLKNTKVLVFGLGGVGSWAAEALVRSGIGKIGIIDSDAVCASNVNRQLEATTLSIGQPKAQALKKRLLEINPDCDITAHDELFCLENKDLFDIVSADYVIDAIDSLKHKLDLIETVCNANVTLFSSMGMALKIDPSMIKTDRFWKTTDCPLARLVRQGLRKRGFSSDFTVVYSAEKPVRAKNTPAEAPSSEPS

SEQ ID NO: 102943 - protein, 224 aa, Unknown
  Obtained from environmental sample
  DOMAIN (71)...(224): E1-E2 ATPase
  misc_feature (1)..(224): Xaa is any amino acid
MNHLHQGLTDAQALESRKKFGINVLTPPKREPIWKLFLKKFNDPTIRILLMAAVLSLGISFVHWDFAETIGIIAAIILATGISFWFEYDAGKKFDVLNQINDTTAVKVVRNGSITEVPKNEVVVGDIVLLEVGEEVPADGEILECISLCIDESTLTGEQLCHKTADPAHFDREATYPGNHALRGTRVTDGHGIIRIFAVGDATEYGKVAEKSTEITSEGTPLGK

SEQ ID NO: 102944 - protein, 279 aa, Unknown
  Obtained from environmental sample
  misc_feature (1)..(279): Xaa is any amino acid
KIDECVRAADTGDYAIKDSSFSRIPDGTGDFYFTPEPTMNGLNDEYGILITLIELNGFYKKLPVDPPVISGLGRTPSSVTPTNTVTVYATVTPTTASAITTVVLKWKLGGDAKPDINMTKGSGNVYSAEIPAQAVDAVVAYQVSATNARGETNSSVEQDYKVADAIVDYTKLVLTEVSGNHKFVEIYNSGDVDIPMKDVKLQRNDGQSQWVGKTSDSIPAGAYRLFLFNNASENLEGKAEFVGWWVASGISSGQILKVAIVDPAGNPVSVFIRGAVPLP

SEQ ID NO: 102945 - protein, 279 aa, Unknown
  Obtained from environmental sample
  DOMAIN (1)...(275): Pyruvate phosphate dikinase, PEP/pyruvate binding domain
  misc_feature (1)..(279): Xaa is any amino acid
MPGIMDTILNLGLNDTTVEVLKAKSNNGRFAYDSYRHFIQTYSRLVLHIERTSENEYDPFERIITEIRNKKGIIYDHQLTEEDLKSIIEKFKKLILKETGKAFPSDPYKQLKGAIEAAFASWMNERAIIYRRKYKIKEEWGVAINVQSMVFGNLGDNSGTGISFTRNPVTGENEFYGEFLVNAQGEDVIAGIRTPLKISAMATTPRLEHCYKELCIVRKQLEKEFGDMQDFEFTIEDGRLYILQTRNGKRTARAYFKIVRDMVNQGLMTPEHAIANVDP

SEQ ID NO: 102946 - protein, 74 aa, Unknown
  Obtained from environmental sample
  misc_feature (1)..(74): Xaa is any amino acid
MEMAIQGGRKTRPDIKFGMCGEHGGDPASIEFCHNLGLDYVSCSPFRLPIARIAAAKAAVKAMKEMTIPVKKKL

SEQ ID NO: 102947 - protein, 287 aa, Unknown
  Obtained from environmental sample
  DOMAIN (180)...(287): SIS domain
  misc_feature (1)..(287): Xaa is any amino acid
SVIDKLDVSKFTKIIITACGSAYNAGVTGKYVFERLCRFPSVETELASEFRYRDAVINDKTLVILISQSGETADTIAALREAKSKGAVTLSIVNVVGSTIAKEADYCMFTSAGPEIAVATTKAFSAQLVLLYVLAIWFAVKLGKLSKEEEQKLTAEINALPEKTEQILKRIDSIQMYASTAVVYKSIFFIGRNIDYAISLEGSLKLKEISYIHSEAYAGGELKHGTISLIEEDTLVVALSNCDSLYGKIMSNVEQVISRGGKVLLIGSCPADNLKADKNFEDKLYTI

SEQ ID NO: 102948 - protein, 61 aa, Unknown
  Obtained from environmental sample
  DOMAIN (2)...(61): Domain of unknown function (DUF1738)
  misc_feature (1)..(61): Xaa is any amino acid
MSNAIYQLVTDTILKKLAQGVIPWKRPWDAPMPQNIRGNEYRGINPILLGTAPFKSPFWLT

SEQ ID NO: 102949 - protein, 238 aa, Unknown
  Obtained from environmental sample
  DOMAIN (1)...(238): Glutamine amidotransferases class-II
  misc_feature (1)..(238): Xaa is any amino acid
IGGKKSHDIIRQGLEILNNLDHRGAVGADPLQGDGAGILIQIPDALYREDMARQGITLPPPGEYGVAMVFLPQEPATRLACEEELERAVRDEGQIVLGWRDVPIDREMPMSPTVKATEPVIRQLFVRRSPDVMVTEALERKLYIARRRSANAIHALGLKHGNSYYMPSFSARTVLYKGLLLAPQVGRYYRDLADPRAISALALVHQRFSTNTFPRWNLAQPFRYIAHNGEINTVRGNY

SEQ ID NO: 102950 - protein, 269 aa, Unknown
  Obtained from environmental sample
  DOMAIN (114)...(262): DNA methylase
  misc_feature (1)..(269): Xaa is any amino acid
MPDKMKFETKDLTAEKAAMIAKLSGLFPGVIVEGKVNFDLLRSLLGDDVFGDEVYEFTWVGKREAIAEAGRPIRKTLRPCLEESKDWDTTENLYIEGDNLDVLKLLQESYLGKVKMIYIDPPYNTGNDFIYRNKWTMDSDRWSEEIRKYDEDTGDMLLRNTESNGRFHSDWCSMIYPRLVLGRNLLCDDGVIFISIDDNEQENLKKICNEIFGESNYISQVVWQKFHSVKSNALNNISNSHEYVLIYAKDVSAANFSKIPMDGEALKVY

SEQ ID NO: 102951 - protein, 305 aa, Unknown
  Obtained from environmental sample
  misc_feature (1)..(305): Xaa is any amino acid
MTNNVSGPELLDNVSKTVKDDLAATISSGDRLSVAAACFSIYAYQVLKKQLDGIAELRFIFTSPAFLKEETPKTKREFYIPRLDRERSLYGTDFEVKLRNELTQKAIARECAEWIKKKVQFRSNTTGGNISEFMNVANAETAVAYAPIRGFTTADMGCERGNNIINPVIKVFSPQSDEYVRLFDQVWNDKMLLQDVTETVLDGITAAYNENSPEFIYFVAVYNIFNEFLEDISEDVLPNDATGFKESKIWRMLYRFQYDAALAIINKLELYNGCILADSVGLGKTFTALAVIKYYENRNRSVLVL

SEQ ID NO: 102952 - protein, 298 aa, Unknown
  Obtained from environmental sample
  misc_feature (1)..(298): Xaa is any amino acid
SGIEHFTALKTLICNNNRLTTLDVSRNTALTTLDCWKSQLTTLDVSKNTALTSLNCGANGLTTLDVSKNTALTKLEVLANELTALDVSKNTALMSLNCGENQLTTLDVSKNIALRTLDCHSNKLTTLDVSKNTALTSLACHRTRLTTLDVSENTALTYLSCSYIYMGLTTLDVSKNTALTSLYCGGNQLTTLDVSKNTALTYLDCGGNQLTTLDVSKNTALTYLDCGENQLTTLDVSKNTALKELYCRKNQLTALDVSKNTSLANLFCSSNQLTILDVSNKTLENLFCDSNQLITLNI

SEQ ID NO: 102953 - protein, 221 aa, Unknown
  Obtained from environmental sample
  DOMAIN (37)...(79): LysM domain
  misc_feature (1)..(221): Xaa is any amino acid
KFRPEEDTLISTNNIKNTRLIQIGQTLRIPNQDGILYTVKKGDTLDEVAKKYGSDAEAIRFANELFTDEAQPGTVVFIPGAKLDWMERQEINGDLFIWPTAGYITSPYGYRKWPFGGNVRQFHSGIDIGAPWGSSVRAAMSGRVSAVGWDDVLGNYAVISHHSGYRTMYGHMSVVKVKSGAYVGTGERIGDVGSTGLSTGPHLHFTVYKNGVTVNPRNLMK

SEQ ID NO: 102954 - protein, 266 aa, Unknown
  Obtained from environmental sample
  misc_feature (1)..(266): Xaa is any amino acid
CYSTGKVSDNTRPGVTTAGGLVCYGTPSKVTNSYWDTETSTQPTSPGGGTGKSTAQMKIQSTYVGWNFDTVWTIRENVSYPTLRGLGGTGTNPSGTFTLRYRAAAGGYIALGDTVQTVEYGSHGSRVVAMPDDGYEFTMWSDGFSNFVRTDSNVTSNKTVTATFCAAANIKSLTYRAGPGGTISGPADQKVCGASNGLPVTAVPSEGYKFVEWSDGKRDAARTDAGGTANAEFAASFVIKTYTLVYSAGPNGNLIGGDAVMTVNHG

SEQ ID NO: 102955 - protein, 183 aa, Unknown
  Obtained from environmental sample
  DOMAIN (18)...(169): DJ-1/PfpI family
  misc_feature (1)..(183): Xaa is any amino acid
EEVEAVTPIDYLRRSGIEVTTAAVGKSLAVNGSHGIQVAADALLDGLLSDGKLLPSEWDGVVIPGGLPGADNLAASREAGRFITKMAVQGKLICAICAAPARVLSPLGILKGKKFTCFPGEEEKVISASSASYGAQWKEDRVVVDGSFITSRSAGTAGEFACAIIEKLTGEGDKLAERVLLLK

SEQ ID NO: 102956 - protein, 244 aa, Unknown
  Obtained from environmental sample
  misc_feature (1)..(244): Xaa is any amino acid
MDERLEQIAEVWGLAGLRPMLGDVGTRRYFRVSMPSGKTVVLVLYPDAVPGADDPFCDFISLHGYVNPILRVPEIYRRDDSMRAMLLEDVGDSSLVNRMSQFPQEEPHWADVVATELLNWIGPLTMAVPKNANYALRSFDRAKYNFEWSFCREHFFQGLLQKNPPLWLDRMMAQVHEYLEPRAKYLAHRDFHVRNLMVYGQELVTIDFQDARMGPATYDLASIMFDGYWDWGEDTRSLMASKVK

SEQ ID NO: 102957 - protein, 284 aa, Unknown
  Obtained from environmental sample
  DOMAIN (54)...(284): D-Ala-D-Ala carboxypeptidase 3 (S13) family
  misc_feature (1)..(284): Xaa is any amino acid
IAAALLLATSPGATDQPSWATHLQNRGIQVSAGLWDLSTGKLIEGFQPDLALIPASTTKVVSSYAILRTLKPDYQLTTSVLGNLQQGTVRGDLLIRGNGDPFLTNEHIWMLAQELKSKGVAIVTGGLRLDQSAFDAKRYGAGWENTSSNTTPPILPLSVNFNRDSNGAITKDPEKLAKDTISRIFSESGISFEGGRDTEDQKGVIASYKSPPLRNLVDSVNKYSNNFITEMLVKHFGDGSWPKGVARIQNFYQTSLGLPPSEIQITDGSGLSKQNRLSAKTLST

SEQ ID NO: 102958 - protein, 302 aa, Unknown
  Obtained from environmental sample
  DOMAIN (223)...(299): Helicase conserved C-terminal domain
  misc_feature (1)..(302): Xaa is any amino acid
IDTILSGRDALGIMPTGAGKSICFQIPALIMDGVSLIVSPLISLMKDQVNALTQSGAPAAFINSSLTSRQISKALSNARGGAYKIIYVAPERLLTPEFVSLAESIKISMLTVDEAHCISQWGQDFRPSYAQIPEFIAGLPKRPVVSAFTATATPRVREDIVVLLKLHEPQILVTGFDRANLRFDVQKPRDKYHALKTFLSDKAKRCGIVYCATRKAVEEVCGQLQRDGFNASRYHAGLDDLERHNNQDDFIYDRVRIMVATNAFGMGIDKSNVSFVVHYNMPKDIESYYQEAGRAGRDGEPA

SEQ ID NO: 102959 - protein, 283 aa, Unknown
  Obtained from environmental sample
  misc_feature (1)..(283): Xaa is any amino acid
VAPIVGIYARADAGSITSTLASASVSAIVCAAALTVFGMVLQGVKWWVLIRRFAPDLKAGTAVSVHLESVFYSIVLPSALAQDVVKSVMLSKDHDPAVVWASSWLGRLIGFFALLSYSIAGVAFLGDSALPPGFRVPLFSAAGVIALLCALSFSKRFTRPLGVVAARVVGPKALAAAKRLRDGIYAFRSERATLALTLLVSAVIQFLVVLVASITVYAVSGRYFFAECLAFVPLVEVMAISLPLTPGGVGVREALMALLFTRLGFSEGQTASYVTISLMLSMT

SEQ ID NO: 102960 - protein, 271 aa, Unknown
  Obtained from environmental sample
  DOMAIN (69)...(252): Peptidase family M48
  misc_feature (1)..(271): Xaa is any amino acid
MAQVAGEVGLVDRNTANAVSVSAKAIGSAAEEINPEQEYYIGRAVAANILASYKLYSGNQRLTAYLNDICAAITINSPRPDVYNGYHVALLDNNEINAFATSGGHIFVTRGLVNAAKSEDELAGVIAHEVAHIQLQHSIKAIKNSRVTQALLVTGTSAVGAAAKMDVKQLTDVMNESVGEIVQTLVNNGYSQTQEFEADNTAMSLMASAGYNPASLIEMLKSLSSVQTAGAGFGKTHPSPAQRIANAEQSVGRYKAVDTSIRTVRFTSLLK

SEQ ID NO: 102961 - protein, 291 aa, Unknown
  Obtained from environmental sample
  misc_feature (1)..(291): Xaa is any amino acid
VAAVFFTSAADSYDAIAGKSQQMIAKEKDDADKALQAAMAKADKSRQTAMDVNGQTYFPNDWKNAEAQNASAKGANKTTAEEIKAATALFDSVAAAYDDIAAKSQQRFAKEKDDAGKALQTAMARADKSRQAAVAADAQTYLPNDWRNAETKNTSAKNAKATTVDEIKAATALFVSAADAYDDVVRKSQQQAAKDKDDANKALQAAIARADKSRKDAQDAKANVNLPTDWNNAETKNRTAANAKRSTAAEIKAATPLYTAAADAYDDLIKKNVAFLSTQNQKSAEDARARA

SEQ ID NO: 102962 - protein, 285 aa, Unknown
  Obtained from environmental sample
  misc_feature (1)..(285): Xaa is any amino acid
LALCSLLSVNASPLHSTTWGFRLDLPEGYEYADGNNQDRYSFQGPNGAMFDLVVYNGVYQDVEQMANDIRRRLGSSGETALFEYEGKTAALLDVHFRNFSGWGICIELAKNAGASKAPFLCALAYSPSSGADMDLYHISALDSIAPSDLEARRPGPVMEFSYPRGEIMETPIKGTIFSALIRENDAEAAQALVDREFALLRKYENAPDWQQAWIRFYRAIYRDSWDRIANALFRLEREWNSGQDAGGRAFAEKSLAFVQGFSYERDPEGSDFVNPGDRPLIEGRG

SEQ ID NO: 102963 - protein, 231 aa, Unknown
  Obtained from environmental sample
  DOMAIN (149)...(229): Sporulation related domain
  misc_feature (1)..(231): Xaa is any amino acid
LGLSLVLFSSHEDSPLPSDPPEASALTPEAALSDSADRMTEDNLGFAPVSTPSEDKPEPTANQEPTAEPATQAAVSTEPEDKPARTASSAKPAAQTTASTKPAKPTGKPADKPAQASASPKPTDKPTVAEAQPAAAAPAEKPAAGASEISDKWVVNISSTPDAAESLRFLSTLAGQDVGGKVYTSEAIVDGRTQHRIRVGFFDTREEAEAVGLKIKEQYRLYATPWAVRPS

SEQ ID NO: 102964 - protein, 274 aa, Unknown
  Obtained from environmental sample
  DOMAIN (57)...(120): Ribonuclease B OB domain
  misc_feature (1)..(274): Xaa is any amino acid
MTEKMDLSDLKKMKIGDLTALAKEFKIEGATNLRKQELIFALLQAQTEHNGMIFGGGVLETLPDGFGFLRAPESNYLPGPDDIYVSPSQVRRFNLRTGDTVTGQIRPPKESERYYALLKVEQCNFEDPEDSNRDKILFDNLTPLYPQKRIQLENDGKNYSMRIMDMMTPIGKGQRGLIVSPPRTGKTILLQNIANSITKNHPDTILIMLLIDERPEEVTDMQRSVKGEVISSTFDEPATRHVQVADMVIEKAKRLVEHKHDVVILLDSITRLSR

SEQ ID NO: 102965 - protein, 178 aa, Unknown
  Obtained from environmental sample
  misc_feature (1)..(178): Xaa is any amino acid
MPNVIVTGADRGLGFSLCREFLARGWTVFAGKFLQDYNLLEQESEKNPALKIVPLDVGDRKSIEKARNYVIEQTNTLDMLISNAALMGEIKCNILEPPMDLQAPWNFFCVNALGPTYMVEGFLPLLDNGKMKRLCFVSSEVSCITLMKHRAGNSYPYPMSKSSLNMSVRLMHNLLYPQ

SEQ ID NO: 102966 - protein, 223 aa, Unknown
  Obtained from environmental sample
  DOMAIN (6)...(197): CobQ/CobB/MinD/ParA nucleotide binding domain
  misc_feature (1)..(223): Xaa is any amino acid
MKKPRLLLAGAHSGAGKTSVAAGLMSALVRRGLTVQPYKAGPDYIDPAFHTFVTGRQSRNLDSWMLDQATVMALFGHNAPEAGQGLSIIEGVMGLFDGHLEDAAGSSAHLARILAAPVVLVINGAGLARSAAALVRGFDRFEPGLRLAGVIINQTSSTAHYEMLKAFVENEAGVPCFGHLLKNSALALESRHLGLVPAGEVADLSARLGCLAEAAAATLDLDG

SEQ ID NO: 102967 - protein, 125 aa, Unknown
  Obtained from environmental sample
  misc_feature (1)..(125): Xaa is any amino acid
MQAVDVLNITKKFPVYENMPHNEQIKDGSFYALCDISLSIKNGECTIIAGANGSGKSVLMSIIAGLEEPTCGSVKTSSRVGLVFQEPDSQILGETPREDITFGPRNMKLSKNEIKARVYASLLLT

SEQ ID NO: 102968 - protein, 231 aa, Unknown
  Obtained from environmental sample
  DOMAIN (32)...(163): Histidine kinase-, DNA gyrase B-, and HSP90-like ATPase
  misc_feature (1)..(231): Xaa is any amino acid
VSETISKNEEPLRPPMVHILEPLVRARIAAGEVIEQPASVVRELVDNALDAGAHSIQVELQSGGIAQIRVQDDGCGMSAVDLPLAIIKHATSKISSLEDLETCVSLGFRGEALFAIASVARMRIVTNDGGGGHALLVDNGTAQEVEDAPSPRGTTITVQGLFQKIPARLAFLKSAASETRAVRRVLTDKMIAWPEVRFVLISDGDTLINSAAGDRLARIGDLYGADMARDL

SEQ ID NO: 102969 - protein, 112 aa, Unknown
  Obtained from environmental sample
  misc_feature (1)..(112): Xaa is any amino acid
VQIDPVGGIGYSGGDTYIVTGNDTLYVKWYEQNIQLVEISYNGNGNTSGTAINTLGVKYRPGDVATIRSNDGNLARIGYSFDGWNTQANGKGTDYSIGSSYTVPTTNTVFTR

SEQ ID NO: 102970 - protein, 266 aa, Unknown
  Obtained from environmental sample
  DOMAIN (1)...(114): Response regulator receiver domain
  misc_feature (1)..(266): Xaa is any amino acid
VDDINTNLKVAEGLMLPYKMHIDLRLSGAEAIEAVKVNDYDLVFMDHMMPEMDGIEATKLIREMGKENPHYAELPIIALTANAISGTREMFLSNGFNDFLSKPIDMVKLNVILAKWLPKEKQEKLELKTTDANASDFETTKMKIADIDIKKGIEMSGGTFKNYMQTLAVFHKDGFQKIDEIKNSLEAGNYPLYTTYVHALKSALANIGASELSASAKALEFAGKEKDINFIKLNNAPFIMNLKTLLGSLGNTLSLDDGYESSVDFE

SEQ ID NO: 102971 - protein, 176 aa, Unknown
  Obtained from environmental sample
  DOMAIN (29)...(176): ABC transporter
  misc_feature (1)..(176): Xaa is any amino acid
MARIELRNVVKAFGKTQIIKGISQVAQDGVFLVIVGPSGCGKSTVLRLIAGLEELTGGEIFIGDRDVARLEPKDRDVAMVFQNYALYPHMSVRENICYGLKVRGVSPEERERRLAAAAGMLGLADYLDRMPRQLSGGQRQRVAMGRAIVREPSVFLFDEPLSNLDAGLRNQMRVEL

SEQ ID NO: 102972 - protein, 224 aa, Unknown
  Obtained from environmental sample
  misc_feature (1)..(224): Xaa is any amino acid
VLIGIVAARVTAANRSMASGLINAGGSVGQFVFAPIVQALMNVRGHSAGLVFLALSSLASMFPAWLLCRHKRLQGKQGANPDKPEAQARSAPGLSKQLRIAFRNPSYILLHAGFFTCGFHVAFLTTHLPGEIILCGHAATVSAISISIIGLCNIAGSIGVGILGKHVRMKYILAASYAFRALMIAVFLLSPKTETTFYIFAVTTGLTWLATVPPTAGIVGKLFG

SEQ ID NO: 102973 - protein, 263 aa, Unknown
  Obtained from environmental sample
  misc_feature (1)..(263): Xaa is any amino acid
VLEIGRNDRGEVVELANAKKLLEDLPNKIRTTMGIIADVNLHDDSGKKYIRITVPAHYNAISYRGKYYYRSGSTNQELSGYALDELLLGKYGKTWDSVPAPYVKNQDFYDDAFDVFRKKAVASKRLLPEDVECTDMELLQILNLTEGEYILRAASLLFHRNPERWCLGSYVKIGYFLNDADLLYQDEIGGPLLTIPDRIMDVIYTKYFKGLIHYEGIQRIDEYPLPREALREAVLNAVVHKDYSTGNPIHIKVYDDKVVLYND

SEQ ID NO: 102974 - protein, 281 aa, Unknown
  Obtained from environmental sample
  DOMAIN (59)...(162): Class III cytochrome C family
  misc_feature (1)..(281): Xaa is any amino acid
SEVGHTSCIGCHQKLAKQAKTAPVNCAGCHAPEALAAQAASKDVPRLMRGQPDMTVMFPVSARGVTPAAAMNPVLFDHKTHEGKVPGCHSCHHARIGVCGSCHTVEGTQAGYNVTLDRAMHSEKTQRSCVGCHSERLKAPECAGCHGFVQPARGKDFCAACHDIPRPDEKTFSAGIAGKLPLADKKRIGEAAGMFRRYAGGPKLDQVPGVVTIGGLKNEYEATAFNHKNHLEAYIMGALEGDKLASAFHTDPATLCAGCHHNSPPSMSPPRCASCHGKDID

SEQ ID NO: 102975 - protein, 278 aa, Unknown
  Obtained from environmental sample
  misc_feature (1)..(278): Xaa is any amino acid
FARTDIIRNFIGHKKAEIDSDYFAEMLSYFTSFLKTANQGGEQAIAAYLLVKDIAAKFPHLGISINFNFADVFKSITNISELYSNLKDSRFREEFLENIQLHIPDWADIFIQIFPKTMDTAIIDKLEEGHCEKLTALTIDCFENFKEYRDAVVWLFRMYSKAKTELKTKSKAKAKPEADPGAEAETESGAEALSKAKAEARVKWYEAAGISEERQLITLIHILDLTYRDIENQRETTDARKINKQVYTILIKEDVLGSFLDAADTEIISRMYRFVNDV

SEQ ID NO: 102976 - protein, 127 aa, Unknown
  Obtained from environmental sample
  DOMAIN (15)...(127): Glucosamine-6-phosphate isomerases/6-phosphogluconolactonase
  misc_feature (1)..(127): Xaa is any amino acid
MRIVIHKTHEEASRWAASYIAGRINDFGATAEKPFVLGLPTGSSPLLIYKEFIRLNREKKISFANVHTFNMDEYAGLPPDHPQSYHYYMMDHLFNHIDIDPANIHLLDGMAKDRMEECRRYEKAITD

SEQ ID NO: 102977 - protein, 62 aa, Unknown
  Obtained from environmental sample
  misc_feature (1)..(62): Xaa is any amino acid
SVSAQLWIIFRHSAAMQQAGIAYATEQIIDLIANDVRNIHIYTMNKPDIAGKIMNNLSEIFK

SEQ ID NO: 102978 - protein, 62 aa, Unknown
  Obtained from environmental sample
  misc_feature (1)..(62): Xaa is any amino acid
MAKYILSLDQGTTSSRAILFDHEQNIVAVEQKEFTQIYPHEGWVEHDPLEIYSTQYTVMADL

SEQ ID NO: 102979 - protein, 113 aa, Unknown
  Obtained from environmental sample
  misc_feature (1)..(113): Xaa is any amino acid
MPKVINIEQTPNPNALKFVVKEPFMLGGARSFQNFASAVGDPMGSAIFAIGNVVSVFYMDKFVTVNKLETAQWSDMIDPICEAIEESRIDIAQDSAVEQVEANDKFQKIMDVV

SEQ ID NO: 102980 - protein, 149 aa, Unknown
  Obtained from environmental sample
  DOMAIN (1)...(141): Putative undecaprenyl diphosphate synthase
  misc_feature (1)..(149): Xaa is any amino acid
IRIRHAGDAAGLPPDIAAEIATAAADTKEFSGMQVILALNYGGRDEVARAVKRLAAQRLAEGRDMADVTEKDIAACLDNPDVPDPDLIIRSAGEYRLSNFLLWEGAYAELYVSAKFWPDWTGDDLAGALDAYRNRDRRFGGIAANGDVP

SEQ ID NO: 102981 - protein, 68 aa, Unknown
  Obtained from environmental sample
  misc_feature (1)..(68): Xaa is any amino acid
MLIVKIALGLFGLGIVVFVHELGHFLAARLVGIDVEAFSIGWGNPILKKKVGAVEYRLGMFPIGGYCK

SEQ ID NO: 102982 - protein, 229 aa, Unknown
  Obtained from environmental sample
  DOMAIN (1)...(65): 1-deoxy-D-xylulose 5-phosphate reductoisomerase C-terminal
  misc_feature (1)..(229): Xaa is any amino acid
DDALDEIILTASGGPFRDYSLEEMKKVSPQDALAHPTWNMGPKITIDSASMANKGLEVIEAARLFTLSDGQSLPPEKIKVVIHPQSIVHSMVRMKDGAVYAQLSRPDMRLPIHKALYWPQTTSCEFGRLDFDSLTLTFYQPDTEKFPLLALAYEAVKKGGLYPCAYNGANEAAVGAFLAGRIGFLDISRVTRYVLDKDWSAEPDGIAAVLEADRQARIMAEKEIEGLVC

SEQ ID NO: 102983 - protein, 255 aa, Unknown
  Obtained from environmental sample
  DOMAIN (2)...(255): Phosphoglycerate kinase
  misc_feature (1)..(255): Xaa is any amino acid
MKTIKDRNFANQKALVRCDFNVPLHKETRQITDDTRIRESLPTIKKLLTDGAAVILMSHLGRPSETGFEEKYSLKPVAEHLSKLLGLNVKLADDIFENKTIENAKNLKPGEVLLLENLRFLPGEQKGDVAFAKYLADLGDAYVNDAFGTAHRAHASTAVIAQFFPNNKYFGYLLANEITNLEKLLNHSDRPFTAIIGGSKVSSKIDILKNLIPRVDNMIIGGGMAYTFITAMGGQIGQSICEDDKLDLAKDILNE

SEQ ID NO: 102984 - protein, 265 aa, Unknown
  Obtained from environmental sample
  DOMAIN (78)...(143): Histidine kinase
  misc_feature (1)..(265): Xaa is any amino acid
MRVSADISDSLIGALIRSGEEEQFAHNAYLRLLLVFSVFITLTAFVILFLYKALESSVKREADGSWFSHAVLLAQEEERSRLSRELHDTIAQDLRCLSLGMDKIGNCPDAGEREKLCNETAIAHSSLIDKIRDICDFLVPPDFRFQGLSEALRRLCLDYGKRTGIDCRIDIAENLKLGGLSEEKQLQIFRIAQEALTNVEKHACATEAIVIMRSGPDKSLFVGISDDGVGFSPPGAKDPQKPTEDGLTHLGIRGMNERATMLGGS

SEQ ID NO: 102985 - protein, 223 aa, Unknown
  Obtained from environmental sample
  DOMAIN (2)...(222): Hsp70 protein
  misc_feature (1)..(223): Xaa is any amino acid
VKVGIDFGTSTSEIAYVDDNGKIIIIPNHLGELITASVVYIADDGTPIVGLEAKEKALIEPENIFLEVKRLFGQNIELQARDKVYSPVDVAAMIIRYLTECAQKHTGKTVDSAVITVPAYFNDSQRKDVIAAGEAAGLKVERIINEPTAASLDYGIEHMRDCKYMLVYDLGGGTLDVTVLELFEGVVEVKSSCGNNALGGKDFDQAIMDHIIGTIKKRDKIDV

SEQ ID NO: 102986 - protein, 88 aa, Unknown
  Obtained from environmental sample
  DOMAIN (2)...(58): DnaJ domain
  misc_feature (1)..(88): Xaa is any amino acid
VNYYELLNIERGANANEIKRAYFSAVKMHSPDSDPEGFKVIRTAYETLYDPKKRVEYDAYFVTSGDLQDALLTARSLIHENKYKQAAE

SEQ ID NO: 102987 - protein, 265 aa, Unknown
  Obtained from environmental sample
  DOMAIN (18)...(120): PAS fold
  misc_feature (1)..(265): Xaa is any amino acid
EDERAQYRKKIYWLESILDAVNSPITVTDKDMKWTFVNKAVERFLYVKRENIIGRKCSQWGANICNTRNCGIIRLRNGFKETYFQQFGGDYHVLVSYLYDENGEVDGHIEVIYEDTAVIAREKKKFEALVHWYESILDAMPFFISVTDKNMNWTFVNAALENHLGKKRKDVIGKHCSYWNFGHCNTDDCTIARAKRGLKQTCFSMGDISYQADVEILKDLKGAVIGYLSVVKDITNLEQMTKQQAEAEAADRAKSAFLATMSHEM

SEQ ID NO: 102988 - protein, 308 aa, Unknown
  Obtained from environmental sample
  misc_feature (1)..(308): Xaa is any amino acid
EFINKAYVDGYIRFEWMHQKLDGEPIPCEITLIRTKHNNDFFITAYLRDLREFKQMINKIKQRENLLNTLNDAAVVLLSINHEIFFESSLLKSFELIGNCLDIDCVQIMRNEIIDGELQCIITSQWLSSHASSLENRPVGTTLSYSVSSEWKQLFMRGESINAPLSTLGETESAFLKSFGIKSIVIIPMFLDNYFWGLFSVHDCRKDRIFSEDEIHIIKSLGLMITNVVDRNLQHAKIREINERVQIMFDTMPLGASYHDANMNPIDCNNGILKLLSLSSKQEFIDRFIDLYPEYQPDGSLSKKKLFD

SEQ ID NO: 102989 - protein, 287 aa, Unknown
  Obtained from environmental sample
  misc_feature (1)..(287): Xaa is any amino acid
PLNALDYKLGNGTQYFDYVVLGCAELKKGASGVYIYIPPALSKLLDQRSTYLTPLRKAGIRVLLGLKGGHDGVSFGTLSDEEVEELPKSLARLLHSYWLDGVELWDIDGAKDADNCPYPSGTHKLANGQDYTVPDDEYADYLWFGDRANHNGDGGVKMTSFIYYLRNELNSTFEDIDGIAIISREINYGAWFDTEAHPGRYVTLFESLNFSINPNPVAFGCEEDTQGIGNFVESGIYEGRPRKPGHSILIGMNGNREYGPLAVNFDPGAGNAVVPPIVNAGGTGDIL

SEQ ID NO: 102990 - protein, 299 aa, Unknown
  Obtained from environmental sample
  DOMAIN (140)...(226): Fibronectin type III domain
  misc_feature (1)..(299): Xaa is any amino acid
FCVYFGVDVDYPLINWKVKLPSNYRDDLRNVYGIKNTGMETLGGTRMTNTNRFVTDSGIFIINNSFAGNVENQARGYRAFMDAVAAAGGEGVMWWGADWFAPLMGLNSNVENSAIFDQTGKALDVMRVLGGIKGPNAAKPGKVTNLRATVSGTTVSLTWDTVNTAITNRYSLERAAASGGTWTTVDDNIAGNNTGTGTFTDTGLQEEVTYNYRVRANNSVGWGNYSDTASITTTGVVLVAPTNLRSTGITSDSISLAWNTVTGAASYKLYGAKGASAPANDTGYTLLGDAISDTTYTHS

SEQ ID NO: 102991 - protein, 268 aa, Unknown
  Obtained from environmental sample
  misc_feature (1)..(268): Xaa is any amino acid
MNGQALDLFTAGRHTLKTQNIPLIKRLLNIPTGGQTPFHCEVYFINKTEQMAIKWGTDSQVQYMEPTYKFPLKIGASGEMSLRVEDSRKLLLKIIGTERSFNQSGITQMFRAFLMAKVKPYLAQTMQSSDFSIFEVDSHMLKLSEALHKQLAPDFMDYGVSLERFWVTTVVKPDGDSAYEKFRDIHVRQYSDVAEAQLRQKVEIIDQQTNAQKMIIDSQAIATKRTQEGYTYQQERGFDVAEKVAQNEGVGNFTNTGIGLGMMGGVAG

SEQ ID NO: 102992 - protein, 206 aa, Unknown
  Obtained from environmental sample
  misc_feature (1)..(206): Xaa is any amino acid
MEDVLPTETFGVSLRLMDADTTRFADMIAPSVAELLEAASDLASPGTGAPIQCPALEIVEYPTPCAIEVDPALVSLSEKVSIVRDAEALARAHAESLCPSSVRQVAVGYPDSMQCVWNAHAERLSDVHGDSGDVSWRARLVSDRRVQGVMRVSVTAGKGDQLETGFQSLGESRGFELFSKEAVERTVKESGAPSCSGVGRAAGTGW

SEQ ID NO: 102993 - protein, 298 aa, Unknown
  Obtained from environmental sample
  misc_feature (1)..(298): Xaa is any amino acid
AAQNNGKKIDVAVEETIEAQPEIVQVEVTAPPEEDETVAEAVRQANEAPIAVEGVQEEFEEDPADTQLPNIISDDNIYAEVLEEQGIDLAYNENDQAFVMDGQVMATADDLEEGLESYAEDETPQEESAEPTEDLLADAVYDESYAQTYDPAIVQSEAQEFLNPEVDQSQEDELLSGTQEYYEEPVPFEEDITQEDLESTREIASDMLQEVPPVLSEVQNAEPEMYNSDFVETVEEEYDDSEGIPEDIDLEDDSESTNVPIEPYQGEQAQEEPWPVNQPVQFAAPPAFSTFNTSVVVG

SEQ ID NO: 102994 - protein, 246 aa, Unknown
  Obtained from environmental sample
  misc_feature (1)..(246): Xaa is any amino acid
ARFVSFLIKDDPTEAAGPSQYRFTYASGKIQNTPEMQIVFAEKEVRDMANHVLLMFSRFNNVIQSLFEMQDRQAAVTSLGLELRQKEEYADQMRDQIAAFLMTCAREQLNPRSEHRVSQLLRVISDLEEISDDCCSLSYILENGVNENLIIKKKEMDALVPYLNHVENFLNLVKDNLGRRLSTTTLSYARELEGEIDRNRDRLRKLGRKRLESGKNVKTELLFIDIVRRIEKLGDYCLEISETLAA

SEQ ID NO: 102995 - protein, 80 aa, Unknown
  Obtained from environmental sample
  misc_feature (1)..(80): Xaa is any amino acid
FHSLIAAARNSQANVVLYGHTHVPSFKKVDDLLLLNPGSVGRPRSRAGASFAVIECAPNGSLTTEFFGIGDKGKIKNLKI

SEQ ID NO: 102996 - protein, 261 aa, Unknown
  Obtained from environmental sample
  DOMAIN (161)...(193): Ankyrin repeat
  misc_feature (1)..(261): Xaa is any amino acid
MLHSVIRNRGISRHIGIILDKRAIVDARNREGDTALHIAVRMNLREDGEFLISRGASIFSANAAGDSPLYNALTSTGGIRYWIINPNTVNAKDGLGNNMLHYAASWKLNNAIPAIIQRGVPVESTNATGETPLFMAVKANSPSTIKVLLDNRANIKAADSQGYNLLHAAIRWNAVDAVSFLIESGIDINAHSLSGDTALHIAVSLGLTDIDSLLISKGANLEVRNIDGNTPFMEAVKIGLLPTIEKLAANGADPNTRNTRG

SEQ ID NO: 102997 - protein, 101 aa, Unknown
  Obtained from environmental sample
  misc_feature (1)..(101): Xaa is any amino acid
DKINNIFLEIDVMLENDYTAVLVEIKTKLTVERINDHIDRLEKMRKYADLRGDKRAFLGAVAGVVVTVKERQYALDQGFYLIEPAGQSLNITPPNGKPKEW

SEQ ID NO: 102998 - protein, 242 aa, Unknown
  Obtained from environmental sample
  DOMAIN (41)...(242): Protein kinase domain
  misc_feature (1)..(242): Xaa is any amino acid
METQIIDLALNHTQSIAGSTTETSANFTGGLLQIHEKIAGWEVTGKLGTLSGEADIYLAQKDGQKGVVKYYRSVTRPKTEVLEKLKGLNHPDIVIVYDFGLYNDRFYEIMEYAEGGAIDTRNTDGSYRYLPLPEEKVEGICKEIINSFKTCHGINIIHRDIKPANIYYRTLEIEEIEGGDGGEKKTVYRGDDVVIADFGISSIMNDAEQLHKTRTSSRTTGYAAPEVLSGIISTKMDYYALG

SEQ ID NO: 102999 - protein, 191 aa, Unknown
  Obtained from environmental sample
  DOMAIN (5)...(191): CobD/Cbib protein
  misc_feature (1)..(191): Xaa is any amino acid
LSISAGLTLLAFLADWLLGDPPSWPHPVRLIGRLIARGEAWARAWAGPARLLAAGAALALGVTAAVMGGAALVLHLAARAGSLVHALAVIYLVYSLICLRDLYKQTWRVEKSLRRGCLPEARAGLALVVGRDTAGLSEAGVRRALIETLAENLSDGLVAPLFYLALGGPVLAWGFKAVNTLDSMIGTKTNN

SEQ ID NO: 103000 - protein, 241 aa, Unknown
  Obtained from environmental sample
  misc_feature (1)..(241): Xaa is any amino acid
MNNIYLKPVFSGKDIKDDLIFINCTLGFNGNINLLFAEKRYDYLISRQIENVYPKGKKPEWPTYRTVKNFTIFPKTPQDYILYIPEENKAIELKNKNINYTNALQIDTDKYCFICHSKSDAFRNSIEKNCEIYDFNKNLLNKLDIGTGINDIQTNGKKELWVSYSDNGIYANNPGDNTHIERKGLNCFDINGNIIYMYDSRPFMDSCDSLHVYSDKEILVNIYCGAVKLWHAFAKINNKKI

SEQ ID NO: 103001 - protein, 150 aa, Unknown
  Obtained from environmental sample
  misc_feature (1)..(150): Xaa is any amino acid
DDTVAQCYSSGKVSGKVDVGGLVGRTGWVGDISQCYSIGAVSGEENVGGLVGSCGGGNTITQCYSTGEVGQKEGRGGLVGFAGDIGKITDCYWDVATSDTTDSQGGKGKITAKMQSRATYENWDFDTVWQIDEGKDYPRLRALAEEPAAT

SEQ ID NO: 103002 - protein, 282 aa, Unknown
  Obtained from environmental sample
  misc_feature (1)..(282): Xaa is any amino acid
VVYAPRSETADDLSLTRIINEPKRGIGEKTLEKLQALAALRGESLFTILEDGEIASSLSVRAAENVREMVSVIGEYNREKDNLRVSDIYDGMMVRTGYLKALEAQNNTEADNRIENLLEFKSVIYDYEKDDPRLSLAEFMEKIALMADIDNHDANEDAVVLMTMHSAKGLEFPTVFLPGMEDGLFPGWRARDTEGGLEEERRLCYVGMTRAMERLYMTSAATRTLYGRTDNTRESVFLREVDQSLLEGEAIRGRDEHSRMKAKWTDGYSSPEPFQPFDPLKY

SEQ ID NO: 103003 - protein, 266 aa, Unknown
  Obtained from environmental sample
  DOMAIN (214)...(266): NAD-dependent DNA ligase OB-fold domain
  misc_feature (1)..(266): Xaa is any amino acid
AGAGEGANAGADANANASANVNAGTNANASAGENVSASISANMNADGRADANAGASANAGTNAGENVNAGANANADASAGENVNAGANANADASAGENVSASIGANMNADGRAGANANAEANANASANADVFLSRKAQMEWLKAQGFDIVGYKLVNRGDLEETVLWFSGQAGESDLPSDGLVLVFDDIEYGKSLGSTAKFPRDSIAFKWKDELKETKIRHIEWSASRTGLINPIAVFDPVELEGTTVSRASVHNISILKSLALGAG

SEQ ID NO: 103004 - protein, 71 aa, Unknown
  Obtained from environmental sample
  misc_feature (1)..(71): Xaa is any amino acid
MLIGAVVVERVFLIPGIGSLLVDSVALRDLQGVQGIVMLLVAIVVLLNFLVDIGYSLLDPRLAASGGDSGG

SEQ ID NO: 103005 - protein, 233 aa, Unknown
  Obtained from environmental sample
  DOMAIN (3)...(180): Domain of unknown function DUF21
  misc_feature (1)..(233): Xaa is any amino acid
MLMLVVIVICVVGVSGMCSLIEAVLYAVPWSTIERLRGEARRSGEVLHGLRSQVSRPIAAVVTLNTLTHTAGAVVAGVAAAGVLGQEYMTAFVALFSILIVIFGEIIPKTLGVVYASPLAPLLAAPLQLLTRVFTPMIWFFGLINRLLLPKGSPHAQATEADIMALVSLSRKEGVIRPTEEAIIGNILELDQKRVHDIMTPRPVVFSLPVTMSLEEARTVRGLWSFSRIPLYA

SEQ ID NO: 103006 - protein, 277 aa, Unknown
  Obtained from environmental sample
  misc_feature (1)..(277): Xaa is any amino acid
MYPESVKSAEDAMRRSMLEIPTYMHAQAYELNKKGDTEGAKKEYANAIKHYNDFINRYKSEPDWNEYKVHMNMAVIYHELGQFEKEAEQFNWMVETDTSRYGRRPQNFGVLITKNDAGYNAVLAMDAAREAALKSKAGGDTTKAYSLPETKAYFKQVDRYMAKFGKDTAAPVIAYNAAIVHYNAKQYKTAIEALRKLTVDFPKHKYTLLINRMTAQALLEDDQLDEAQERFEWLYKQYTEKTGLGIKDSNAVTVAKEIETSIAAVLFQRAEKGLRKA

SEQ ID NO: 103007 - protein, 212 aa, Unknown
  Obtained from environmental sample
  DOMAIN (50)...(178): Acetyltransferase (GNAT) family
  misc_feature (1)..(212): Xaa is any amino acid
RPYQPEDAPDAKRLINEAFLVDQYIHDPKLNDGALDIFLRSYLTNSSYAQVAVADGRVVGFLMGKIKGQPLLPDHVSNRIIAIAQTAKLLIIGIKDFKSLFQYARFKIVNKRLKASTAAPTTDEITLFAVDSDTRGMGVGKELFNNYLQHLKELGRSDFYLLTDTMCTFSFYEHKGMTRGAEQDMTIYLDGKPKKIGVYLYAGNVDEAIKLS

SEQ ID NO: 103008 - protein, 229 aa, Unknown
  Obtained from environmental sample
  misc_feature (1)..(229): Xaa is any amino acid
MKKSTMFLLWLGAAISVSEILTGGLLAPLGFARGLGVIFIGHLIGTVFFAGGAYISYCRKVNSMESVVFSLGKNGARFVALCNVVQLIGWTIIMVVQAGITIHAVFPDIPFWAAALTLSVLQIAWALAFGSPGGKINEIAVVLLAGLCVVFFVESIGYKSDFKFISDNMTVMLGIELSIAMPVSWLPLVGDYSCKAKSKTGAVLMPFLGYFLGSCVMYFIGLLIVVSSG

SEQ ID NO: 103009 - protein, 295 aa, Unknown
  Obtained from environmental sample
  misc_feature (1)..(295): Xaa is any amino acid
KRAYTALSFLLPVAYMVIMFAFHWVYPFGNRQILVTDFWQQYYSFLSDLWHKVRGGTFAPWSWTLGAGIDYVSMLAYYMASPLNFLTVLAPHAFLREALTFILLLKIGFAGLFMGMFLRYTFRQSSLALPVFASLYALCAFTLGYYWNIMWFDSFALLPLVMQGLIALMRESKYRLYTVSLALSVMANYYIGFFICIFVAITFFNQCIIQKLKPRDFLCKLALIAACSILAIGLTAALTVPTFFSLQTTATAASKFPSSVTWFNGWAKVLGNLVAFTPPTIKDGLPNLYCGMISV

SEQ ID NO: 103010 - protein, 80 aa, Unknown
  Obtained from environmental sample
  misc_feature (1)..(80): Xaa is any amino acid
MAGIAKKSTKKRAGAKKASAKKKTAKKSVAAAKKAPAKKKTAKKSVKKAAKKKSAAKKSAVKKSSVAKKRATKKRAAKKA

SEQ ID NO: 103011 - protein, 261 aa, Unknown
  Obtained from environmental sample
  misc_feature (1)..(261): Xaa is any amino acid
ELQTLEQRGIAEAVLTGVNISQYHDSGMDLPGLLEFLLNGTGKIRLRLSSIEPEPGLFDDVFLRVLTDKRIRPHFHLSLQSGSAAILAKMGRPYSPADIEKIVSQLRRIRQDPFLACDIIAGFPGETECEFEETYTLMEKLSFAWIHAFPYSKRPGTAAFWFSGDVNGKDATRRVELLTSLARKGRLDYIQRWKGREVEAVVEAGENLPKGMVQAVTENYLKVCVDYGEEKAPAPGSLIRCRIAEIAETASYDALACYVWP

SEQ ID NO: 103012 - protein, 221 aa, Unknown
  Obtained from environmental sample
  misc_feature (1)..(221): Xaa is any amino acid
VTFADANSAATTFTMPGNAVAVTAVFVAVFVDDRDGKAYGKVVIGSQTWMAENLNYETAGGNGSWCYNNSVDSCSKYGRLYDWSTAMGGASSSNTTPSGVQGVCPSGWHLPSRAEWGALAIAAGGTGTYGSSGTAAVKLKSKSGWNNNGNGTDDFEFSALPGGVCYSDGSFSSGNYGGWWAATEYTSDLAYRRDMSSSKDHVEENYYTKRGYGYSVRCVED

SEQ ID NO: 103013 - protein, 96 aa, Unknown
  Obtained from environmental sample
  misc_feature (1)..(96): Xaa is any amino acid
MERFNPLNDYLFLKVMGEEGDEEQCLAFLNAVLGSKSKQPLKLIKILENKAFVAEVVGEKTSILDVRVETDSGEKVNIEVQLKDLYNMKWEAFRRQ

SEQ ID NO: 103014 - protein, 288 aa, Unknown
  Obtained from environmental sample
  DOMAIN (127)...(283): Glycosyl hydrolase family 3 C terminal domain
  misc_feature (1)..(288): Xaa is any amino acid
MHESKELLTGLLKDEMGFEGFVVSDWAAVAQLSGGSYKAKIANAINAGVDMVMATNSRDSWVNFITSLKQLVEEGTVPMARIDDAVLRILRFKKRLGLFDAPLMEKAGTIGSDANRAAVRELVSESLVLLRNEKNVIAKLPECKNILVAGQGANDIGMQCGGWTITWQGSHGAITKGTTILEGIQAVMKGKAVITYAEDGKADGAFDAVIAVIGENPYAETEGDRNSQINIRAPDADMLWEAYGYDCPVIVIMLSGRPMTIGDEYKNVGCFYRGVAAWQRRRRNRGCA

SEQ ID NO: 103015 - protein, 251 aa, Unknown
  Obtained from environmental sample
  misc_feature (1)..(251): Xaa is any amino acid
MGAGLRDDLYHNGELLTCILEEYYFKNGWFLVLNGDIEELHRYSLDEIRENWAGLYRVFNLFNRENRLYKIIGNHDDKLLFLRNTSYTYPIHTLIKIETGVIPAYVYHGHQLSSFYVKFNWLLGLLVRFILKPFGIKNITDSRSPLKRFQIEKMAYAFSLKNNCLSIIGHTHRALFESLGRFDYIKFEIERLCHDYPSSSGEDRNRIENEVTALRKELGKLKRKERRDVLRQSLYGDELPVPCLFNSGCAV

SEQ ID NO: 103016 - protein, 161 aa, Unknown
  Obtained from environmental sample
  misc_feature (1)..(161): Xaa is any amino acid
MHRPGHFSITAVDGAARAAALLTAHGEVPTPVFMPVGTGATVKAVAPDDLEAIGARIILANAYHLYLRPGHELVRRRGGLHSFMAWNKAVLTDSGGFQVFSLSALRKILEDGVEFRSHLDGSRHLFTPEKVIEVQRALDSDIMMVLDECVPYGADYAYTGT

SEQ ID NO: 103017 - protein, 255 aa, Unknown
  Obtained from environmental sample
  DOMAIN (127)...(203): Helicase conserved C-terminal domain
  misc_feature (1)..(255): Xaa is any amino acid
ISHLSLYNVNLSQVKYLVLDEADRMLDMGFFDDLMQIIHHLPKERQTVMFSATMPPKIRQLAKTILREPKEVQIAISKPADGISQQVYPCYENQKAEFVRRLLSEKEQGKVIIFSRYKSKVRDLLQRFRRSGLLLSEMHSGLDQAERELVMRNFKSGKVKILVATDILSRGIDIEDIDLIINYDVPNDAEDYVHRIGRTARASAIGTAITLISKEDQGRFARIEQLLEKELDKLPLPDDLGKVPDYTPNSSQKPK

SEQ ID NO: 103018 - protein, 191 aa, Unknown
  Obtained from environmental sample
  misc_feature (1)..(191): Xaa is any amino acid
FIKNNGQFGTGIQWAIPTGVAGTAVVVNKNLADRLGIDFTKPYNWEDLITWGQKVRAADPTCYLLSINQEHGMPFFVRAYSRQLNGAPIIDDAAKKLNMTEAQFTQCFDLIDRIYKTGTAAPAAYKAPFGNRDQDDPNWIAGKYVAHIGYTSSAEVEQAANPSVQYYPGNLPLLPNRKNDGWFSNPPQYMG

SEQ ID NO: 103019 - protein, 187 aa, Unknown
  Obtained from environmental sample
  DOMAIN (5)...(182): haloacid dehalogenase-like hydrolase
  misc_feature (1)..(187): Xaa is any amino acid
MLPGISAVAFDLDGTLYPNYRLNIRLLPFLCRHGLLLAAFAKVRGIIHRRQEQSPSAVLPDFYGYQARLVAGLLHAPPEQIREKIERLIYRGWEPHFCKIKLFPHVREVLAELRAAGLKLGLLSDFPPENKLKNLGFAGCWDAVLCSEHTGALKPALRPFTELADALQCPPGQVLYVGNSRPYDGTG

SEQ ID NO: 103020 - protein, 70 aa, Unknown
  Obtained from environmental sample
  misc_feature (1)..(70): Xaa is any amino acid
WRDFLDKRGEGIHHIAFKAEGMDKVLSVCEGAGLKCVQRGKYGDASGEYAYLDSKKDLKCIIEFLESYNK

SEQ ID NO: 103021 - protein, 85 aa, Unknown
  Obtained from environmental sample
  misc_feature (1)..(85): Xaa is any amino acid
IHFPELGIKSEKRNNLNSDEDYQNLFKEYKSSLPNCREFLEKLYLLLETKNRIALTCFEHEPSHCHRHVIRDYLKNSYNVQTMDL

SEQ ID NO: 103022 - protein, 252 aa, Unknown
  Obtained from environmental sample
  DOMAIN (40)...(252): DNA gyrase/topoisomerase IV, subunit A
  misc_feature (1)..(252): Xaa is any amino acid
MFENGSSGETAPTGKVIPVAIEDEVKTDYLNYAMSVIVARALPDARDGLKPVHRRLMYSMGELGLRHNAATKKCARIVGDTMGKFHPHGDLALYDALVRMAQDFSLRYPLLEGQGNFGSLEPAGAAAMRYTEAKLSRFGEEMLRDLEKETVDFIPNFSEEEMEPTVLPTVVPNLLVNGSSGIAVGMATNMAPHNLGEVCDAVCALIDNPEISIDELMKFVQGPDFPTGGIIFGRRGIKDAYKTGRGKILVRG

SEQ ID NO: 103023 - protein, 286 aa, Unknown
  Obtained from environmental sample
  DOMAIN (39)...(286): Aminotransferase class IV
  misc_feature (1)..(286): Xaa is any amino acid
FALNTYPITYRAKVEDGNWNGEYLEKPHKTPEEEEKMSEDDLAKLQDSRNCYADMPLVSYTSQYGLACFEGLKALPQKDGGLAIFRPDKNAARFYRSMEGLCMPPFPEKLFLEACIETVKRNSKLGFCPRYNKDWEKDSFMTADSVYIRPFTISEGGIGVNLSSKPWVCVINTPVSAYFSSNNSDAVVSDRIRATPNGTGWIKACSNYVISALAKSEALKAGFMECVFLDATHRKYMEEGSSCNIFFFLKSGELVTPELGDTILPGITRASIIELARDKGIKGRKA

SEQ ID NO: 103024 - protein, 239 aa, Unknown
  Obtained from environmental sample
  DOMAIN (1)...(239): Isocitrate/isopropylmalate dehydrogenase
  misc_feature (1)..(239): Xaa is any amino acid
MGETEALLLGAVGDPRVKPGPLEQELLLALRFHFDQYLNLRPARSFPGAPTPLPLPDGRRLDAVVVRENTEDFYMGLGGRGQGRLETDLRTRRGLYGLTGRLTLSLDPAAEAAASIGLLTRPGVARITRRAGELARRRGERNLTVATKANAVPQLYGFWNEVTRETAAAEFPNLTLDYQNVDALAYLLPRQPVDFGVILCPNLFGDIISDLLSALAGGLGLAASGNIGDGLSMFEPVHG

SEQ ID NO: 103025 - protein, 233 aa, Unknown
  Obtained from environmental sample
  misc_feature (1)..(233): Xaa is any amino acid
MNDRYEDWPELLTVEKPGRYLGGEREARPNQVPDAAGRLFRVALAFPDVYEIAHGHLGHKILYHLLNHAPGFSAERAYAPWPDWEAVLRRRGRPLTSLESRRPLAEFDLVGFSLQYELGHTNILNMLDLGGLPLRAAARDEKGPLVAAGGPGAFNPEPIADFFDFFFLGDAEAHFLEDLEIIKTWRAEGGPKAELFRLLAGRPGLYIPSHFRPAYGRDGRLTVVKPGARPGSG

SEQ ID NO: 103026 - protein, 89 aa, Unknown
  Obtained from environmental sample
  DOMAIN (4)...(79): Bacterial export proteins, family 3
  misc_feature (1)..(89): Xaa is any amino acid
VSIGEVTMLLRGGILQVLTLAAPLLLSALLVGLIVAILQATTSIQEQTLTFVPKVLTILAVLAFLGSLGFSRLADYTIELFRRIPDMVR

SEQ ID NO: 103027 - protein, 61 aa, Unknown
  Obtained from environmental sample
  misc_feature (1)..(61): Xaa is any amino acid
MSLTPPLVGRLFLKARELAKEQGCEEKGGRFVINAKKDGGQTVDHLHIHFLGGRALGWPPG

SEQ ID NO: 103028 - protein, 284 aa, Unknown
  Obtained from environmental sample
  DOMAIN (3)...(148): GAF domain
  misc_feature (1)..(284): Xaa is any amino acid
ESTFDEVMTNGIRPVADTAGLDRIVFYALTEVDGIKRLGQVYRWDKSEGGLMHLADELRVLPNTPVLEKWISVTSQGGYIRLRESDYSEDVAALARIYGIRSILIVPIFTHGNFWGVVNFQDHTNDRYFDEDCADLLYSAARVFANAIVREGYERNAQKTLKALERREKMSDTLNKVSIMFLSQREDTFEETMTAGVREIADLFNLDRLSIWRNMKKNNALHASQIYRWDRDTGGTTVPTPGLEDVAYSKLAPRWETVFANNEIINSPINLLPEAAMLRAFGVV

SEQ ID NO: 103029 - protein, 150 aa, Unknown
  Obtained from environmental sample
  DOMAIN (29)...(141): MOSC domain
  misc_feature (1)..(150): Xaa is any amino acid
MGKIVAVCISPEKGTAKHNAGRAEFIAGHGIAGDAHAGPWHRQVSLLSHNKIEAFRLKGAEVEDGAFGENLVVEGIDLSGLPVGTVLECNDVLLEMTQIGKKCHSHCAIYKIMGDCIMPREGVFAKVLCGGFIGVGDEMKIRENAPYKVG

SEQ ID NO: 103030 - protein, 275 aa, Unknown
  Obtained from environmental sample
  misc_feature (1)..(275): Xaa is any amino acid
AALSTGMSFQSMAGIVASLDNRAGNLGIEGVRGAKAVALMATAFKGAGMGDEEAGGAIDTLLRTAPMLGFKQLHGDGATADMVKKAVGGADKLKAITSGIFGKDGKLVGKDGADRMLTVVELFDRLSKGIKNGEERAAVFAALLPGAKNVAGLAANVDAWDKAAAAINDHAGLQRAANDVMDTAAFKWEQLKTKTGALAVEVGTKLLPVATFLLEKATKIVDKVVEWTKAHPGLTKALALGAAVGGALLVGVGGLITGVGLLGGAITGIFSTFAT

SEQ ID NO: 103031 - protein, 293 aa, Unknown
  Obtained from environmental sample
  DOMAIN (142)...(290): Calcineurin-like phosphoesterase
  misc_feature (1)..(293): Xaa is any amino acid
DFRGLVSDDESDQSATEAAFDSLYYIAVKRLDRGRLTVIDATNVQPFARKKIIELARSQDLLAVAIVLDIPEELCLERNRLRPDRTIAPHVVKNHTRDLKRSLRSLQKEGFRYVHILQGQEEVDSVEITRTKLWSDKRDETGPFDIIGDIHGCYDELTELLEKLGYEVDRESCTARPPITSNRRAIFLGDFCDRGPANAAVLRMAINMTESGAALCVPGNHDVKLLRKLRGNDVTLTYGLDLTVKELEKEPQEFIDKAIQFLDGLVSHYVLDHGKLVVAHAGLSEKFHGRSSG

SEQ ID NO: 103032 - protein, 284 aa, Unknown
  Obtained from environmental sample
  misc_feature (1)..(284): Xaa is any amino acid
ITDHAFTITYTGDNAADLGYLLHKNPSRPQTAEFNFGKVHVFYPEVSANRCTAALLLDMAPLDLARGKPGSAGGGLFDYVNDRPYVSSSFMSTAISRVYGSAMSGRCEKRQALADSVLELSATLVMLPCRGDTAMLEKVFAPLGYEVKWESGLLDECFPEWGNSCYVNLTISGKVKLQELLRHIYVLIPVFDYRKHYWIGNEEVDKLLAHGSGWLENHPEKNFITRRYFSKLGHFTRQALERLNRLDNGEGSAENPAIEEDQEAEAAIPIKAPRINDQRLLAVL

SEQ ID NO: 103033 - protein, 280 aa, Unknown
  Obtained from environmental sample
  misc_feature (1)..(280): Xaa is any amino acid
REQERIEREKKEADKKEQKRIEKEKKEAEKKEQERLKREKKEQEKRDKEKKAQEKKAGGAAASAPAPEAEAPAQTAPQPAAPPPAEPKKQPEPAKSAPPAESKKQPEPAKPEPAAKPAEPVKSESVKPEPAAKQAEPAKPEPAAKPAEPAKSEPVKPEPAAKQAEPAKPEPAAKPAEPAKSEPVKPEPAKSEPVKSEPVKPAEPPKQAEPAKTEPAPSKPAEPAKSEVTPKPTEPAKSETPSKPTEPAKADAAHKPAEPAKSEGAAKAAEPAKPGKASAK

SEQ ID NO: 103034 - protein, 259 aa, Unknown
  Obtained from environmental sample
  misc_feature (1)..(259): Xaa is any amino acid
SRTKAMHYTEQRFGKEYQHKAADFYTCSTYSLSKGVFDEKCSQHYIRTEVVRELALNAIRAVCGYVSENEAEFVAKIREESAIQQEETAKSSKRRLAQNQKRITELDRLFKKTYEDNASGKLSDKRFEQLSAGYENEQAELEAQNELLAAEITAFNEDGEKSARFIELVRRYTQFDELTTPMLNTFISKIVVHEADKSSGERIQDVDIYFNFIGRFTPPQEEHIPTEEELAEAEKRRQRLARQREANQRWYAKKKAEQS

SEQ ID NO: 103035 - protein, 73 aa, Unknown
  Obtained from environmental sample
  misc_feature (1)..(73): Xaa is any amino acid
MIICGQLTKLFDANSGIKNINLQFSPGTIYGIIGYNGSGKTTLLNCIEGLYIPTSGFVSHDDVKTTKIKISPI

SEQ ID NO: 103036 - protein, 94 aa, Unknown
  Obtained from environmental sample
  misc_feature (1)..(94): Xaa is any amino acid
TLRRGFQLEPGMSLLIAEDVVTTAKSSGECAKALEEAGGKIAALACVVDRRSSGIEIKWPFYPACRFEAGNWDAEDCELCKKGVPLVKPGSRKI

SEQ ID NO: 103037 - protein, 81 aa, Unknown
  Obtained from environmental sample
  misc_feature (1)..(81): Xaa is any amino acid
QGKAFDVSPDPQYESLKAALSGISLGQSGPFHTQLKPILSNPSFFGVNVYEAGLGEQVERYFEELVSGPGAVAAALKKHTA

SEQ ID NO: 103038 - protein, 185 aa, Unknown
  Obtained from environmental sample
  misc_feature (1)..(185): Xaa is any amino acid
CICDPPYFNGPQKLGYYGAGYSKIGVERQEYKKIGKWDIPGQEYYDELLRVAKHQIIWGINYFKFTNIGVGRIIWDKQKTYGYSFSEGEIAYCSLINSVRVFRFRWDGMLQGNMKNKEQRIHPCHKPIALYKWLLSKYAKQGWKILDTHLGSGSHAVACYDMRFPLTACEIDEDYFNLVVERLRL

SEQ ID NO: 103039 - protein, 294 aa, Unknown
  Obtained from environmental sample
  misc_feature (1)..(294): Xaa is any amino acid
ERWYVDVIEKQIATCYGADRYIERGGKLYIDNHLAKELPVKYDLEKVSIHKIIVAHGAKEACLNYSTENINGSLMISYRSIDSGNPKIPFYIWLDKENPVHVFDSHNFELILSELDTFRDFTDYIVRKEQLIKESVCLNYCGEEELLAYYYMMDRYEEVRDQISSINCDHRLCIDQGGWDRFIKSPAYQERAEKKHISLFWDDWINELGKTAREENLIGNANVFTKDSGLYEMAKESRSFRWKLSLEMKKAIDSFQKTDMSVRQKIVALKSSQDSVWYVFLQYKAMPEGKCVVK

SEQ ID NO: 103040 - protein, 91 aa, Unknown
  Obtained from environmental sample
  misc_feature (1)..(91): Xaa is any amino acid
MAVCLSLLELAHVSIQRAVTPGSLVVDATAGNGHDTLFLAELVGPAGLVLAFDIQPEALENTRAALEKARLAARVRLFLTGHEHIAACLHG

SEQ ID NO: 103041 - protein, 212 aa, Unknown
  Obtained from environmental sample
  misc_feature (1)..(212): Xaa is any amino acid
MPPFGSLVIVVAPKGTRRLMRVEENRDWHSTDGVLSMHDVAAADYGGEVRTSLGLPLRLYAPGLHDLVKGVKRQTQIIYPKDIAHICLRLGAGPGRRMLEAGSGSGALTLALSWFCGPSGEVHSCEAREEFHKLARRNLTWAGLGDNVTLHHRDIAEGFPVQGADALFLDVRTPWEYLRHVPSTLTPGAPIGFLLPTVEQVSALLRGLEQGP

SEQ ID NO: 103042 - protein, 158 aa, Unknown
  Obtained from environmental sample
  DOMAIN (47)...(130): GHMP kinases C terminal
  misc_feature (1)..(158): Xaa is any amino acid
MLSQGREGASFREYAAMDLVESMGNLPEEIRRRSLHVVQEIRRVLGARDYLIRGDLADFSRLVFNSHESLRDLYEVSCPEIDWMVKRAQETIGVYGARMTGQGFGGCTYTIIKNEMVSEFRNRLDDYERIFGFHPAIYEVKLATGSRIINKEQRAGSR

SEQ ID NO: 103043 - protein, 264 aa, Unknown
  Obtained from environmental sample
  DOMAIN (11)...(160): Penicillin-binding Protein dimerisation domain
  misc_feature (1)..(264): Xaa is any amino acid
MSQEQIRRTILLPAKRGNITDRNGILLAASMDSNMVYIDCNKIDNPETAAEQLSQALNLSRDFVYQRIKNRNLNVLLKRRISDEELAALHRLKLKAVDLRHDQKRIYLREYLAANLLGYTDQENEGKNGIERAQERNLQGINGELIVERDPFGRELYVSERILKEPRDGDNITLTIDEFLQYIARKYLAAAVREEKADSGSVIIMDTGTGQILAMVSLPDYDPNRYFSYPPENLRNNTIQTVYEPGSVFKVITVATGLDSGVIS

SEQ ID NO: 103044 - protein, 149 aa, Unknown
  Obtained from environmental sample
  misc_feature (1)..(149): Xaa is any amino acid
ICFPAKKYVFEKPNEEIALAVTASCSIPGVFAPTKYQEHYLVDGCLVNNVPLSNLAKHHPDVYIGVNVISRKPMPFLPKNMFQVFSRGYDIYELSNIARYDKYKPLLLEPLKEYISPTIKPGKDFYHKLIKYGETEAEQLLGKIKQAVK

SEQ ID NO: 103045 - protein, 257 aa, Unknown
  Obtained from environmental sample
  DOMAIN (163)...(232): HAMP domain
  misc_feature (1)..(257): Xaa is any amino acid
MYIPYSRYIKTTYRSTLTHVLQMVEKEYPALSDPANLVRLGNEGSQDYWNLINHMDEIAKIFDIAYIYYVRPSGNTFEFVLSSEYTPAMSLEEVFSKYEQRDIPKPMNDAYKTGTLQISPAPFTNVWGTFVSAYIPIMKGGAIIGVLGADYEISKIKFFELEAQISLIVSVIIAAVMAFLLSVSLIKPIVRLFGVLTTIAEGDLTQRIETKGKDEIATMTVMIKETQESIRNLVINIKGEAAALSDIGSDLASNMNE

SEQ ID NO: 103046 - protein, 228 aa, Unknown
  Obtained from environmental sample
  DOMAIN (109)...(223): Response regulator receiver domain
  misc_feature (1)..(228): Xaa is any amino acid
IFCTPWKSRKSGAGKYWDSISRLRDITYSVKSGSDNMADLGETLVKETEEFIRTSREAVEGMNEILQGINQINTSVNHVNDMSMENNRNFDALKRETEKFNDTVGDEKQKILMVDDDTIHLEMASAVLSNEYEVSTAKSGKEALRLFYQGLVPKLILLDLVMPDMDGWGTFKRIKAIGALHNTPIAFFTASNDPKDKRNAQEMGAVDYIRKPYDANDLLKRVGRILKK

SEQ ID NO: 103047 - protein, 277 aa, Unknown
  Obtained from environmental sample
  misc_feature (1)..(277): Xaa is any amino acid
ELPKRITNRPANYQETLVAGLCGYGVNPNIVWMKLGLSDQDVMKSYGVKDWLEEVEQAEYEEFDNNNFYGEMKVVVDQATVFGFGIMHIEEDFTNKKVRFKQVSVPEVYLDTNEYNEYETVFRRFFMTIENAVSEFGLKAMNESIRSQWNMPDSGGQKAREIEILHAVFRRKNAKGVSERNTEMPFACFYVDVANQHVIKESGYKSFPYAIFAWDRIGGIKYPISPAIKSVNDVKLLNKTEDTRLTLAQMSAKEPVAMPASMKGVTDIFGRDGYIRP

SEQ ID NO: 103048 - protein, 225 aa, Unknown
  Obtained from environmental sample
  misc_feature (1)..(225): Xaa is any amino acid
MRDYTDALFRYLRATGLVNISHIGKSISIAPEKIQEVDFFLQNTNREPCFIDNEKQYSEYLGNATIPQLFTDDKELLLSKIKSDFPQIKVDETFSLSTLKDILFDEIAIRKENIISEQVKSIKDYHLYDDINVVFNQITEKSLYDTPLMLEWNTWRAMTMLDGGQVFANLKFDDFGNPMSTAQGNMADIVCDYGDLGVTVEVTMQTGQRQYETEREPVTRHLAQF

SEQ ID NO: 103049 - protein, 290 aa, Unknown
  Obtained from environmental sample
  DOMAIN (74)...(113): SWIM zinc finger
  misc_feature (1)..(290): Xaa is any amino acid
RTYANTGKVLSLKFEVGRAVAKVKGNYRPSYQVEIIFPPLKEAELVYKIIEEDPLLLAHIASGELPETLLQKLKQRNISLIPRHWREMKKSCTCPDKYGDPCKHLAAIYFIIAREIDTDPHLLFRLRGMDLVTRFGKSAVQRILPPFTISHSVSDNDRADEKENTTLIVRPSPPVLEEIPNCVNLITALLPSAPAFCKRDFAVVMAEFYHRTAHYKAWENTEAFDRAETEQNFSRSVWTIHSPDPGPGAKLFLDAQDIDGNIRRFTPCDAFEYFVHFSSEEGTSSYSFLF

SEQ ID NO: 103050 - protein, 281 aa, Unknown
  Obtained from environmental sample
  misc_feature (1)..(281): Xaa is any amino acid
SDLINAITGGGTGTPNTPGAPKYNVYFNPNGATGAPPETIQRDSGSVVPLPDQAGLVKDGHSFGGWYENRDGNEIHYNANSSYTVTRTVTLFAKWTRNSYTLTISANPSVGGTFSRNPNQTSYSHGTNVAVTATPNTGYTFTGWSGAMSGAANPVTIVMDDDKTLTANFEQIPYSVTVSSVGTGASNNGSYVAGTTVTITAGTAPPDYRFKNWTTTSSGVTFANANSATTTFVMPANTITVTANFEAAFITDSRNGQKYKTVRIGGQNWMAENLNYAVDSS

SEQ ID NO: 103051 - protein, 242 aa, Unknown
  Obtained from environmental sample
  DOMAIN (149)...(220): Bacterial flagellin C-terminus
  misc_feature (1)..(242): Xaa is any amino acid
VYARFGASDVRGVSTYADTGISSLNRILNQIKTANQDLDKLGAICGSKASSQMQNDLKAVLEIDPSKMNTGDVKDKVASWQKTISDLKEAYKNHSEADIATGTAASEVLHVGPNYSTGLGGAAANQIKVNYTAVDVKGLGLQAQTIDTREGAQKAIDKLQETIKVISGNRASIGTYINRLDYTVNNIASMEYNIQDAESRIRDTDFATETTNFTRNQIMVQAATSMLSQANSLPQSVLGLIG

SEQ ID NO: 103052 - protein, 256 aa, Unknown
  Obtained from environmental sample
  DOMAIN (1)...(232): Glucosamine-6-phosphate isomerases/6-phosphogluconolactonase
  misc_feature (1)..(256): Xaa is any amino acid
YIAGRINDYGKLKDRPFVLGLPTGSSPLIIYREFIRLNQEGKLSFANVHTFNMDEYAGIPPEHPQSYHFFMMENLFKHIDIDLANTHLLDGMAKDPVEECKRYEEAIAEKGGIELFLGGMGSDGHIAFNEPGSSLQSRTRIKTLTPETKVANARFFGGDPSKVPSTALTVGVGTVMDAREVLIIASGRNKARALRAVVEDGISHMWTLSCLQMHHRAIIVCDEDATDELKVGTVRYFKDLENIVNENNLNGTGKGK

SEQ ID NO: 103053 - protein, 48 aa, Unknown
  Obtained from environmental sample
  misc_feature (1)..(48): Xaa is any amino acid
IDVPYGTQLGGNIHDMQRYIIDNIEHYTGILIEEVNIIIDKITEQNAN

SEQ ID NO: 103054 - protein, 264 aa, Unknown
  Obtained from environmental sample
  misc_feature (1)..(264): Xaa is any amino acid
MNIDDEFKTGVWSGNSFQHQGICPDGWRVPNNEDWAALVTFGGGSSTAGGKLKAVGEFSSGTATDNFGFSALPGGYYYSNFSPPFNNLKTDGFWWTATQTNNVNATVYNIYTSNSVSNNSFQKVRGLSVRCVAYAQEKYTVNINSDGSAGATGAGDYKVGDTVTIDAGEAIEGRKFLKWTIQSGGVTLNASSTTNKFIMPVSDVTLTAVFASQYSVELTGAGEGALGAGIYFEADTVTIKAGTGPIDKKFHMWSTQSSGVNWIN

SEQ ID NO: 103055 - protein, 79 aa, Unknown
  Obtained from environmental sample
  misc_feature (1)..(79): Xaa is any amino acid
MTAAHAQGGGVARAMLEHSLEEARRRAFLAMQFNFVVGTNERAIRTWLAYGFKEVGRLPGAFRHPRLGLVDALVMHRAL

SEQ ID NO: 103056 - protein, 133 aa, Unknown
  Obtained from environmental sample
  misc_feature (1)..(133): Xaa is any amino acid
IRTVLYTTQPREDTWTYFPDKELAFHRAIGIGNFLRPKRPYAIVESVGRHSFARIRKDAAKVGFLLEPVAEHRAEYAYPVFDRESATNRRNALRVLGARGLHMLGRFAEWAYYNMDACIFRAMQVAAAIRQGS

SEQ ID NO: 103057 - protein, 290 aa, Unknown
  Obtained from environmental sample
  DOMAIN (170)...(236): His Kinase A (phosphoacceptor) domain
  misc_feature (1)..(290): Xaa is any amino acid
EITRGNLTCPIRSERTDEVGSLANSIGDMVDALSEHNKLMAVMDNLDSMVCAIDFDYTVLYINKYLAEGLALDKDASLGQKCYRAFKNLNHPCPICRFPGLSAQKTSYPSVTYEVWDEHLQMWLGGTDAIIRWVDGSKVFFQCLRNISEKKEQEVLLQHALEAAKTASIAKTSFLANMSHEIRTPMNAILGITEIMLAKKTTTQDVREGLDQIYNSADLLLNIINDILDLSKIEAGKLELTPGNYDIASVIHDTMQLNLMRITSKPVEFILEIDETLPANLYGDSLRIKQ

SEQ ID NO: 103058 - protein, 153 aa, Unknown
  Obtained from environmental sample
  misc_feature (1)..(153): Xaa is any amino acid
MNPSNAPVPAESRPRHRRLLVSMGAAYALGTFNDNFFKQAALCLAALAGLEWLQGVAAALFALPFVLFSAWGGWLADAFPKKLVIVRAKYLELAAMLLGAFALCATGFIPHWWGMAAVVFLMGLQSTFFSPALNGAIPDNFPDHEVPKVNALL

SEQ ID NO: 103059 - protein, 280 aa, Unknown
  Obtained from environmental sample
  misc_feature (1)..(280): Xaa is any amino acid
ATKAKCINEFLRDYLGVIENKRLYVLGSMLYALEDPGFKMAYSSYNNNAELSSFLYQTIERKIKNSGLKNVPIIQNELKPAIEGLAKSEKEGAKLDYPNGTLLELISDVDKTLYDYYKNSELDLISIFFNVFLSYSTSGGSDLGIVLTPLHITKLFTRIANVSNCSKILDICAGTGGFLTSAWKHISLDSKYTFTQKENFRKNNLFGVEKDSSIYTIIALNMFLNKDGRSNIYNDDCFSIRDELKAHECNIGFINPPYSDEVYSELSFVEFMLDCLLPNS

SEQ ID NO: 103060 - protein, 286 aa, Unknown
  Obtained from environmental sample
  DOMAIN (1)...(285): Histidinol dehydrogenase
  misc_feature (1)..(286): Xaa is any amino acid
VYVPGGRFPLFSSVLMCVIPALCAGVDEVLFSSPPTADGLPDLKILAAAAIAAKAAGITIADNENAHNNRFRVFTVGGAQAIAAFAFGTESVPRADVIAGPGNKYVAAAKRLLYGQVGIDFIAGPSDVLVIADNTSIQSADIIAADMIAQAEHDPDARARAIVPDREFADKIIAAIEKRLTILSTAKTAGASLENGLIIICNNKEESVRIANKIAPEHLELQTADTDSWIPQLKNYGSLFIGSLSAEVLGDYSAGINHTLPTSGSARFTGGLAVRHFLKTVTTLRC

SEQ ID NO: 103061 - protein, 282 aa, Unknown
  Obtained from environmental sample
  misc_feature (1)..(282): Xaa is any amino acid
SAVGLRVIRRLGEDAERQIREDPYRLAYDFEGVGFATADKVARRLGLEPTDPRRLSAGLLFALNKFTEEGHIYTRDRELLEAGAKLLPEAEPSALKEALSRLVLSGQVQAGPPDEPQAGLDIYQPRLYRAEEWVARDLLAILRTQASVEVPRQPQALAWAENALAINLSESQRQAVALALSQKVLVITGGPGTGKTTLTRAITAIFGALRARLALVAPTGRAARRLAEATNLPAKTVHRLLEYAPQVGFQRHPDRKLEIDLLLVDEASMIDLPLMNPLTGAL

SEQ ID NO: 103062 - protein, 255 aa, Unknown
  Obtained from environmental sample
  misc_feature (1)..(255): Xaa is any amino acid
VLVNGRLVGSDEMKNISGSRGLSVVNTGIAINGSENRVDFRFPVTLNSGTNRIEVFASNPYSEGREYIEVNYNQTVTRQDILPNLWILSIGVNKYDANPQLPNLNYAVNDAKGIVDIFKAQEGKLYRKVNSLLIADGALITPTKDNIIDNFPFLRQAAQRDVVLLFIAGHGVNDDGGNFYFMPSDAAFNADGSIRPSRAISYREIQAVLDVPGQKLVFIDACHSEGTSGRKTRGADNNQLVRSLQDNSTVILPQA

SEQ ID NO: 103063 - protein, 280 aa, Unknown
  Obtained from environmental sample
  DOMAIN (123)...(161): WD domain, G-beta repeat
  misc_feature (1)..(280): Xaa is any amino acid
SGHTDNVWSVAFSPDGRQVLSGSGDKTIKLWEVASGREIRTFSGHTDNVWSVAFSPDGKQVLSGSGGNGDKTIKLWDTANGRELRTFSGHRTIVRSVAFSSDGKQVLSGSSDRTVKLWDTVSGQVIRTFSGNSSSVESVAFSPNGKQTISSFWINWIKLWDTANGQVIRTLLRHTSIVFSVVFSPDGKQILSGSEDNTVKLWDTGSGTEIRTFSGHSARIVSVAFSPDSTRILSGSWDKTIKLWDVASGQELRTFSGHTRDVTSVAFSPDGKHVLFGSYD

SEQ ID NO: 103064 - protein, 52 aa, Unknown
  Obtained from environmental sample
  misc_feature (1)..(52): Xaa is any amino acid
KGNNRINAKSIMGIITLGAAYGTELKIIADGEGEEAAVKTLVRLFESKFEEE

SEQ ID NO: 103065 - protein, 289 aa, Unknown
  Obtained from environmental sample
  DOMAIN (1)...(239): ABC transporter
  misc_feature (1)..(289): Xaa is any amino acid
IVALVGENGSGKSTVLQAAAAIYRSTVKYRYASDFFPDTPCERIQGATIRYTYRQGKVSQTKTIRKPTGRWRGNLERPERAVQYVDLRRIQPVGARVGYAQVLKASAAAGGFTAFDAPRLERLTQIVGKQYTDAGMSITDAGKDKPVPILQVGKVRYSGFHQGAGEIAAAELLVVDYPRYGIILIDEVETSLHPRAQRRLIRDLARVARELELQIILTTHSPYILSELPPEARIYLMDGASGKTAVVGVSPEFAMTQMDDEQYPECDLYVEDVRAATLVSEILVAIDRD

SEQ ID NO: 103066 - protein, 272 aa, Unknown
  Obtained from environmental sample
  DOMAIN (1)...(270): Periplasmic solute binding protein family
  misc_feature (1)..(272): Xaa is any amino acid
FSVAAEHKPATDNAKISIVTTIFPPYDFARAIAGDKADIAMLLPPGSESHSFEPRPQDIVKIQKSGVFIHVGGESDAWVKDILKSIDNPKMKVITLMDCVETVEEEIVEGMQEEEGEDKKDGEGEEGPEYDEHVWTSPRNAKLIVQKISETLREADPANADVYQKNTEAYLSRLDELDAKFKGVVDSAARKTIVFGDRFPFRYFADAYGLKYFAAFPGCATETDASAKTVAFLIDKIKKEKIPVVFHIELSNEKMANTIREATGAKVRLLHA

SEQ ID NO: 103067 - protein, 274 aa, Unknown
  Obtained from environmental sample
  misc_feature (1)..(274): Xaa is any amino acid
FFTQNPQIAAFFYTTTADASLSNMVYVNERFFLTRGIDINLADAFRVNSEKERENAKMGQTILVNASPMFNKAQSSTFLAAIFFPIHEGSGCVLFSTENLNESFGMGVNSSFLINASGDIIADADIERVKTRVNLFEQEIIKQIFNSPDRNKQMLAEFDVQLTQNHSSSSSLFSYLWEKINKNDKRNETKKARHYLAYTRLNTAGSVVITTIEYDKVFEGINATTRRNLYLTAAILFLSIMCIWFFAKSISVPLKTLAEAAHTIEGGVFDVELH

SEQ ID NO: 103068 - protein, 71 aa, Unknown
  Obtained from environmental sample
  misc_feature (1)..(71): Xaa is any amino acid
MKTDGSDKDAKGKKPEDNVKTLQERIKAMARQFEAALPKTITPERMMRIVLTTIRQNPKLAACPEESFFGA

SEQ ID NO: 103069 - protein, 183 aa, Unknown
  Obtained from environmental sample
  DOMAIN (94)...(183): SRP54-type protein, GTPase domain
  misc_feature (1)..(183): Xaa is any amino acid
VNLFADKIKKFFGIQQGLSDEVFEDLADLLVEGDFGARGAFSLTEKLKEECGREKAGSGEDAKRILARLLTEILLKTETAKQNIEEGGLSVGKPLGIVLLLGVNGVGKTTTAAKLAERYRTLENRRPILAAADTFRAAAIDQLKIHGERLGVRVVAHQHGGDPAAVIYDAIETANASGGDVII

SEQ ID NO: 103070 - protein, 200 aa, Unknown
  Obtained from environmental sample
  DOMAIN (67)...(200): Protein of unknown function, DUF258
  misc_feature (1)..(200): Xaa is any amino acid
MARRTFRLGQSLELQDLDGRDHYSSERNAAAKRRQTSASKLATEVEEHDPDAMLCLPDASQWGHLPQATIRQRHSQWIDLLLDDGSMLRATLAGKLKGVRLVCGDRVHFEPNAEQTDAKLPGAAVVAVMPRRSLLKRGGIDDREPWQLVCANADELWVCAAVVDPPMRPGLLERAHALALDAGLGFRIVVTKRDRASKSD

SEQ ID NO: 103071 - protein, 207 aa, Unknown
  Obtained from environmental sample
  DOMAIN (21)...(207): Prolyl oligopeptidase, N-terminal beta-propeller domain
  misc_feature (1)..(207): Xaa is any amino acid
MAVIAGCATLALVGQSVAKPPATRKLDVVDTYFGTQVPDPYRWLEDDNSLDTKAWVAAQNEVTEKFLSSIPERERIRARMTKLWNYERYSSPSKHGGQYFYFYNTGLQNQSVLYVTGNVAEKGRVLLDPNTLSPNGTIALSGMSVSDDGKYLAYSLSNAGSDWVKWKVRDVSTGADLKDEIQWSKFSGAAWKKDRLTAFTIQGTTRP

SEQ ID NO: 103072 - protein, 274 aa, Unknown
  Obtained from environmental sample
  misc_feature (1)..(274): Xaa is any amino acid
VKQAFRLGTRLDPWQEFISKDAWQTVLEQNPGLADEFLAQKDIAAPLPWSVINAGVSPAYLRKEFDKSNRGELTPPCVEDCIERCGVCNEQLTMNGEQRTMSNEQSLRTKTPVPSPQSPLPIKRPDPVIWRLLFGFSKEGSAVFHGHLSLIEIFSMALCRAGLDARYTQGFNPLAKLEIVSPLSVGISAGGEIAAVEFLHTVQPREFIEKMNATLPEGIKITKAECYCIPSGSKKHSLSSLLWGFGYAGTDGETIYVPATGEKAHREKHLSSGQ

SEQ ID NO: 103073 - protein, 176 aa, Unknown
  Obtained from environmental sample
  misc_feature (1)..(176): Xaa is any amino acid
MPAADETGKFALNISAALAILCCCILMIPQTQSVIVESGGKLLPGRNWDYAAWTSKISTFSLAASICLGVYFVLQIKRLRPFLEKYGEKICIAALTAIIAIGILVRIVMYAKCRSLWLDEAMLVESIASRNWSTLLASSLSNDQSAPILYVVAVKIICSVLGYSEFSLRFFSFISF

SEQ ID NO: 103074 - protein, 248 aa, Unknown
  Obtained from environmental sample
  DOMAIN (12)...(155): ATPase family associated with various cellular activities (AAA)
  misc_feature (1)..(248): Xaa is any amino acid
MQHSSGTKPRGILFLAGPTGTGKTEIVKTVTELLFEDEKTLIRFDMSEYAAEHSDQKLFGAPPGYVGYDSGGQLTNAVKNNPFSVLLFDEIEKANPKIMDKFLQILEDGRMTDGQGNTIYFTETLIFFTSNIGISKEIIDPDTRVVTGRENIVTPNDKLEVIEKKVRDAMKTHYKPEVMNRFGENILVFTYINETASQEIAKSQIDNINRNYQKNNKIEIKMSDDAYKLLYSLCWQDEPRSNGGRGIG

SEQ ID NO: 103075 - protein, 125 aa, Unknown
  Obtained from environmental sample
  misc_feature (1)..(125): Xaa is any amino acid
MNELLKLYEKRSKLADTLHAFLDSHRIGDVLPAEHEETYQKMDAEITALTKEIERQNKLNALDLELSRPMSEPLLGKPDKPAETKTGRASDEYKADFGNILRGRPPVNNVLSTSPDTDGGYLVPI

SEQ ID NO: 103076 - protein, 280 aa, Unknown
  Obtained from environmental sample
  misc_feature (1)..(280): Xaa is any amino acid
EGALEVIFSFRDLRAISLLDKLNKAQDSREEELLLGELHNTPSQLATKGLLDRVRSPRLVTRLESIRALEKLTALSESAEKALIDDIINNPFTTAYISARTLGNHGCTAAIPLLRELAVSTDYMLAGESIIALAKLKDEAFRPRIEEIILDTENPRLKIMGVEALGLYHSLNSLSVLLDILLKADPPPYLRDEVVLAMSEILETQHRFYHVLVRYLADNSLIAALATDEAESAFEFYNSALGKSKGSKKAGLAIAAHAKSLQAAVSDYIHNKNGTKLSRW

SEQ ID NO: 103077 - protein, 198 aa, Unknown
  Obtained from environmental sample
  DOMAIN (86)...(194): Exonuclease VII, large subunit
  misc_feature (1)..(198): Xaa is any amino acid
MLEKRKQKFAAEGLFDAERKRPLPRFPETVGVVSSPTGAAVRDILNILGRRASRIKVIILPAPVQGDEAASFIAARIRQANQWRLADVLIVGRGGGSIEDLLPFSDEEVVRATAESVIPVVSAVGHEIDWALCDFAADLRAPTPSAAAELVSESRFTAVNTVMSIKEGFISVIRSRLERANLLLKPFDPQDLNTVSAQ

SEQ ID NO: 103078 - protein, 275 aa, Unknown
  Obtained from environmental sample
  DOMAIN (1)...(275): Bacterial Cytochrome Ubiquinol Oxidase
  misc_feature (1)..(275): Xaa is any amino acid
MQHPVGYVVNNGRAEMTDFFALITNPYFLHQIPHVISASICTAAFFVLGISAWKMLQNTEDAFLFERTFRYALFMGFIGLIAVLLSGHLQGQSIAKLQPMKLAAMENLEKTSDPAPLSLVPGLEIPAMLSFMVHNRPSGEVQGLEDLQKTFEYRYGEGNYTPPVWVSYISFRVMVGASSIMMLFIIYGISWHLFMKKNIHRKIMFLMLLGISLPYIANSAGWILAEMGRQPWIVYGLMPTDKAISVGTSQHSIIFSITAFTLIYGRFGSHNIYID

SEQ ID NO: 103079 - protein, 260 aa, Unknown
  Obtained from environmental sample
  misc_feature (1)..(260): Xaa is any amino acid
LLLPLQKDAQAVEETDAAQIYENAMEAQRAENWERAITLLNSGIKLYPEDFRFPLSLGNLYYQRKLYNLAWDEFCRAEKISPPQEDLLLKLANTSGYLNKNDVSASYLERLLALDNSSREAIGSLAWMYFKLHRLAEGEALLLDAIDRLGLDMDFSMTLGTLYSDMFRYPEAKEAYQNAISLAEAAGDRHFASLSYYNLSILENRFYRYQLAYECANASLQAMNRASGRLSRGELYMRRMELKRALDDYQESYGMDSSHL

SEQ ID NO: 103080 - protein, 194 aa, Unknown
  Obtained from environmental sample
  misc_feature (1)..(194): Xaa is any amino acid
VADGLRSKGRKPYIVPMGGSNVIGALGYVACVQETLQQLFEMDLNMDAIVCTTGSAGTHAGILTGVFANSARIPVIGMSVSTKKEIKRKAVYDLCVELASKLDLRGTPDFEDVIVFDDYVGPGYAIPTEGMREAVTLLAQKEAILVDPVYNGKTVAGIIDLLRKGYFKNMKNILFIHTGGSPALYAYTDVFSGK

SEQ ID NO: 103081 - protein, 295 aa, Unknown
  Obtained from environmental sample
  DOMAIN (34)...(72): WD domain, G-beta repeat
  misc_feature (1)..(295): Xaa is any amino acid
TKHEILYGVFSSVGDLLLEGSWDGTIELWDKSTGQKIRTFSGHASEVKSVALSPDGKQALSCSTDGTIRLWDVASGKEIVKFISFDDDEWIVITPEGYYNSSLNGDKYLNVRVGNKVYGIDQWRDTFYRPQVLEAMLSGNTDIAVPPLRIQEAAQFEPPKITIRSPKQGSQSSSSYAELSVVVEDQKQPIREIRIFVNGRPLGGEELLQLTGTRGIRVGKDRIEPPEDLRRVEFILPVRMEPGANRIEVIATNGYSLSPEKVETFYESSQKYRPNLWILAVGVNNYSSPDLRDLK

SEQ ID NO: 103082 - protein, 101 aa, Unknown
  Obtained from environmental sample
  misc_feature (1)..(101): Xaa is any amino acid
IAFARVMGFEPDLSKRDEWWHVRFVFLEIPPQARTITLQTPHFTGREVFTMGGRKVFIKAVNFEAFQEESGEAAPGGGPGRPPRATEPKNLPGKPTFTLIK

SEQ ID NO: 103083 - protein, 244 aa, Unknown
  Obtained from environmental sample
  misc_feature (1)..(244): Xaa is any amino acid
TGKYVYINTGLEQKGRPGLNCSGFAKWLVDGILRPVTGERLEIPPLKEPYGIRGSSFTDIWEEKRDPFFGLDWIRNLASTAWSRLRSPAFGNLNEIEVHSDLFSQLILRTRNNTTIYSYPGFLENAGYGVEGLLPLLYLLAIDEPGKFYLAAVNNETGPPATEDNPRGPPRMRQYFHIAAFVPYFSESGVFHVAVFESAEETSISAFRNRYPLSEKTVDGEKRLFPNGHYVNLVRIPVETAFEP

SEQ ID NO: 103084 - protein, 65 aa, Unknown
  Obtained from environmental sample
  misc_feature (1)..(65): Xaa is any amino acid
ALNLHNIFLRVYSFNERAKKAYEKIGFKIIGNKREALLRGKERHDIILMDILCNEFYDKNNLNNI

SEQ ID NO: 103085 - protein, 145 aa, Unknown
  Obtained from environmental sample
  DOMAIN (3)...(145): Bacterial  dnaA  protein
  misc_feature (1)..(145): Xaa is any amino acid
MDIAQQYRFDTFAAGESSRLAFAACNAVAENGESHGNPLVLIGGTGLGKTHLLHSTANALHSKKSDLKIICATALEFYEEYAKNAQQIKENPSLMEEMATRFRSADVLILDDLQNIERKFESQHELLQIFNILLLTGKPIIVASQ

SEQ ID NO: 103086 - protein, 88 aa, Unknown
  Obtained from environmental sample
  misc_feature (1)..(88): Xaa is any amino acid
GEKYIILTTISNEAEIYKLSERIRGNIEHTYISYEGDEIKVTCSIGIAKFLKNDTLETAIQKADEALFVAKNSGRNQVKFYDSRLYER

SEQ ID NO: 103087 - protein, 154 aa, Unknown
  Obtained from environmental sample
  misc_feature (1)..(154): Xaa is any amino acid
YHIFEQDTDSPVIEFAEEGFHVKKCLVSGKELVFADYIAKNKIDTKIPIVGDYSGSGVNISFKSIENGIVNFYAPVFQGIKYRIAKPVSDYVALFNKRISEHTDVTSAFSCNCILNFLYGNLENNKIEAFAGPITFGEVAYQLVNQTLVYVTVI

SEQ ID NO: 103088 - protein, 134 aa, Unknown
  Obtained from environmental sample
  misc_feature (1)..(134): Xaa is any amino acid
MLSLFPVVTLTGPRQSGKTTLLKSLLPGYQYVSLEDPDNRLFCSSDTRGFLATYPDKTIIDEAQRVPELFSYLQTHVDKEGREGMYVLAGSQNFLMMQSISQSLAGRTAILKLLPLSYEEIKASGLTKSTIDEE

SEQ ID NO: 103089 - protein, 203 aa, Unknown
  Obtained from environmental sample
  misc_feature (1)..(203): Xaa is any amino acid
MKTEKGGQSPAKYIYDKTYESKFLVEAAGNTGWFEASYMKFSRTGACGVTIPAGSYTLDLMATPTSGGTASKSPSSSYYSSGSTVTVTAKAESGWQFDSWSGDAEGKTNPLSVTMNKNKVITAKFTPIIDTDKNIVTNGTFKNTDSWTFNKGSSYGSSEGTFSVSGNKATLSVTAIGKNPCEPQLVQNGITLVEGMKYRLTFD

SEQ ID NO: 103090 - protein, 281 aa, Unknown
  Obtained from environmental sample
  misc_feature (1)..(281): Xaa is any amino acid
MKSFCLLENAISDIFYEESALNGVKRVANTVSEDLFLVTGKKPNITSTLQNCTNGQIIITATLGNSALIDSFIEKNLLNVGDITGKRECYVIKVLETPFTDFPKIKQALLIIGSDKRGTIYGLFRLSEMCGVSPLVFWGDAVPEKKDKIYLEFENDIVSKQPSVTYRGFFINDEWPAFGKWCSEKYGDVNAKAYDKVFELLLRLKGNYFWPAMWNSSFSEDGPGLENALLADEYGVIMGSSHHEPLCRAGVEWQNHYSQYGNDNTWSFVSNSKAITKFGRM

SEQ ID NO: 103091 - protein, 290 aa, Unknown
  Obtained from environmental sample
  misc_feature (1)..(290): Xaa is any amino acid
GQTDVDVFNYTLTDSEGDTAGAALKIYAPGTSIDEGGDGTGGGDGDGPTISTGSEDAAGALVQVSEAHLAAGTSPDADALSKSGYFTVDAHGLLCELEIALGSETLALSFNKDGTLKTGAGEEIVTPYGVLTILGSTMDEHGVITVQYGYKLDAAYHSASGDAAPIEDESFTISVVGGEGATLHVGIADDAPVAYGESQNAHGVGSTIEGDILANDLFGADGRASSGGLLVQGMAVDGETRIEGEYGTLTIHADGTYSYVQTALMGKTDVDVFNYTLTDSEGDTAGAALR

SEQ ID NO: 103092 - protein, 273 aa, Unknown
  Obtained from environmental sample
  misc_feature (1)..(273): Xaa is any amino acid
VDAHGLLCELEIALGSETLALSFNKDGTLKTGAGEEIVTPYGVLTILGSTMDEHGVITVQYGYKLDAAYHSASGDAAPVEDESFTISVVGGEGATLHVGIVDDAPVALNDVKNAHGVGSTIEGDILANDLFGADGRASSGGLLVQGLAVDGETRIEGEYGTLTIHADGTYSYVQTALMGKTDVDVFNYTLTDSEGDTAGAALKIYAPGTSIDEGGDGTGGGDGDGPTISTGSEDAAGALVQVSEAHLAAGTSPDADALSKSGYFTVDAHGLLC

SEQ ID NO: 103093 - protein, 151 aa, Unknown
  Obtained from environmental sample
  misc_feature (1)..(151): Xaa is any amino acid
MLPLVSGTSETCEPEELCAGVPISFVVPVPEDEVPAEIVPCEVVPEEEPVSEAATPAEAVPCDEVVPTAELVPEAATPAEAVPCETVVEAEPVPEALTPAEAVPCEAVPETEPVPEVTMSRPDFGRLVSGCPEFTCTKSKVAFFAFNLSLR

SEQ ID NO: 103094 - protein, 272 aa, Unknown
  Obtained from environmental sample
  DOMAIN (140)...(270): Predicted permease
  misc_feature (1)..(272): Xaa is any amino acid
SKKDVQKLKEESSFAAAISGVVNSNANVIGTEGNAQVSIMGVEPDYIIARNYDINTGAFFDEEDLRNRSMVAVLGPTTANNLFGDAESAMSQRIRIGTNYFTVIGILASKGAGMGGGNQDDVVMIPLDTAMTRLSNTQSIAQIVMSVKSKEYMDAAQKETIAILCESRRITDTANADFDIMNQADMIDMASATMKTLTTLLAAIAGVSLLVGGIGIMNIMLVSVTERTREIGIRMAIGGRKRDILFQFLYESVILSLMGGLIGVGLAFLACS

SEQ ID NO: 103095 - protein, 203 aa, Unknown
  Obtained from environmental sample
  DOMAIN (13)...(202): NIF3 (NGG1p interacting factor 3)
  misc_feature (1)..(203): Xaa is any amino acid
VILDKFFRSLLDIEEFNSIDSSMNGLQVDNDGSEIRKVVFAVDASLESFKRCAAAGGGMLFVHHGLFWGVPMAVKGLHRARLQFLLDNNIALYAVHLPLDQHPKLGNNAALAKLLDIESPEPFGLYHGKKIGYKGKLKKPLTMDEAVKAIDYMGRLPLGVYPFGKELNESCAVISGGASQEAFQALDEKVDLYVTGEIGHSVY

SEQ ID NO: 103096 - protein, 216 aa, Unknown
  Obtained from environmental sample
  DOMAIN (1)...(114): Response regulator receiver domain
  misc_feature (1)..(216): Xaa is any amino acid
MNILICDDMEEDANRLATLIAESGFDVQTMVFTCPFASLDYFRSGGGIDACFLDIIMPKMNGIKLAEKLRENNFANDIVFLTTSNDFASQSYQVQAFDYLLKPLTGEKVNNVIGKLKKSQENADKTGLFVTTTQGVAMFIHFRDISHAEVIKHNVYIKLLDKSIIKIYTSFSKITEQLLLDSRFAKCHCSYIVNLGEIKAMAYNEIIMKNGSQIPI

SEQ ID NO: 103097 - protein, 125 aa, Unknown
  Obtained from environmental sample
  DOMAIN (5)...(121): PIN domain
  misc_feature (1)..(125): Xaa is any amino acid
MGQSFLIDTNIIIDIFKPSIPSSVKSKLANIPLVVSAVTYMEILGWLNATEQQLKPIQEFMNNAKILLIDKPVMEATIKIRQMKKIALGDAIITATALVHNLTLITRNVDDFKNIKDLKIWNPWE

SEQ ID NO: 103098 - protein, 289 aa, Unknown
  Obtained from environmental sample
  DOMAIN (30)...(260): Glycosyl hydrolase family 3 C terminal domain
  misc_feature (1)..(289): Xaa is any amino acid
NSGKYRKLGRKVINCEKHKQLALKAAEKSIVLLKNDDNLLPLDSSPKAIAVIGPAAANAHALFGNYYGVSPRFVTILEGLADKVKDAFGINLNYRQGCLMYTDINKSNVVYGEAKVTDIVIAVMGLDGAIEGEEGDAIASDSNGDRAAIELPPWQVKFLKAVRAAGKKIVLVLTGGSPIAFPEDLADAVIFAWYPGELGGTAVADIIFGDTVPSGKLPITFPASTDQLPPYEDYSMKGRTYRYMTEKPQYPFGFGLSYTSFRFDSIKLSDPPVSADYVVKASVTLSNTG

SEQ ID NO: 103099 - protein, 288 aa, Unknown
  Obtained from environmental sample
  misc_feature (1)..(288): Xaa is any amino acid
LSYVIVTPYTIAKSRTGGVIARLLSRVDLELAGAQIITPGEDFINEYAGILRNQEKRKVNTAGDLLANYIERNMGPSGGRRHRSLLLIFRGENACRKLSDICGALFPEKHSIEALSGETIRDTYADYIVDRDDPKKIIHFEPAILTPRHEELANEGMALFVKYFKNSKNVADNRSYQDSAKRERTLVILKPDNWSFASSRPGTIIDMFSRTGLRIAGIKIFSFSLNQALDFYGPVEFTLKERLAPIYGQKARETLERNYEFTLSENTARILGESFGREYAKEQFYKIV

SEQ ID NO: 103100 - protein, 76 aa, Unknown
  Obtained from environmental sample
  misc_feature (1)..(76): Xaa is any amino acid
MPVNTLVITGHGTNCHKECAHVARLAGADKADIVHFADLAGARRLLDDYQFLIFPGGFLDGDDLGAAQAAAQRWLH

SEQ ID NO: 103101 - protein, 131 aa, Unknown
  Obtained from environmental sample
  misc_feature (1)..(131): Xaa is any amino acid
NDIAKRYPIDYKEGKFYYDSSVEFHSAEEWNEAIASATKSINILAALEAGRSVVRGLPKQYTVRTWQKERDCLWNISGYSWVYGDPSKWRLLYNANKTKMPDPNNPDLIEPGMVIDIPSIKGETREGMWRP

SEQ ID NO: 103102 - protein, 212 aa, Unknown
  Obtained from environmental sample
  DOMAIN (120)...(189): GHMP kinases N terminal domain
  misc_feature (1)..(212): Xaa is any amino acid
MKIKELITQIDPDNFSKTGELRIFSAPGRTELAGNHTDHNRGKVLAASVHLENIAVVQKRSDNIVFFRSSNFPDVKIKLTDDSGAPDLQPKPEERGTTEALIRGIAAAFVNAGCAIGGFSANAASDMLPGSGLSSSAALEMLLCRVFDSLYGEGKRSPLEIAQFGKFAENAYFGKPCGLMDQIACAVGGAVFIDFADEAHPVIKQITLDLPP

SEQ ID NO: 103103 - protein, 286 aa, Unknown
  Obtained from environmental sample
  misc_feature (1)..(286): Xaa is any amino acid
VIDDYFFDEVAVGPGFSEEESRSYQSLISALPVSYSSFAVHHRPGHQVGSPVSVDIFPKVEGVKINSTATTVAGSKGRIEVSTSLQNGITQVNVRGTMGMEEPPGYAYRRMWQSWESFGGAFRAQCADNGIKITGKTVRQRVPDSLTAKAPFYLYGGDPLTEFVKHMFKWSSNFIAEMLFKTMGAEKLGDPGTWPKGAATVSAWWEFSGLPGKPQIINGSGMGGERASLPQSISADDSSGAPKNDNRVSPLQIVELLSYVYKQKSYFPDYAASLSSAGVDGTLRSR

SEQ ID NO: 103104 - protein, 229 aa, Unknown
  Obtained from environmental sample
  DOMAIN (6)...(229): Alanine racemase, N-terminal domain
  misc_feature (1)..(229): Xaa is any amino acid
MKKTGRAWIELDMNNLHHNVSVVRERLQSSCQIMASVKANAYGHGAVGFCRELNALGIHSFCVATIMEGVELRKHHIEGEILILGYTHPEQFPLLIKYALTQTVLDLDYAELLNGFGKKFVVHVKIDTGLRRMGERSENMDRIIRIFKFENLTITGIYSHLSAENDGETEKAFTQEQLERFQHVRAEIAKRCFNQPKAHIQNSYCLFNRPDLAFDYVRTGRALYGTLNN

SEQ ID NO: 103105 - protein, 280 aa, Unknown
  Obtained from environmental sample
  misc_feature (1)..(280): Xaa is any amino acid
VIQAGSASTFSIQNREPAGIVIIKKNVVQRRLGDRVLWERLSNESPVYPGDLIRVAEISFAALDIESNDIELDENTLIRISRSPDGEGFHIELSSGNISFSSVGAGKNVSLELNGRVIQPGLGTVLSASAGEKGMSVQVSNGTARITESRNNRGVSSLEVSSGEKIAIDLDGKELIEKTAVVTRPNPNTWYLKSTNESVPVDFEWNRINLSPGEKLRLEIAMDRNFNQIYKVIDGLDRQAHVSLETGMWYWRLSFAKSVLSDGRITVADGAVPQLTSPAL

SEQ ID NO: 103106 - protein, 242 aa, Unknown
  Obtained from environmental sample
  misc_feature (1)..(242): Xaa is any amino acid
AYNKFVSNGIPVIIGEFGSVDKNNTSARAAWAEYYVSFAKSKSIPCFLWDNDLTYEPEKFGIFKRSNNTFYFPEIKDALMRGAATIPPTPPSQGGETVKGSFNAYAGNSYNSLSSSVNYQIVDLPGESKTNVMKVVNPGEWAVALYDLSSSKGKNVTITFSAQVKRVGAAGTLNWQINNSDYPSVGTPINNAAAGTWHTMSGTWTGTPSSNDTPRFYLSTHENNSGSTTYYISNFTVTVTEN

SEQ ID NO: 103107 - protein, 295 aa, Unknown
  Obtained from environmental sample
  DOMAIN (96)...(295): Glycosyl hydrolase family 20, catalytic domain
  misc_feature (1)..(295): Xaa is any amino acid
IAVFSGQMAARFGDAVGPARIFCAKLDEGAITTEGYRLQIGPERIDLAAATKPGMYNGLQSLRQLFLSGNTGDVFAKKCGGHFVIPCADIEDAPRFPWRGFMLDCSRHFYHVSFIKKLLDALSLHHINVFHWHLTDDQGWRLPVPEYPQLTKIGAKRSNPRMQEKVFEGEGFYAEEEIRDIVAFAAARHIMVVPEVDLPGHTVSALASYPKLGCTGGPYQVEYRFGVFDDILCAGNDHIFDFTTAVFDSLARLFPGKYVHIGGDEAPTVRWKACPRCQKRMAELGLAEPRQLQRW

SEQ ID NO: 103108 - protein, 136 aa, Unknown
  Obtained from environmental sample
  DOMAIN (6)...(136): CobQ/CobB/MinD/ParA nucleotide binding domain
  misc_feature (1)..(136): Xaa is any amino acid
MKKPRLLLAGAHSGAGKTSVAAGLMSALVRRGLTVQPYKAGPDYIDPAFHTFVTGRQSRNLDSWLLEQATVQALFGHHAPDAGQGLSVIEGVMGLFDGHLEEGAGSSAHLARILAAPVVLVIKRGRLGPQRGGPGA

SEQ ID NO: 103109 - protein, 229 aa, Unknown
  Obtained from environmental sample
  misc_feature (1)..(229): Xaa is any amino acid
MSNTDRYLLPEENEDLEKEDFETQNEQDQSFKDVIEEDDSETAKTLHGSLVQFGFVNFDTNVADNSSSEAMVSAEHRKYFRRDVYVGIKDTEQKIDFLGRVVEGPFHSPHEVGIDSAITRTTVLHPDRTQFRPSYYVTGTIEVLGQLGEDEQLIPSPTRPRPYSEIYIFPPERLQKFLEINGNFYLGQLMGYEQIAVKTDVDSKNFLPRNIGIFGTVGSGKSNTTQVIM

SEQ ID NO: 103110 - protein, 57 aa, Unknown
  Obtained from environmental sample
  DOMAIN (3)...(56): YcfA-like protein
  misc_feature (1)..(57): Xaa is any amino acid
MKRTELIQLITAKGVIFVRHGSNHDIYMQPKNGNAEPVPRHNEIKEFMARKIIKNLS

SEQ ID NO: 103111 - protein, 282 aa, Unknown
  Obtained from environmental sample
  DOMAIN (145)...(282): Domain of unknown function (DUF323)
  misc_feature (1)..(282): Xaa is any amino acid
ASTLSAADLALIDRKAAEIQEAIEMVEGPSLTGVATNLIFNRYSLSLPAGTWEDLIATLVPSNAPQLVHWETNNPGIIDLGDYGTSRGMSRCSVRGVKEGTAVITAYINTVSGRRLRTTCAVTVTAAPTGPTGPTGPTGPTGPIGPIDMVRVEGGSFQMGKELGTAKSGDVTPVRTVTLTGFYMGKYEVTQAQWYAVMGTTIAQKQNSAVPTFTPPGFPQDTSNKGRGDKYPMYYVTWYDALVFCNKLSMAEGLSPAYRINNSTDPAAWGIMPTSHNAAWDA

SEQ ID NO: 103112 - protein, 264 aa, Unknown
  Obtained from environmental sample
  DOMAIN (1)...(159): Mur ligase middle domain
  misc_feature (1)..(264): Xaa is any amino acid
LSFIDGLENNDNVVLELSSFQLGDLKGRETPDGKALLKPFASIITAIMPDHLDRYVSMEEYIDDKRNIYRGQDSSCVTIAGDCPWGKSFLSETKARPLVYSRYPLGKNQSGGWLENEKGYAHFLKWEGFAEKIAELLPKKLLVKGNHQKLNLLAAALAAYANGAEAEEIRCALADFNGIEHRLELFSEANGICFYNDSAATIPQAAAACIEALKCGHPLVLVTGGTDKNLDFSALAEAASGAGALILLAGTGSEKLASLLSVKG

SEQ ID NO: 103113 - protein, 291 aa, Unknown
  Obtained from environmental sample
  DOMAIN (51)...(207): Anticodon-binding domain
  misc_feature (1)..(291): Xaa is any amino acid
MCAQGQDVLVDKESFKMGSKFANKIWNASRYILMNLEGRKIIENPKLLPVDKWIYSRLNSAAKSMREAFFSYRYNDAAQTAYEFFWNDFCDWYVEATKLSTKNEDSSEQGCAEKDRSTTILLDVLTQSLRLLHPLLPFVTEEIYQKLPNTDGKTLLINNRYPEYDEKLFYPAEEKNFSSLQSLVGAVRTLRSECGITADKKLRVLARTGQENEEILRRNEGLIKLLAGIGDLRIEAVKDADSLNRPEGSIGMAISGFEVFVFVAEAVDTAALKKKFTNDLERDRKYTDSLR

SEQ ID NO: 103114 - protein, 262 aa, Unknown
  Obtained from environmental sample
  misc_feature (1)..(262): Xaa is any amino acid
EYLNLIEKAFQQYTEVWEAFPECYPAALGLARVMEAQGRYPQAEGLLSDLASSFPDNMQVKRQLALSYYHSGNWPRAQAAVDEILQKYPRDGEFVLMKAHILVEQGQLLQAQAPLELYAGINPNNRFALFLRARVQAEAYNNREGALNYLRSIIRSSSPEDDYYNEAAIYAVRLLTESNRPQDQIEGRSLLIRLLSVPDPSLEAVSLAMWDAIRREAWTDARLYLARLLDERRSTQDLLAAYTVEREDGNAAAALSFARELY

SEQ ID NO: 103115 - protein, 265 aa, Unknown
  Obtained from environmental sample
  DOMAIN (1)...(144): GAF domain
  misc_feature (1)..(265): Xaa is any amino acid
AFEETMTAGVKEIADVFNLDRLSIWRNKPRPDAMHVSQIYRWDRDSGGTTVATKGLEDTTYARFAPRWEKLFTSGESINSPVRLLPEAEMLKSFGCVSAFVTPIFINNAVWGFALLEDRHNERFFEDDSVEMMRSGILLCTNTVIRADMEREIANANDFNRVILDASPLGFTIFDENARVIDCNDIVWKILGTTKSYYLEHFNEFSPKYQSDGVLSLDKTVEIIRRAINGEKLLFEWTHCTPMGELIPIEVTTVRAMYNGRYVAM

SEQ ID NO: 103116 - protein, 267 aa, Unknown
  Obtained from environmental sample
  misc_feature (1)..(267): Xaa is any amino acid
FAVLNLFAFLVSWNRKWRVTSFVGLFLNIAGAAYICLFAGPGSFNSPSIAPAASDTLGMTLTIIYAVFSFLIYTAIPVVSTFQAKLKFRKSDIVLLAINTVFSGLIMYGVFWRYELKDYNGLLAVAYAVFYLLLARFIEKKFTGEEVYTRALFYLTALAFVVLIIPLQFGRVWLSLGWLAEGVILAVYGILNNEKRFRRAGFIICLLCLGAFLLFDLSTSWHKLFIWKYSAITLGSLLILGAYMYKKKMTGGFISVYKYFAVINAWI

SEQ ID NO: 103117 - protein, 70 aa, Unknown
  Obtained from environmental sample
  misc_feature (1)..(70): Xaa is any amino acid
MNINKFIDKKYEKLTLKELTAAPVDAIAGISVGDAKLLKEAFKVKTISDLAKLPYINWAKAICALAEGEL

SEQ ID NO: 103118 - protein, 284 aa, Unknown
  Obtained from environmental sample
  misc_feature (1)..(284): Xaa is any amino acid
MSRERFDWLKTIATEIIATPGTESNVKEIFDKVNELKATRKDVMIFNQFDELGNYLWHYSVTGPAIAEVFENLARSNKGLNFSGACFTSGSAGTLASGDFLKQRYVKSRLAVGEALQCPTILNNGFGSHRIEGIGDKHIPWVHNVKNTDMAIAIDDNDCMALLRLFNEEEGKSFLVSEAGLSKEQVDNLALMGISGIANMLCCIKFAKYYELGASDVVTTVLTDSVDMYLSRLEELRQEEGSYTRKKASADFSASLQGEGIDNMLELTQQERRRVHNLKYYTWV

SEQ ID NO: 103119 - protein, 270 aa, Unknown
  Obtained from environmental sample
  DOMAIN (1)...(243): Pyridoxal-phosphate dependent enzyme
  misc_feature (1)..(270): Xaa is any amino acid
ATGNAASSLAGAAASLGLKSVIFVPERAPQGKLTQLLIFGATVVSVKGDYEATFRLSAQAIEKYGWYNRNAAINPYLSEGKKTVSMEIAEQLGFAAPDFVAVSVGDGCTIAGVWKGFKDLYATGLIDKLPRLISVQAEGCCPINRAIENNTAIEKMEENTLADSIAVGVPRNGDKAMAAIRESKGITVNVSDDEILAAMQFLGKNAGVFGEPAGVTGTAGLAKAAAKGLIPKDALVVSIVTGNGLKDVASAQKAAAAANLIRIEPDMALL

SEQ ID NO: 103120 - protein, 122 aa, Unknown
  Obtained from environmental sample
  misc_feature (1)..(122): Xaa is any amino acid
LLIRGRVGWGEYAPFADYDDDAAAAWLRAAREAADEGWPEPVRDHIPVNVTVPAVGPVLARTLTLCGGGCQTAKVKVAAQVKTGELEAIDAEAARIAAVRAALDDLHGPGIGRIRIDANGAW

SEQ ID NO: 103121 - protein, 163 aa, Unknown
  Obtained from environmental sample
  DOMAIN (1)...(149): Bacterial export proteins, family 1
  misc_feature (1)..(163): Xaa is any amino acid
MGLGASETFDPLAQVENPLMGQYFNLVSMLVFLVVGGFRQLFVGGFWRSVQTINIAMLVEGRGPVITMMASGLAKLFLDAMVISLPILGTLFLTSLSTGLISKAAPQINILSEGFPIAILTAYLLLFATLPFLVETFSNVIDAGFANIQRLYTQIGQQIGGGS

SEQ ID NO: 103122 - protein, 103 aa, Unknown
  Obtained from environmental sample
  misc_feature (1)..(103): Xaa is any amino acid
MTKSLLIDLQWFSDNAEEEGRTEQPTEHKIQRLREEGQVSKSQELIGAVTLFLPALMLLFIAPYMLRTCVEMLRFFLLRAVELDPTKDAILVVAFFRYMARLA

SEQ ID NO: 103123 - protein, 62 aa, Unknown
  Obtained from environmental sample
  DOMAIN (2)...(56): Ribosomal protein L19
  misc_feature (1)..(62): Xaa is any amino acid
VTVRKISLGVGVERTFPVHAPTVESVEVITRGDVRRAKLYYLRNLRGKKAKIKEKRAVTPAK

SEQ ID NO: 103124 - protein, 264 aa, Unknown
  Obtained from environmental sample
  DOMAIN (51)...(264): Cellulase (glycosyl hydrolase family 5)
  misc_feature (1)..(264): Xaa is any amino acid
LDSAVTALQSAITTFSGARQQGTKEGGGTQNFRDITAAQLAAEIKIGWNLGNTLDAYNLTWLGANPTVNQMETAWGVPTTTKANITALKNAGFNAIRIPVSWTKAASGAPNYTIRADWMARVKEIVNYAVDNDMYIILNTHHDEDVLTFMNSNAAAGKAAFQKLWEQIAAAFKDYNEKLIFEGLNEPRTPGSSSEWNGGTAEERANLNSYYPIFVNTVRNSGGNNGKRVLMINAYAASAEAVAMNALTLPTDSAVNKTLCSFHS

SEQ ID NO: 103125 - protein, 96 aa, Unknown
  Obtained from environmental sample
  DOMAIN (10)...(96): Domain of unknown function (DUF1732)
  misc_feature (1)..(96): Xaa is any amino acid
VGAANVDKNRFEQELIYYLEKLDVTEEKTRLRSHCSYFIKTSKEEGAGRKLGFIAQEMGREINTLGSKANDSNMQRIVVNMKDELEKIKEQLLNVL

SEQ ID NO: 103126 - protein, 280 aa, Unknown
  Obtained from environmental sample
  misc_feature (1)..(280): Xaa is any amino acid
VQLALVNKADGRSVRCIGAAADELFIYPHSSAPLPLVNHQSSLPLTCNSIAGYSSYVWTVRDSANTTLASELTIPMSGTAVTLTNLNVGGLTVGRKYTVTVRATPTGGGTDLIATKIITVTGCPSIEVVGPAAVYPSSSATYSVANIAGVTYTWSVPSDWTITSGRGTNSITVATGTSGTAAGVGAVGVALSCGAARTMNVMRHGNGTLIAGLTWANRNIAAGRTFAARPDMYTEFYQFNRTTAYNASDPLTPAWDTSINGSGAWDDTVNPVCPVGWRLP

SEQ ID NO: 103127 - protein, 163 aa, Unknown
  Obtained from environmental sample
  DOMAIN (3)...(123): TrkA-N domain
  misc_feature (1)..(163): Xaa is any amino acid
MNIVIAGDGEVGFHLAEMLSNEEHNITVVDPHHELLKLLEAHTDILTIAGDPTSIRVLKNANVHDADLFIAVVHDEQPNILACILAKKIGAKRTIARINDAEYLSDEYKTFFQSFGIDQLVSPELIAAKEIFNLLKQMGTEVFSFDDDQLSLLQIRLCKESKV

SEQ ID NO: 103128 - protein, 79 aa, Unknown
  Obtained from environmental sample
  misc_feature (1)..(79): Xaa is any amino acid
LSVIYVKVQNFALTQLLTQKTKIMETIIQTTQPQIGQPIFQKIHEIREQKVMFDFDLAELYGVETRVLNQAVRPNIDAF

SEQ ID NO: 103129 - protein, 213 aa, Unknown
  Obtained from environmental sample
  DOMAIN (84)...(177): Pyridine nucleotide-disulphide oxidoreductase
  misc_feature (1)..(213): Xaa is any amino acid
MEDLRKQAERFGADIRSGIVTAVDLSKRPFLVTVDDSKQLLAETLIISTGASANWLGLESEKKFQGLGVSACATCDGFFYRNHDVCVIGGGDTATEEASYLANLCNKVYLIVRRDELRASKAMQHRVLNNPKIEVVWKHKPKEILGDDSGVTGILLHHSDTGEERKLNVTGVFVAIGHTPNTALFKGQLDLHPEGYITTVPGSTKTNVAGVFA

SEQ ID NO: 103130 - protein, 130 aa, Unknown
  Obtained from environmental sample
  misc_feature (1)..(130): Xaa is any amino acid
MKLGVMTVLLGQKSVDEAFRYLSSLKVQTVEIGTGGYPGTAHLNPKEFLADSGSAAAYKEMLKRYNLEISALSTHSNHVHPQKEIAAKAHEDFINTCKVAEKLNVDTVVTFSGCPGDHEGAKYSNWVTCS

SEQ ID NO: 103131 - protein, 270 aa, Unknown
  Obtained from environmental sample
  DOMAIN (44)...(175): Thiamine pyrophosphate enzyme, C-terminal TPP binding domain
  misc_feature (1)..(270): Xaa is any amino acid
RRKAKSEGIAASIIDKLLANTQADDAAIDEQRKNVDALKAALKDNTKTTAKLLLSLADYFVKRSVWILGGDGWGYDIGYGGLDHVIASGKNVNLLCMDTEVYSNTGGQMSKATPVGAIAKFAAAGKEITKKDLGAMAISYGYVYVAKISLGANMAQTIKAFREAESFDGPSLIIAYSHCINHGIDMSKGLDQGKAVVSCGLWPLYRYDPRLKDQGKNPFQLDSKDPTTSLEDFMYKEVRFKSLKAASPERADALLARAKAQAERVWKEYK

SEQ ID NO: 103132 - protein, 174 aa, Unknown
  Obtained from environmental sample
  misc_feature (1)..(174): Xaa is any amino acid
AYYEESENKFHSYKVTRILLGLAFVLCVGFLGGFFGIGAGWAITPIQNFILGVPIKVAAANSGIILGMVNCIAVWPYMLAGSIIPLFVLPWLSGKVAGGYLGALAFVKIKVTVIRFILSGIMIYTSFELITDGLAKFNLIPKIPGRISLAIFLIIMVIDALLLFRAQRKKAWRK

SEQ ID NO: 103133 - protein, 71 aa, Unknown
  Obtained from environmental sample
  misc_feature (1)..(71): Xaa is any amino acid
VCPYKQRIFLFTPGFEFKITDALLTNFHWPKSSLILLVSAFYGRENTLDAYKYAVQNQMKLFSYGDGMLII

SEQ ID NO: 103134 - protein, 192 aa, Unknown
  Obtained from environmental sample
  misc_feature (1)..(192): Xaa is any amino acid
MDDQILRKLFDACIRAAGILGITDCNTEFRSIHSRLAPPRIHSNGTICEWNEEYEEAEPGHRHFSNLWALWPGGAMSPDEEPELAAAARKTLERRLAHSGGHTGWSRAWLVNFFARLNDGNAALENLNAIFSEFTLPNLLNNGPPFQIDGNFGALAGITQMLVQSRVHYSNTDTVLVLDILPALPPSWPSGR

SEQ ID NO: 103135 - protein, 187 aa, Unknown
  Obtained from environmental sample
  DOMAIN (1)...(162): NAD binding domain of 6-phosphogluconate dehydrogenase
  misc_feature (1)..(187): Xaa is any amino acid
MAIIGFVGLGIMGRPMAKNLIKAGYKLVVYDKFAKFDDLVSLGAEGAVSNKEVASKSEIIITMLPNSPQVKEAIIGPGGVIAGLEKGTIVVDMSSIAPEACREVGAVLAEKNAAFLDAPVSGGESKAIDGTLSIMAGGDKAVFEKVKPILEKMGSSVVLVGPLGAGNVVKLANQIIAAINLAAISEA

SEQ ID NO: 103136 - protein, 210 aa, Unknown
  Obtained from environmental sample
  DOMAIN (2)...(131): Cyclophilin type peptidyl-prolyl cis-trans isomerase/CLD
  misc_feature (1)..(210): Xaa is any amino acid
MTVCNFVALAEGKMTAAGGKPFYDGLVFHRVIKDFMIQGGDPLGDGTGGPGYRFPDEFDPALLHDGPGVLSMANAGPGTNGSQFFITHVATPWLDGKHTVFGRVVSGQNVVDAIQQGDKIQKITIIRNGEAAANFKADQTVFDALVRNSESAAAAKAKVRQDEEIAEIARKYPNAVVSPSGLRYIVQKQGNGQKPSAGSTAVVNIKGSLL

SEQ ID NO: 103137 - protein, 195 aa, Unknown
  Obtained from environmental sample
  DOMAIN (4)...(161): Methyltransferase small domain
  misc_feature (1)..(195): Xaa is any amino acid
LLKVFSRILDEDAATGKALPRSVLDAGCGCGVIGICAAAAITAMGSGAGTGVKVRAQDRDELARLFTAHNAEKNNIPLAVLEAYAEPLLAGPENRRWDLIMSNIPAKAGEPVLEDFVHRSAALLNPGGKAIMVAVHTLADFFREQIMLAGAELVVEEKGTEHSVFVYCGKSPQAALDHAPIKTGKGFLERYPFYA

SEQ ID NO: 103138 - protein, 291 aa, Unknown
  Obtained from environmental sample
  DOMAIN (154)...(277): Tubulin/FtsZ family, C-terminal domain
  misc_feature (1)..(291): Xaa is any amino acid
KADNKLQIGARLTGGRGAGSKPSVGEDAAKEDQQSISDVSRGADMVFVTAGMGGGTGTGAAPVIAKIASDHGSLTVGVVTKPFEFEGEAKMQKAEEGIKKLREFVDTLIIIPNENLFKLVDSKTSSLHAYKLADDVLRQAVQAITDLITKTGLINIDFADVQTTMKGQGDAHMGIGIGRGDSRAKAAADAAIDNPLLEDTGIEGATRLLVNISGPDDVSMLEVKDIMMTIRAKAVPNVEIIFGQLVDPELGEDIKVTVIATGFNAKAASSAKSSDPVRKAETAPGDVISID

SEQ ID NO: 103139 - protein, 285 aa, Unknown
  Obtained from environmental sample
  misc_feature (1)..(285): Xaa is any amino acid
SSLGNVTVSSSSSEVTVSSSSSDVTASSSSSDNTVSSSSVVEIPKCGVVEYNPLTEQCCGSNKYTVATQFCHTDNTVKDKCGGTLVFAPGTEQCCGNNKYTLATQFCYNNSKIGNFCGNRTEHYNPDLYECKTGDKIYLKNGLTDSRDSKHYEAVLIGTQTWMAENLNFDVPDNATDVCYNNNTTNCDTYGRLYNWSTAMGGVCPAGWHLPSDAEWTALTTFVGTNPGTKLKANSTLWITNTGTDEFGFSALPGGGGYASGGFDYVGSGGDWWSATEDDASNAYG

SEQ ID NO: 103140 - protein, 129 aa, Unknown
  Obtained from environmental sample
  DOMAIN (14)...(129): NeuB family
  misc_feature (1)..(129): Xaa is any amino acid
GTAHGGSLSRAQELVQAAAEAGTSCVKLQMVFADEILHPNTGEVTLPGGKIRLYDRFKQLEMPLDFYAAVKEYVESQGLLFLCTPFGLKSAQMLRELQPKIVKIASPELNYTALLEESPSGACLHCCHR

SEQ ID NO: 103141 - protein, 140 aa, Unknown
  Obtained from environmental sample
  DOMAIN (76)...(140): HAMP domain
  misc_feature (1)..(140): Xaa is any amino acid
LCVPEKDYVISGTHANSVTGASIESLPWDINAESFTLYDIDYLSFGRYMDNGWLLSVQIPKHEIFDEMEEQNSRFSLLIAFAMVAMIGLAYYLISKFVNNPIKRLTSDVSRIALGNLDARIQINSNDELGLLARTFNKMT

SEQ ID NO: 103142 - protein, 95 aa, Unknown
  Obtained from environmental sample
  misc_feature (1)..(95): Xaa is any amino acid
MNSYLKRFTDTILKNRLHDSGAVLIQGAKGCGKTETALQAAKSSVRLDVDSDVRMRMELDPKSVLEGAVPRLIDEWQEHPQIWNYVRREVDEPEE

SEQ ID NO: 103143 - protein, 241 aa, Unknown
  Obtained from environmental sample
  DOMAIN (1)...(241): Acetokinase family
  misc_feature (1)..(241): Xaa is any amino acid
DCIVAGIEAANIPIKTLDAVAGRGGLIKPVDSGTYLVNAAMLADLHKPAAAAHASSLGAIIASELATPLSIPAYIVDPLVVDEMDRNAKLSGMPGIERASVFHALNQKAIARRVAEKIGKPYENSRLVIAHLGGGITVGAHRYGRVVDVNDGLAGEGPFTPERSGGIPAIPLINMCFSGEYTREQMIEKINGNGGMRAYLGISDEAEVQKMINDGDDFAALVLDAMALQTAKEIGAMTAVL

SEQ ID NO: 103144 - protein, 151 aa, Unknown
  Obtained from environmental sample
  misc_feature (1)..(151): Xaa is any amino acid
MENEMNYIFVFGTFFVVVFCIVRYFVENNKTDNKETLGYNETEIMFFNKISEKNRPYKLLNIYFPFDLMIIKSLFISEQIPYYVEFEHFMGVKPYVQIINYNNTNFYILEEDYNDAMIIIENYLKTKTLNNYKLKEKITNMFELALISWVI

SEQ ID NO: 103145 - protein, 212 aa, Unknown
  Obtained from environmental sample
  DOMAIN (5)...(210): Amidohydrolase
  misc_feature (1)..(212): Xaa is any amino acid
MTTIIDFHTHFFPPELAERAITRLIENAAPTIAMKNHTDGTVGGLIESMRAGGIGKSVTLPVATKPSQVSTINRGVAESASAYPGIIQFGAMHPEMDGFEAEIDFMTANGIKGIKLHPEYQYSYVDDPRAFPIYEKLASAGIIVVFHSGRDPGPFTNDHAMPPALRTIHKNFPTLKMVAAHLGGWMVWKEVEETLAGSDIFFDTSAIYKLLP

SEQ ID NO: 103146 - protein, 120 aa, Unknown
  Obtained from environmental sample
  misc_feature (1)..(120): Xaa is any amino acid
MRYAGVMISGALAGLGGLVFIIPTSTQFNADVSGYGFLALAVLIFGQWKPGRILAAAFFFGLMKAIASSYSGIDFMKAIPIPSYVYKMIPYIATLIVLAFSSRNSQAPRAEGIPYDKGSR

SEQ ID NO: 103147 - protein, 284 aa, Unknown
  Obtained from environmental sample
  DOMAIN (173)...(283): NusB family
  misc_feature (1)..(284): Xaa is any amino acid
DTGRDDHRKDYHRKDDTGRSGYRKDRYGKDDAGSGDYRRKEHYRKDDTGRDDHRKDNYRKDDTGRSDYRKDNYRKDNYRKDDSGRDDHRKDYPRKDNYRKDDIGNEDRRKEHYRKDSAGRGDYRKDRYGKDDAGSAGGYRKDQSRKGDTRRKDHRKDQYRKDDTPRGKEEPAVGVRQLVQRILADFDSSPGDPERIADRILARRYVEHRDRRFIFEIVYGVLRNRIYLDYVIDTFISDEREPMSDVLRRILRIGAYQILFLDRVPDHAAVNESVNLAKRDPNTA

SEQ ID NO: 103148 - protein, 90 aa, Unknown
  Obtained from environmental sample
  DOMAIN (3)...(85): Ribosomal protein S20
  misc_feature (1)..(90): Xaa is any amino acid
LAKKSNSAEKRHRRSEERRLRNKSAKSAVRSSVKAFVTLAQKKDPQAGVALKEMIKKIDTAAGKGIIKKNAAARKKSRMQRYYNTMKAAQ

SEQ ID NO: 103149 - protein, 289 aa, Unknown
  Obtained from environmental sample
  DOMAIN (98)...(265): Radical SAM superfamily
  misc_feature (1)..(289): Xaa is any amino acid
GGPAVSNPLSFSPFIDAFWIGEAEAGFFDLAHELAVMKEGGKGRGALLEKISAHPNIYVKGKKKSLRAIYGGFSDSDETAAAVFPVPSMKIVQHHGSVEIMRGCPNGCRFCHAGFWYRPMRQKSLAFVEAQIGEMVTKGGWHEISLSSLSSGDYNNIDSLVENLNDKFAGQHVSFQLPSLKVSSFSLSLLEKISVTRKSGLTFAVETPEDVWQMSVNKEVTLDSVTSILNEAKKRGWKTAKFYFMTGLPLPVSEKKEEEEIVNFIARLGRRTRMHFNINVGLFVQSRTL

SEQ ID NO: 103150 - protein, 81 aa, Unknown
  Obtained from environmental sample
  misc_feature (1)..(81): Xaa is any amino acid
MLIAKIALGLFGMGIVVFVHELGHFLAARLVGIDVEAFSIGWGNPILKKKIGAVEYRLGMFPIGGYCKMRGENEFKEAVGK

SEQ ID NO: 103151 - protein, 241 aa, Unknown
  Obtained from environmental sample
  misc_feature (1)..(241): Xaa is any amino acid
MGLNMQGKKAVTGEYKSRYQKAKKKEKKAILDEFIKVTGYHRKSAVRLLNAKRVKQVTVYVDSKPVQIKPEKKRPPNRKGKRIYTDEVISALRLVLTFFWYKCGKILAPLMRQQMAYIARWPAFGITGETAEKLKKISPASIDRYLKKDKAALRLKGKSLTKPLDSLKSRIPIRTFYTSEERKKPGFWQIDTVHHCSQATQGQYLHTLTATDVVSGWIELSALLNNAHKWTFEALSRIRAV

SEQ ID NO: 103152 - protein, 222 aa, Unknown
  Obtained from environmental sample
  DOMAIN (1)...(153): Calcineurin-like phosphoesterase
  misc_feature (1)..(222): Xaa is any amino acid
MLYGIFSDIHANLPALEAVLRSMDSRKVERRICLGDIVGYGPSPNECVATVKENSDVCLLGNHDNVALKREHHFDFNIYAKAAMEWTWEHLTDESKEYLKSRPYTAAEKGFTFAHSSPMSPADWHYLADLDGALEAFSYFRTPYCFIGHTHSPVIVAANRDDPYSEIPVISDGPLYRPKKHEKVLINVGSVGQPRDRNNRACWCLADSDCSWIEFVRVEYDI

SEQ ID NO: 103153 - protein, 245 aa, Unknown
  Obtained from environmental sample
  DOMAIN (5)...(218): Phosphotransferase enzyme family
  misc_feature (1)..(245): Xaa is any amino acid
MSSYKLDNIIADRQTKKIYRDGDKVIKLMGEEFPASDVLSEAHNLAAVGETGLKVPKLVEVTKINGKWAVVWEYVKGTTLAELMKKHKHKEQQYLERFVDIQLDMHRYSATRLPLLIEKMERKIKASSLDATARYEILGRLASMPKHTKLCHGDFNPSNIVINDNDEAYIIDWSHATQGNASADAAHTYMLFWLTGNLDLAEEYLSLFCTKSDTAVQYVEKWVPIVAASQLPKAKPDDKGLLLSW

SEQ ID NO: 103154 - protein, 290 aa, Unknown
  Obtained from environmental sample
  DOMAIN (10)...(286): Bacterial extracellular solute-binding proteins, family 5 Middle
  misc_feature (1)..(290): Xaa is any amino acid
AFFVNPRTLQPDLALAERWDLSEDKKQWTFTIRQNAKFSNGDAVRAEDFRAAWISLLSPGRDSPYSSLFDVIAGAREYRNGLEKNPEKVGIAATGPRTLVVRLNSPASFFPYMLCHHSFSPIHPSMVNKEVWSPGENSKNWQPPVSNGPFQISAMNDESITLLKSDQYWDARRVSLNKIILKYTETADEASALWNSGEARWISGDVNLDALTDRSGIQVNAMFATHYYFIRSADKPWDDHRIRRALSLALPWGEIRQGHYLPAKTLIYPMYGYPEIEGISETNIEEAKKL

SEQ ID NO: 103155 - protein, 279 aa, Unknown
  Obtained from environmental sample
  DOMAIN (50)...(279): Bacterial DNA polymerase III alpha subunit
  misc_feature (1)..(279): Xaa is any amino acid
SRRTGIPLVATNDVHYLDREDNVAHDILLCIGTGKVRTEEKRKKYYGEQFFFKSGEEMAALFPDYDEAIANTVRIAARCKTDVPDIKVKELPKYLPDFEIPAGFDNADAYIRHLVSAGIAVRYANEKAAGGEKWRKITDRAEYELGVIIQMGFTGYFLIVADFINWARNNNISVGPGRGSGAGSIVAYALRITDIDPLKYGLLFERFLNPERISMPDFDVDFANEGRDDVIKYVTEKYGQDKVGQIITFGTLGAKAVIKDVARTLGISIPESDMITKLI

SEQ ID NO: 103156 - protein, 272 aa, Unknown
  Obtained from environmental sample
  DOMAIN (107)...(193): OB-fold nucleic acid binding domain
  misc_feature (1)..(272): Xaa is any amino acid
MAFATLEDYNGEIELTFFRGAWTQCREKIENDKVAILKGKIEYQQNRDKRSFTVDECLELDNVTNAEIANKEDNQQWEKFANVRKHAKDMGLNLLDVSKGKAEAGTYIAIGILKSIRTHVDKNGKEMAFGTLQDQSGEMDILFFAKTWENCKAKAVIDEILALKGTIEAQRDQYNGKNGNGKNTLLVTSIQDIDKLVRAADKKAADKNSRQRREDAADKMETTMHIRLAAGAAENEEMLNFLKSCIEENPGSCPVFIHVPFIALGKESSQDK

SEQ ID NO: 103157 - protein, 241 aa, Unknown
  Obtained from environmental sample
  misc_feature (1)..(241): Xaa is any amino acid
ALSDVTNAKNETGIITAAELLEKEFPPQKWIIPGLIGGGLIMIAGPPKIGKSWFVLQLAAAAAAGCRFLDLWAKQTGTLYISLEDTERRLQSRMKILNTPAINELKITTQWKDGYIGIDNYLEKNTDVGLVIIDTLGRFAGIEDMNDYAMTTNALSKLKVIADKREAAIIVVHHARKGENKENQRNDPVEAALGSTGLTGTVDSTITLTRHRYRDKINDEGALYATGRDAPDVLKKLTLDI

SEQ ID NO: 103158 - protein, 274 aa, Unknown
  Obtained from environmental sample
  misc_feature (1)..(274): Xaa is any amino acid
KKLLAEQIAADREVANKIYQQTGRKVFGTINGEPFFEEDLNVYRSELRAVVAAYYGRVYNISSMGARFWDTKYDGITPMEYMTNLAINDLKKNMVIIQQARIRSIDTPAAYGDLEKERAEWNAPADDIVYGPKTLGPAEFISYRITDITDALKTVLLKNELAPTAAQLRAAFDDLPEPLKIAPYRASGIRFTWGESSDWERRAPYIEVSDSDRKYNKEVCAAIEGSLRRGLSAEKVVDTLSGLYPGLRQEKFTVNSRHISRVIEYDQALADILG

SEQ ID NO: 103159 - protein, 197 aa, Unknown
  Obtained from environmental sample
  DOMAIN (144)...(197): Bacterial regulatory proteins, luxR family
  misc_feature (1)..(197): Xaa is any amino acid
MNGVLMLSKAAELYAEIQGWLEALGFEDVAVTGKENEALNTAICNKKPRLVMIDSLFYQEGTSHRIGKLLKLFPKLNVAVVSFHGFDASSAPWFIWEGAKSYLSLWEGYGEFQRGLRIVREGGQNISPKVQKLIDYCDEWPDTQSKTTKRQKEILTMLCCGRTIDQIGKMLNISKSTVNNHLNSLYRVFHVGGREEM

SEQ ID NO: 103160 - protein, 74 aa, Unknown
  Obtained from environmental sample
  misc_feature (1)..(74): Xaa is any amino acid
MDMFKIISIDENILRNALKSQIKDFEDAVIEVSSLQNDVDCIVSRNKEDFTKSKVPCLEPADFLAMLNSNSVSL

SEQ ID NO: 103161 - protein, 264 aa, Unknown
  Obtained from environmental sample
  DOMAIN (48)...(238): RecF/RecN/SMC N terminal domain
  misc_feature (1)..(264): Xaa is any amino acid
MQIFPKTENTKPINNELLINKFFLKDEIELKRKNLWPITKGYPFSIPVIKDFKKFTFKKQVTFIIGENGSGKSTLIEAFARCCGFNAEGGSRNFRFSTYNTVSGLFEYLNIDKSWEFSVFDGYFLRSETLYNLATNINYLEGSCEIKSDYGKIPLHKQSHGESVLSLLTNRISKRGIYIFDEPETGLSPKNLFVMLTLINNLVKLQSQFIISTHSPILLAFPNSEIYEIKDGKLKLVKYEDTDHYNLSKYFLMNYETMLKNLGF

SEQ ID NO: 103162 - protein, 272 aa, Unknown
  Obtained from environmental sample
  misc_feature (1)..(272): Xaa is any amino acid
MNAPIEYDFTRKGYYYTEKTFRLPAAFASADDMLALGMAKTLLSLYQNTPIYDAAKELMESVTAPLGNGENSRWYEERIIVPPIPAVQFSPEIWNIACEALRKNRVLSFEYRSTWNSGYTPRRVRPYQLLFDNGAWYLYAYSIEGRGMRMYSLPRIRNIGIEDETFTFPASADYRARVDGSYFGAYSSEKKRRFRIAFYNNGAMRIKERLWAADQRIKETSDGVILSFSSSQYGKVLELVLANGRDAMPLEPKELVRDWQDNIRDMLKQVKV

SEQ ID NO: 103163 - protein, 229 aa, Unknown
  Obtained from environmental sample
  DOMAIN (2)...(229): NAD-dependent DNA ligase adenylation domain
  misc_feature (1)..(229): Xaa is any amino acid
MGSKEQRISELEKLIQKYQAPYYDGEAEISDGEFDLLWDELKVLSPDSAVLKKIGDGSKRIIEERQNDDGSELKKTDVESHVDGFPEAFHLIPMGSQEKASDPQEFIIWAKKMGMEGSNLPQDKVNTASLTNKKNKLTKKFIVQYKLDGASLELQYEKGKLVRAVTRGNGIKGDEITENAKRMNGVVQKMDVSFTGGVRGEVVMTHDVWEGKYPTKANCRNAAHGLMRK

SEQ ID NO: 103164 - protein, 87 aa, Unknown
  Obtained from environmental sample
  misc_feature (1)..(87): Xaa is any amino acid
MFSGVFSGSFIPLVFFPKPLQIIQFFLPFQYTSYVPAMVFIGKYTLGDIQLSIPAIVGLQALSLLCLIILSELLYNFAMKRFTAVGA

SEQ ID NO: 103165 - protein, 104 aa, Unknown
  Obtained from environmental sample
  misc_feature (1)..(104): Xaa is any amino acid
NSWLTGTAAWTFVSISQYILGVRPDFDGLILDPCIPSNMKGFIVTRHFRGADYHITVDNSAGVEKGVKSITVDGKPLDGAALKNALLPVFGDNKVHKVVVTMAK

SEQ ID NO: 103166 - protein, 299 aa, Unknown
  Obtained from environmental sample
  DOMAIN (24)...(299): Aminotransferase class I and II
  misc_feature (1)..(299): Xaa is any amino acid
EKLSNPYFISHDSPLRDTSIVNGKEVLNFGSYNYLGMSGHPKVSQAAIDAIQKYGTSASGSRLLAGEKTLHSELESEIAAWKHTEAALVLVGGHSTNVTFVGNFCGDKDLILYDVLSHNSVAQGIQLSHATGRLFPHNDYKAARAILASMRNKFEKVLLIIEGVYSMDGDIAPVPEFVKLKKEFGLFLMVDEAHSSGVIGKNGGGVDEYFNLKPGDIDIKMGTLSKGLGTCGGYLAGEKKLMDYLKYSLPGFVFSVGLSPALAAASLEAIRIIRNDNSHVRQLQENIRYFISKAKEKGF

SEQ ID NO: 103167 - protein, 282 aa, Unknown
  Obtained from environmental sample
  misc_feature (1)..(282): Xaa is any amino acid
VTLLAVCNCKHDVSPGYVTQGGQTEEGKTQGAETGEGEPQEITSPEAISPEIVPPEVVPPAVVPPEAETPEAETPEAETPEVIPPEAETPEAGTPQEDEGEGEEGQPPEIIQPETGLLVINELRAEYSFATNNAEYIEFKAAAAGSLNGISLHIMHDAAEPFTYSFPAVTVAAGDYITLHLQTLESNNANELGENISAWRGNETSPFARDLWAAGNSKRLRQTDIVYLQDENGRIIDAIIMNETPSGTWNKNQAHFAAIADTLFNAGMWKSANGQKPTPLDA

SEQ ID NO: 103168 - protein, 282 aa, Unknown
  Obtained from environmental sample
  misc_feature (1)..(282): Xaa is any amino acid
MALLRAVGATPGQVRRMVMTELAVLGALAGTLACLPGTWLASLSLRGLADHQFIPASTRAWTSPIELAVSVGAAVVVAELAGFFAARRASRVHPAAALGEAAVERRSPRPARLLLGLLAMAGGVVMGYVAVHQHDAAQQLSQAELALLVFMVAVALLGPYLLRVVEAALRVPVRLLGGTPARLSSAQLRTRSRRMASALVAIALPVSFAGAIVAVDATQTHADTTQAQARLAASAVVTAPGPGLDPSVLAAVRSQPGVSGAVGLSPTTVYVPFEGTETTSAE

SEQ ID NO: 103169 - protein, 166 aa, Unknown
  Obtained from environmental sample
  misc_feature (1)..(166): Xaa is any amino acid
LAVANAVRFGENFTPSTLRSCTRSVPGGRRRPDGGACPTPLSGVVPIDSGHAVAHALGMQNATLERTVVETAVSLTGVTKRYGSRRRRVDALSDVTADFPRSSMTAVMGLSGSGKSTLLQVAAGLDHPTSGTVHLGGTDLGKLRRRKLSVLRRRRVGFVFQAFNLV

SEQ ID NO: 103170 - protein, 59 aa, Unknown
  Obtained from environmental sample
  misc_feature (1)..(59): Xaa is any amino acid
NGPVMDVSDTIDVYVLIFGINLRNYSLATAAGMFKNVVNISLIFIANAIAKRAGEERLI

SEQ ID NO: 103171 - protein, 207 aa, Unknown
  Obtained from environmental sample
  misc_feature (1)..(207): Xaa is any amino acid
PDASDSEKAILSAKDSNKSVVSVIKGNIRFEHIEISNASGEGTRGVGVFVLNPSNVTLGQGAVVRDNNDFGLLVSGDGAICTIDGGEIRNNNSTGVFVNNALLIFKNGTIVDNKAEMGAGVFVAANAKFEMQGGTITNNTADNAAGVLVRNKAIFEMSGGTITKNRATNSVGGVLVQSGGKFVQGRKAKVSGNNATKNNPNPNVYRQ

SEQ ID NO: 103172 - protein, 168 aa, Unknown
  Obtained from environmental sample
  DOMAIN (1)...(140): ABC transporter
  misc_feature (1)..(168): Xaa is any amino acid
NKIILEVGMVFQRFNLFPHMTALENVMLAPLHVRKLPHKDAHDKSVQILERVGLGDKINAYPSKLSGGQQQRVAIARALAMEPRIMLFDEPTSSLDPELVGEVLAVMKQLAAAGMTMLVVSHEMGFAREVANRVVFMYEGSILESGTPEQIFSNPSNDRTRQFLQSVL

SEQ ID NO: 103173 - protein, 73 aa, Unknown
  Obtained from environmental sample
  misc_feature (1)..(73): Xaa is any amino acid
MSSFENLNIRQSFIDKLKERSIVEPTAIQNLVIPALLAGKNILFRSATGTGKTFAYLLPALQSLLEENNANTG

SEQ ID NO: 103174 - protein, 269 aa, Unknown
  Obtained from environmental sample
  DOMAIN (14)...(187): NAD dependent epimerase/dehydratase family
  misc_feature (1)..(269): Xaa is any amino acid
VTRIRCDIRTEDESAIKAKLEKTLGKDKYFDVVADFIAFVPDHVKKDFNIFNGLCRQFIFISTASAYQKPLSSCVVTESTPLANPYWRYSRDKIACEEYLIEKYRECAFPITIVRPSHTYDERNVPLGVHGKKGSWQVLKRMIEGKPVIIHGDGTSLWTITHNSDFAGAFLRLMGNIHAIGEAVHITSDESVTWNQIYMVIADTLNVELKAVHIASDFLDECSGGIYDFRGSLTGDKANSVIFDNTKLKRLAPGFCATVRMDEGIRMTM

SEQ ID NO: 103175 - protein, 276 aa, Unknown
  Obtained from environmental sample
  misc_feature (1)..(276): Xaa is any amino acid
MLDREFPEAAIISEWSSPPQSIKAGFHADFLLDHGNSGYRSLVRDYKDGGEDNSYFKKDGNGGIAKFLDQYMTWYEATKNDGFISIISGNHDTPRISHGLSPREMSLFFAMQFTMPGVPFLYYGDEIGMRYLYRTHTKEGGYDRTGSRTPMQWNSGANAGFSCTALEMLYLPVDTESGAPDVESQEKDPQSLINTVKDLLRLRNSSEELGSKPNLEVLHAGISGDRSFFYRRGSFIMGLNPGVNAVQVQISVQNTPESVYSIGGCGTEKGISNGAA

SEQ ID NO: 103176 - protein, 284 aa, Unknown
  Obtained from environmental sample
  DOMAIN (1)...(281): Aminotransferase class-V
  misc_feature (1)..(284): Xaa is any amino acid
IFTSGATEANNLALLGLGRRASSGKRRRILVSSIEHKSVLAASRALHEQLGYIIEFLPVDASGFVDITALGETLADDVLLVSAMAVNNEIGTVQELAKLSQIIRQTGALFHCDAAQAPGAIDLRMAADLVDVLSLSGHKMYGPQGIGALFICRDLHDSIEPLFYGGGQQRNLRSGTLPVALCVGMGTAASLIDTSEASEKRIAMRNRRDNFVRKLKDLPWPIVLNGPESTSRHPGNANMRFVGFDAHEILSSLQPHIAASTGAACTSGIPEPFHVLRAIGLSNY

SEQ ID NO: 103177 - protein, 306 aa, Unknown
  Obtained from environmental sample
  misc_feature (1)..(306): Xaa is any amino acid
SCEPFLDVKNDNSGNFWATNYSTKKNYKVKVELFAEGKYCNVWVERGSGVSKDQAKTVANKYDKEIHGLMINAFGIENPSYDGITFTDIMKVADYLGDGDDKLCILLMDIKDDYKAGINESFVAGYFWSGNFYDVSGSNKCDMIYLDTYPGMGIRDRHIENVFITLAHEMQHMINRVTRIVLSPNGSIFTASMDTWIDEGLSSAAEYIVSDGKHSKERIDWYNENGDSKAKIKGLIDQGNNFFVWDNHTTNANPYPVLDDYATVYLFFQWLTLQKGKDVYPYIISSNYGDYRAVKDAMGEDWDTLL

SEQ ID NO: 103178 - protein, 279 aa, Unknown
  Obtained from environmental sample
  misc_feature (1)..(279): Xaa is any amino acid
YTFLEGMNPHTDEIKALSNKMRSLAGMDIPINRRYMAYAEALDFFEKNHQNDTALLLAGRNESKVLMNECADFADLYIAPLVHRTGLLTAFELMAYQEGFLLRYPHTGRGRMIEPFEDSPKIFCVYNEYKKWGRIVGVHAVGHLNRLISQRNIRDYIRIAEAFQEKKLAEIADQIYEKKESVKAVLIAGPSSSGKTTTAKRLSVALKVLGIEPIAISLDDYYVGTDKTPLDEKGEPDFECLEALDIPFLNEQLLSLFMGDEVTLPVFDFKTGRRKETGG

SEQ ID NO: 103179 - protein, 280 aa, Unknown
  Obtained from environmental sample
  DOMAIN (144)...(226): Hpt domain
  misc_feature (1)..(280): Xaa is any amino acid
MDHMMPEMDGIEATAIIRSLEGGRFRTMPIIALTANAVVGMREMFINNGFNDFLSKPIDVSKLDEILERWIPKEKRESGTEKRAMSNEGQDNQPDNDSASSLYPDSANRDSPLPTPHSLLPNIPGIDTAKGIVMTGGTASAYIKVLSLFCKDVEERLPFLKKTPEENLPAFITQVHALKSASASIGAQKISSLAAGLEAVGKAGDIAFIRESLPDFIEQLTALVKNIGDALESSKSEYQDVPRSRANFVGEFPVPRSILPLYNELADALKSQKISEIKRI

SEQ ID NO: 103180 - protein, 236 aa, Unknown
  Obtained from environmental sample
  misc_feature (1)..(236): Xaa is any amino acid
MRYMISRSGNNADKNVYWEIVGKAGDSLLLENKYYLPLGFMVDKKLTEYKRDDSPFISQNNFFRLATGLNGNLFSIYDLSALKQKSHWMTSWSYRVPVSGMMYASCMINKPQLSMDMTIYTEADGLQQERFLPMSDNAPCIFTVGSQEKGSTVNFLLDNNEASLYVGHLNSKLFERGYNLLASQPLNLTKFTNTQVCGNVTALKDGLLYTSIPGDKNWSVYVDGKKDKIVLIDGAM

SEQ ID NO: 103181 - protein, 260 aa, Unknown
  Obtained from environmental sample
  DOMAIN (9)...(242): IMP dehydrogenase / GMP reductase domain
  misc_feature (1)..(260): Xaa is any amino acid
AKIIDEVSRTFSEYLLIPRLSCAEHQPGKVSLRTSVTRFKLGAEEARFSLNLPFVSASMQSVSGPEMAIALARLGGLAFIYCSQPIDAQVAMVSKVKAHKAGFVPSDSNLRPDATLADAVALSKRTGHSTIPITDNGSGNGLFLGILTDKDYWEFDDDLSRPVSEFMTGGRENVIHAHVGISLHDANVQLRKCKKECLPILDAKEHLHSLVFKKDYVDHINNPNELLDRQKRFAVGAAINTHDYKERVPALVEAGADVLC

SEQ ID NO: 103182 - protein, 277 aa, Unknown
  Obtained from environmental sample
  DOMAIN (6)...(258): Phosphomannose isomerase type I
  misc_feature (1)..(277): Xaa is any amino acid
WEVSGWGDSQTVVSTGEYMGLTLGELFALSPSDMVGKRTGAAGSKSSFPLLFKFIDANENLSIQVHPNREQARSRGWGERGKTEAWYVVNAVPAAKIAIGFNRGDVTREEVAEAAGAGRFESLLNFVPARRGDTFFIPAGTVHAILGGILIYEVQEESNTTLRLYDWNRKCPAGNLRELHITDALDIIKYNENRDLKPEPVAIYKTETFIYETLSDNNKFLLSRCGFLKSGEAPLRTINGFRVISITAGLMEVNANGHKVQLGLGQTVLIPSGLENV

SEQ ID NO: 103183 - protein, 268 aa, Unknown
  Obtained from environmental sample
  DOMAIN (1)...(148): Mur ligase middle domain
  misc_feature (1)..(268): Xaa is any amino acid
VYFFLCAKHGSCGAMVVETGMGGRLDCTNIVDPVVSVITLIELEHTAILGKTIGLIAGEKAGIIKAGKPVVLAKQPADALEVFRKKAAEKNSPLFYFPDIAAIDNLSVHTGGTDFTLNFSGNNEPLEISVPIPGAIQAENAGLAILALKNFDKNINNDAIRRGLSMVHIPARFEKITDNPDVIIDGAHTPESASLCADTFCSLYGEGGILLFGCAADKDAAAMAKILLPRFSRIIITMPGTFRISNPEKVYDAFSSGKTMFIKDTAQA

SEQ ID NO: 103184 - protein, 157 aa, Unknown
  Obtained from environmental sample
  misc_feature (1)..(157): Xaa is any amino acid
MINIFINFFKKSIPASFVFSVFSGLIIGTLFGLSIPLIVLSHSERVASYEEVAAVSMVEDALRLAGRSNSEEEGFSYVTLPGIQKYDGPRLAQSMPIETKEVWLSWMSKNRGDDPVFLEQRWDWAQNLVNTSELKRPEDVRAFLLTPREYFVRAQNK

SEQ ID NO: 103185 - protein, 277 aa, Unknown
  Obtained from environmental sample
  DOMAIN (1)...(266): N-6 DNA Methylase
  misc_feature (1)..(277): Xaa is any amino acid
DAGQFRTPRHIIDFIVAIVNPRKDESILDPACGTAGFLIAAYKHILKSNTDAQGTSTLTPDDKKQLIANIRGYDISPDMVRLSLVNLYLHGFSDPHIYEYDTLTSQDRWNEYANVILANPPFMSPKGGIRPHNRFSVQSKRSEVLFVDYMAEHLNSTGRAGIIVPEGIIFQSQTAYKQLRKMLVREYLVAVISLPAGVFQPYSGVKTSVLILDKAISKQRDTVAFFKVENDGFGLGSQRRPIDKNDLPRVQAEALEYLQKLRSGEDVNGLKLQHGLL

SEQ ID NO: 103186 - protein, 160 aa, Unknown
  Obtained from environmental sample
  DOMAIN (1)...(149): Protein of unknown function (DUF1016)
  misc_feature (1)..(160): Xaa is any amino acid
IFDFLTLEERFHERELETGLVTHVEKFLLELGAGFAFLGRQYHLAVSDQDFYIDLLFYHTKLHCYVVIELKSGNFKPEYVGKVNFYCSAVDDILRHELDNPTIGLILCQTNDRVIVEYTLKKVNTPIGVSEYELTRALPENLKSSLPTIEELENRLEESM

SEQ ID NO: 103187 - protein, 78 aa, Unknown
  Obtained from environmental sample
  misc_feature (1)..(78): Xaa is any amino acid
KAKTFAQRAVNQASIKVSDIRIMQIPFPPIETQRAIVTEIEAEQALVSANREIITRFEKKIDAVLARVWGDSAENRNA

SEQ ID NO: 103188 - protein, 257 aa, Unknown
  Obtained from environmental sample
  misc_feature (1)..(257): Xaa is any amino acid
MYEAVWLNVIGIPTGLVLGMTLQFGVTKILNSALVSVNISNGYDQYAEYLISAPVAFMSIVIGFFTVLMSAWLPASKAARISAIDAIRGNTRTDKKKAKKPGTPLLLPRVFGAEGLLAGKYMSLNKKRYAAVVRSLTLSTILLIIGGAFAENLHSAFVLAFPEIRYTSAVTVGVNLYRIVESADSESSVIEEVSAALDSFKDPLAAAVMFNPNYTAELNPDAFTADYRKYVSGENTVKANVISFDDGMYRKIMTRGA

SEQ ID NO: 103189 - protein, 284 aa, Unknown
  Obtained from environmental sample
  misc_feature (1)..(284): Xaa is any amino acid
CRYAGELPRQVYLRDLADVFEGYRDETSTVYVNGRPAVMMTVQKQSGKNSVQAAKDLRVRLEKLVREIPPDIKITEMFNTTDIIENSLGQVTSAAFSGALLAVLILFIFLRSIKPTLIIGISIPVSIIVTMMLMYFTGLTLNLMTMAGLVLGIGMLVDNSIVILENIYHYREKGAKLRTASIIGTGEMVVAIVASTLTTLCVFLPLVMFKGLLEMPGELFAGLAFTVVISLAISLFTAIFLVPILSSHYLPLVTRKQKPLTGRLAKIDAKFERFFAWLTKSTAG

SEQ ID NO: 103190 - protein, 254 aa, Unknown
  Obtained from environmental sample
  misc_feature (1)..(254): Xaa is any amino acid
VEGLILENINLLVGKNATGKTNTLTKIGWLGDMLAGMQPQLLNSGNYKVEFSDDKDIYKYKLNILQQKVQFEELIIDDDVKFKRENDGKGEIYLERLKEKIDFQLSPNRLVVTSKRDAIQHPFLEKLAKWAEGQRMYAFSKLGQDVLFFANDMININVNPRDMNSVIGLYLNGERESKNEFKAQILASMNKIGYELTDVGAASNPDPIAPALALYVKEKGSEPPILQFQMSQGMFRALSLIIQITYNTLKTFQQ

SEQ ID NO: 103191 - protein, 131 aa, Unknown
  Obtained from environmental sample
  misc_feature (1)..(131): Xaa is any amino acid
ERIRKIITDEAQKLFRPEFLNRIDDMVVFRPLSREHLLRIVEIMLSDVRLRLGEQGIGIGVEDEAKEIILKKGFQPKFGARPLRRAIQSMIEDKLADSVLSGRIGKGDTVTVSVSDDDIFFGIEETALDKA

SEQ ID NO: 103192 - protein, 55 aa, Unknown
  Obtained from environmental sample
  misc_feature (1)..(55): Xaa is any amino acid
MKAAFIETNPAPIKQAMNWAGLPGGPCRLPMGKLAPVSEKALKAALEEMGIKIKA

SEQ ID NO: 103193 - protein, 84 aa, Unknown
  Obtained from environmental sample
  misc_feature (1)..(84): Xaa is any amino acid
MEPHREKKPKPKLERKPGGQVGHTGVTLQQTEHPDAIIEIKVDRDGLPPGHWKYAGYEKRQVFALKIVTHVTEYQAEILVNETG

SEQ ID NO: 103194 - protein, 289 aa, Unknown
  Obtained from environmental sample
  DOMAIN (143)...(280): HD domain
  misc_feature (1)..(289): Xaa is any amino acid
DLICWDVDMPDTDGYETIKALKSNSRTADIPVVFLTAHSNSESELRGITLGAVDYIIKPFSAPLLLKRIDMHLTVESQKRLLESQNQELKAQHNELEHQQQELINFNSKLQEMVDAKVKTILELQGALLRSMAELVESRDDITGGHIERTQSYLGILLEAMKTQGIYKDEVAKWDLNLVLMSAQLHDVGKIAVKDSILNKPGRLTPEEFNEVKKHTTFGGEVIDKIMASTSEHTFLIYAKTFAMTHHEKWDGTGYPKGLKGEEIPILGRLMAIADVYDALASDRPYKKA

SEQ ID NO: 103195 - protein, 261 aa, Unknown
  Obtained from environmental sample
  misc_feature (1)..(261): Xaa is any amino acid
LNQLFNEAVKYPLVVVCAGAGYGKTSAVHDFAEEYQASTTWIQLSERDNVGARFWENYTHSLSQVNAPLAEAMAKLDFPDTKEKKSHYQALIHSMVEMKRRIIVMDDFHCIEEPSVLRFAEECILQIMPPGTSIFLVSRSTPRVNIAGLVYRDQIFNMSENDLRFTDNELAQYFRRLNIPSQTNTLREVMQDTEGWAFAINLIARSYQKAPGYGGYVRSAMKTNIFRFMETEIWDGISERLQNFLVRLSLIDHLSVDLITQ

SEQ ID NO: 103196 - protein, 190 aa, Unknown
  Obtained from environmental sample
  DOMAIN (104)...(127): 4Fe-4S binding domain
  misc_feature (1)..(190): Xaa is any amino acid
AYYYSIATYGGLAGNAVYQMYELLLDRHGIKLNYGEKLRMFANYVVAYDMSANIDKITKKSNEKLAPMIDSIKRRKSNSINKLTKIFKFINERFIKEVSNMDKDFTVNDNCTGCSTCEKICPVKNIEMVNNRPEYKHHCEQCVACIQFCPQKAINYKNITQNRKRYTNPAVSCEELSGYNNKEACVDYLY

SEQ ID NO: 103197 - protein, 270 aa, Unknown
  Obtained from environmental sample
  DOMAIN (27)...(147): Glycosyl hydrolase family 20, domain 2
  misc_feature (1)..(270): Xaa is any amino acid
IIPEFPCRGLPLPELSENNEVQVFNAQLINTWGKKACTENSSKIKLQESCVNVNATDTANYVGTANYVGTANYVGTANYVGTANYVGTANAVGEESYQLEILPDEIRLSAAAGTGMFRGLQTLRQLFLSGYNGGVLSVPCGIIGDKPRFPWRGFMLDCSRYFYSTEFIKKILDALSLHHINIFHWHLTDDQGWRLPVKKYPLLTEIGSKRRDHRLHDEFVGGYYTEAEIQDIVEYAAARHIEVVPEIDLPGHTSAILAAYPGLGCTGGPY

SEQ ID NO: 103198 - protein, 288 aa, Unknown
  Obtained from environmental sample
  DOMAIN (3)...(200): FtsK/SpoIIIE family
  misc_feature (1)..(288): Xaa is any amino acid
SHCRNYGQAFVKDPTSIDGFDIPIGWTASGEIVPLTLGSTTSEHHALLAGKSGTGKSNLLHVIIHTLCEKYSPHEVDLYLLDYKESTEFTVYASPPLPHARLVATESDPEYGATVLQHLVDELEARARTFKSEGVQNFTEYRKLRRSQLPRVLLVIDEFQALFTETRQVAETAERLLSQLLKQGRAFGIHILLATQTLKGINALSMGALVSQLGCRIALACGQEDSAMILGGNNWAAAELTSPPEGLINNANGAKSGNIKFMIPLAESMFCRNHLARMSDRARKSGLT

SEQ ID NO: 103199 - protein, 294 aa, Unknown
  Obtained from environmental sample
  DOMAIN (66)...(292): NADH-Ubiquinone/plastoquinone (complex I), various chains
  misc_feature (1)..(294): Xaa is any amino acid
VPLGACVIGLDPLTRIFLAPSFGLGAVCALSGAAHLAHSPPNEHNLGAHWAFYNLLILALALVLVARDAVLFLLAWELMSLAPFFLIAFHDHDAGVREASWIYLVAAHLGAVFLIAMFGLLWAQTGGTSFESFTLAAFPLSTGTVLFALALVGFGAKTGIVPFHVWLPEAHPAAPSHVSAMLSGAMIHAGIYGLARSLGFFGAGSIWWGWALVGAGVCTGLGGILRALGQGELKRLLAYHSVENMGIALIGVGVGYIGIQTAGAWMAVLGYGAAFFHLLNHTAMKGLLFLCAGE

SEQ ID NO: 103200 - protein, 275 aa, Unknown
  Obtained from environmental sample
  DOMAIN (51)...(204): Radical SAM superfamily
  misc_feature (1)..(275): Xaa is any amino acid
MREGDALWKQCVPDPRELAPAGADESADPLDEDRFSPLPGVIHRYPDRVLVLAAAHCAGYCRFCTRRRFVGRDTRTASPEDVIAYLGAHPEVRDVLLSGGDPLTLPIAELRRWLEALRRFPQLALIRIGTRLPAFAPAKISEEFCAALAPFAPLYINTHFNHPAEITPETQAACARMRRAGCILANQSVLLRSVNDDAAVLRELGYALLRMGVRPYYLHIMDRVAGTAHFRVPLSRAAAIWDALAVTTGMALPRLMLDLPGGGGKMQYMESRPAF

SEQ ID NO: 103201 - protein, 245 aa, Unknown
  Obtained from environmental sample
  DOMAIN (3)...(245): SecA DEAD-like domain
  misc_feature (1)..(245): Xaa is any amino acid
MNLVEAVKSYFSARKLTRYWDKVQEINALEGQISALTDAELRAKTEYFKQQLKTGKTIDDILVEAFAVVREAAKRALNMRHFDVQLLGGIVLHEGRIAEMKTGEGKTLVATLPVYLNALTGHGVHVVTVNDYLAQRDAAWMGQVYTFLGLTVGVIVANLDFAARQAAYNSDITYGTNNEFAFDYLRDNMATDQEQLVQRGKYYAIVDEVDSILIDEARTPLIISGQVDDNTDKYRRVLQAAKQLT

SEQ ID NO: 103202 - protein, 260 aa, Unknown
  Obtained from environmental sample
  misc_feature (1)..(260): Xaa is any amino acid
MIENKKKLSRYLVYTFYAAAMIALIFYSWIEQTKATLSNNNPLYRNIRECPVYIKKGFDRSDLRKIPDEGPASAWRRFQTTSLHVTDSSLELPKRRYLSPRGSAPQEFTINVLLEMDGGAAAFIDGNVSVVPGLFFAGIGENWEIYFNGKLVRAEMYPDEAGRIKKPRTWYNVYFPLDSSLVLAGTNILSLRILGDPTYLGTGVFFQTAPVYMDDYRVIEGRQFNFMNTVLCAVFAFTGVYYLMLYISVKKKTEIFNLYF

SEQ ID NO: 103203 - protein, 262 aa, Unknown
  Obtained from environmental sample
  DOMAIN (38)...(262): BadF/BadG/BcrA/BcrD ATPase family
  misc_feature (1)..(262): Xaa is any amino acid
FRDRKEHEEFLERHRTLNIKHEPAELNLRQGSTLRVYLGIDAGSTTTKFVLIDENENVVDSFYSPNKGEPLKVVKQALLDTHKKYKDLGIKLEVIALGTTGYGELLFDKALGADFHTVETVAHAAAAQKYVPGVTFILDIGGQDMKAINISNDIVTNITVNEACSSGCGSFLETFAETLHIPVEKIAEEAFSAKNPARLGSRCTVFMNSTIITEQKNGKQANDIMAGLCRSIIENVFTKVVRISNPAQLENKIVVQGGTFKN

SEQ ID NO: 103204 - protein, 265 aa, Unknown
  Obtained from environmental sample
  DOMAIN (49)...(186): ATPase family associated with various cellular activities (AAA)
  misc_feature (1)..(265): Xaa is any amino acid
MSADITELNERVKEESSFVSLLKAEMAKVIVGQSKMVDRLLVGLLTRGHILLEGVPGLAKTLAISTLAKAVDTGFKRIQFTPDLLPADIVGTMVYNQKSGEFVPKKGPIFSNIVLADEINRAPAKVQSALLEAMQECQVTIGDECYKLEEPFLVLATQNPIEQEGTYPLPEAQVDRFMLKLKVVYPSRDEEKEILKRMAAGPIPEVSPVIKVDKLLAARKLVTEIYMDSKVEDYIVNIVFATREPEAVGLGDMKSLISYGASPRA

SEQ ID NO: 103205 - protein, 189 aa, Unknown
  Obtained from environmental sample
  DOMAIN (51)...(175): DNA primase catalytic core, N-terminal domain
  misc_feature (1)..(189): Xaa is any amino acid
MEREGMSFLEAMEHLFKAVGIELPRFRVDGDRAKDELEARMRSALDLAQTYYQDCVVENQRASEYLDGRGIAQDFARRVGFGFAPDGWENVVGLLCRSGHSPELIEQTGLAARSSKGNLIDFMRNRLTIPIRDQRGRLVAFGGRAFGEDKPKYLNTRETKLFKKSETLFGLDTAKGQMRDRCPSGGRLL

SEQ ID NO: 103206 - protein, 232 aa, Unknown
  Obtained from environmental sample
  DOMAIN (1)...(232): BPG-independent PGAM N-terminus (iPGM_N)
  misc_feature (1)..(232): Xaa is any amino acid
MDGYGLSKETKGNAIAASGTPYLTELLKKYPHATLGASGLDVGLPAGQMGNSEVGHLNIGAGRIVFQELTRISKEIADGDFFHNHQLLLAVKHAKEAGAALHTFGLLSNGGVHSTTEHLFALIKLAKAEGLSDIFVHAFLDGRDVSPTSGAGFVDELLRFMKAEKFGTLCTVMGRYYAMDRDNRWERVNVAYDALTIGIGAGQAGMEGAEVAVSASDDPFKAVKKSYADGIT

SEQ ID NO: 103207 - protein, 175 aa, Unknown
  Obtained from environmental sample
  misc_feature (1)..(175): Xaa is any amino acid
MIQKIYASDKRFKAVEFQKGLNVILAERTKGSGEKDTRNGAGKTTLVNIIHFCLGADVKSLGLPIADIGDWDFYIDIVISGKNITAKRSIKRHKYIFVSGGIAELPIQAENDDVSGEFFYKTDDWRKLLGLCLFNLRDKPKPKYKPTFRNLVSYFARRETDAYLGPFTHFRSQPA

SEQ ID NO: 103208 - protein, 75 aa, Unknown
  Obtained from environmental sample
  misc_feature (1)..(75): Xaa is any amino acid
MIMPSKYIREDAALIGVGGILLRGIENRRNISSLWEDVKANPAVATFERFVLALDFLFLLGLIDIENNEICRCKS

SEQ ID NO: 103209 - protein, 234 aa, Unknown
  Obtained from environmental sample
  DOMAIN (10)...(234): GcpE protein
  misc_feature (1)..(234): Xaa is any amino acid
VIIQTMWKDRLSFSDLDGAVGRIEGLARMGCGLLRFAVPDVPSAEVLGALAKLVSMPLVADIHFDYKIALRCMDFPIAKIRINPGNIGGKEKVKAVLDKAAQKGVAIRIGVNAGSLPRDLKERVGDGMDGALALVEAAHRELAVFDEFGFTNVVVSMKASNLADTIKANQLFTKGIDTKCTDSFVPVPRSPLHIGVTEAGPLVAGVARSSAALALLLAQGIGDTVRVSLSDSVE

SEQ ID NO: 103210 - protein, 134 aa, Unknown
  Obtained from environmental sample
  misc_feature (1)..(134): Xaa is any amino acid
FSVLRADFFYHDGDFAARLGHPGSGLEKEYLVEATGHIPDEAVLAFQRGITIEGVRYKARLAERTASRCLRIVLIEGKNREIRRVFSHFHLHPSRLRRVRIGPVKLGNLEEGVCRPLTESEVEALQGARHGNRH

SEQ ID NO: 103211 - protein, 162 aa, Unknown
  Obtained from environmental sample
  DOMAIN (62)...(162): Cytidylate kinase
  misc_feature (1)..(162): Xaa is any amino acid
MVIAIDGPAGSGKSTIAKLLAQRLKDRAGKGFTYINSGNLYRAITLGCLRANITPTDSEKVMEFAQKARITYRGDRVILDGADVTDSLHTDEIDRWSAPLSAIVPIRHLINDIIRGIAGKLNAVVEGRDMTTVVFPHAECRFYLDALTHARAQRRFDQGVSQ

SEQ ID NO: 103212 - protein, 260 aa, Unknown
  Obtained from environmental sample
  DOMAIN (38)...(260): Malic enzyme, NAD binding domain
  misc_feature (1)..(260): Xaa is any amino acid
MLAPSVGAVNLEDISQPNCFKVLDELQDCGVPVWHDDAQGTACVTLAGMINAIELAGKDWKSVKAVFYGAGSSNATIIRLMLAEGLDPKNVIAFDSKGALHMGRDDVKKDTRFYRKWQICETTNPQRVDSILEACKGADILCALSTPGPDVVKKEWIQVMGKKPIVFVCANPVPEIYPHDAKDAGAFIVATGRSDFPNQVNNSMCFPGLLKGCLLAHASRVTDGMAIAAAHSLAKAQQVRGLDPEHIMPSMDDVDVFPRE

SEQ ID NO: 103213 - protein, 265 aa, Unknown
  Obtained from environmental sample
  misc_feature (1)..(265): Xaa is any amino acid
TLTASAEAQTLENNRFYIDLQKYPLFIKTGFNHSDAVSPDLQDGSWQEKKQWYGAVIRRLGLPEIPKRIFLWPWGRPEREWTFAVPFTMNASLSDNDAPVIPCLYLASIGINWEIYLNGTPIKKEMYMANGRITEQHYERNVIVPINNNLLQKGGNVLVFRIVGDPTDYTTGFTYKSPYYISDYDYVTRRHNETAQIILISILAILGIYHFVFFAIFRENRYSLACGFFTIEMSLYYLLRTRWIHQIIPNTAVVVKLEYFTVYFI

SEQ ID NO: 103214 - protein, 250 aa, Unknown
  Obtained from environmental sample
  misc_feature (1)..(250): Xaa is any amino acid
VNVTDSDDAFYLRGNGNKTIEALTVIRGWACLNIQNTAGSVRINGLVMRDLTGTGITMNGANGTKRLSGIRGINISGGAISSTASSGSFTLTGSDVDDVTFDNTGIISVLNGSGSVSVSDIEIKNSKSSSALSVTANGNTVIDTVTINGVPNGRGIYTSGLGSAIISYTTITGCKTDGDGGGMYLANSGDVSVSNTTIDTVELTFSSIPGGGIHRTGGSLSVVNSVIKNIRGSDTFCARICYSGSRNLEV

SEQ ID NO: 103215 - protein, 78 aa, Unknown
  Obtained from environmental sample
  misc_feature (1)..(78): Xaa is any amino acid
LAGEPVITDSKPNQNNATLIRGITTTMNGKLPNGANVAHVISSQGCGDMGDNLHFSYDGYEKLGTRYGEKMFELLYKE

SEQ ID NO: 103216 - protein, 267 aa, Unknown
  Obtained from environmental sample
  misc_feature (1)..(267): Xaa is any amino acid
MDALRNTFGRQAIPMVWDLAESNPFSNSSGCFDKVLDWIEKCVKLFPASVYSYVQQYDAQIDNGLRNIMVSTDPPYYNNIGYADLSDFFYVWLRHTLKDSYPDIFKTMLVPKSEELTAMPHRFNNSKTEAREFFETGMLVTFKQIYIYSRDDVPVTVYYAYKQSEYDSTTETASTGWETMLSAIIQAGFTVTGTWPMRTELSNRMVSMDTNALASSIVLVCRKRPPSAPQCTRRDFINALKRELRPALHTLQASNIAPVDLAQSAIG

SEQ ID NO: 103217 - protein, 258 aa, Unknown
  Obtained from environmental sample
  misc_feature (1)..(258): Xaa is any amino acid
LDDIDAVEELFAARNSAPASSAESAADSAADSAADSAQPAAVLDKDIIVNVWKLLRSERGRNHLARKLQVFSGVITEDEDHDGYAESRTVYKQGVIEEYYFDADQDRIEDVAITFNSGAPQWARMPALPAVVFWESYPSVQRAVLESGYYLPAPGGFRFAPLEFIEICASDTTPGLLYPQREPLQQNITRRMLASFAVSVQQPSVEFAGGIEHIYLENGIPLRAEVILDNKIVSFTEFENGRPVIQWLDLDADGRMET

SEQ ID NO: 103218 - protein, 140 aa, Unknown
  Obtained from environmental sample
  DOMAIN (8)...(98): Single-strand binding protein family
  misc_feature (1)..(140): Xaa is any amino acid
FSWTAYPRTRELKYTAGGQAVCKFSIAVNRRKKNGEQWEDEANFFDIVIWGKQGETLNQYLKKGKMVAVDGELRQDRWQQDGQNRSKVEIVASFLQLLGGGGQGNYQDRQGSSQQSYDSAPDNSSGSRQDSSDFADDIPF

SEQ ID NO: 103219 - protein, 285 aa, Unknown
  Obtained from environmental sample
  DOMAIN (44)...(238): DnaB-like helicase C terminal domain
  misc_feature (1)..(285): Xaa is any amino acid
ALEKVQQSIFELSDDRQVFSFRKIGEVLKDTIDIIEQARESKNPITGIPSGYEKLDQLTSGFQKDEFIIIGARPSVGKTALALNMAASIAFHKKLPTAFFSLEMSSIALVQRLISSEAMVQAQNLRTGFLSSGDYKKIIDIMGIIYEAPFYIVDMPNMKLMDLRSQARKLRSQQQVEIIFIDYLGLIGHESSWLPRFEQISEISRSLKSLARELHIPIVVLCQLNRDAQFETPTLANLRDSGSIEQDADLVLFLNREAFKKKKNDKEEEKQGPIDEFRRIFILPS

SEQ ID NO: 103220 - protein, 248 aa, Unknown
  Obtained from environmental sample
  DOMAIN (168)...(235): Elongation factor Tu domain 2
  misc_feature (1)..(248): Xaa is any amino acid
MDLDGRDVLELLDEIEKILQIQACPFTLPIGYGKLFKGIYSIADNTFHTFNKEEGKQEILQMSGADDPKLTELCGEEYIKEFKNRYEMVTQAMEPFNKGEYLAGKQCPVFFGSAVNNFGVRQLLNTFASIAPPPTPRESDVRIVMPTEDKFSAFVFKIQANMDPRHRDRTAFLRICSGSFERGNKVWHCRSGREIRLAAPTSFLAQDKEVIDKAYAGDIVGINDPGIFNIGDTLTEGERFQFPAFPDL

SEQ ID NO: 103221 - protein, 283 aa, Unknown
  Obtained from environmental sample
  misc_feature (1)..(283): Xaa is any amino acid
VLRELRRDVLDKYDCFTVGESVFVDLQDAKLLCDESRKELNMIFFFDHLEVDRRIARYIPKKFRARKLLEVMTKWQLGLDWCALYLENHDQTRTVSHFGALKKSSITNDGDLKRSGEYWRRSAKMLALFELTLRGTPFIYQGQEIGMTNFDFKSIDELNDVESRGMDKLMKRLFVPKWLRWKWIKASSRDNNRTPMQWDNSDNAGFSKGTPWLGVNRNYKYINYASQKNDPDSILTFYKKLIALRKQTKCLVYGDFHPVYADDRVMLYQRKFNDETYTVALNF

SEQ ID NO: 103222 - protein, 250 aa, Unknown
  Obtained from environmental sample
  DOMAIN (48)...(227): Peptidase family S41
  misc_feature (1)..(250): Xaa is any amino acid
MSPYDMFIAINDSLGRGRYTEYIDDRPGGGVMFDPDTEFDDPVELTPSTVYFYLPEFSDIALEFFNASMRRLSKYPNIIIDVRDNGGGLLNVTDAILGELLPYNTQYIKNRYRRYNSGKYAGETTEDTSRTTVRRPQLLDSDRRPKKIAVLMNGGSASASEILAAGLKDGADAFLVGGKSYGKGIGQVIITRGDGRKRLSITFLEISGLTDRTGQYHRVGIEPDSVPKRITNYVNEHIPNASQQDTIQAG

SEQ ID NO: 103223 - protein, 277 aa, Unknown
  Obtained from environmental sample
  DOMAIN (38)...(274): Polyprenyl synthetase
  misc_feature (1)..(277): Xaa is any amino acid
LTSGLPEKPDSVWLERVFAPFSPASTGGFVSPELAASLTMPGWDLVKRGGKRWRPLLMVLAAECVAGESGGEAALSLTPLVEFPHNASLIHDDIEDCSDERRGKPAVHIAYGEDTAINSGAFMYFLPLACLSAWKGNPRIKEQIWVTWARHMRALHLGQAMDIAWHRDFNSLPHLDEYDRMCRLKTGCLARLSAILGVIVGAETAPLKEIAPLADAFGEAAEQLGVGFQILDDVQNLSTGIPGKKRGDDIVEGQKSLPVLLFLHRYPEKRDFAARCF

SEQ ID NO: 103224 - protein, 55 aa, Unknown
  Obtained from environmental sample
  misc_feature (1)..(55): Xaa is any amino acid
MDSLKNVPIAFLTSIAEEAEKKKAYKMGAADYIMKPFNMTELKSRVKEIRKRFKV

SEQ ID NO: 103225 - protein, 274 aa, Unknown
  Obtained from environmental sample
  DOMAIN (1)...(274): Protein of unknown function (DUF935)
  misc_feature (1)..(274): Xaa is any amino acid
MGRLMDFFFGKTEEPEIKNAADGTDDEQATAVSYTNRHPWGDFSLLQSITPERMAQILNDVKRGECPAEYLELAQDIELKDLHYRSVISTRKDAITGLEIKVVPASDGKHDTELADAVKRDIVKNINAKLYILIRDMLDALAKGFSVSEIIWDTDKTPWKPKQYKFRDPRWFQYDKETGKTLMLRAPLGNELEPLKPFHFVVHEPHLVSGNQITAGLALPALYYWMLKSYDVTSWAAFIDRYGYPIRIGKYGKKATEQDRATLKRAVPPSARIS

SEQ ID NO: 103226 - protein, 225 aa, Unknown
  Obtained from environmental sample
  DOMAIN (131)...(220): Response regulator receiver domain
  misc_feature (1)..(225): Xaa is any amino acid
LSNAVKFTGERGRISLNAKLLEETDSFCILQIEVSDSGIGISEEQQARLFSSFVQADSGTSRKFGGTGLGLAISKSIVELMEGKIWIESEQGKGSTFCFTIKALKANESGVDIPEEKESEPQSEEENFENYTILLAEDVEINREIVITILEPTALNIDCAENGRQAVEKFAAAPDKYDLILMDVQMPEMDGYEATGKIREIERESARKPVTILAMTANVFNEDMK

SEQ ID NO: 103227 - protein, 151 aa, Unknown
  Obtained from environmental sample
  DOMAIN (4)...(150): E1-E2 ATPase
  misc_feature (1)..(151): Xaa is any amino acid
SETTVCVARKFHDSESGDTISEKKEIPMDEVVVGDMVYLAAGDMVPADMRIIKAKDLFISQASLTGESEPVEKFASPAISASRNPLDYKNLAFMGTNVISGSATAVAITVGDDTYLGSIAKQLQTKAPPTSFEKGVSSVSWVLIRFMLVMV

SEQ ID NO: 103228 - protein, 265 aa, Unknown
  Obtained from environmental sample
  DOMAIN (1)...(256): C-5 cytosine-specific DNA methylase
  misc_feature (1)..(265): Xaa is any amino acid
VDIVSFGSPCQDLSISGKRAGLEGDKSGLFLQAIRIIKEMRIATNGNKPTVIIWENVPGAFSSNKRKDFQKVLQEIAAVAVPGISIPRPSRKSGWLAAGGIVGDCFSLAWRCLDAQYWGVPQRRRRIFLVASFGTQCAGKILFKPESLSGDTEKSKEAGKGIAGTVENGVRAAGFNGWRSVTGTLEYKEGRAPCINAVMPPNIVTQYTVDIGYSTDRIQMFPQSSVTLRANGGGNGANTGLYCLPTYCIVGNTIDRADDTGGNGT

SEQ ID NO: 103229 - protein, 244 aa, Unknown
  Obtained from environmental sample
  DOMAIN (2)...(237): Methyl-accepting chemotaxis protein (MCP) signaling domain
  misc_feature (1)..(244): Xaa is any amino acid
MNTIASAVEEMSASIRQIATNASEAHSISKDAAVKSTGATETMNKLSVAAKEIDHVTSVIKKIADKTNLLALNATIEAASAGEAGKGFAVVAGEIKELANQSAQSADDIASRINGIQSETNSAVKVISDVGSIIEKINQSVEAIAGHVEQQTKASNEIANNVAQANVGAKRVASSISDVAKGSNDIALNAAEAVKGTTAIQENMAVASNVAKESNQGASQVNSSANDLAKITSGLRTVTDKFKA

SEQ ID NO: 103230 - protein, 175 aa, Unknown
  Obtained from environmental sample
  misc_feature (1)..(175): Xaa is any amino acid
MANVKIIKGTRVRLGPRDQLFYTIIDVFLVVMLIVMFIPMWSTITLSFRSNTFIGSNLDGMFLPPWKWSTAAYKTLLGNSGFINAFFNSLKIFIFGVSCALFFTIPLAYSLSIKSLPGRKFFNVFMLIPYLFNVGLVPTYLVVTRVGLTNKLAAIFLPVVISTYNCIIMRGFFEG

SEQ ID NO: 103231 - protein, 284 aa, Unknown
  Obtained from environmental sample
  DOMAIN (86)...(201): Histidine kinase-, DNA gyrase B-, and HSP90-like ATPase
  misc_feature (1)..(284): Xaa is any amino acid
MRENLPSAARDYVITIKQAGADLLSIINDILDFSKIETGKLEIINRKYSFSSLVNDVISIIRMRAFESNIKFIVKIDSRIPNELIGDQIRLRQILLNLLSNGFKYTERGSVTFAIVGNVVNDETVEFTISVKDTGRGIHRDNLSKIFDSFIQVDADKNKYIEGTGLGLPISKSLAVAMGGDISVESQYGVGSTFTLKISQSINKPERLAAVQDSREKHSLVYEPDEQYADSIVYALRSLQVPCILVSNKRQLKEKLDSRDYPFIFIASDAYEDVKSVIPPRGTG

SEQ ID NO: 103232 - protein, 266 aa, Unknown
  Obtained from environmental sample
  misc_feature (1)..(266): Xaa is any amino acid
MIDEERRNIMYSDARSLFCLKELSSFLYDRVLMAFENNAAVGGETCSVGIVRDLLMTLNNILLSLKIVPPMPLLESLFIFILQDKVGEHGFEINREIRILLSKAEESLSVIREFNSHVPLTLVLRCSTRNMSLSPHELSGGEEWFVVYRDYWKKHIDSVFAEFLKDHRQKELVQSFRLFLKGKELKTLGNVQSDANPDGMPIKGAFGLSFLYTFYPVVFMPDINWILRPILIEGDFQKKENRLEFAEGYNNLIKLEDEIKKFEYNI

SEQ ID NO: 103233 - protein, 292 aa, Unknown
  Obtained from environmental sample
  misc_feature (1)..(292): Xaa is any amino acid
VIENKNKKGHSEVDTELLALVEEWRMVLAKNIAKNNPDLSVYNLNTVVQKIIDRIIFLRIAEDRGTEDENILLTVAKTSNIYEKLNLLFTKANVKYNSGLFTYIDWIEKVNIEDKILSDIIVNLYYPECPYEFSVLPIEILGSIYERFLGNTIRFRTIKGDSGSKAAVHTAVVEEKPEVKKAGGVYYTPQYIVDYIVKNTVGEKIKNKKPEEIAAIKICDPACGSGSFLVGAYQYLLNYHLDYYTQEKNIKASLKNKKIFEAGHNTYKLTIDEKQRISVCSSIFGVDIDNQA

SEQ ID NO: 103234 - protein, 277 aa, Unknown
  Obtained from environmental sample
  DOMAIN (1)...(277): Aldo/keto reductase family
  misc_feature (1)..(277): Xaa is any amino acid
MGTFGSDRYSPTEVSAAVLGAIRFGYRFFDCASVYGNEDLIGNVFEEAFRSGAVKREELFITSKVWNNMHGPGKVLSSINKTLADLRLSYVDAYFVHWPFPNYHAPGCDGDSRNPDSVPFSADRFMATWEQMEEIYNKGLARHLGMSNMTIPKLEAVLPRCKIKPELIEMEQHPSFQQQALFDYCKKNNITVIGYCPIGSPNRPERDKAPGDVADTELPEVVSVANAHNIHPALVCLKWAVQRGSIPIPFSVHEKNYKSNLLTVTEDPLSAGEMLLL

SEQ ID NO: 103235 - protein, 283 aa, Unknown
  Obtained from environmental sample
  misc_feature (1)..(283): Xaa is any amino acid
KMFQTRVIPTLAFCLCAISSIGSAQAQNGPKKLLSLQDAIQAALENNLSLEMQRTSWRGTLAAGTMSAEAAFELSLGANIGIGWSRSGSSTNTTLPIDGESVNVLQETSGTNDSRNVSLTLSKPFQWGGTANFSYSPRYSSSTSETTFTLLDPPTVLPSKSNTTPTPYSGQWSFGYTQDLLKNFGRKSATADLVIARRGLDTANANFRSQLQAQVAAAERAYWALALAQMNLSISQQSLELSERQLRENKIRWENGVIAPIEVTNSEAEVARQEVTIINAETN

SEQ ID NO: 103236 - protein, 90 aa, Unknown
  Obtained from environmental sample
  misc_feature (1)..(90): Xaa is any amino acid
MSRNNIEIWRNNISGRKKMQQIAGAFADCLSPDIPKYICAPCSNCKGQIREVIEHNGLLEKNSLKYGGIVELIVNAMVDVKPGFLKWEEE

SEQ ID NO: 103237 - protein, 76 aa, Unknown
  Obtained from environmental sample
  misc_feature (1)..(76): Xaa is any amino acid
GKTIPVSVVLDSAAFGLEMRLFNTWVQGHEEQLDKNFLDFSTWTRLFAEWRNSDKVQDWAAGLREADLAEANAPTQ

SEQ ID NO: 103238 - protein, 277 aa, Unknown
  Obtained from environmental sample
  misc_feature (1)..(277): Xaa is any amino acid
FEGFHRKRAAWTAKDLLEALATHSEGFDLSYFAWADCPFLDPELAKRLADRHLHYAAEYSYADGWPYGIAPELLSPGTAAILAKILSDNDNGPVERDTLFSVIQKDINAFDIETEISSVDLRCHRLRLCADSKRNLLLLRRFGQESVPNQVPGTAAIERIIAEKPEILRTLPAFYPVQVYGGCPQVCAFCPWPKTSGAINGGAITERRDYMETGVFDSLLEKIAAFSGDAIIDLSLWGELSLHPKKMELIEMVLRRPELDLIIETSGIGWKDDEIDK

SEQ ID NO: 103239 - protein, 70 aa, Unknown
  Obtained from environmental sample
  misc_feature (1)..(70): Xaa is any amino acid
MILILILILILIYSKTKKMRYFFRTEYDGTRFCGWQNQPNGISVQQLIEEALTVVLRAPCPVVGAGRTDA

SEQ ID NO: 103240 - protein, 278 aa, Unknown
  Obtained from environmental sample
  DOMAIN (70)...(254): Phage integrase family
  misc_feature (1)..(278): Xaa is any amino acid
KRQDIESFIEYFETLAETKGERIPQSAKRKNNIIQAGTIPLSWAFNKEMIEKDITQGITWFSGKAAERQILTPEMAAAVFKVQWKDERAKLANMLAMVTGMRAGEIQGLRVQDLGKDCIYIRHSWNRLDKLKTTKTNENRTVEVPFSGLIQDLLTLAGTNPHGQNIDSFIFWAEKNHDKPMEASLFIDGLREALVSIGMNKETAKDYIFHGWRHYFTSYMREKITEKLLQQQTGHKTLQMLNHYSGHMIAGDRERIQQAKIETFGRLLPETTGTLLRA

SEQ ID NO: 103241 - protein, 278 aa, Unknown
  Obtained from environmental sample
  misc_feature (1)..(278): Xaa is any amino acid
TFALFSRRHLRVFALPKTPDFGADTVQDLFSPDLAGQGTFVTSRGSAPFSAINPAQAGQTDRMILNFGALGVTDLNIADELGGIFDLGLLYPTKSVAFSGTLRYYYFDQFKTDFPLKNELGGNFSVAKEFFPQFSLGAGINFGAGPDNWTLSADLGLLHNLGDLGFMKNFTWAFVLRNMGMSWAPTWFTPWAGFTFDFLQIAGKGGKPNPLVLNFAADIGVPSVIIPENINVIVKTGITATVLEKFTLSVLWPGAAGYNMRETKNENRGHFQWLPSVG

SEQ ID NO: 103242 - protein, 266 aa, Unknown
  Obtained from environmental sample
  misc_feature (1)..(266): Xaa is any amino acid
MSPLGLLRIAFRALLRNRMRTFLSVLGIVIGVAAVITMVAIGEGSKQSIKEQIGSLGANIVIISPNPRQTSGVRMDASATQLLTVNDAYALRKKSKYLVAVSPVIDARGQVVAAGGNWPSGITGVWAEYLQIRGYELEDGAMFEGDENMSKVCVIGKTVADNIFPGGNPVGQTLRYRNIPFKVIGLLKSKGTSGFGQDQDDVILAPFSAVQRRILATTNVRTIYAGASDELSTPLAVEEAQEILSEEHKLPYDSDAFRIQTQQELW

SEQ ID NO: 103243 - protein, 264 aa, Unknown
  Obtained from environmental sample
  DOMAIN (86)...(260): Met-10+ like-protein
  misc_feature (1)..(264): Xaa is any amino acid
MKFFGWGAYSPNSQIRVRIWSFDENEKIDKDFFVRKLKRCLESRKAVGFEPKGTNAFRLVNAENDFLPGCIIDYYASYLSVQLLSAGWEIFRDVLVECLKEIFPDCKGIIERSDSNVRIKEGLEPQVKVLAGEIPKNAIEIEENGIKILVDLHSGHKTGYYLDQRNARKRIGELAKDKRVLNCFCYTGGFGLFAAKGGSKYVRQVDVSASALEFAKQNAALNGLENAEIEYAEADVFAYLRKCRDKGETFDLIILDPPKFAESS

SEQ ID NO: 103244 - protein, 237 aa, Unknown
  Obtained from environmental sample
  DOMAIN (22)...(223): tRNA (Guanine-1)-methyltransferase
  misc_feature (1)..(237): Xaa is any amino acid
MIFDILTLFPAMFEGAFSDSIIKRAVEKGLVSIGIHNIRDHSDDLRHQTVDDYPYGGDAGMLMKPEPLAGAITAAKERLTGSDPVVVYMTPAGRLLDQDIVKELAEKKSLILLCGRYKGIDQRIVDNYVDMELSVGDYVLSGGEIPAMAVVDAVTRLIPGVLGNMDSAETDSFHSGLLSHPHYTRPEVFEGVRVPEVLISGHHANIREWQKEKSIAITKERRPDLLEKYYREMDGIN

SEQ ID NO: 103245 - protein, 281 aa, Unknown
  Obtained from environmental sample
  DOMAIN (164)...(281): Glutamine amidotransferase class-I
  misc_feature (1)..(281): Xaa is any amino acid
MITEVGGTVGDIEGQPFLEAIRQVPLEKGRENCLFIHLTLVPNLRSSGEQKTKPTQHSVKELLSMGISPDIIVARADEPLRDGTKEKISQFCNVKLDCVIENTTMTSLYEVPLMLHRNGLDEVACRELGIKAPPPDLGEWEAMAASISKKQKEASIAIVGKYIQLHDAYLSIIESLNHAGIETGANVNIRWMDCEDVTIESAPRLFSGINGMIVPGGFGDRGIEGKIAACRYARENNVPFLGICLGMQIAVIEFSRDVCGLGGAHSPPSHETSPHPVIHIM

SEQ ID NO: 103246 - protein, 135 aa, Unknown
  Obtained from environmental sample
  DOMAIN (38)...(134): FlaG protein
  misc_feature (1)..(135): Xaa is any amino acid
MTLTSVSSVAMEPVYSGGDRVAHEGGTTPAPQPATPDAFVPTKGASQPDAPGTPAGDHDAEFQKTMDESIKQANKSLANYDRQIEREIHSVTKVLMYKIRDTKTNEVIAEYPPKKIQDMIAKMWELAGLFIDQKA

SEQ ID NO: 103247 - protein, 150 aa, Unknown
  Obtained from environmental sample
  misc_feature (1)..(150): Xaa is any amino acid
MNEQKMNSPGDVLIAAGEDIPEFTISPRLRAMGADLNRIFYLYGREGKDKKEIPWTVNDIDTLKDAIRQIKDGGGELKLFIIDPLENFIGGDVDVYRNNEVRAALRAIMDLAKEENFTILAIQHLNKTTGAQALYRFAGSIAFAAAARTV

SEQ ID NO: 103248 - protein, 53 aa, Unknown
  Obtained from environmental sample
  misc_feature (1)..(53): Xaa is any amino acid
TEEAIAVWREEGREEGGTEGKAEQARETARKLKALGVSAEHIIAATGLSPDEL

SEQ ID NO: 103249 - protein, 276 aa, Unknown
  Obtained from environmental sample
  misc_feature (1)..(276): Xaa is any amino acid
MLLPVFIAIACGKNESSQFQAAENNTLTADEDSTQRADENRGEQVLRALASAYPDRVNAVEFYEGDWTILVYGERFYFAGGRLLPSSLRDDLNQYAPMPFYIYQKDLPAWVQPTPEESTRIREQTRIRNTNPLKRSTHFTDTLWRSRNRDEAWEHIKQIRFLGLQVQVHYSLLVQLSLIEEQILRTAKTSSMVRQWVNNLGSAEGWAWRNIASSENRSYHAYGAAIDIIPKSSSGLEMYWLWTSGKNIEWWNVPYSRRYHPPDEVIKIFESFGFIW

SEQ ID NO: 103250 - protein, 106 aa, Unknown
  Obtained from environmental sample
  misc_feature (1)..(106): Xaa is any amino acid
EKEEEEKRRIEKERQEAIRLASVNKLRKNVDDVSGITWYCNPYFVHYDNSNLISIYIGKRAEGKPWLRLMMSYYGDNWIFFENAYISYEGKTEEIYFNKYKEKKIR

SEQ ID NO: 103251 - protein, 62 aa, Unknown
  Obtained from environmental sample
  DOMAIN (1)...(62): WGR domain
  misc_feature (1)..(62): Xaa is any amino acid
MAKTVRTFEYADGKTGKFWTIEINGKGYTVKYGKTGTNGQTSSKEFDSAEDCKKAAEKAKGK

SEQ ID NO: 103252 - protein, 281 aa, Unknown
  Obtained from environmental sample
  misc_feature (1)..(281): Xaa is any amino acid
VNFRDDTYTANAQRVFDICKAIEESGINPLWSCQSRANMIDEERLVAMIRAGCEFIQFGVEHGSEKMLKALDKGIKLDQVNNAISLAKKVGMIVGIYLITGIPGETMEDVAQSEALIEKLMPHDVQMAPLAVYPGTRLYRELLDSGAIPKNFYTKAKDAEVFARKTEKVIIEKMPDTPGSASRVVFCECINRVFTGAGWSYVDEHTAKALARLQKVADVVKPKARYTPEDFRRQKKLLGWCATTNMLCGEAAEDVNDFLEAREQYSEIIQKEPQNPGADEK

SEQ ID NO: 103253 - protein, 255 aa, Unknown
  Obtained from environmental sample
  DOMAIN (169)...(240): HAMP domain
  misc_feature (1)..(255): Xaa is any amino acid
MRELALEAAEYMGKRKLSGDMPSFEYRIAKEYGKLTLKNNDLVGSEGNSLKHHYEVVDKISNELGIVATIFIRENNDFRRLTTSVTDVNGKRAVDTFLGSTSPAYKSIISGNPYSGHATILGKDYIVEYKPLFEGNTRNVMGILFIGIEISSFENHVRETSNSKTMVSLVAGAFLLLMVIFANAIGINFIILRPISKVTRILKDISEGEGDLTHSIPIKSNDEISQLAKYFNKLMNTLRGPIGDTKKTIDYLAAA

SEQ ID NO: 103254 - protein, 247 aa, Unknown
  Obtained from environmental sample
  misc_feature (1)..(247): Xaa is any amino acid
INAQGQHTLTIFRKTPTTQSAGREAAETELFRKIAEFSIEGTITVKETERGIAYQSGQSKGVSFTISAFGRDFDSSNILDQVEITYTYNPRSGVYEQTKASRIPGSQVEQRRVRELLGSRQLFEEFISGLWYFVTPQGKINKNQYIYFSPSSQEIIFYGDEILQVFNWTNSIATRYGLYVASQNISVTTLKRTIDIELESLESIRIRVQEDVSLRIGVNNTWDGSYCKAPPPEKRTALPPINAHLEA

SEQ ID NO: 103255 - protein, 150 aa, Unknown
  Obtained from environmental sample
  misc_feature (1)..(150): Xaa is any amino acid
TDPLYDGRPLIEIMGIQGHDIIGPTLASDNQAAVELYASLIDEGLLSAIAYSELDLKLSDSAPGGASLAPAPLNQKQADALGYQYALLFRMFSKYARYIDHVIIWGIAGWGWQNSYVLFNEKQQANQGYYGIMDPDRFIRGHAYLDEYFK

SEQ ID NO: 103256 - protein, 271 aa, Unknown
  Obtained from environmental sample
  DOMAIN (28)...(271): Cytosol aminopeptidase family, catalytic domain
  misc_feature (1)..(271): Xaa is any amino acid
LTGLRLWGWDVKDEPERVRLAEATAEAVILARSLGDEPGNLLYPESFARRAVSLARARDMKTQVLDEKGLAREKLNLLLAVGGGSRRPPRLVTLTYQGDRASPLVVLVGKGLTYDSGGLSLKPAANLAAMHTDMVGAAAVLAVILAAAELKWPLNLAAILPLAENMPGGGAYRVGDIHLSRSGRSVEITNTDAEGRLVLAEALTWAGEMKPAQIIDVATLTGACSIALGGNCAGLFTDDDGLRADLMAAAGASGENLWPLPLLDEYEEHLE

SEQ ID NO: 103257 - protein, 303 aa, Unknown
  Obtained from environmental sample
  misc_feature (1)..(303): Xaa is any amino acid
AEWGNSFAYLLPALHFAANNNERVVISTATITLQQQLFGKDIPLVQQATGLNIKSVLVKGRGNYLCFRRLEEALNEPELPLGGERDEIERIAQWANASKSGGKDEISFTLAENIWSKVCSDADLCMGKRCSQQNRCFVVALRKEAAAARVIVVNHHLLFADLAARREGAGYEAAVVLPPYSRVIIDEAHTIEDAATSFFSKEFSKLSIMRHVGRLYRRRRAQRSGLLVRFCSLISDGNGSLDTLVAALDGIRLAAGELDSPALDLCGTEGVFRFSPDRENGGDDSARSAALFPLLNSLRKKLL

SEQ ID NO: 103258 - protein, 243 aa, Unknown
  Obtained from environmental sample
  misc_feature (1)..(243): Xaa is any amino acid
LQPNDTNRTVAQNATTGGFPKLTVAATGKPTLKYQWYFNETGLPTGGTSLSPAGTSYTYTPPNDVEGFRYYYCVVSNTCGSDTSKVSGKHTVTECTKPAFTTQPKTDSVIRAQYAAPGFPALTVAAFGTPPFTWQWYATTENNNTSGGTKVGKDSNAYTPPDTTAGDSYYYCVVTNACGDTTSKISGKHTVTLCASPFIKVQNIDDQTVYQSPAPGFGKLEVKSVGGTPPFTYEWYSCENSTS

SEQ ID NO: 103259 - protein, 266 aa, Unknown
  Obtained from environmental sample
  misc_feature (1)..(266): Xaa is any amino acid
KTSIGEFIRLTHDAFKKRFGKDFGGIIPAIFTDEPQFTRMGTLSFAREEKDITLPWTTDIEDTFKAAYNGESLISTLPELLWDLSGGKASKARYYYHDHVAERFTAAFADQCGEWCDKNGIMLTGHLMEEPALESQTAALGDAMRSYRSFQFPGIDMLCDRREYTTAKQAQSAARQMGVPGVLSEIYGVTNWNFDFRGHKLQGDWQAALGVTVRAPHLSWVSMNGEAKRDYPSTFNYQSPWFEEYPYVENHFARVASVLTRGKAVC

SEQ ID NO: 103260 - protein, 151 aa, Unknown
  Obtained from environmental sample
  DOMAIN (16)...(136): D-isomer specific 2-hydroxyacid dehydrogenase, catalytic domain
  misc_feature (1)..(151): Xaa is any amino acid
MKILVTPASFKQGASAAVMDALKSFADDIAFNAKGKPLTEDELITALKGCDGCIAGLDPFSRKVIESTDKLKVISRYGTGVDNVDVAAAVEKGIVVCRTPGVNSQAVAELTFAFMLCLARQVPMLDRKTREGHWVRSVGAELHTKHWAFWG

SEQ ID NO: 103261 - protein, 195 aa, Unknown
  Obtained from environmental sample
  misc_feature (1)..(195): Xaa is any amino acid
MWNFSKFGNNIALIDENGEKVSYTELQSACEELFSKTNGRSVVFNFCLNEKGSLLGYVAFLNGGIVPVMLDAALDRELVSALIGNYKPDYLWLPRNMAGEFSGYSEVYSVWNYTLLKTPYDKVFPLYEELALLLTTSGSTGSPKFVRQSYANIKANTESIVEYLKIDASERPITTLPMSYTYGLSIINSHLWVGA

SEQ ID NO: 103262 - protein, 272 aa, Unknown
  Obtained from environmental sample
  misc_feature (1)..(272): Xaa is any amino acid
VELFKADAGLPRPLLLPRLLTIQELFLLCRARLPLPLGYRPGLPDAVVMLHRCVRELAAQNPVHAYLGKLDLADFFPWGVRLFGLLEECWSQNVLPRDILYAEAEVSSLAAGILSMLGSIHERFTEVLQERRASTQGLDALAVADNLGALPPLFPDRRVFLAGFVALTGTEDMLLRHLWEGGARVCLHSDPALLAPDAGQGAHWSCEEHARWLRRWKAKAELHAPPDAKKAEHHFLAGYDLHSQLHELGRILKEDGAEPPSTAVLLTDPSLL

SEQ ID NO: 103263 - protein, 287 aa, Unknown
  Obtained from environmental sample
  misc_feature (1)..(287): Xaa is any amino acid
VEGKKLRSRFVEELLWRMEQAGGRLFTTGRPPVDLTELSFVPPRRERRGMERSPALDAAMRGILAAPLSASTLNGYVRCPVRFLRERLCRIEPLEEINEGDDPKAVGDLIHKTLHALFRPWLGKTVRRGDIGARRAQECFEGLLRESSLYELLPPDSYYMLELAGPERLRRFLESQPETTRIVALEKKYTRELAHPWGSHALTGVVDRLDVRMEGALILDYKTGSLARLDPDVWEDASFWRRLASWDGNPDEDPLTEIYERVPDVQLPCYLHLCAQDECAPPDRGYN

SEQ ID NO: 103264 - protein, 92 aa, Unknown
  Obtained from environmental sample
  misc_feature (1)..(92): Xaa is any amino acid
MNKRVLGADLLLLLTAAVWGFGFVAQRSGMQYVGPFTFNALRFPLGSLSLLPLIAWRRRHKPAEKSESRSLFFSSFLAGTCLFIAVTFQQLE

SEQ ID NO: 103265 - protein, 213 aa, Unknown
  Obtained from environmental sample
  DOMAIN (1)...(212): Phospholipase A1
  misc_feature (1)..(213): Xaa is any amino acid
DRDAIETSFQISFKKDIVKNISPLGFSIGIAYTQMIWWQLYAPSCPVRTTNYGPELYVDFPFNRESGNASIFYQGIKFAVAHKSNGKDGEDSRSWNWIYIESPISIGRFLFVPRIWWSYVGIIDPFSVREIQRYMGICDLTIVSHWNSHVLRVYGRSNLNVKNLKGALRVDYSYPIAATGFYFYLQYFLGYGESLIDYDRLVNKIGTGLALSR

SEQ ID NO: 103266 - protein, 224 aa, Unknown
  Obtained from environmental sample
  misc_feature (1)..(224): Xaa is any amino acid
VAIDFEDPANPQVKGIGFDLASAGFALCIVNTKGDHSDLTPDYAAVPAEMKAAASFFGKHVLRELDEKEFFPRLPDLRNAVGDRAVLRAMHFFSENRRVDAMLAALEEMAAPPAEKAMEAYLALVRESGDSSWELLQNIYSPKNLNAQGLSIALSLTKNFFNSGSAKGACRVHGGGFAGTIQAYIPTEKLKDYRNLMEGVFGSGTVTVLRIRPQGAVELNLKQA

SEQ ID NO: 103267 - protein, 227 aa, Unknown
  Obtained from environmental sample
  DOMAIN (3)...(227): NAD dependent epimerase/dehydratase family
  misc_feature (1)..(227): Xaa is any amino acid
MKALFIGGTGTISTAISKRVLEKGWELYLLNRGSRNKELEAADKAGKLIEISCDIRSEDEAAISGRIKKALADSGATGFDVVADFIAFTPAHVEKDFRIFNGLCRQYFFISSASAYQKPLSSYLITESTPLANPLWQYSRDKIACEDYLMGKYRECSFPVTIVRPSHTYDERSVPLGVHGANGSWQVIKRMLDGKPVIIHGDGTSLWTMTHNSDFARAFTGLMGNIH

SEQ ID NO: 103268 - protein, 260 aa, Unknown
  Obtained from environmental sample
  misc_feature (1)..(260): Xaa is any amino acid
NGGALQFVPAARRTEAVCLAALTQDESAREYIPKKLKATVEAALKNAFSTEAFCLAEVQKSGRALQYVPEEFKTEAVCFAAVQKDGRALEYVPDAVKTEALCLAAAQQNGCLLKLVPDAVKTKELCFAAVRQSGWALEYVPDVMKTEAMCLVAVQQDGRTLEYVPETLMTEELCLPAVQNDWHMMQYVPDAVKTEALCLAALEQYDGYFIPELLQLIPDALMTEVVCLAIVQKNGGALQYLTDAQKTEAVCLAAVLQYTS

SEQ ID NO: 103269 - protein, 286 aa, Unknown
  Obtained from environmental sample
  misc_feature (1)..(286): Xaa is any amino acid
GKANPDKDFEYRLNYDGDKVVISKYIGSSGTVVIPQTIEGMPVERLTAVQDIKGNAGLLKAFVKESVMGGLTGNDGIFKNAVTVYVPDGILIERDIFKDCKRLREVRLPDDLEIIEFSLFEGCEQLETVNMPSALKSIYAWAFKKCKKLTRIDLPDNITIGGYVFEETGIKNIRLPSGIKTLVNNNSYNAIGFGLFKKSVLESIIIPEGVEEIMTGAFEECTKLTSVSLPSTIKTIGSGTALFQGSTFRKCKNLTTLQIPDSVSEIVFVYLFNFTETNLPLKTQAR

SEQ ID NO: 103270 - protein, 275 aa, Unknown
  Obtained from environmental sample
  DOMAIN (144)...(232): Hpt domain
  misc_feature (1)..(275): Xaa is any amino acid
MPYGKVLIVDDMESNLFVAKGLMLPYGLQVETASSGLEAINRVKNGETFDIIFMDHMMPEIDGIEAARVIQEMGYKEPIVALTANAILGQSELFMENGFAGFISKPIDVRALGACLTRLIRDKYPERAANGGAVIAPAPSMSADIRKSFTRDAERALGVLEALQLKPDWDGSDFAQYTTYVHGMKSALANIDAYELSQKAAALENAGRKHDRGKIKADTPLFLDELQRVMHSLSGAGGNELDQKGQGAGDADFLNEKLQALKSACGNYDKKAARA

SEQ ID NO: 103271 - protein, 284 aa, Unknown
  Obtained from environmental sample
  misc_feature (1)..(284): Xaa is any amino acid
YEQTEALADFKEELLTNLNAKIENFIRKGLGMDAAFAKASAELGDVSSLADELSLKKRKEVFEEVYMDIRMYMPARRVAGYVVFGILAFFGITAAIIAYFTIRSVEFLSATSLDLTSFFGAMMPFLTAAAIGFTWLGVTQETASMLPVSRKRGAWYAAAAGLICFGLFTMPIAYFSIKFANNVVNDVLAFDIPVEKLETLVPVIGIIIPFVLPGIGILVFLVLTEKDRLKPWAKNLHNKAVEGEMAIWNDPVKAGRFGMFSGAIWIFAIGIFIVLGFLIGFKFS

SEQ ID NO: 103272 - protein, 89 aa, Unknown
  Obtained from environmental sample
  misc_feature (1)..(89): Xaa is any amino acid
MTTTEKARIAAEIKAFKNTDFTDCPPLTDEQLAQLRPSHYRNMANYKPIKKTVNVRLDADIIEWLQSAGRGYQTRMNAILREAMLHSAT

SEQ ID NO: 103273 - protein, 84 aa, Unknown
  Obtained from environmental sample
  DOMAIN (1)...(74): Protein of unknown function (DUF497)
  misc_feature (1)..(84): Xaa is any amino acid
LYLSEVVDVFDDPHLMGFYDRAHSSLDEDRYITLGRLRDIVILFVVTVDKADGDTQIIMAREAVPKEQEAYYDHYRKSTNSGRN

SEQ ID NO: 103274 - protein, 205 aa, Unknown
  Obtained from environmental sample
  misc_feature (1)..(205): Xaa is any amino acid
MNAPAHTIAALSTPPGRGALAVIRLTGDEALEVFAKVIAEKEKFEEEAPRRIGIYTVIDVAKTAIDEVTAIKYKAPNSYTGEDMVEIFCHGGAIIPTKILDGLFYQGAKAAGRGEFSRRALINGKIGILKAESIRELIDSQTETHLRSAQLAYFGKQSESIERLKQEIIAALSDIESRIEFDEDDDVAESKQQQISVNKKTLASI

SEQ ID NO: 103275 - protein, 85 aa, Unknown
  Obtained from environmental sample
  misc_feature (1)..(85): Xaa is any amino acid
MRIAVVNSKGGVGKTTTSVYLGAAAVAQGLSVEFVDLDRQQSLTTWLTEAAPLPAGVSYRRANAHSVDRESLADVVIMDAPPGDP

SEQ ID NO: 103276 - protein, 275 aa, Unknown
  Obtained from environmental sample
  DOMAIN (1)...(275): Dehydratase family
  misc_feature (1)..(275): Xaa is any amino acid
NGADPKPLNLVDAINYAANESVSDEDLERVEQWACPTCGACSGMFTANSMNCLTEAMGLSLPGNGSTLATHTARRELYEAAGDLIVTLCRRFYDEGDDLASPRGIATKAAFENAMALDVAMGGSTNTVLHILATAQEAEVDFTMADIEEVSKKVPTLSKVAPNHPIYHMEDVHRAGGVPALLGELDRAGLLRHDVTSIHTPRLRDWLDDWDIRGGKATKEAKHLFHAAPGGKRNNEAFSNDNTWDSLDTDAENGCIRDVAHAYTPEGGLTVLRGN

SEQ ID NO: 103277 - protein, 271 aa, Unknown
  Obtained from environmental sample
  DOMAIN (2)...(238): Aldo/keto reductase family
  misc_feature (1)..(271): Xaa is any amino acid
SLREREFFDTAWIYPGSEETIGTIFERNHVREKIFIASKMPLVFVKGPADFDKYLDQSLNRLKTNYIDYYLMHMITDSGLWEKLKGWGIEDWILRKKKEGKIRQIGYSYHGSRNEFLKVLDDYDWEMCLIQYNYSDENFQAGVTGLKKAAEKMPVMIMEPLLGGKLATGLPKEAVEIFKKAKPDLSPAAWGLNWVWNQEEVTLLLSGMSDMAQLEENLRLADKVKAGMLGKAESDTYRQALEVINRSCKIRCTGCNYCMPCPKGVNIPGCF

SEQ ID NO: 103278 - protein, 230 aa, Unknown
  Obtained from environmental sample
  misc_feature (1)..(230): Xaa is any amino acid
VFVGANMALWRSTNGGASFSQFAHWLQSGRQYIHADMHLGAWTPTSQTGNAKALYIATDGGLSIVRNPGIATIPGSTPDPTVIDHRRNRGLSTHLVYNIGSTNAKLPATGGIQPVRDRVIAGFQDLGTLVRLNNTDRPGLFRYTGVGGDGFGCLYHPYNGNLVLGSVYNTRIMKSTNGGVSAWSNAVSGIPESNTNAAPFYTRLYLGMADPTGNSVYTFTNATPYRSSNF

SEQ ID NO: 103279 - protein, 282 aa, Unknown
  Obtained from environmental sample
  misc_feature (1)..(282): Xaa is any amino acid
NQRPSQPEIKLAPINQDNTYTKALTGKLDDDYAMYLKLRPEYINTPTFYFDMADWFFRHNDRERALRILTCIADLDLENASLFRLLGYRLKEYQEYALEIYVCRKVIQWRPMEPQSYRDYALALGDNEIYQAALDSLWSVLSRSYARNIVGRSHGIDEVVVTEINQLLAKYPKLHAGSLPKEIIQAMPVDIRVVINWNMNSTDIDLHVQDPNGETCFYSHRETALGGRISRDITQGYGPEQFLLKKATAGTYKVFVNYFGDSQVKAEGPSTIMAEIYSRYAE

SEQ ID NO: 103280 - protein, 245 aa, Unknown
  Obtained from environmental sample
  misc_feature (1)..(245): Xaa is any amino acid
MAYQEPIETFSVKATVWKSKSKPQMEGQLANELVFDEQGEAFIATFSRKAYRADRALIFSLPTPVDVPQTLMQSASGSYYFVASCMPKSETRQKTWGNTLGVIWDASLSGLYRDHAKELEVLNQIIQAKKNLTIHLYLLNNRFVKNGEYKITNGNWSALRNVVETVIYDGGTNFEAIRIPSNSADEFLFFSDGLSTLSDADIIAKNPVWTKYPMHGIVSSAKADYSAMKWLAAQTNGKFINLNAL

SEQ ID NO: 103281 - protein, 284 aa, Unknown
  Obtained from environmental sample
  misc_feature (1)..(284): Xaa is any amino acid
TLAKDMLTPAAFGGHKLEPKSFLTQCTIDGIKKELPDGFPNTDKIIGSLTNFMQGIMNTAMAGGGLDPKKLLGAVASMDIMGLVNDVKKLAADECIVDKPYEPPAAPAGGDDEDEEEDEESSVSFGIRAGANFSHTYGEYHVRYSNSGLIKDGEGDYGDVWGMQAGFVVDFAVSDWFHIQPGLMYIQKGMYEDYGGSITAHYLELPLLLSFKLDVLRLNAGPYVSWNMFGNSYYEDFDFGISTGIGFDIGMFYIGAFYDYGLVENLNHNLYGSYLTGVFRDASL

SEQ ID NO: 103282 - protein, 143 aa, Unknown
  Obtained from environmental sample
  misc_feature (1)..(143): Xaa is any amino acid
THDGALPDNIAKKLSFDIPTIVGRLFDGETFAPVSGVTVKLYWNGVLALMRNSNWQNPYTLVANTPGAFTFWPAPVPAAMVDMHQIFEYEIVIESGQYDTLTHFFKIPAVSAFQTEQTYFMNRTFKLPDLYLFSPGEAEQNGE

SEQ ID NO: 103283 - protein, 277 aa, Unknown
  Obtained from environmental sample
  DOMAIN (66)...(103): Ankyrin repeat
  misc_feature (1)..(277): Xaa is any amino acid
MLSPYLCSGANGFYEIMRLCLAAKADVPCVNRFGGTVLLPSSEKGYLKTVREALKAGVPVNHANHLGWSALLEAVILGDGGLLYADICAELIKAGADIRMKDRDGKSSLDHAQSMKQERVLRIMRGEPLFDCACAAPVMAAREHIWNEEYGQAMPELNKALAINKHSASALYYKGYCLQEQKKYAEALACYNEVTATAPEKIEFRFYTAGCLRLMKRAEDALAEYKKAIDAKPEAQFHRYHMSNYLRELGRHEEAVAVMDVLLSQQPRRYDYSFHKA

SEQ ID NO: 103284 - protein, 263 aa, Unknown
  Obtained from environmental sample
  DOMAIN (149)...(263): Alpha-L-arabinofuranosidase C-terminus
  misc_feature (1)..(263): Xaa is any amino acid
MADLRKKNGREKPWQACFWGIGNESWGCGGNMTPEFYADNYRRYAVYVRRYGNTIPYKIACGPSDENYNWTRVLMEKTCGGKSNLIDGLSLHYYTIPGEWAFKGSATQFTEDEWLVTMKKAYLMDEFIHKHGAIMDEYDPKRKVSLVVDEWGAWYDVEPDTNPGFLYQQNTLRDALLAGIHFNIFNNHCERVGMANIAQTINVLQSVILTKEAAMVLTPTYHVFDMYKVHHDALKLRVQVESEKCSAGSSTIPALSASSSKDD

SEQ ID NO: 103285 - protein, 85 aa, Unknown
  Obtained from environmental sample
  misc_feature (1)..(85): Xaa is any amino acid
MSNFAKIIAFDLETTGLDDNKHEIIEIGGVKFSVKESRGRIVPDKIEEFQSFIKASKPNEAVNVNHITDDMLVSAPSHSEVLQRF

SEQ ID NO: 103286 - protein, 260 aa, Unknown
  Obtained from environmental sample
  misc_feature (1)..(260): Xaa is any amino acid
MNFDTSIGIKQVIRYEWMNYTVDLLTSGLKKEDIRKELENYLSEKKGNGKTGNRAGYTMSLAVTLLMNIWITPKPELISFRDRLLKMIKIKEIEPVCHWAMASSVYPFWFNMSYIFGSLFLLQDQIKKSQIMSRVYEIFGERNTIERCSRYVIRSFVAWGIIKDKERSGYYEKGKIIKISDISFACLLIETMLNAVPEKRISLASVLNCPSFFNFELPPMNGSQITKVNQNLEVEQFSINEEFVKLSIQRFQNLRIKSAF

SEQ ID NO: 103287 - protein, 125 aa, Unknown
  Obtained from environmental sample
  misc_feature (1)..(125): Xaa is any amino acid
MKESGYIIGSSTWIGDFADPYTFLQIWRRDSNLNDACFYDTEYEALIEKSMMEDGNERMATLAKAEKLLLDRGVVLPIFYHPALNIVDTGELEGWFPNALDIHPFKYFYFKAYRPLPGVAMVHEK

SEQ ID NO: 103288 - protein, 84 aa, Unknown
  Obtained from environmental sample
  DOMAIN (2)...(84): YgbB family
  misc_feature (1)..(84): Xaa is any amino acid
MIRAGLGYDIHRLKRKRRFLLAGVEIPSRRGELGHSDGDVLAHAVCDAILGACALADIGELFPPSDTSWKDADSMQLLDMAFSL

SEQ ID NO: 103289 - protein, 142 aa, Unknown
  Obtained from environmental sample
  misc_feature (1)..(142): Xaa is any amino acid
ARLSGGSQTYCRVDVEDIDSKAGKALSDDFGAIVARTAIRAIIRTIAAEQTKKNVDTGSQLGNLAFSIFTDLAFDQLEMADVRMCFFLPQKITLIRIPVEPGKHSVQMKIHDKSGGFIGWKSFENIEVRRGEKKVLLGGYFL

SEQ ID NO: 103290 - protein, 62 aa, Unknown
  Obtained from environmental sample
  misc_feature (1)..(62): Xaa is any amino acid
MNNQLRKVTKTRSTFSTDDAIYTVLYLAIRNASEKWTMPIRGWGRALNQFAIEFGRDRVPFL

SEQ ID NO: 103291 - protein, 262 aa, Unknown
  Obtained from environmental sample
  DOMAIN (66)...(229): Glycosyl transferase family 4
  misc_feature (1)..(262): Xaa is any amino acid
WAVICLILRTRLTHLFADTPNHRKAHSDPIPRVGGVAMVAATLAATLAWYAVSQRSEGGPVPGGMLVSIIVAAICIGALGFLDDTRFVNVRVRHKILVTAALAALTVFGLGVRPGVISVFGLFTIPELAGDLIAVLWIMWLINGYNLIDGLDGFAGTVSALSLLGVAAVLYIAGDFQAAALSLFVAGAAAGFMVHNAPPAKVFMGDTGSCFLGYIIALLTIRAAFDLNGSGKVMALMPLLAGVPIIEVLTTILRRYVRAGHR

SEQ ID NO: 103292 - protein, 254 aa, Unknown
  Obtained from environmental sample
  misc_feature (1)..(254): Xaa is any amino acid
VVSREDGSGTRASFTELFGIEAKGGDGSKKDLTTREAIIAKQTDITMTNIINDKYGIGYISLGSLNSNVKALSIDGISPSAANIKNSLYQAYRPFYIVTKGKPEGIAKDFIGFILSADGQSIISKNYVTVNDHFAAYTGGKSHGRLIIAGSSSVTPVMEKLRETYIALNPETEIEIHQSDSSSGINAVLNGTCNIGMTSRELKESELKELVPVKIAMDGIIIIINNLNPLTTLTKEQVKNIFTGQLERWSDVNK

SEQ ID NO: 103293 - protein, 263 aa, Unknown
  Obtained from environmental sample
  DOMAIN (1)...(263): Glycine cleavage system P-protein
  misc_feature (1)..(263): Xaa is any amino acid
VSSIGGLFTDIPDSLAPHPSAKEFFDTEGLSELEATAECERLASENDTRLVSFLGGGFYDHFIPAAVDAIASRSEFYTAYTPYQPELSQGTLQAIYEYQSQICRLTGMEVSNASLYDGGTAVFEACKMALAATDRHTIVIDCGVNPIYGKMLKSHTVNLGIDIAEIHAMYDGTLDREAINSRIDDKTAAVVLQNPNFFGIIDDHSDVVDKCKSVGAIAVQSVNPLALALIKSPGEQGFDIAVGEGQPLRIPLSFGGPYLGFIG

SEQ ID NO: 103294 - protein, 284 aa, Unknown
  Obtained from environmental sample
  DOMAIN (135)...(182): Regulator of chromosome condensation (RCC1)
  misc_feature (1)..(284): Xaa is any amino acid
TQQFTATVIGGTAGNTAVIWTASGGTVTQTGGYTAPTTKGAYTVTATSQADASKSDTATVTVTADNVPVTGVSLDKTSMSLTTGDRGLWAWGDNHLGKLGLGDWDGRNAPAPVGTVNDWAAVSAGSRHTMAIKSDGSLWAWGDNEYGRLGLGDTSSRSTPVRVGTDNNWTTVSAGGIHTMAIKSNGSLWAWGYNGRSQLGLGDANNRNAPVRVGTNNNWVALSAGNYHTIALQTDGSLWAWGDNEYGQLGLGDATNRNAPARVGTDNDWAVVSAGETHTVAIKT

SEQ ID NO: 103295 - protein, 272 aa, Unknown
  Obtained from environmental sample
  misc_feature (1)..(272): Xaa is any amino acid
ESVTLVTGGTQTFTATVTGGTGNTAVTWSVVTAGGGTITSAGVYTAPATTGTYTIRATSQADTTKSDTATITVVNPVSVSVAPKTVSLITGETHTFTATVTGGTTGNTAVAWSVVTSGGGTITTAGVYTAPSTAGTYTIRATSQADTTKSDTATITVVNPVSVSVTPEAATLTTGGTQQFTATVTGGTGSTNVTWSVVTTGGGTITTAGVYTAPSTTGTYTIRATSQADTTKSDTATITVVNPVSVSVSPKTVSLVRGEAHLFTATVTRGPG

SEQ ID NO: 103296 - protein, 259 aa, Unknown
  Obtained from environmental sample
  DOMAIN (102)...(259): Glycosyl hydrolases family 11
  misc_feature (1)..(259): Xaa is any amino acid
LTVITTGLVGSGTITYQWKQCDTATAEGTNIGSNSQNYRLVTADLGKYIKVTVTRSGYDGSVTSDAVGPVKNALVISTTQLDKDAIGVQTFTSNSGGNKSLTGSPYGYEMWTDGGNNNKLIWYGPNQGGGAAFRAEWNNPNDFLGRLGYFWGNGGLFTQYKNIYADFNYTRSGRSTAGDYSYIGIYGWARNPSAADTKEQLIEYYIVEDWFGNQWQNDTNPMGTGTTQGTVVGSYTLDGATYSVHNSVRTNKPFIDGNK

SEQ ID NO: 103297 - protein, 168 aa, Unknown
  Obtained from environmental sample
  misc_feature (1)..(168): Xaa is any amino acid
AKGQPFTIIAYGQDSESDNMLDRIEIEYVYNPGKEFFEQGRITHIPGSQIEQRRVREILSGQPKVFEEFINDLWYHVSPMGTIDKSQYLYFDPANREIIFFGEETQQIFSWQSSNATRYGIYVTSQNIAVTTLRRFLDIELESLDSIRMKVFEDVRLKIGISASWDGS

SEQ ID NO: 103298 - protein, 270 aa, Unknown
  Obtained from environmental sample
  misc_feature (1)..(270): Xaa is any amino acid
EEALYDFLDSVTGSFELDEVVSFIQMIEPKRKSLLAQEVESYINHRNMAFLVRNKCWMSRRGYFAPLSFVISPSRLELVNGILIPGHRCVPFANTSLLPHEYIFSWQGSVIPCTTTEGPPEEFYPYYSILGEEYAPQYVAKDNSENEEAFNGDPFDDPPEVSIRTMDMRNIYRETSFVPGDRFVVKTLDWKQGSFELEKVSKDEWSAADLDAWLLAAEEGFENSFSKLGPGSCTEEQIAYAYWYGSPRMREVPAYSLEDYIYEKPNRIET

SEQ ID NO: 103299 - protein, 275 aa, Unknown
  Obtained from environmental sample
  DOMAIN (114)...(275): Trypsin
  misc_feature (1)..(275): Xaa is any amino acid
MKNKRYRLSQICIAALGAALFACSAGGANPSSSSVAPVKELEAQHTAQVARTVSPQLEAFRYELADLADNLIPAVVSIQTETTVRVQNFGGFFGDDFFDQFFNFGPPRQQQQKPKESERKQQGQGSGVIISSSGQILTNNHVVEGADQITVVLSDKREFKAKIVGTDKQTDIAVLQIEGEIKGLPVAHLGNSDALRVGEWVIAIGNPFGLSQTVTKGIVSAKGVHNRGITSYENFIQTDAAINPGNSGGGLFNLSGELIGINTAILSRSGGFQGI

SEQ ID NO: 103300 - protein, 108 aa, Unknown
  Obtained from environmental sample
  DOMAIN (1)...(92): Protein of unknown function (DUF1016)
  misc_feature (1)..(108): Xaa is any amino acid
DNYILKCFIIIDLKADKLTYQDVGQIDFYVRLFDEKIKQADDNPTIGLVLVTDRDESIVKYSVLADNENLFASKYRLYLPTEDQLKAELQREREIIERRIDDHGGDAT

SEQ ID NO: 103301 - protein, 105 aa, Unknown
  Obtained from environmental sample
  misc_feature (1)..(105): Xaa is any amino acid
MDIKQAIIENRTSLGIELGSTRIKAVLIDENYAPIAAGGHDWENRLENGVWTYHLDDVWTGLQDCFSKLALDVKNRLWSDPFLGWRYRRLRHDARVSGVDKNGNQ

SEQ ID NO: 103302 - protein, 236 aa, Unknown
  Obtained from environmental sample
  DOMAIN (56)...(145): Helicase conserved C-terminal domain
  misc_feature (1)..(236): Xaa is any amino acid
DNGAANAAEELLLKIEKIVTRFIGEKREGDILVFLSGEKAIKDCMNRLSLCRVGSKLYLLPLYGRLGKEEHERVFEAAPKGKTKVVLSTNIAETSVTIEGITAVIDSGLSKLNWYNPNTFTSSLVEAPISIASANQRKGRAGRTCEGSCYRLYTRGDFEKRPLFTTEEIFRTDLSEVILRMADLGITDFEDFDFISTPGREGIEAGIETLNLLSALESDRSLSNISKMMTEFPLAP

SEQ ID NO: 103303 - protein, 273 aa, Unknown
  Obtained from environmental sample
  DOMAIN (1)...(197): Phosphoribosylglycinamide synthetase, ATP-grasp (A) domain
  misc_feature (1)..(273): Xaa is any amino acid
MGKYGIRAAASRNFTSHADALKYAEKHFSKAKKTTPPPLVVKADGLAAGKGVVVAADLAEAKQTLSAFMKEGSLGDAGKSVILEEYLEGLEVSVLAAVSVSPGKKGTIKPFISARDHKRRFEGGSGPNTGGMGAIAPVPDFTETARNDFETAILAPTLKGMAAEKMDYRGFIFFGLMVREERCYLLEYNARLGDPETQAVLPLMDSDLAELCTAILNGTLQNFPLKWKKSAVCAPVAVAEGYPGPYRKGDPIAINPTELGKTGAKLFVAGASR

SEQ ID NO: 103304 - protein, 218 aa, Unknown
  Obtained from environmental sample
  DOMAIN (26)...(134): Alcohol dehydrogenase GroES-like domain
  misc_feature (1)..(218): Xaa is any amino acid
MKTKAIRLYGKNDLRLEEFELPEIADDEILAKVVSDSICMSSHKLALQGGAHKRVRHNLAQNQPIIGHEFCGVIEKVGAKWAGKFSAGDKFAIQPALNYPDDSGVPTLWAPGYSYEYIGGDATYIVIPKEVMEMDCLLEYRADNFFMGSLAEPVSCVVGAFNAQYHTKGGSYVHSMGIVEGGSLALLAGVGPMGLGAIDYAIHNKRKPSRLVVTDIDD

SEQ ID NO: 103305 - protein, 183 aa, Unknown
  Obtained from environmental sample
  DOMAIN (1)...(103): Response regulator receiver domain
  misc_feature (1)..(183): Xaa is any amino acid
MRKGLADYFAGTGRCRVVGTASTLAEAKELASRVYADIYLLDIQLEDGWGLDIIPLFTKEPRPIMAVYSSFDDYAHVSAALGMGVQAYICKRRSEQELESALRATLDGTPYIDDTVQSKLTKTVNLFSLLTKRETEILRLVTRGLSNRQIAENLKISPRTVENILSCVYDKTGIRSRAELERL

SEQ ID NO: 103306 - protein, 292 aa, Unknown
  Obtained from environmental sample
  DOMAIN (47)...(283): DNA methylase
  misc_feature (1)..(292): Xaa is any amino acid
DDESVPDAPAHPVSVLGDLWLLGRHKLICGDSTKSETLQSLMGGEKAALCFSSPPYGNQRDYTQGIDDWDTLMRGVYGNLAEIMDPAGQILVNLGLIHRNNEVVPYWDGWIAWMRIQGWRRFAWYVWNQGSGLPGDWHGRLAPAFEFIFHFNRESRKPNKFVPCKFAGSCGHLDSNGAGTDIRNRDGNPGKWTHVGRPVQETRIPDSVVSVGRQSGPVGKDIDHPAVFPVGLPEHIMLAYSDENEIVFEPFSGSGSSLLAGERCNRQVRAAEIAPEYVDVALIRFARAHPDV

SEQ ID NO: 103307 - protein, 183 aa, Unknown
  Obtained from environmental sample
  DOMAIN (2)...(181): RecF/RecN/SMC N terminal domain
  misc_feature (1)..(183): Xaa is any amino acid
MAITTIETEKFLVFKNKFSADFCNGVNIFIGANGTGKTTLMKVMYAACRFLLAKTDDFTKVLSNNFGSNEFLREGMAKIVFDGPRKAFDNYVLFILEPNGDNIAEISNEFKTTAIYIPPEDMLSHSKGFLALANERKMPFDQTQIDILSKASIPETNSITPNTEKVIDRIKAIIGGNVVYEND

SEQ ID NO: 103308 - protein, 139 aa, Unknown
  Obtained from environmental sample
  misc_feature (1)..(139): Xaa is any amino acid
MKNNDKQVLWAGRLEEKPEAEAFAFQASIAVDQRLVQEDIAGSRAHAAMLAKQGIIPVETAQALDSELERIAEEISSRVLAIDQNAEDIHSFIEAVLTERLGDAGRMVHAGRSRNDQVALDFRLYLKKAIPGLRGNGGD

SEQ ID NO: 103309 - protein, 93 aa, Unknown
  Obtained from environmental sample
  misc_feature (1)..(93): Xaa is any amino acid
DVTQETVTGTVRLKLYKGSVSSAGASSPYSLYNASIASFTTGELYNHADARGFIRLYGLPTLVRALMQNDAKSKKPVKKVQEKSDSKSQGISG

SEQ ID NO: 103310 - protein, 270 aa, Unknown
  Obtained from environmental sample
  DOMAIN (24)...(189): GTPase of unknown function
  misc_feature (1)..(270): Xaa is any amino acid
MLDAEEERLLIIKSDKELISTKKYNVAVMGKFKTGKSSLINALLGVKVLPADVEPATATINRITYGPELKAVVEFKDGVKLDVDISELANYVTKLTSNGASRAAKIKEALVYTPSVICQNYVDIIDTPGLDDNPAMTKITINMLDNVDAVIVTIHAKAPFDEHTETDFVCRLIKSDNVNNIVFVVTFMDHLDEDDYDYDKFIMFIKNRIYDKVMEKLKAADETEHIINKANTLLKDLHIYGISSALALRYYLTNDEKTLKKSKFDIFKTE

SEQ ID NO: 103311 - protein, 240 aa, Unknown
  Obtained from environmental sample
  DOMAIN (17)...(83): His Kinase A (phosphoacceptor) domain
  misc_feature (1)..(240): Xaa is any amino acid
MIAEMRRAEVAEESNKAKSEFLAKMSHEIRTPMNAILGITEIQLQDANLPNTIKEALERIYNSGDLLLGIINDILDLSKIEAGKLELFPTQYDVSSLIYDTVKLNVMRYESKPIEFLLEVDENLPSSLVGDELRIKQILNNLISNAFKYTHEGRINMRLTIEKGGNSSEIILIFVVSDTGQGMTAEQVRKLGDKFSRFNAEANRKTEGTGLGMNITQNLISLMKRDMKIESTPGMGSTFT

SEQ ID NO: 103312 - protein, 64 aa, Unknown
  Obtained from environmental sample
  misc_feature (1)..(64): Xaa is any amino acid
MVKESKKGKVKCSMRSKGAIDISKVAHDFGGGGHINASGFNSEFNIDQTLSLTLAKITAYLGIK

SEQ ID NO: 103313 - protein, 237 aa, Unknown
  Obtained from environmental sample
  misc_feature (1)..(237): Xaa is any amino acid
MGTVDLPKSGKNVRPQAARPQARSAPLPETGENRKDDALERIFREQSHKFSNRLGAKLPGESSPRLDDKVYNFISQNFRSISADFSLGRHDDSREKNSAVKNTATEVAAMLESSGSANQFNRGEIEKSSRQWGIDGLEAHTNNMLRRRTGIGSVVDPQRANSVITCVFKDNAKKPKTVTDLRLAVNIPETELIDPQANYKAGAAYLVRDVICKYLSERIDGETDIDSLLDDSPGNKS

SEQ ID NO: 103314 - protein, 90 aa, Unknown
  Obtained from environmental sample
  DOMAIN (8)...(90): UDP-glucose/GDP-mannose dehydrogenase family, UDP binding domain
  misc_feature (1)..(90): Xaa is any amino acid
ELGRKRIALLGMTFKANNDDTRESLSFKIKKLLEFKMAKIITHDPYLPCEMSLQETLNSANGVILGTPHNEYRNIIPTVPYVDCWGIWPR

SEQ ID NO: 103315 - protein, 259 aa, Unknown
  Obtained from environmental sample
  misc_feature (1)..(259): Xaa is any amino acid
VADLAGVDVDDARNLVGGTAMLEFKIVAEQEKTGQTLTLIDNFLKGRNLPMLDSASASDTTSETEVVEANKEPATSEADLLSDESLLLGGKTTEPAVGDSAKDKSEDKSAYLNPERPFTGYMVNYGSNLAVPDGYVSKIQAILEMPGVQALIPRDVAFYWGRGFEKEQNGNKLKKLYLLKRRTEMDGKEIATANPHRVSDGLSAGQVAVSLRFKGMGPKKFGSVTGNNVGKQMAIVLDGQVISAPVIRDRIPNGEAQIT

SEQ ID NO: 103316 - protein, 268 aa, Unknown
  Obtained from environmental sample
  DOMAIN (34)...(208): ABC transporter
  misc_feature (1)..(268): Xaa is any amino acid
MSNVIAVNNLKKNFGATAAVNDISFAVQRRSFFAFLGQNGAGKTSTINMIIGLLKRDGGEIFYGDSTNFEEYKNKIGVVFQNNISDDLLTVEENLQTYGELYIRQPKKTKDRLNEVMTLLSLQDVAKQRFGTLSGGQKRKVEIARALLVSPEILFLDEPTTGLDPKTRAEIWGVVHSLKNENGMTVFLTTHYMEETAKANDVVIINKGKIIATGSPAELKSRHAFDRLLITPQDAPLLEKQLEEEGLQWEKTSDTYMARISAAGASID

SEQ ID NO: 103317 - protein, 153 aa, Unknown
  Obtained from environmental sample
  misc_feature (1)..(153): Xaa is any amino acid
AFHISKSEAPRRAVVLITDGENNAGTIHPESAAAMLGEMGVSLWVVGVGSAGEVPVNYVDPITKMRRTGTFDSRYNIEDLRRIAEKAQGQWVHAPQAEALSAAFTQLDQREMIIRRSVSVRREEPLYVIFLIVAVTLLWGVRFVRRYVLGALL

SEQ ID NO: 103318 - protein, 84 aa, Unknown
  Obtained from environmental sample
  misc_feature (1)..(84): Xaa is any amino acid
VGIESGGHVALVRKDKQVVMMNPVLQAMSELQEHMNGKFEEAGLYTDDDIMELVREIRYEIEGIPYEPPTRAPQTADTVSQAAV

SEQ ID NO: 103319 - protein, 234 aa, Unknown
  Obtained from environmental sample
  DOMAIN (14)...(228): Protein of unknown function (DUF558)
  misc_feature (1)..(234): Xaa is any amino acid
ALPESDAPLENAVLELSVEQTRHLAALRCAVGDPLEILFPSGPWKAEIVGMARGRVSVRLVAPVGECREAPIGIHACLPITADLRLWDTFLPSAVELGATLIQPVVYERSQFDRRGAEARMGRWRRIIMAACEQSHRSKVPVLENPAPVTALRDYAVPQRWMAYEVRLEEPNPTLAFEDLAFTHGPEGGITDAEAEMLRGSGWKPFSLGRAILRAATCPAAILGAVQMELGRHR

SEQ ID NO: 103320 - protein, 116 aa, Unknown
  Obtained from environmental sample
  misc_feature (1)..(116): Xaa is any amino acid
GGKLGIGFQILDDVKNLTTGIPGKKRGDDIVEGKKSLPVLLFLKRQPEKKEMVCRCFAASRANGVSAPETEELIQALAACGVIKEAEEQGLALIAGARKVFEKTSAPLAGLLDLIS

SEQ ID NO: 103321 - protein, 282 aa, Unknown
  Obtained from environmental sample
  misc_feature (1)..(282): Xaa is any amino acid
EIRLTTTPSKTGDANSKEGVTATTPNGYYVRTLPTTTSTTNTDYQYTLIAGKNLKIDTTAPTVSGIAATTAQGWYSAGDIYITATFNEPILIGTGSNLPRLNLGIGNGTGSTSTAESDVRVNNNTISFRYTIKENNDSSRGNPISVTGYSGTITDIAGNRLASNAVSATTLTGIYIETLKPQNPIVRVSSTPLTNPIDGSQAIRSNVDGTTNYGSSTQNAALSTVYFKQLYIAVRGQNDNDYNGNQFAALEYSTDGGTSWTRAPNIVNNSFEITQTGTYNLV

SEQ ID NO: 103322 - protein, 205 aa, Unknown
  Obtained from environmental sample
  misc_feature (1)..(205): Xaa is any amino acid
IAVVCRLPSGWNVYWYSAQGEQLFLVQLDNNAIPVPPNWPGFSASVDAIIAAPDARKLYIKVDYYRDVFDESTDTRASTEPVSSLIWILDVEKGSYERSVEAPFYEYSFSENGKTVYVRLLYSMLGIIRGGGILLYFPTENGYAVLRLDSDGHRQRRGFIKVAPEEQRFNNFHLSPEGILSALLVDDWKINVVWWRMDKFMRDTL

SEQ ID NO: 103323 - protein, 282 aa, Unknown
  Obtained from environmental sample
  misc_feature (1)..(282): Xaa is any amino acid
FKGFMPSTDDDELPGTVDIDDAFADNAPEPETSDTKSADVKSSDIKSDDFDLPETSFDEGLDLGGDTSSDVPSVDVPSADIPFEAEPPEEHIDLGGESPDFDMPEFSAEPSASEDFGFEGDTSSGSGLPDESEFTQTEPDGLDLPDFDMGEPAESSGADDSGGLPDMDLGGEFSSDQIDLENEPQAEGESAGGAPAADFGDDSFDLPGLDDLFDKKTEAAPKPAPKKSFFKRKKEPVVEEEEEHELGDSDEINLSQSDVDKLLATIASYPLNLRVACQELIA

SEQ ID NO: 103324 - protein, 167 aa, Unknown
  Obtained from environmental sample
  DOMAIN (1)...(167): Nucleotidyl transferase
  misc_feature (1)..(167): Xaa is any amino acid
MAVILAGGRGSRLMDLTADLAKPGLDFGGKYKVIDFTLSNCVNSGFRRIAVLTQYNSHRLLQHLQMGWTFLPGKMGEFVHVFPAQQNELRDAWYVGTADAVFRNLDNIQSAKPEVVLVLAGDHIYRMDYRTFLDDHLRTGADLTIACLQVPKEKASQFGIAQVNDEG

SEQ ID NO: 103325 - protein, 291 aa, Unknown
  Obtained from environmental sample
  misc_feature (1)..(291): Xaa is any amino acid
VIVQSENVRRAYILAQKNYFGDKLDQAIGKAEDRIIALGSPKFDKVIKSKREDFSLPEEWKNLIGNKKVILYNSSLGTILLDTELYLMKIRFVLETFRQRKDVVLWWRPHPLSDATYKSMRPHVMMEYKKIVAEYVRDGWGIFDDTPDLHRALAWTDAYYGDASSLVALYERTKKPIMIQSPWLVDALRDAIAPVCLCEDDKHYWFSALSFNALFRMDKDTSKVEFISSFPNESHMNNYLFTEATLCDCKIYFAPCSADNISVYDIKSNEFSTVKILRPDNYNFNNYYLNN

SEQ ID NO: 103326 - protein, 220 aa, Unknown
  Obtained from environmental sample
  DOMAIN (18)...(183): GAF domain
  misc_feature (1)..(220): Xaa is any amino acid
MNIESIIKIDTELNEMQDLDLLLERILFEARKVVHADAGSIYIKQIIEEDGNKIEKLFIKYSQNDTLQKELPPGQKLLYSVFSLLVNDKTLSGYCALTKQLVNIEDAYNLPPGVPYSFGKSYDQITGYKTTSSLSVPLKNADGRLLGVIQIINSKDKKGNIVPFTKEDEGIITHFAVNATMALQKAQLIRTMILRMIRMAELRDPKETGTHVNRVPATLW

SEQ ID NO: 103327 - protein, 281 aa, Unknown
  Obtained from environmental sample
  misc_feature (1)..(281): Xaa is any amino acid
MRTAIDKLNVILRELSASKKAGLHPDTVGMHALRVKIAEAEEFLAIVEISVDGTEIALASDWITEENKTKLENAIDTAKTILETPNIPEADVEAALEDLIAVFDEVYNSKEKGTNANAADKAALRAGIIAAEKKLADNADVEIANTAHEVYTNKKWVTQAVMDALTTALEAAKSLSVNPFALQANVDAALAALNAASAAFVPAPGMKPDLGDPAALGLLIAIIEAEMANAKVSADGSDVENHETWVSTTANAALLTALADAKLVSPDASQDEIIAAVEALD

SEQ ID NO: 103328 - protein, 185 aa, Unknown
  Obtained from environmental sample
  misc_feature (1)..(185): Xaa is any amino acid
KNRQFKIVSVISAGEQPSREQHDPSLENALRGANNSFSPRWRFDLGLRLSATDLLSAAPKRSVVYIGSGNVGELAFERYSLSELSNYLANNCIVFNAVIVGNGQASAAIEYLCRETGGKIAHLYQPQGIGPLIKSVAEIPSGLYSYSFTSHLPTDFGRAWLPVEIEVKLMERSGLDSTGYYPPLE

SEQ ID NO: 103329 - protein, 118 aa, Unknown
  Obtained from environmental sample
  misc_feature (1)..(118): Xaa is any amino acid
MQKRRKTKKPENLCNGPGKLTQAFGITRKQNNKSLLTGDFRIYDSKIKPEITITTRIGLTLGKELPLRFYITGNPFVSGRLHTKITKVHKDHKGNIKKSFIQAAGNSLCCPSRIFPSV

SEQ ID NO: 103330 - protein, 288 aa, Unknown
  Obtained from environmental sample
  misc_feature (1)..(288): Xaa is any amino acid
YVYERNPPIYHSKNDVIVEYAVSNRKINGNNAKSKEQKELLEESARNFYVAVTRPIYRLYIVNAYKEDSKENEFSAGQKICNRILEDENIQIVDSFADIEYPKNSRLKFEKEQYKQEKLPKSKNFEIAPAWQHTSFSEISQNLEHRDHIHILQEVEVKIPAGKVMGTLLHSIFEHVDFNASENEIRSLVESKLGGFKEFSKNTAEGEKRKAWVEKQVKVILNKDLGEAGKLCEIDASNRAAELNFFMKAENLDLRKIKEVMQEKILDFENEDLLAKYIKGAMDLVFLG

SEQ ID NO: 103331 - protein, 106 aa, Unknown
  Obtained from environmental sample
  misc_feature (1)..(106): Xaa is any amino acid
MKEKKTDTEDTALIREDGVHTLGVVNLHKKFGKKEVVKGVNFTMQNGEVAGLLGPNGAGKTTIFYMIVGFLAPTQGIVTMNDINITPKHMYRRARMGIAYLPQEAS

SEQ ID NO: 103332 - protein, 278 aa, Unknown
  Obtained from environmental sample
  DOMAIN (2)...(277): Dihydrouridine synthase (Dus)
  misc_feature (1)..(278): Xaa is any amino acid
ALFAGGPYEKWYIDAAPKPEKVVFQVVGSDIVQISNAVTFLDKLECAGIDINMGCSAPLIRKTGAGAAWMASIDRAGELISHIRPFIKRRLSVKLRIGYKDDFDFLVRFCRRLEAEGVEFITLHPRLVTEKFKRFARWEYVKRLKQELRIPVAGNGDISAPAELLRRAADGSCDAVMVGRAAVRQPWIFARAREIEGADSNATKPDFVPNIEEIGLRFLELLTRYQPPDFHVSRAMRFFGFFCDNLKWGNYLKTRLNRQKTLSDIEMVWRGYFNENEE

SEQ ID NO: 103333 - protein, 265 aa, Unknown
  Obtained from environmental sample
  misc_feature (1)..(265): Xaa is any amino acid
MTLNEIYRLCGKDWRNGEDNNLLAQTNWFFTVNPNFDPKTGEALPQALSAFLARIAKPKDDGTLHDRLWRITEHARDSIERIFRALNENPRREQAFLHIRAVRELDANSFIKLSNRPGRTIREKLKDKPYLYAVRRYQSIDLPENRLLKEFVTRLAELLKKRYEYLKEEKEDEILQKIQLWLLGDEAKSIARWENLPPNNTLLSHRDYSRIWKAWGWLQSLDEDIDGDFSHFETRAGTKRFWLLIRKKYSGGQYIFADMPVHFDY

SEQ ID NO: 103334 - protein, 289 aa, Unknown
  Obtained from environmental sample
  DOMAIN (34)...(57): 4Fe-4S binding domain
  misc_feature (1)..(289): Xaa is any amino acid
NCELQTLAAEFGIRELPFKHISNGLSIDDSNPAIVLNPEKCIRCGRCVKVCQDVQNVWAIEFLGRGIKGRIASAADAPLGESPCIKCGQCAAHCPVGAIYERDDTVKVWAALQNPNCHPVVQIAPAVRVALAEEFGLPPGTVFTKKIYAALRRLGFKTVFDTNFSADLTIMEEGTELVKRLTEKKSDIPLITSCCPAWVDYMQKYFADMIPNFSTAKSPQQMMGAMIKAYWAGKASVDPEKIFSVSVMPCTAKKWETHRNSDMQSAAKFLGKELGADIGWDVDIAITTR

SEQ ID NO: 103335 - protein, 156 aa, Unknown
  Obtained from environmental sample
  DOMAIN (1)...(156): TatD related DNase
  misc_feature (1)..(156): Xaa is any amino acid
MLVDAHCHPFDLVGHLENAEEERRNLGVICASSATTLKEFEYCEKLSLKAKKDNAPPLLPCFAVHPQMPLTLGNGTQMFLQDSLSVLDMLAAKKRLCAIGETGFDLYNAAFKETEGIQDELFAAHLETALRYDLPLVIHSRRAMHKVFANAAALKN

SEQ ID NO: 103336 - protein, 67 aa, Unknown
  Obtained from environmental sample
  misc_feature (1)..(67): Xaa is any amino acid
MCVAKGVDYLALKIKEQAKDHDVPIVENPPLARLLYRSVEVDKPIPAELYQAVAQVLAYVYRLKNAA

SEQ ID NO: 103337 - protein, 174 aa, Unknown
  Obtained from environmental sample
  DOMAIN (8)...(122): Response regulator receiver domain
  misc_feature (1)..(174): Xaa is any amino acid
MSTKTPAQQILLVDADVDQRETVANILKGEGLDICTALTGDEATNVLRQRRPPFSMVVTNLLLPGKGGLEIIRAALKHDPDCSVMALSSPASAGMTTDALTSGAYAVLSQPVHVEQFRNALRRFVERSRLLSERKHLMSRVAELESKVEALEAAVGRMEMLAQQISPVVVQDEL

SEQ ID NO: 103338 - protein, 63 aa, Unknown
  Obtained from environmental sample
  misc_feature (1)..(63): Xaa is any amino acid
MVGTLVDVGRGRLAPLRVAEILDAKDRRAAGVTAPPMGLYLEKIWYGREWGLGEPCPWLVSSG

SEQ ID NO: 103339 - protein, 72 aa, Unknown
  Obtained from environmental sample
  misc_feature (1)..(72): Xaa is any amino acid
MKFVNERKTPLVITQKGEATAVLLDIETYQNMEDAFSQINIMKLSEKDIENGSVKKANEVFKNIRERIEENA

SEQ ID NO: 103340 - protein, 65 aa, Unknown
  Obtained from environmental sample
  DOMAIN (2)...(65): Adenylosuccinate synthetase
  misc_feature (1)..(65): Xaa is any amino acid
MKVVVIGAQWGDEGKGKIVDYLAGEAQMIVRFSGGAHAGHTIVIGNEEYALHLIPSGILYPDKMV

SEQ ID NO: 103341 - protein, 91 aa, Unknown
  Obtained from environmental sample
  DOMAIN (2)...(91): Aspartate carbamoyltransferase regulatory chain, allosteric domain
  misc_feature (1)..(91): Xaa is any amino acid
MLNIEEIKNGIVIDHIKAGLGIRIYNWLSLDKAPYTVAFVAHATSEKCGRKDIIKIDNTISINTDVLGLIDPKHTVNIIENERITKKIKLT

SEQ ID NO: 103342 - protein, 201 aa, Unknown
  Obtained from environmental sample
  misc_feature (1)..(201): Xaa is any amino acid
LLREQKSNLWYIRSSKAISENGFFVGLKGYETQVFLDIYEVEDDAKGRWARLNNDLEGRGVSDPLAAIKDIFLGELYYHFIEMFKPEILEKLCALKDKNSAAGDIKEDAGEFFITASFFMDGANGSYDEWAAFDEEGVKRKFTLISNDDILLEFNSFLERMMTIREMLLKPDSPFLKNLKERTDDGNKLGAIVMSYGLLYM

SEQ ID NO: 103343 - protein, 69 aa, Unknown
  Obtained from environmental sample
  DOMAIN (1)...(69): Tetrahydrofolate dehydrogenase/cyclohydrolase, NAD(P)-binding domain
  misc_feature (1)..(69): Xaa is any amino acid
MVKEGATVIDVGINRVPDSSAAKGYRVCGDVDPAVMQKAAFFSPVPGGVGPMTIAMLLQNVAEAAEKIV

SEQ ID NO: 103344 - protein, 171 aa, Unknown
  Obtained from environmental sample
  misc_feature (1)..(171): Xaa is any amino acid
MNNEYIEPIMFDEVVYEDNSIFIKKICLWEKCRLWKDDETNLLKVLLPGSNMFSIGHKGTYALPDGTRATGKDFYYIGSFHEGLAKIAVKDKGYGFIDKDMNIVVNPKYEYANDFENGVAVVSIIDEVSNDKKFLIIDKNGNERFFEKEYKRISVNSEGLFYNEGMFMVSD

SEQ ID NO: 103345 - protein, 178 aa, Unknown
  Obtained from environmental sample
  misc_feature (1)..(178): Xaa is any amino acid
MERCAVFVEDGKISDVFSQKRFEQKRFDPQTQIIDVNEAIIAPGFIDTHIHGFGGWGTEDSSAESIIEMSRLLVQYGVTAFNPTIYPMESEQMLEAIKAAASAIGKEEGAQIMGLHLEGPFISPERLGVMKAGTVKNVDLAFMERLWEAAGGRIVNMTVAPELKGMRELALFCLKKGI

SEQ ID NO: 103346 - protein, 79 aa, Unknown
  Obtained from environmental sample
  misc_feature (1)..(79): Xaa is any amino acid
LEIACGTGFWTETISEVSNYIMAIDLNNEVLEMARSKKYNCNVDFIQDDSYERNKIKVKYDSLFAGFWFSHIPKSKIIS

SEQ ID NO: 103347 - protein, 239 aa, Unknown
  Obtained from environmental sample
  DOMAIN (190)...(213): 4Fe-4S binding domain
  misc_feature (1)..(239): Xaa is any amino acid
MKASKVYFTDMRTKLGESLLMKLDRLIKKAGIEKIDFSQKYVAIKIHFGEPGNLAFLRPNFAKTVADRIRAMGGMPFLTDCNTLYVGRRNQGLNHLDAANENGYFPMSTGCQNIIADGIRGTDDVDVPVKGGEYCKSAYIGRAIMDADIVISLNHFKGHEGAGFGGALKNVGMGSGSRAGKMVMHNDGKPKVNKGDCIGCEICARFCAHGAISISNDKASIDHGKCAGCGRCIGAAAKT

SEQ ID NO: 103348 - protein, 86 aa, Unknown
  Obtained from environmental sample
  DOMAIN (6)...(85): Plasmid encoded toxin Txe
  misc_feature (1)..(86): Xaa is any amino acid
MYNIIYSSQAQRDAKRVGKFGIKKNIQKIVDILQKNPYQNPPPFEKLLGDLSGAYSRRINIQHRLVYQIYEKEKIVKIIRMWTHYE

SEQ ID NO: 103349 - protein, 114 aa, Unknown
  Obtained from environmental sample
  DOMAIN (35)...(107): Phd_YefM
  misc_feature (1)..(114): Xaa is any amino acid
MKLEGVKRPFLLLTDTDKLSIFKLLIIPNYQEKVMPVLNVKNVKEKLDSILADVQDTYEPLIIAGEKHSAVLISEAAWRSIEETLYLSSIPGMKDSIIDGMKEKIEDCTSTVEW

SEQ ID NO: 103350 - protein, 59 aa, Unknown
  Obtained from environmental sample
  misc_feature (1)..(59): Xaa is any amino acid
MNNIVNVSEGKIALYSTPGGNVYVDVVFKDETFWMTQKAMSELFEVDKSVISRHLKNLF

SEQ ID NO: 103351 - protein, 279 aa, Unknown
  Obtained from environmental sample
  misc_feature (1)..(279): Xaa is any amino acid
VRVVSIEGVPETGTAGTPLILTGTIRPAFASNLNIAWSVKDAGTTGAVINGNVLYAGADGIVVITARIPNGRAVGKDYTQDFIIVIGLGNPNEGEFLFLNGDITIHPNSDVTIGTELTAVYDGSEAVSYQWKKDGNVVGENSDKYTPTEAGSYTVTVSAVGYHSKTSAVVDVSDPSLLYLSGTITITPNINVTVGMELTAVYDGNETVNYHWEKDGTGVGTNSNKYTPTEAGSYTVTVSAEGYNPKTSAAVNVVVEYTILIDMFDNMPGDAITVSPNKG

SEQ ID NO: 103352 - protein, 283 aa, Unknown
  Obtained from environmental sample
  misc_feature (1)..(283): Xaa is any amino acid
AAASSDGVALQVSKGSAVIDEGGQSREMEAGSAISMDSEGSILSEPAVFVIQPKPNALYRKNAGEQFNVVFSWNRLNLQPDETLRLEIAEDQNFSRSVRTLNGLNNSARAALSSGIWNWRLAYNGAILDSGRFTITDAEELELLSPARNRKFSYESETPELFFQWTQMEDVLYYIAEVDDTSEFRTPVIKKQTAAESFSDSSLGEGIWYWRVTPVFSQTNEGGVTASRSSSFYIIKNKEQQTPSLVFAEESPANSSPNPNQTQVPPIPFLPAPAWRQPANGYR

SEQ ID NO: 103353 - protein, 204 aa, Unknown
  Obtained from environmental sample
  DOMAIN (7)...(98): Phage integrase, N-terminal SAM-like domain
  misc_feature (1)..(204): Xaa is any amino acid
VDKLSILKNYYSRLIALERRAPLTAETYRFEIRRFLDWLEGEKLSLASSEPESPEGKTVGVSDVTRYLEHRRECDGIDSRSVAKAISALRSFARFLEDSDFSGVSGLTSLLQIPRRAERLPEVHRKEDVDALLLSINTDSALGIRNRALYELIYSAGLRVSEVVNLDTEDIFLSENVAKVTGKGNKERLVVFGPDALHWIKCYL

SEQ ID NO: 103354 - protein, 162 aa, Unknown
  Obtained from environmental sample
  DOMAIN (34)...(62): SecD/SecF GG Motif
  misc_feature (1)..(162): Xaa is any amino acid
VDHSLKWRLGLVAAVFMVFTALVLPTFLDRPPAWGPQKRISLGLDLRGGIHLVMGVDLEVALANNLGRQADELRRALSEASVPAARVAKNPDRPVIEAEFPDSESLNAARALLAKQFPNLTLNPDGLRAELTLSDSEAAYLREMTGRQALETIRNRVDLFGV

SEQ ID NO: 103355 - protein, 277 aa, Unknown
  Obtained from environmental sample
  DOMAIN (63)...(275): Protein export membrane protein
  misc_feature (1)..(277): Xaa is any amino acid
VQARFDRPTATDEIRSVLGAAGFDDARIQTYGAPDDHEFLINLRGEAEETRVEEGQTTFGTKAGQVLVDHFGADRAEIRRVEMVGPQVGRDLRGKAFSALFYSLLMIIIYISGRFEQKWGTSAVFVAALLGICYLASLLGADLAVMTILALLVTLTLCYFLKFQYALGAILALVHDIVITVGFFSFLEKEISLSFVAAILTIVGFSINDTIIIFDRIREHISRSRRLDYGATINRSLNETLSRTVLTSGTTVLATLALYIFGGQANQDFALALIISC

SEQ ID NO: 103356 - protein, 294 aa, Unknown
  Obtained from environmental sample
  DOMAIN (229)...(294): MutS family domain IV
  misc_feature (1)..(294): Xaa is any amino acid
ELPRKQFEAEFCNSVLEKHFGTQNELSNLSISASGALLFYLLEQKKSGLSHIIKIESIPWSDYMALDPATQRNLELTAPLHPEDSNSTLLSVMDFTKTAMGGRTLREWISHPLISIEHILGRLSCVEELVDNPMSIDEIGEALKPIPDMERAMGRVGSSRANARDVQSLGKSLLQAEQIARMLKKLKGKKFGEIASKLELAKGKGQEIYALLKDELPLTIKEGNLIREGASDEIEDFRQEIKSKKNWLANLESKEKERLGIPSLKVGYNKVFGYYIEITSTHSHKKIPPEYIRK

SEQ ID NO: 103357 - protein, 79 aa, Unknown
  Obtained from environmental sample
  misc_feature (1)..(79): Xaa is any amino acid
MIPISSLAYELIRYAADLGDTGIGVVLRAPGMLLQMLTTYEPDKEQIEVAVAALAEALGEEAPERLRAPLYQPMKPLAE

SEQ ID NO: 103358 - protein, 176 aa, Unknown
  Obtained from environmental sample
  DOMAIN (60)...(176): PCRF domain
  misc_feature (1)..(176): Xaa is any amino acid
MFAKLEGLERKYIELETQLAQPGVFADQDRYRKLAKTHADLREAVELFRKHRKTCEALEENRRLLNDPDPELRVLAQEECGLLEAELPGLEQALKVLLLPSDPLDARNTILEIRAGTGGEEAALFGADLLRMYMRYAENMGWKTELLSESPSDTGGYKEVILLVSGHKVYSRLKFE

SEQ ID NO: 103359 - protein, 225 aa, Unknown
  Obtained from environmental sample
  DOMAIN (3)...(180): Domain of unknown function DUF21
  misc_feature (1)..(225): Xaa is any amino acid
MLTLVVLVLCAVGLSGACSLTEAALYAVSWSNIERLRGEGRRSGEVLHALRGQVSKPIAAVVTLNTLANTTGAAIAGIAATSVLGPEYMSAFVACFSLLILTVGEIVPKTLGVVYADSLAPLLAVPLHLLTRLFTPVIWLLGLINRLLLPKDSKHTLATEADIMALVSLSRKEGVIRPAEEAIIGNILELDQKRVHDIMTPRPVVFSLPAAMPLEEAYAARDLWH

SEQ ID NO: 103360 - protein, 291 aa, Unknown
  Obtained from environmental sample
  misc_feature (1)..(291): Xaa is any amino acid
IILVFQLCPAARFTTKYAKIGLNSFGGSRSQLDALEKYPTSQGATSRGNWWTATDYYSWDYYYYSHYSRSICSRAYIRAYYRNESGKTNYAYYRSIIGNEVDGNNINKEYRFSVRCVQDYISPSEVAKLLEEQKEEKRKQEERRQKEEEQRQKDAEERIAMNTGYFTDPRDGQTYRTMIIGGKTWMAQNLNYRADSSWCYDNKKINCDNYGRLYDWNTATTACPSGWHLSTQEEWRHLIRTVGGTDKYGPSDRAAKLLKAKCCWKDRFGYYGRNGTDEYGFSALPGGYRYI

SEQ ID NO: 103361 - protein, 196 aa, Unknown
  Obtained from environmental sample
  misc_feature (1)..(196): Xaa is any amino acid
AIPQGLLKTDQTLRPEEADALERRWESKYGQVKAGRKIAVLGKGTSFEALSFNPDVVKLFELKKWNLYTILAKFGIPPRVANIADRSTALSGKDTKEQHSAFWQYTLIPLLRQFEQILESQFFMRFNLQEKGRFDLFDIPELQESEDAQSKRDIAEITAGLKTINDVLKERGKEAKPWGDMWYRPQNLVPTSHSNQ

SEQ ID NO: 103362 - protein, 273 aa, Unknown
  Obtained from environmental sample
  DOMAIN (1)...(216): Caspase domain
  misc_feature (1)..(273): Xaa is any amino acid
GNYSGISRLANPTNDANDMAAALQSLGFTVDKVLNGDLEQMETAVTNLKKKLGGSPDTYGFFFYAGHGVQANGQNYLIPLPATNIQNETHLRERAVSLQFVLDSLSEAGNKLNMIVLDACRDNPFGWSRSGARGLTVVSYAPSGSIVMYAAASGQKADDGSGRNGLFTGHLLNNLKTAGLSVYEIFDRTMGDVKNTTGGRQDPELSIRFSGANSVYLGSRPTPYGSVTVTSDIAGEIMIDGKTTGRRIKAGGTETVSNVSTGSTEVAVRGDDG

SEQ ID NO: 103363 - protein, 289 aa, Unknown
  Obtained from environmental sample
  misc_feature (1)..(289): Xaa is any amino acid
GRSPFSGYLWEKEPIGGITPIHEMLDQLMDVPDAISARTPLMPPRLDPSKIVRSAQLGEMVPLADILGLPKMAESGNAALGSAALKSLGSGRPLPIVLHGPSLVPEAMACWDGLPVQFSGADAAAGGAADPSPIEPGGMVAITLVQGDLMLAATGTITYVSDKRILLFGHNLISREEGVGNLGAIDFPLWSASVATHLASYSNSMKLSQPVAPIGAIRLDRPTGVAGILGAEPKMIPFRIGLNLGGKKNMNFSFDVIDHPALTPMLVRTVLVQTINSHMREMGMQSLSL

SEQ ID NO: 103364 - protein, 120 aa, Unknown
  Obtained from environmental sample
  misc_feature (1)..(120): Xaa is any amino acid
MNMKFIKSITPTELSACENADSFLQSALWGRFKSHFGWEARAFSVDWSLGETRPLLALSRRIAPFLSMAYVPWGPELPAAFPDDPRLRVMAAAEIARALRPFLHSAFIRFDPAWFDSDGS

SEQ ID NO: 103365 - protein, 122 aa, Unknown
  Obtained from environmental sample
  misc_feature (1)..(122): Xaa is any amino acid
MPITASQPLHKVKEALHCFQERGGGRVTLEAVLLGGVNTRPEDARSIAGFAKGLDVVVNLIPWNPVKGLEFEGKALRPPSNAEAETYTQELEKLGLNVTRRFRRGRGVMGACGQLGKLGIRN

SEQ ID NO: 103366 - protein, 290 aa, Unknown
  Obtained from environmental sample
  misc_feature (1)..(290): Xaa is any amino acid
GVDPYRVACTGGFVAAGCIGFGAGLTGCTADFAATGCAGDLTGAATGCAATGRVGCTCGFAATGCTGLGTGCAGGLTGAATGFAATGRVGCVCGFAATGCTGLGAGCAAGLAVTGFAATTCTGLGAGCAGDLTGGTTGFAAMGRVGCAGGFVTTGCTGLADGCIAGLAATAGFGAGRTGCGLAVAGCTGGLAAITVFVCLAGFDFFGTVTGLTGMRPLFPARPAPAAADRIPLSGSVTGLRVIPGRPFFFCSLSFALPCLASGGDSGFCCPWLITALLILFQLRWRYKSP

SEQ ID NO: 103367 - protein, 202 aa, Unknown
  Obtained from environmental sample
  DOMAIN (5)...(202): NQR2, RnfD, RnfE family
  misc_feature (1)..(202): Xaa is any amino acid
MEPDNLIVSPAPHINNKATTNRIMLDVIIALLPAFVLAVWIFGPRAILITGVCVASCVFFEWAFEKLLKRKNTINDLSATVTGILLAYNLPVTIPVWQAIFGSFIAIVLVKQLYGGLGKNFANPAITARVVMFLAFPITMTTWIEPFVWKTSNDIITGATPLVLLSKGQTDGLNTLELFLGFHGGSFGEVSEAALLLGGLYL

SEQ ID NO: 103368 - protein, 264 aa, Unknown
  Obtained from environmental sample
  DOMAIN (190)...(259): S1 RNA binding domain
  misc_feature (1)..(264): Xaa is any amino acid
EAGLEDQFKKFADAAGSNKVFKGHISKIVEFGLFIEVGGLEGLVHISEVSWQRAQNLAESFTVGQEVEFVVLKAERRDTLRNSKISLSIKQALDDPWKKVAEGVQIGETISGKVTRLADFGAFVEVIPGVEGLVHVSEMAWGRRVHHPSEIVAPGQDVRVTVLGIDHNKKSISLTLKDVANDPWNGIEGKLAVGADVGGTVARKAKFGYFIDLFEGVTGLLVFSRMTADKKDSLKPGDSVIVQVESIDTEARRVALSMGVSDSN

SEQ ID NO: 103369 - protein, 117 aa, Unknown
  Obtained from environmental sample
  misc_feature (1)..(117): Xaa is any amino acid
KDKRILRKRGHLHDSIHFRIEGDTVVVGTNKQYARIHQLGGAIQKKAADRDIRLRKSGGRTLFAKKTHKKATLMTVHVGAHTINIPARPYLGVSGEDENEIRSIVLDELDRLLGGGV

SEQ ID NO: 103370 - protein, 283 aa, Unknown
  Obtained from environmental sample
  misc_feature (1)..(283): Xaa is any amino acid
SITGVLEIYNGYGGIYDAPMTFQNAFSLYQLEMNYKNYFHIDFGTGVIWPKRFELGYLFPLLDNFINQNLVGKTDNTSANINLKGRYPGLGSIWFSFFADEMEISSMTKAFELDRHMFAFQAGLQGMIPLLPFASFTLSYTKVEPYTYTHLRHYLPWYDRTNGPMEKAYVNNGVSLGYYLAPNSDEIKLRVESPLFYKKSVHLQYQLIRHGADFGPHQVDGSSLISEPDIDRDIKKSLTKNFLNDGAYQWLHIAKVGGEYKFGSLPLTIFGEAGVSYSYFTDI

SEQ ID NO: 103371 - protein, 268 aa, Unknown
  Obtained from environmental sample
  misc_feature (1)..(268): Xaa is any amino acid
TGVIVGITEAPQAISFDAMAERQQAVARAILQDPAVESLSSFIGIDGTNTTLNSGRIQINLKPLEHRRISAVGALRRIQAEVHGVSGIQLFMQPVQDLTVEDKVSRNQYQYVLEDADPDELAKYVPKLVESLQQIPILRDVVSDLQNNGLQVRVLLDRTTASRLGITPQILDDALYDAFGQRQISTMFTQMNQYKVVLEAQPGMVNKPEDLLGLYVRSNVGQIVPLSAFTRIETGPAPLAISHQGQFPCATVSFNLAPGASLGGAVKA

SEQ ID NO: 103372 - protein, 95 aa, Unknown
  Obtained from environmental sample
  misc_feature (1)..(95): Xaa is any amino acid
YLYGIRYRGSWGYGLWQQAVGSKAALNTANYEAARLAMQTFKRDGGDPLGIMPTHLIVDPTNEAAARAILSRELINGGESNPNYHTAELVVVPHL

SEQ ID NO: 103373 - protein, 97 aa, Unknown
  Obtained from environmental sample
  misc_feature (1)..(97): Xaa is any amino acid
MPIPFTQIPDILLVPGQYQEVDNSLAGSVGEVKKALIIAYKSDAGTAIAGKPVQVLSDLKAASLFGYGSPAALLAKSVFVFEQNRTVLGVAGASARS

SEQ ID NO: 103374 - protein, 277 aa, Unknown
  Obtained from environmental sample
  misc_feature (1)..(277): Xaa is any amino acid
GIAVLGLIIAACNNPFLPEKKEKGLNPVDVKPEEPVINDEESVLSDVECNKGEDILLIVSVDGDEDDYTYQWYSNSENSNEGGTPIPGANGPFFSPPTDEEGTTYYYVVITNKKNGKKTTSKPVKVTVDPSIYTIVIIKSGNVSGDTITALPEKGKEGNTVTLTYNVAYTGIHNLLDFGGVTAVIDSVNSAGNGSRTYVINPADSSNGIITITAIFTHTDLELDPIRFNTTGQTTKTYGDMAFTNAVAEGHLGSGAITYSSGNTDVATVNSSTGQVT

SEQ ID NO: 103375 - protein, 136 aa, Unknown
  Obtained from environmental sample
  DOMAIN (3)...(135): Pyridine nucleotide-disulphide oxidoreductase
  misc_feature (1)..(136): Xaa is any amino acid
MYDVMVLGAGPGGYTAAIRAAQLGAKTALVEKQDVGGTCLNRGCIPTKALIESVEAYLSLAHMEAFGVSVKDASFNAAKMYERKDKIVKQLRSGVEALVKSNNIELLRGEAKFLTKNSVELTAGDKKTKLDAKNII

SEQ ID NO: 103376 - protein, 276 aa, Unknown
  Obtained from environmental sample
  DOMAIN (1)...(275): DNA gyrase/topoisomerase IV, subunit A
  misc_feature (1)..(276): Xaa is any amino acid
MRYTEARMTHFAEFMLEDLDKDTVDFSPNFDDSLEEPVVLPSAFPNLLVNGSVGIAVGMATNMAPHNLREVTEAIKAVIDNPEISCEELLDFVKGPDFPTGAVICGRTGIRNAYLTGRGKIKVRADIEVEVDSKGRNFLIVKSIPYMVNKKELLETIGKLVNDDKLEGINHANDESDREGMRIVVGLKKDAVPEVVKNNLFKYTRLQESFSIYNLALVNRQPKLLTLKDLCANYVEHRYIVIRRRTEFELNKAKERAHILEGFKIALAPENIDEVV

SEQ ID NO: 103377 - protein, 91 aa, Unknown
  Obtained from environmental sample
  DOMAIN (4)...(50): SpoVT / AbrB like domain
  misc_feature (1)..(91): Xaa is any amino acid
MELAKITLRGQITIPVGIRKKLGVKDGDKVVFIEDDRGRIVIENSVNIALKEVQEAFRGEAERVGLKTEQDVVTMIKEIRREKRSGDASHA

SEQ ID NO: 103378 - protein, 93 aa, Unknown
  Obtained from environmental sample
  misc_feature (1)..(93): Xaa is any amino acid
MRVMLDTNVLVSAIIFPNAKMDSLIRKATLEHQLVLSSYIIDELLAVTRRKFPKKIKDVDRFLARIPFELVYAPSEPEPGSCSVRDKDDYPIL

SEQ ID NO: 103379 - protein, 216 aa, Unknown
  Obtained from environmental sample
  DOMAIN (45)...(192): Phosphoglucomutase/phosphomannomutase, alpha/beta/alpha domain I
  misc_feature (1)..(216): Xaa is any amino acid
MDTSVITERAKDYIAKEKDAHFRKEVEDLLAAGDFKELEDRFYQNLEFGTGGLRGVIGGGYNRMNTLVVKSATQGLATYLLKAYPERALKSGSLSAVVAFDSRHYSAEFSEAAALIFAGNGIKCFLFSSMRPTPELSFAIRHLGCDTGIVVTASHNPPKYNGYKAYWAGGAQVIPPHDKGIIDEVNAVTEIKEMGRDEAIAKGLLVIIDKEVDVPT

SEQ ID NO: 103380 - protein, 214 aa, Unknown
  Obtained from environmental sample
  DOMAIN (5)...(214): ThiC family
  misc_feature (1)..(214): Xaa is any amino acid
MTTETRVGQAKSGVITDEIKLAADLERLPPEQLRRGVADGSVVVVRNRLRKINPLTIGRGTRIKVNANIGTSSAKSDIGEEIEKMNAAVKHGADAIMDLSTAGDLPGIRAALIERCPVAVGTVPLYEMAVRARDSKKSVLDLTADDMFAVIEDHCRQGVDFLTIHCGVTKQSVERFKEIGRLAGATSRGGTIIMEWIHHNGKESPLYEQYDRLL

SEQ ID NO: 103381 - protein, 180 aa, Unknown
  Obtained from environmental sample
  misc_feature (1)..(180): Xaa is any amino acid
ECIPARQVTTFAALIGAIPAYAYLGDVGESPTGDKKAEKFEDDFIEELFEELSRLGYRAVTYMPPRNTAEQLHRVRRLCAKYGFMEISGVDINSSRQSFNCPEVMRDEFRHLIDTTWALIAHERLASIDKRFGIFSRENPLSGASLSQRLAVYAEAGKKLDLFHPDESAGDIVNEIGRKE

SEQ ID NO: 103382 - protein, 234 aa, Unknown
  Obtained from environmental sample
  DOMAIN (31)...(196): Caenorhabditis protein of unknown function, DUF268
  misc_feature (1)..(234): Xaa is any amino acid
CISSITEWDISLLRKRSKVRFYTAFNNYQVKGKDVIIWGLAGCNCEAIALWKGANRVYVVDYNKPICDNTKIQVLNHEEITLKDIKADFAVSYSSFEHDGLGRYGDPLSPDGDFRAMKEAHKFLKRDGILFLGVPLGEDCIVWNAHRIYGKNRLPLLLRGWQLIDVFDINIKDSPEYPFNLPLGSYIQNVMVLKKIEEEFPDDKYLFADSIKFGERNNLYKRINKIIYDYKKSL

SEQ ID NO: 103383 - protein, 85 aa, Unknown
  Obtained from environmental sample
  misc_feature (1)..(85): Xaa is any amino acid
VIEQSASMLGCFLAMLIDIINPDRIVIGSIFTRSEALFRSRIEEIIRQEALPLCADACSIQPAALGESLGDVAAICVAVNGVNSK

SEQ ID NO: 103384 - protein, 158 aa, Unknown
  Obtained from environmental sample
  misc_feature (1)..(158): Xaa is any amino acid
MSPVKKQHYVPRFYLSGFTYENDEQLYVLDKNNNKCFKNNIKEICEENYFYSFYVEQQKEYNFMLEEHLSKKESEFSFVFRELIDNIENYYYKKNGKLNRLSNNNKKLILEFIIYQIIRVPKYVDKLYSMVTPQLKQINKEEGIEQSNKEIINDIKKY

SEQ ID NO: 103385 - protein, 197 aa, Unknown
  Obtained from environmental sample
  DOMAIN (114)...(143): Helix-hairpin-helix motif
  misc_feature (1)..(197): Xaa is any amino acid
LTRQTVSEARKIQAREISEFKKAVLDFYESGGRSFPWRYAGNPDPWGVLVSEFMLQQTQTRRVVPYWERWMELWPRPADLAAAPLETVLKEWSGLGYNRRAKRLRDCAAEIAAKHGGTVPSDPETLITLPGIGSYTAGAVACFAWNYPAVFIETNIRAVLIHFFFRDRTGIGDGELVPVLEQTLDRCNPRVWYWALM

SEQ ID NO: 103386 - protein, 220 aa, Unknown
  Obtained from environmental sample
  DOMAIN (28)...(220): Glutamine cyclotransferase
  misc_feature (1)..(220): Xaa is any amino acid
MRTGSAADLMLGLSVFLRRGGYRGGGRRCFALPAVALLFAAALPAAAQWLHALPGGVKEAVPTVAPEIVRVVRHDPTAFTQGLLFHDALLYESTGLVGFSGLRRVDPRSGTVRYSAALGGDYFAEGIALFGGEIVQLTWKNGTALRYEFPSLRRGKLPPFRYAGEGWGLTNDDKRFIMSNGSDTLYFRDRKFEVARAVPVTLNGKPLIHLNELEYVKGFV

SEQ ID NO: 103387 - protein, 260 aa, Unknown
  Obtained from environmental sample
  DOMAIN (1)...(260): PEP-utilising enzyme, TIM barrel domain
  misc_feature (1)..(260): Xaa is any amino acid
MIVSDTDEERRKRLKEILPLQQKDFYGIFKAMEGRPVIIRLLDPPLHEFVPHTKTEVEELAADLHVSPESLQPKIDRLVEANPMLGHRGCRLAITYPDIYDMQVEAIARAAVECVKQKIPVNPEIMIPIVITARELKFLRPNAEKVIKKVFEETKTSFHYKIGTMIEVPRAAIRAGHIAEYADFFSFGTNDLTQMTFGFSRDDVASFLPVYLEKNVLEVDPFKSIDEEGVGCLMEVAIHLGRSAKPDMTIGICGEHGGDP

SEQ ID NO: 103388 - protein, 195 aa, Unknown
  Obtained from environmental sample
  DOMAIN (1)...(195): TatD related DNase
  misc_feature (1)..(195): Xaa is any amino acid
MSPAFDRDREEVIARAQALGVKALIITGSSIESSSGAAAFVRENARLNCKSTAGVHPHNAKDWNDKSLARLEELVALFGSDIRAVGECGLDYNRNFSPQDAQRKCFEDQLKLAIKIGKPVFLHERDAFGDFFSILKQYRTGLPGAVVHCFTGGMRELEAYLSIDCYIGITGWVCDERRGGHLVPLLPAIPADRLL

SEQ ID NO: 103389 - protein, 152 aa, Unknown
  Obtained from environmental sample
  misc_feature (1)..(152): Xaa is any amino acid
NLYESYVNACNNNGIKDAKERIDEMIILDYIIGNTDRHYGNFGIIRDANSLEWIQIAPIFDNGSSLFYNNELLDTVQNKIDSKCDWFPGGNQECLTLINYPFWYDKNRAKDIPQIVFNGLNENKRLDKVRINEIVNIIEERTKILENIIDRK

SEQ ID NO: 103390 - protein, 264 aa, Unknown
  Obtained from environmental sample
  DOMAIN (76)...(255): Binding-protein-dependent transport system inner membrane component
  misc_feature (1)..(264): Xaa is any amino acid
VIKKFVIPVKYQLFLLLLPFLILITAFAYLPLAGWRYAFFNYRPGLPLKWADFAGFKWFESIISSQARRAEVVRVMKNTLAMSGLGILTSWFPVLFAIMLTEFRNKRYQKIVQTLTTVPNFISWVMVYSFAFMLFSVDAGLINRLLIDLGLIDKGRNFLLSGDHIWLKMTAWGIWKGLGWGAIIYLAAIAGIDQELYEAATIDGAGRWGKIWHITVPGLLPTYFVLLMLSIANLINNGMDQYFVFRNAFNQETIEVLDLYVYYV

SEQ ID NO: 103391 - protein, 71 aa, Unknown
  Obtained from environmental sample
  misc_feature (1)..(71): Xaa is any amino acid
MNSTSDLWGKKNETLSDKSAEKEYGISRKEILDAINAGDLQFRESSIYGTPWYRLLRVEVEALVEKSMGQD

SEQ ID NO: 103392 - protein, 293 aa, Unknown
  Obtained from environmental sample
  misc_feature (1)..(293): Xaa is any amino acid
FEKGMLMLGGSTHLQYNGTYYEGDLSGITAGNIPFWFQHYYKPGKRISKERDWQVKLEEIVRNAPNWDIMAIVGVPAWMVILMEKIIETYKLKTIHDIWPNLRIFCHGGVSIEPYRKSFDKLFGKPVTFIETYLASEGFLAYQSRPKAQGMELMLDNGIFFEFVPFTTENFDENFNLKPNPQAFTIDEIEMGKEYALLITTCAGAYRYLIGDTVKLVDRKYNEIVITGRTKFFLSICGEHLSVDNMTVALTKLSDEENVEIPEFCVIGESYGNMFAHRWFLACDNLWMHRGCT

SEQ ID NO: 103393 - protein, 270 aa, Unknown
  Obtained from environmental sample
  DOMAIN (7)...(270): Pyridine nucleotide-disulphide oxidoreductase
  misc_feature (1)..(270): Xaa is any amino acid
MNLETTKCLIIGSGPAGYTAAIYTSRADLKPILYQGIQPGGQLTITTEVENFPGYPSGVTGPELMEDLRKQAERFGADIRSGIVTAVDLSKRPFLVTVDDNKQLLAETLIISTGASANWLGLESEKKFQGLGVSACATCDGFFYRNHDVCVIGGGDTATEEASYLANLCNKVYLIVRRDELRASKAMQHRVLNNPKIEVVWKHKPKEILGDDSGVTGILLQHSDTGEERKLNVTGVFVAIGHTPNTALFQGQLDLHPEGYIKTVPGSTKT

SEQ ID NO: 103394 - protein, 94 aa, Unknown
  Obtained from environmental sample
  DOMAIN (9)...(77): Sigma-70 region 2
  misc_feature (1)..(94): Xaa is any amino acid
MAKKTASDIFKDYQRRLLNFIRGRVNQIEDAEDILQDVFYQFSRVDSLVNPIENISAWLYRAARNKIIDHRRKKKDEPLPASYDEDEDEYIIDE

SEQ ID NO: 103395 - protein, 125 aa, Unknown
  Obtained from environmental sample
  DOMAIN (2)...(125): Homoserine O-succinyltransferase
  misc_feature (1)..(125): Xaa is any amino acid
MTIVVPRDYHGISALESRQVQCVTSDDALREDIRALRIGILNIMPKAQTYEFSLLQPLGRSVMQIEPVWIRLRTHTYTSSDQTHLDKLYVSFEEAVSRSRLDGLIVTGAPVEEIPLRRSATGGDP

SEQ ID NO: 103396 - protein, 264 aa, Unknown
  Obtained from environmental sample
  DOMAIN (1)...(220): haloacid dehalogenase-like hydrolase
  misc_feature (1)..(264): Xaa is any amino acid
KTGTITEGKPAVTDVVAAPGVYEGYLLKTAASAERGSEHPLGRAIVNGAIELGHHLSDADNFSAITGMGIEATVGGSAVLAGNRKLMDERGIALAELEAAAEKLMAEGKTPMYVAFDGKAAGIIAVADVLKKSSKTAIERLHKMGIEVAMITGDNQKTANAIAKQTGIDRVLAEVMPGDKAAEVKKLQEGGRKVAMVGDGINDAPALAQADVGIAIGSGTDVAMESADIVLMRSDLIDVPTAINLSKQTIRNIKQNLFWASDIM

SEQ ID NO: 103397 - protein, 270 aa, Unknown
  Obtained from environmental sample
  misc_feature (1)..(270): Xaa is any amino acid
MYPKFVNGAQRQDISEKTADAIWADMEKFASYGFNKAHACVYAHVSYYSAYLKAHYPTEYMAAVVTSRMSDSKKFAAARNEALRMGIKILAPNVNVSLKICAIQGKDIVVGFNAIKGVGEKAAENIVSRRNELKRNFENIFDFCANVDLSVVNKKALESLIYAGAFDCFGAARSQNFEAIESAILYGKKVREEKASNQISIFGETGEKANVPKLPHALEWDIDKKLQNEKDALGFYASGSPLDKYKYEIDAITTFKLDLEENSDAEEEDF

SEQ ID NO: 103398 - protein, 130 aa, Unknown
  Obtained from environmental sample
  misc_feature (1)..(130): Xaa is any amino acid
MKIVKQSAEIIAPFDEENWREQLRLIEYSGRIAYKSEDKMTDESYHAFIKMIVDRGHLAVIEFGHMTVHFVTDRGISHEIVRHRLCSFVQESTRYCNYGQDKFGNEISFIQPSNLRGKTASQFQAWRYAC

SEQ ID NO: 103399 - protein, 230 aa, Unknown
  Obtained from environmental sample
  DOMAIN (1)...(228): Phenazine biosynthesis-like protein
  misc_feature (1)..(230): Xaa is any amino acid
MKYFVVDAFTDELFKGNPAGVCILNNWLEDNLLQNIASENNLAETAFFVKNGNSYDLRWFTPKTEIDLCGHATLASAFVIMNFLDKDNNTIIFNTKSGLLTVKSKMELYELDFPSRKTNKVDINQIVQSSINEKIEEAYLSRDLLLLLDTEEQVKNLIINMDLLKTITECHGFIVTSLSSNNEYDFVSRYFAPNVGITEDHVTGSSHTTLIPFWAERLKKNKLVAKQYQK

SEQ ID NO: 103400 - protein, 223 aa, Unknown
  Obtained from environmental sample
  misc_feature (1)..(223): Xaa is any amino acid
MTILNEKDGKKKLPVLFYVKTLIFLGIIAVSVVILRPVQQALNREMLKIRTGVIKKLENITGTTIRYASIRPSFLGSIRINNLNFYKEEEPLFKVAQVKIHFSLWKLLLRKKTFIHTVDIDRPEINIDTVKDADYIEFISALIKNNKNKEDNVNSFQITEYLPLNANYQIRRLNFTLTDKQTVYKLQDTNLNVREKDGEVTLSGRFYSVYKNTNLFGRTITIN

SEQ ID NO: 103401 - protein, 126 aa, Unknown
  Obtained from environmental sample
  DOMAIN (7)...(126): Bacterial Cytochrome Ubiquinol Oxidase
  misc_feature (1)..(126): Xaa is any amino acid
MWDVIDLSRWQFALTALYHFLFVPLTLGLIFLLAIMETIYVVTGKTIYRDMTRFWGKLFGINFALGVATGLTMEFQFGTNWSFYSNYVGDIFGAPLAMEALMAFFLESTFVGLFFFGWQRLNKYQH

SEQ ID NO: 103402 - protein, 76 aa, Unknown
  Obtained from environmental sample
  misc_feature (1)..(76): Xaa is any amino acid
MSEQRVVVMGLGNLLWADEGFGVRVAERLYAHYHWPEYVEIVDGGTQGLNLLGYVESASHLLILDAIDYGLEPGTL

SEQ ID NO: 103403 - protein, 250 aa, Unknown
  Obtained from environmental sample
  misc_feature (1)..(250): Xaa is any amino acid
MDPSQQASGYLAMIPMGITASHAFYINTEVLDDCGLKPARTYTELKAQVPVLKAKGYETVIMPNKDSWVMQSCLFSAIAGRFCGEAWEQKILGGKAKFTDVDFVAALDFIRQLYTDGVLASSSLGMDYGDSPGLFATNRGAYMIDGDWRGGSFLTDPDTGKALISPERQKKIKVTVFPDIEGARLNKSTSVVLGTGWAMSAAIPGGSKREDAAWRLIKWLTGPEVHKRSFVNGGLPSPSRLDIDYSSLNV

SEQ ID NO: 103404 - protein, 172 aa, Unknown
  Obtained from environmental sample
  misc_feature (1)..(172): Xaa is any amino acid
MNILKEIDKRKNQINEIRPFEEEYLRQINRFFKIETTYSSNAVEGNTHTLEETKVILEDGITIGGHPLREFYEVEGHGKAYDYMFSLINNRNITEENILFCHELFSKNIPGFISPGEYRKIEVLISGSKKRLPKAVNVPMKMQEFIEWANKARNNLHPVLFAAEVHLKLVNI

SEQ ID NO: 103405 - protein, 156 aa, Unknown
  Obtained from environmental sample
  DOMAIN (30)...(115): Cyclic nucleotide-binding domain
  misc_feature (1)..(156): Xaa is any amino acid
MIEKSTLLKYSLFGGIEEQHLDKILALLTEEKYKPGETIIVEGTPNDKILFITEGRVSIIRGDRVIYDLSEGNTFGEMEVLDVMPCAATIKAVTDVTVIAITNISLREIYKIDMKSFSLLLMNLARDLSRRLRVANEIMIEGKVIDLYSSTIFINH

SEQ ID NO: 103406 - protein, 93 aa, Unknown
  Obtained from environmental sample
  DOMAIN (9)...(92): Protein of unknown function (DUF933)
  misc_feature (1)..(93): Xaa is any amino acid
DSVYRLLGLRTFFTAGADECRAWTIHAGDTAPKAAGVIHTDFEKGFIKAEVYACDDIFRYGTEAKIKEAGKYRIEGKEYVVQDGDVIFFKFNV

SEQ ID NO: 103407 - protein, 87 aa, Unknown
  Obtained from environmental sample
  DOMAIN (4)...(75): Cupin domain
  misc_feature (1)..(87): Xaa is any amino acid
IEAYIITIEAGAKTGNAEYGHPGWELGIVESGTMKLTAGDQVFTCKQGDSVSFRADTPHIISNPGKKPLRVFWVVSPPKNMVNKAGR

SEQ ID NO: 103408 - protein, 228 aa, Unknown
  Obtained from environmental sample
  DOMAIN (62)...(106): Bacterial regulatory helix-turn-helix proteins, AraC family
  misc_feature (1)..(228): Xaa is any amino acid
MVRPYDLLNGVLNDIENRLKEGVNENALAKKYFISNIYLRKLFKFAFGLPIGTYIRSRKLSSSIADLLYTDRNIQDIAMDYGLDYEQSYIRTFRREFGLTPGELRKTGQIIKITPPLQLFDSNKLADGLLFGPEIVMIPRFYVAGKRHKLPLRDVLGSASCMAKQFYNHDRLKIPNAVNPDVLIILCREAGIEADYGWFMPSLPVKTTDNIPEGFDSDTFPSSVCAKF

SEQ ID NO: 103409 - protein, 210 aa, Unknown
  Obtained from environmental sample
  DOMAIN (121)...(144): 4Fe-4S binding domain
  misc_feature (1)..(210): Xaa is any amino acid
VREFVPKLQLEDCFVFSAVSCGNNIGAANRQLDELLGEQGAKLSAGFQVRMPGNYIVLYQARAIDKIKKILPASRAKVREIAKILNRNEEHPYENGPLFGRLLAWVMYNAFLSSLDTVAGQYHVTDKCVSCGRCAAICPSRIIKIPKKGAEPQWNGHCEQCQACIQWCPEEAIEFGKKTAGRRRYRYPGIRAEDIIPKHGKEEKKPGKKR

SEQ ID NO: 103410 - protein, 282 aa, Unknown
  Obtained from environmental sample
  DOMAIN (44)...(282): ABC transporter
  misc_feature (1)..(282): Xaa is any amino acid
GQYWAGELKIDIPKKRREGNGAFIKLKGVSEHNLKNINVDIPLGIFTCITGVSGSGKSTLLSDVLYPALANKVYGSNHAEGAYKKMDGAEYIDKVIDIDQSPIGRTPRSNPITYVEGFTAIRDLFANMPESKMRGYKPGRFSFNVRGGRCENCEGDGTIKIEMNFLPDVYITCDVCHGKRFNRETLEIHYKGKNIAEVLDMTIEEAADFFAAIPQVSRKMQTLLSVGLGYVKLGQSALTLSGGEAQRVKLALELSKRSTGRTLYILDEPTTGLHFADVKQLM

SEQ ID NO: 103411 - protein, 85 aa, Unknown
  Obtained from environmental sample
  misc_feature (1)..(85): Xaa is any amino acid
VEQDAIQNAGVDVREVLSVNDLVRSEDAFFAATGISGGSFLQGVRYTGTGAVTHSMIIRAKTGTLRYIESYHNMALLSRISAVQY

SEQ ID NO: 103412 - protein, 106 aa, Unknown
  Obtained from environmental sample
  misc_feature (1)..(106): Xaa is any amino acid
LRETAVVATAAHAALEGRRLDRAQAETLYYEANLHTLGRLAHAARLRRHPEAVVTYVADRNINYSNICACGCRFCAFFRPPGHPEGYVITREELADKIEELLQLGG

SEQ ID NO: 103413 - protein, 271 aa, Unknown
  Obtained from environmental sample
  DOMAIN (182)...(270): SIS domain
  misc_feature (1)..(271): Xaa is any amino acid
DKSIIDNLDVTSFTKIVITACGSAYNAGVVAKYVFEKLCGCPSIEVELASEFRYRDTVINKKTLVILISQSGETADTIAAMREAKAKGSVTLAIVNVVGSTIAKEADFCLLTAAGPEIAVATTKAFSAQLVLLYILAVWFAVKLGRLSREAEQELLSQVAALSGKTADILKQIDSIQKYASTCVGYKSIFFIGRNIDYAIALEGSLKLKEISYIHSEAYAGGELKHGTISLIEEDTLVVAISNCPPLYGKIMSNVEQVKSRGAKVLLIGNC

SEQ ID NO: 103414 - protein, 289 aa, Unknown
  Obtained from environmental sample
  DOMAIN (191)...(287): Transglycosylase SLT domain
  misc_feature (1)..(289): Xaa is any amino acid
AQAEVLAEAQNGYPTDSGYPTDSLAQAYFRIAYNNTEPSILLDGKALYYRSLSAIALVEPFLNLPTAAPIPTETAAVPPKTAVSKKAAANSKPQASTPAESDAMEFLLGFFKNGTARFAPRYIRMMESGLSAEELRRLAEALGNGAPLGAAPDGAGLYQESMRLVSLYTKQDSYQFERRDLELMYPRPFSEQVTQYARETGIGSAKLYSLIRTESAFNPDAISRSGAIGLTQLMPATAEETAARILRRGGPDYTRKTDKDSAVIGGATAYGGDEISGDTDSYAPRLIAS

SEQ ID NO: 103415 - protein, 263 aa, Unknown
  Obtained from environmental sample
  misc_feature (1)..(263): Xaa is any amino acid
MPNHRNLWDASKLKSPFRPCYNLFYSEMTIQSKRAAYRVLPRFVCLILLAANAVSAQDVLRIASFDELRRIGRSTAYPLSGHYELVCDIDASASRVRPFEPIGGDGSPFIGRFIGRGGGVFVVRNLYISKPAAGHVGLFGVVGYGAEVSGVGVVADTVAGRYAVGVLAGSNNGRIVNCFGSGVVVADRAESNAGGLVGVNGGGVYGSYSTAEVYGAENVGGLVGLLRVAAEGEVRQCFALGGVSGESNVGGLVGQVFGGRVLE

SEQ ID NO: 103416 - protein, 248 aa, Unknown
  Obtained from environmental sample
  misc_feature (1)..(248): Xaa is any amino acid
MFSMLFNDPKSVIELVNTLLGTNYGADTKAEITTLKNVLSCGRLNDLSIVLDDVLLVLIEHQSTINNNMPYRMLQYVCEIYKRRMKDDDEYKEYRIPLPRPVFIVLYNGTKETPDRELQRLSEAYPKALPTLAWVGSLELEVLVININNERNEKLVKTCKLLHEYSIFIDALRRNQKTMTPREAVRKTVADCIAQGILEDFLQKHGKELFSMLITDWNWDTALKVAKKENFEAGMEEGLEKGIGIGRQ

SEQ ID NO: 103417 - protein, 288 aa, Unknown
  Obtained from environmental sample
  DOMAIN (4)...(187): ABC transporter
  misc_feature (1)..(288): Xaa is any amino acid
MFPLLGPSGCGKTVLLRLIAGFELPDAGSIRIGETLVAEAASRTSLPPDRRDLGVVFQDYAVWPHMTVFDNVAYPLKLAKVERTELHKRVIDSIAMVNMTGLEQRLPSELSGGQQQRVALARALTAKPSLMLLDEPLSNLDANLREEMRFEIKELQRKLNITVLYVTHDQEIALAISDRMAVLDRKGAIRQIGTPWEIFEQPVDSFVFNFMGIANFVPVRHEASQYYVGNGKQRIPWTTMPTDPGREWLAAFRPSDVRIARLDESAPPADALRGVIRRASFLGAMMDY

SEQ ID NO: 103418 - protein, 52 aa, Unknown
  Obtained from environmental sample
  misc_feature (1)..(52): Xaa is any amino acid
MSHVRLINVTKRFGAVTAVDALNIEIGKGECFSMLGPSGCGKTTTLRMIAGF

SEQ ID NO: 103419 - protein, 221 aa, Unknown
  Obtained from environmental sample
  DOMAIN (20)...(220): Binding-protein-dependent transport system inner membrane component
  misc_feature (1)..(221): Xaa is any amino acid
LSLNNYKFILFDYKVTKDAIWNSVTLGLSAALITMFAGVMISYVIVKMKVRGKGILEFLGMLPFSVPGSVIALGVILAWSGKYGINLYNTVWIILVAYIARYMAFSLKANSAALEQVHDSLVEAARASGASMGQALRDIVLPLVRPGMLAAFFLIFLPSLRELTVSVMLYAPTTRTLGVAIYTLNEDGETVVSAALAGVALILIITGQILINRFTAKKARG

SEQ ID NO: 103420 - protein, 264 aa, Unknown
  Obtained from environmental sample
  DOMAIN (145)...(264): D-ala D-ala ligase C-terminus
  misc_feature (1)..(264): Xaa is any amino acid
MNKLRVGILFGGKSAEHEVSLQSARNIFDAIDREKYEPILIGIDKNGRWLLNDESAFLINADDPKRIRLNTSSDAVALIPQSKGAISNLSALKNGNTDDSVSAIDVIFPVLHGPFGEDGTVQGLLKLADIPFVGSSVLASAVGMDKDVMKRLLRDAGIPIGKFRVLCEGDDVPSYDEVSSELGTPLFVKPANMGSSVGVSKVKKEKEYLTAIGAAQEYDTKVLIEEFIPGRELECSVLGGSEIIASIPGEVKSRHEFYSYNAKY

SEQ ID NO: 103421 - protein, 278 aa, Unknown
  Obtained from environmental sample
  misc_feature (1)..(278): Xaa is any amino acid
IFYILCTLIDTGGNFIITAKDPAGPWSDPVWLKDAGGIDPSIFFDDNGKIWYCGTHPAPEGEAYSGNYEIYIQEINLALLSAGKNPLTSKSIGIWRGALNNTVWPEGPHIYKINGWYYLLHAEGGTSLDHAVCVARAKDISGPWEGKKSNPVITHRHLGKNTEIINVGHADLFDDTNGNWWMVLLASRPHYGVCPLGRETFMVPVHWEDNWPFISSKSGLVESEFNLQPLPITNADPEWSYEPNCDHFYGKLPLHWLMLRMPVNKKDCAVGFNSHSGA

SEQ ID NO: 103422 - protein, 70 aa, Unknown
  Obtained from environmental sample
  misc_feature (1)..(70): Xaa is any amino acid
EAFKYGPPPHGGIAPGIDRLVMLMAGEISIKEVIAFPKNSFAEGLLDDCPAAVSPEQLKELRLIIDNKRE

SEQ ID NO: 103423 - protein, 256 aa, Unknown
  Obtained from environmental sample
  DOMAIN (89)...(256): tRNA synthetases class II (D, K and N)
  misc_feature (1)..(256): Xaa is any amino acid
LRDRYGITQVVVDPAAFAGGAVPDEIVKICGELRNEYCLAVEGTVRLRPSTMINPDMQTGEIEVAAKKIVVLSRCEILPFQIDEKTEAREELRLKYRYLDLRSASMQKKIKLRSDVIFALREYMMGKGFYEIETPTFIRSTPEGARDYLVPSRLYPGKFYALPQSPQLYKQILMVSGFDKYFQIARCYRDEDARGDRQPEFTQIDIEMSFASREDVLALVEGLMAYTFKKTLNRELPSTFKRLSYEEAMELYGTDK

SEQ ID NO: 103424 - protein, 241 aa, Unknown
  Obtained from environmental sample
  DOMAIN (12)...(236): Alpha amylase, catalytic domain
  misc_feature (1)..(241): Xaa is any amino acid
MGVWWKDRIAYQIYPRSFQDTNNDGIGDIPGIISRLDELKSLGIGILWLSPVYKSPDADNGYDISDYYSIDPKFGTMEDMERLFSEAAKRDIKIIMDMVINHTSDEHGWFQKSRDPKSPYRDYYIWRPAKNGGPPNNWTGFFMNDTWEYDAQSGEYYLHLFDKKQPDLNYKNPKVIEEIKAILRFWLDKGAAGFRCDVINIIYKTGLEDGKKSMAVRGIEHYQSQEGNHAILRELRQTVLD

SEQ ID NO: 103425 - protein, 280 aa, Unknown
  Obtained from environmental sample
  misc_feature (1)..(280): Xaa is any amino acid
VVYFRLFYIHAQPVINAKDDSQAALQYVQWIQQAIDEQRWDEALAAANRAMDFYSVSSDIPYLLAVIRSHYKKSIKQSAVVESLNKAIDVNRWVNYSEYSAQLLKAQMLISMREYHSAIICLDKIDSSVSRADAVMLRLLAWRGMASGKEPGYDYAYASAQFRSQTLLAMDRFPRDPRPLRIFFEYAHNRKPQASELPESDINLLELALKRLPFLQETDPELAWMAAPFIRNVDDARRSAAAYRSGSLSNDVNFKPNPASIPVALNLGLIDDKTAIEEIF

SEQ ID NO: 103426 - protein, 262 aa, Unknown
  Obtained from environmental sample
  DOMAIN (81)...(261): Domain of unknown function (DUF323)
  misc_feature (1)..(262): Xaa is any amino acid
GNITLYANWDNPITVNFETNGGSMVAPQIVYSSKPKVDEPAAPTKIGYTFCGWYTDDKTFSKKYDFSEELKAVITLYAKWILDYMVWVAPGSFKMGSPDTDTGAYEDERPQHDVTISKGYYMAKFEVSQEQFESLMGYNPSVFSNLSGSHPVETVSWYEAVEFCNKLSEQEGLAPVYTLSNRTSDSTHPIANMRVTVDWNKNGYRLPTEAEWEYAAKGGDGSPYNYVYAGSNDVGDVAWYSVTTGNIATRPVDTTPNNSGNG

SEQ ID NO: 103427 - protein, 296 aa, Unknown
  Obtained from environmental sample
  DOMAIN (1)...(296): Aconitase family (aconitate hydratase)
  misc_feature (1)..(296): Xaa is any amino acid
MQDATAQMALLQFSTAGRANSALPVSVHCDHLIQARKNSSSDLSKAKEENKEVYAFLESVCRKYGLDFWEPGAGIIHQVVLENYAFPGGLIIGTDSHTVNAGGLGMLAIGVGGADAVDAMVSLPWELKYPRIIGVKLRGSLSGFASPKDVILKLAGMLKVSGGTDSIIEYFGEGAKTISATGKGTICNMGAEIGATCSVFGFDASMERYLRATDRAEIANAAKKIISYLRCDAEVEVEPEKYFDKVIEIDLSTLKPHYNGPFSPDRSFAIGEMEKSLEEFDSPPEISAALIGSCTN

SEQ ID NO: 103428 - protein, 132 aa, Unknown
  Obtained from environmental sample
  misc_feature (1)..(132): Xaa is any amino acid
MTIAVNGEERVLEQIIKQLGKLVDVIAVRELDPSSCLRREIMLVKINAGEKTRPAVLEISGIFRARVIDVSPATITIEATGSAEKLNGLLLLLRPYGIMELARTGLVALERGDRVLSVDSAGEPAGAAADTM

SEQ ID NO: 103429 - protein, 103 aa, Unknown
  Obtained from environmental sample
  misc_feature (1)..(103): Xaa is any amino acid
MAEFFNSLTLFLQTSVQMGTHILFAVLGGICCEKIGNLNLGIEGMMLLGASVGFSAGISTGNPAAAVLAAGAAGSLGALIYGIITITFRGNQVVTGLILTIFG

SEQ ID NO: 103430 - protein, 128 aa, Unknown
  Obtained from environmental sample
  misc_feature (1)..(128): Xaa is any amino acid
MPTFDLMVIGSGPGGYVAAIRGAQLGLATALVEKDDVLGGTCLHRGCIPAKTWLETAHRFEQMQQAADYGILGTEPGKLVPDLPTIVGRKGRIVSKNAKGVEFLMKKNKVTVLRGFGKLLAAAGSPWA

SEQ ID NO: 103431 - protein, 234 aa, Unknown
  Obtained from environmental sample
  DOMAIN (1)...(234): AMP-binding enzyme
  misc_feature (1)..(234): Xaa is any amino acid
MAVMISDAEYEARKALVSPHDVVNMQYTSGTTGFPKGVMLTHVNIVNNGYWIGYHQAFSPKDRVCLPVPLFHCFGCVLGVMACINHGAAMIILESFNPVHVMTSVEEEKCTALYGVPTMFIAVLEHRIFDRIDFSSLRTGIMAGSVCPEPLMRRVIEKMNMTELTICYGLTEGSPVMTQTHVDEEFIYKVSTVGRSMPGIEVIVADPATRQELPRGSQGEVMCRGLHVMKGYYN

SEQ ID NO: 103432 - protein, 246 aa, Unknown
  Obtained from environmental sample
  DOMAIN (108)...(246): Poly A polymerase family
  misc_feature (1)..(246): Xaa is any amino acid
MRYRYSVAENGKHEKKAAIYTKDEHGINFADVDGEAVSIVKKLKNSGYDSYIVGGAVRDLILGKKPKDFDIVSAATPTRIKKIFRNSRIIGRRFRLVHIYFGERIFEVATFRSLKDGNTSNTFGKIEEDVFRRDFTMNALFYDPEQQIVVDYVGGMDDIKKKQVVPLIALSEIFTDDPVRMIRAVKYAAMTGFSLPMNLKLKIKKQSGLLASISPSRLTEEIFKIIHSNKAALIVDMLDKMGLYSY

SEQ ID NO: 103433 - protein, 153 aa, Unknown
  Obtained from environmental sample
  DOMAIN (64)...(153): Acyltransferase
  misc_feature (1)..(153): Xaa is any amino acid
MTPNITIFTKISRSLHTVLFVVAVVTITALYCPVIFFSVLISRKIARKLARIWNRHVLAIGGVRVKVVGADKLSDGERYVFVSNHQSALDIPIIYVGISESISFIAKKELFMIPFFGWGMWAVGHISIDRQNARKAHASIARAVRRLNKENVS

SEQ ID NO: 103434 - protein, 285 aa, Unknown
  Obtained from environmental sample
  DOMAIN (164)...(278): GTPase of unknown function
  misc_feature (1)..(285): Xaa is any amino acid
TLLRGKFADEATIEVSSGNGGNGCVAFRREKYIPKGGPSGGDGGRGGDIVFTVRRNLRTLAHLRYKHTFKAENGHDGENWGRYGANGSDMVIPLPPGSLIREEETGELIRDFSKDKEDFVFLKGGNGGWGNIHFKSSVNQAPRKALPGKQGQTVKLKVELQIIADIGLVGFPNAGKSSLLDRFTNARPKIAAYPFTTKIPNLGVLTVGEKDIIIADIPGLIEGASEGAGLGIQFLKHISRTSALAFLIDLSDENYLAAFDILLKELGSFSSDLPRKIGCWWEQKP

SEQ ID NO: 103435 - protein, 235 aa, Unknown
  Obtained from environmental sample
  misc_feature (1)..(235): Xaa is any amino acid
LKIIKGDASFLLLALIILLIVSGIVISIIVFRSNPVEDAFSTNRVINVLFVIENNKMPVSTYVLMYYPVTKRTAIFDIPEDLGLLIAKINRVDRIDRVYDPQKLGSYQNEIEKLLGIEITFSFIITKENLVSIVDLLEGVEIFIPSPVSYRDDNNIILFPSGMTVLDGDKASLYATYSLPHEDSEMSVFRRQRFFLGYLHRQIQMNERLNNPQAAKMYHSFFRTSMNQRAMMLLL

SEQ ID NO: 103436 - protein, 236 aa, Unknown
  Obtained from environmental sample
  misc_feature (1)..(236): Xaa is any amino acid
MTNECYFTSFDGIELYLKRDIPDAATAVVVIVHGLCEHQGRYDYVTEKLNEAGYAVYRFDHRGHGRSKGRDVYYTDFNEIMEDVNEAVKIAEKENAALPVFVLGHSMGGYAAALFATKYSSRVRGILLSGALTRYNKPLMGSLPMQGDPETYFPNSLGDGVCSDPAVVEAYINDPYVRKEISIALCNSLGAGVDWLKENAGKFTYPVLIMHGANDGLVSEKDSRDLFGEIASKDKG

SEQ ID NO: 103437 - protein, 286 aa, Unknown
  Obtained from environmental sample
  DOMAIN (39)...(276): DNA methylase
  misc_feature (1)..(286): Xaa is any amino acid
LQEQQRGKKIADEFSDRAEIVFLHGDSFDSLRKCPPGCATLIITSPPYNIGKEYETQTNLEKYLNRLEPIVEQLIHVMAPNGSLCWQVGNYVENKEIFPLDAYFYTIFKKFGLKLRNRIVWTFDHGLHCSTRFSGRYETLLWFTKGDDYIFNLDPVRVPSKYPGKTHFKPGPKYGLPSGNPLGKNPSDVWNLLAHEWETGLWNIPNVKANHPEKTLHPCQFPIELVERCVLALTNEGDWVLDPFSGVGSAMLAASKLNRKAIGCEREAKYIEEAKKRMDMLFSGKL

SEQ ID NO: 103438 - protein, 238 aa, Unknown
  Obtained from environmental sample
  DOMAIN (33)...(238): PEP-utilising enzyme, TIM barrel domain
  misc_feature (1)..(238): Xaa is any amino acid
AVVNADEGKVILDPKSEVAAEYEKKYNVYRRDKLDAEKYLEKEAHTADGIKIDIGLNISGVLDDELQASSFADSIGLFRTEFLYLGRNTLPDEDEQISSYKKVLECFGERQVILRTLDIGGDKQLSSINYTREENPFLGNRALRFCFSNQDIFRTQLRAVLRASVYGNMWLMFPMVNSIDDILKAKEIIASVREELEKEGKTFGSIKTGIMIEIPSIALLAEHAAREVDFASIGSNDL

SEQ ID NO: 103439 - protein, 255 aa, Unknown
  Obtained from environmental sample
  DOMAIN (173)...(251): Surface antigen variable number repeat
  misc_feature (1)..(255): Xaa is any amino acid
MRDAARKYAVFLIALICGLSSSRSAAQTYLDSLIQHQRSLQEQEALQHGENGRETLRDESSRLSGRVLSRSEAREFERQQREDRKRREQRAWRVRSVEFTGNSAYGKRDLQSLMELKRKSRFTEYMMRSDLDALTAFYKNGGFEYVNVKSVSERDSASRKVKVRISVEEGRRIHVGEISIDAQRFTPGPSVMRKLATKRGAPLVHSDVRQDCRTLKEIAGERGFLEAIVEPEVMIDTVDHQAIVFFRVQEGPVVK

SEQ ID NO: 103440 - protein, 73 aa, Unknown
  Obtained from environmental sample
  misc_feature (1)..(73): Xaa is any amino acid
DRLLFVSLGAVLGGAAGNLIDRLRMRAVIDFLDFHLAGWHWPAFNIADCAICIGAGLTCLALWRAPADKGARP

SEQ ID NO: 103441 - protein, 110 aa, Unknown
  Obtained from environmental sample
  misc_feature (1)..(110): Xaa is any amino acid
MFLQFFILGATGPILSLYLRDCLGFSGAQTGLVLGLAAVSAVIAPAATTFLADRVISSERLLCLLNAAGGACMIVFSAQTAFYPALGAYFFYTMTMTPAVPLINAITFRH

SEQ ID NO: 103442 - protein, 72 aa, Unknown
  Obtained from environmental sample
  DOMAIN (3)...(68): RadC, DNA repair protein
  misc_feature (1)..(72): Xaa is any amino acid
VFADLIQDRAAAFCVAHNHPSGKLQSSPEDDEVTDRLQSAADILGLQFIDHIIFSETNWWSYRENGKLSGMV

SEQ ID NO: 103443 - protein, 284 aa, Unknown
  Obtained from environmental sample
  DOMAIN (1)...(258): Domain of unknown function (DUF323)
  misc_feature (1)..(284): Xaa is any amino acid
NEGPQHNVTLTKSFYMSKYTVTQAQYQAVMGTNPSRYNGGLSFEPANSEGEVQRNRPVDTVSWYDTLVFCNKLSMREGLNPVYSIKGSTNPATWGTVPTVSDTDWNAVIMDTSKNGYRMPTESEWEYACRAGTTTAYNNGNNNYTNTSSVDEVAWYGDNNTNSGGGNSGMRTHEVGLKAPNAWGLYDMHGNMFEFCWDMSASYGSGDLTNPVGPSTGTTRMVRGGSYYREEKHARSAYRNLSRNPQDVADSIGIRLVRYYVNREPFNHRNAYRITGNGNLQRDA

SEQ ID NO: 103444 - protein, 266 aa, Unknown
  Obtained from environmental sample
  DOMAIN (10)...(266): Domain of unknown function (DUF323)
  misc_feature (1)..(266): Xaa is any amino acid
MTVAYTFSFEMIPISAGTFMMGSPEGETDRNPNETQHSVTLVTSFYIGKYQVTQAQYQAIMGNNPSDFNGGAGKEPAAGEGQKYRPVEKVSWYDALVFCNKLSMREGLEPVYSIKNSTDPTAWGTVPTVSDSDWNAVKMDMSKNGYRLPTEAEWEYACRAGTTTAYNTGATITVNDAWFTTNSGSKTHEVGLKPPNAWGLYDMHGNVWEWCWDWYGSYNGAHTNPVGALSGTYRTGRGGALNDIIVQLRSARRYDYNDLTPFTRER

SEQ ID NO: 103445 - protein, 257 aa, Unknown
  Obtained from environmental sample
  DOMAIN (1)...(257): tRNA synthetases class II (A)
  misc_feature (1)..(257): Xaa is any amino acid
MQYNKNAEGQYIPLSRKCVDTGMGIERTVTILNGKTSVYDTEIFAPILAAVESAVGYKYGTDREKDRSLRIICDHTRASTFILGDPKAVTPSNVGAGYVLRRLIRRAVRHGRKLAGKEIIPLLSPIAAVIIEKFKGPYPELLENKARITEELNNEEEKFMETLQKGEHEFEKLLPNLLKDPKKIMSGRLAFKLYDTYGFPIELTEELAAENGMKINREEFDEAFKKHQELSRAGGEQVFKGGLQDHSEIATKYHTAT

SEQ ID NO: 103446 - protein, 124 aa, Unknown
  Obtained from environmental sample
  DOMAIN (73)...(119): LysM domain
  misc_feature (1)..(124): Xaa is any amino acid
YESSAQPPARQETQPVQELQPLPPLPPPEPEPVVIKAPETLAKPKAAVKRARPPAPVKSYKVPAVIPKNGVVYQIQWGDTLWDISGAFYRNPWLYPRIAKDNKIRNPDFILAGRNLRIYPKDRK

SEQ ID NO: 103447 - protein, 286 aa, Unknown
  Obtained from environmental sample
  misc_feature (1)..(286): Xaa is any amino acid
PGNRRNPLPPVVSIAAITGITKPVLNGTPVTKITDTAQYTGTVTWSPEVTGAFGASTTYTAIITLTPVSGYTLNGLEANFFTIADATTVTYAAGSNTVRAVFPATVSDGTVNITAIPGVTPPVTGAVPVTSIESTQYTGTVTWSPTVASGATFAASTAYTATITLRAKQFYSLTGVPANYFTVAGTSEPATNSAGSGTVTAKFQATGATAPVFVISIKDIQGVNKPATNGTPATAIVQTVQYTGTIAWSPTVASGGKFASATPYTATITLKAKTGYTTDGVTADYG

SEQ ID NO: 103448 - protein, 169 aa, Unknown
  Obtained from environmental sample
  DOMAIN (5)...(167): impB/mucB/samB family
  misc_feature (1)..(169): Xaa is any amino acid
MIFHIDGNAFYASCERVFRPDLAHSPIAVLSNNDGIVIALNAECKALGFKRGDVFYQVKDRLEKCGVAVFSSNYTLYADMSARLNLIYSRFAPDVEAYSIDESFLFFPQWRNVDYSEIGIDIKNAVMKETGISVSVGIAPSKTLAKMCNKLAKQRGGVCDWNKLNHDEE

SEQ ID NO: 103449 - protein, 250 aa, Unknown
  Obtained from environmental sample
  DOMAIN (14)...(103): Domain of unknown function
  misc_feature (1)..(250): Xaa is any amino acid
ASPELTVTITDSSNSSISPTTATFDKKTGATDNKDIAVTMTLNGNTLSNIKNGNTTLSSSNDYSTSGSTVTIKKAYLAAQANGTVTLTFNFNAGSAQTLTITVKDTTGGAAGTTYNFANDNLPTGYPKYSSSEISATITGGVLVVTKTGGYSTPKITLPFSVTGNLSGYTGIKINVKGVSGDFQNKQLYAAIGSTNLGSVNNAPIPNGSFGDVTIPISGGGTNTGDIEISFWLNNTNAYVIEIKSIELIK

SEQ ID NO: 103450 - protein, 79 aa, Unknown
  Obtained from environmental sample
  misc_feature (1)..(79): Xaa is any amino acid
MEQENQNFSRKELEFAVFCIENIAENLGKNGNEMYKMLTEKSDILDSYIIPCYDVLHTQGKNYIVNDILDYMKKRGMIE

SEQ ID NO: 103451 - protein, 69 aa, Unknown
  Obtained from environmental sample
  DOMAIN (25)...(41): KWG Leptospira
  misc_feature (1)..(69): Xaa is any amino acid
VVIPLIYDSADTFSEGLAVVELDGEYGFIDKNGKEVIPLMYDYADNFSGGRARVKLDGEWLTIDRNNKG

SEQ ID NO: 103452 - protein, 184 aa, Unknown
  Obtained from environmental sample
  DOMAIN (36)...(156): Fic protein family
  misc_feature (1)..(184): Xaa is any amino acid
ENKTANVNDIIETVNHFSCFNYLIKISEEPLSEEIIKEFHNILKRGSSDSFKDWFKIGDYKTRENFVGDIKTTPPSDVNMMMKKLLSEYLKEDVDLNKIIDFHYTFEKIHPFQDGNGRVGRLIMFKECLKHNIVPFIIEDENKQFYYMGLKEYPNSKTRLIETCLSSQDVYKDALKYFNVEYDT

SEQ ID NO: 103453 - protein, 269 aa, Unknown
  Obtained from environmental sample
  DOMAIN (46)...(269): Methyl-accepting chemotaxis protein (MCP) signaling domain
  misc_feature (1)..(269): Xaa is any amino acid
KAIFNNLNKPENCAHYNMALLMEQMKTEELNRLLKEHIGRATALIENISQTVNELNASIDMQAQSVKESSQKTEQMLKSLSSTSEVSKNKQGDIHELLENAAHGQTSMKETIQSVQSISESVDGISSAIKIITAIAANTNLLSMNAAIEAAHAGDAGKGFAVVADEIRRLSESTRENSRNIAKTLKTIIDNISLTSKRSGDTDARITEMSKEIKGFAETMTNLINTLNELSAQSYDITTSLNSLRDQSAAVRTSYTGMLEMTEKLRNAM

SEQ ID NO: 103454 - protein, 159 aa, Unknown
  Obtained from environmental sample
  DOMAIN (2)...(154): Rhodopirellula transposase
  misc_feature (1)..(159): Xaa is any amino acid
YDIFRTHGFVSVGISADTAEFAVQTIRKWWKIVGSISYPKAKELLITADSGGSNGYRIRLWKARLQTLADELGIEITVLHFPPGTSKWNKIEHRLCAFISKNWRGRPLLSLALIVNLIGSTKIGGGNKVECVIDTHKYECGVEISDEEFDAIKIGSSLH

SEQ ID NO: 103455 - protein, 72 aa, Unknown
  Obtained from environmental sample
  DOMAIN (5)...(69): Heavy-metal-associated domain
  misc_feature (1)..(72): Xaa is any amino acid
MAKTILTVDGMSCEHCVNAVTGAVGALPGVSDVTVNLAAKTVTVEHDPDAAAIDKIKAEIEDQGYDVISGGI

SEQ ID NO: 103456 - protein, 93 aa, Unknown
  Obtained from environmental sample
  misc_feature (1)..(93): Xaa is any amino acid
LRKFDPKKIKALAIDLDGTILLPNTTLGERTQACIKNLISNGMEIIIATGRAIEASERFRIPMGAEGPMVYFNGAEVVEMPSGKILYTNLIGK

SEQ ID NO: 103457 - protein, 229 aa, Unknown
  Obtained from environmental sample
  DOMAIN (20)...(178): Phosphoribosyl transferase domain
  misc_feature (1)..(229): Xaa is any amino acid
APAQTPRQCVFELVYFGRPDSRIFDEQVYLCRKRMGWQLAFETTPEVDFVMPFPDSGVYAAVGFAQCGELPYEHAMIRNHYVGRTFIQPTQGLRDFSARMKINPVRPMIAGKRICVVDDSIVRGTTMLVRVKKLRALGAREVHVRISCPPVRFPCWYGIDFTSRGELVAAARPVEEIRRILDVDSLHYLSLEGLARSLAHPDHYCRACLTGDYPVAPEEACRMPETRAP

SEQ ID NO: 103458 - protein, 275 aa, Unknown
  Obtained from environmental sample
  misc_feature (1)..(275): Xaa is any amino acid
MAISLVEPVLISHFYAPDNSELLKTMGRVYAEMRLNKKVYQVYAAGLAQHPEDYEYYLLKGAAEQKLGRTAEGDRIIKWGNLMKRLQDNPRDYKAKLSMGEIRIRENTFEEGLKLLREAAALCPDNAGLRMNLGEMCLKENKVEEGLAFMAEAAALSPDNAGLRMTIGEICFKKNKPEDGMKYLCEAAALSPENTGLRWRLYNLYMKQDNIDQALKYFLEIVALDPDNDDLQYRLADFYRKHQRREEALTIYKALAEKYPREPKPHIMWGELLFE

SEQ ID NO: 103459 - protein, 128 aa, Unknown
  Obtained from environmental sample
  DOMAIN (3)...(36): Tetratricopeptide repeat
  misc_feature (1)..(128): Xaa is any amino acid
MDFNDYVNKGFAFLQENEFGQALKNLRAAHKLKPDNQEIQNIIRNVEGVLREEALASQSMVNEAKHRAESIGIKVEDVDQAIMEYNETLKRNPNDVSVKSVLSIAYYIRGVTFSSKGEYDKAIADYNY

SEQ ID NO: 103460 - protein, 261 aa, Unknown
  Obtained from environmental sample
  DOMAIN (4)...(260): Baseplate J-like protein
  misc_feature (1)..(261): Xaa is any amino acid
LADPERLLQLTEAAILAQVNQNIDYAGKGGLLFFADEHTVEHIGYLYGDRGARLDASYSLTTIRYTLSVKRTVKTVILKGSRVTADNKIFFATIKTLEIPAGELVGEVEAKSLTAGIEGDGFAVGTIKNMVDRVPFVSSVENITPSTGGEEAESLGAYKERLRLLPESFSVAGPDGAYEFWGRTANPGIVDAKAWQPELDMESFKEFLEPWGITNASGFYKALGDYYRESGTGPGNVNITVLMKDGELPSEEVLHHVYETL

SEQ ID NO: 103461 - protein, 123 aa, Unknown
  Obtained from environmental sample
  misc_feature (1)..(123): Xaa is any amino acid
KIVYTKIRSVNSPWLSNVKIGDIHAVPISHGEGRFVAPAAEIKKLFLNGQVATQYVNHDGLYEDSMDGNCNGSYCAIEGILSPDGRVFGKMGHSERIGYDNVAKNIHINKDPNIFEAGVEYFK

SEQ ID NO: 103462 - protein, 269 aa, Unknown
  Obtained from environmental sample
  misc_feature (1)..(269): Xaa is any amino acid
ITYNDASIYPIDSKKYFGAAVDSCYFIIDFTKKKATNECRVFDSIEERNYKKTIGTYMNTMIANMETFSSHNFIGKSDYIWRNGIKHDCSKVMEFDIMDSLLINGYGETVDIEDDLLYPLLKSSDVANGKIEIRKKVLVTQRHMGEDTGYIQSKFPKTWKYLNDHANDFEKRKSNIYKNRPKFSIFSIGDYCFYPYKIAISALYKKINFKMICPINGKPVMVDDTCNFISCENESEANLLFCLLTDERTNIFLESIIFWDSKRPITTEI

SEQ ID NO: 103463 - protein, 263 aa, Unknown
  Obtained from environmental sample
  DOMAIN (1)...(155): Peptidase family S49
  misc_feature (1)..(263): Xaa is any amino acid
LRNRGKRIAAYTNDYRPSVIFAASAAEKIILQPSAFVNFKGLASEVLYYKGLLDWAGIKFEMFRHGGYKSAMEPYVLDSMSSEARENLQGILDGWWKVVRDTVATSRGLSAEFLDSIASNPKTTASSAKNSGLADTLLYMEDVPKYMSKVLLGRENKNAFLESWYLSGEKIISNSWQPRAKIAVLNIDGMLIPGSGSNDPLFGRSIAGVASLIETINDIGYSGEYEALILRINSPGGSAVASDELWHSLKMLKESGVPIIASV

SEQ ID NO: 103464 - protein, 85 aa, Unknown
  Obtained from environmental sample
  misc_feature (1)..(85): Xaa is any amino acid
MPTIRPSADLRNKYNEISELCHKYSEPVFITKNGTGDLAVMSIETYEFLAGKMELYKLIDEGLTQVKEGRVKPMKGTIKSIREKI

SEQ ID NO: 103465 - protein, 269 aa, Unknown
  Obtained from environmental sample
  DOMAIN (193)...(267): HisG, C-terminal domain
  misc_feature (1)..(269): Xaa is any amino acid
KAGINIKRGSRSYYPDCDDPELDLIVMRPQEIPRYVEQGIIDAGITGQDWVAENEADVVEVTELHYSKASRQKCRWILAVPEDSPFQRAEDLTGKHIATELVGTTKRFFDSKGVKDVRIEFSWGATEVKPPRLADAIVDITETGSSLKANRLRIIETLMETCTVIIANKAAWADENKRGKLENLKMLLQGTLDAENYVGLKCNIEESKLGEIISILPALHNPTVSKLSDGNWCAVDTILSAKQTKHIIPLLKRAAASGIIEYPISKVIT

SEQ ID NO: 103466 - protein, 215 aa, Unknown
  Obtained from environmental sample
  misc_feature (1)..(215): Xaa is any amino acid
MDVAIVQPNYPVNTRIPGQLGDMWTRSDALLQSNGLPKQDRPTLLLWPESSLTDGNYLLPNPFLAEIAKGRGVAWLFGTDGWLETGPPQNLVRGEVAGLEPFFQAKVVPMPFGERMPGPEWMRARLEEIAGFNSWAVGELGPNSSFSVPAPDVGSIKVHPLICSEALIPKRVRAGLSLAGGDLLTEHTNDAWFETSLAADLHASMVRLRALESGV

SEQ ID NO: 103467 - protein, 268 aa, Unknown
  Obtained from environmental sample
  DOMAIN (9)...(232): Alanine racemase, N-terminal domain
  misc_feature (1)..(268): Xaa is any amino acid
MNIQRPLYSPYVEISLDNLLHNLAQIRKKLPQEVGIIAVVKDSSYGCGSVQVAKALESGGDVAFFAVARTIEAVVLRKFGITLPILVLGMATEDGLRFGADNDIVFALNDLSDVDRWESYGVNVNFHLGIDTGMSRMGLQPSEIDALIDKLNTARNIRIGGAFTHMANADEPDTQTVARQLEKFRDAVNKLRDGGHPPAHVHYGNTATFLRFPLSECTLARPGIALYGCKPDPAQGFDIDLKPVASLISHVVKMKKIPAGTPVSYCGN

SEQ ID NO: 103468 - protein, 187 aa, Unknown
  Obtained from environmental sample
  DOMAIN (10)...(170): short chain dehydrogenase
  misc_feature (1)..(187): Xaa is any amino acid
MDPNKNEHPRAVVITGAADRIGLELAKECLDLGYHVVIHYRTSPEPAQSVFNGDGRVTLIRADFTESPEMPEMFMKDAASLPLTLTGLINNASVFEAGDMSYPDNFTDMLTINTLIPLRLSAAFAKLVKSGWIVNITDAHTHSKNKKYQNYRVSKLFLDEITRQQAYLYAPAIRVNAVAPGAILPPE

SEQ ID NO: 103469 - protein, 168 aa, Unknown
  Obtained from environmental sample
  DOMAIN (2)...(159): DNA methylase
  misc_feature (1)..(168): Xaa is any amino acid
SVDLCESIGFVFKRDIIWHKTNGVRAHFGTYPYPGGILLNNMHESILEFQKPNVHNFNKYAHLTEEIKEKSKIDKDFWLSLKNSDVWLMKPEKSGDGREHVAPFPYELPYRLIKAYTYIGETILDPFCGSGTSLLAAKNLGRNAVGYEINANFAKSIKNKLCSISAER

SEQ ID NO: 103470 - protein, 66 aa, Unknown
  Obtained from environmental sample
  DOMAIN (4)...(63): Ribosomal protein L35
  misc_feature (1)..(66): Xaa is any amino acid
MPKMKTKKSAAKRFSFTGTGKVKYKKQNLRHILTKKSTKRKRNLRHAGILSDDNVPVIRKQMLPYG

SEQ ID NO: 103471 - protein, 276 aa, Unknown
  Obtained from environmental sample
  DOMAIN (2)...(269): Prismane/CO dehydrogenase family
  misc_feature (1)..(276): Xaa is any amino acid
NLGVLEADMVNIVVHGHDPAFSEMVVFASEARELVDYAKTKGAKGINIVGLCCTANEVTMRHGVRIAGNFLQQENAILTGAVEMMCVDVQCIFPALSSLSECFHTKFVTSSPIARIPGSMYVEFKQDTAFQQAKDLVKTAIDNFTNRDKSKVFIPQVKQNAVVGYTCEQIIGHLDGVTNSRADNFGSYKPAIDAIKAGVLRGAVAIVGCNNPRIRPDFAHFEIMKELLSNDILIVATGCAAHVAAKAGLMNREAKKFCGDGLRRVCELVNIPPVLH

SEQ ID NO: 103472 - protein, 294 aa, Unknown
  Obtained from environmental sample
  DOMAIN (38)...(216): Peptidase family M28
  misc_feature (1)..(294): Xaa is any amino acid
MIVPNTPIELNVRMRQVAAKLPNVTAMLHGSDPALSKEYIVVGAHLDHIGMGKRHSRSGPGELHPGADDNASGSAMVLELARTLRESKPKRSILFIHFSGEEDGLLGSSHWIQCPTVPIPSVKFMVNFDMVGRLDAASPILHVGGLGATKAILEQSHSLAPNHLTVAGDLGSAMGGSDHMSFAAARIPSYFFFTGIHNDYHTPRDTPDRINFQGMALIADYAAKVVKDLADTEELPPFEAAAPQAGVRRPSNDRRRIAFGTVPDFSGGGGGFKISGTTPGSHAEALGLKAGDRI

SEQ ID NO: 103473 - protein, 304 aa, Unknown
  Obtained from environmental sample
  misc_feature (1)..(304): Xaa is any amino acid
TFGKVNAVTITPRQGKSPGARTIYYEGTGSTTYTKGTTLPTERGTYAVTFDVAAATIWKAATGLSAGTLEINDKLTPVADDYDISGLTQSAGSAAAVTITPKADKSSGARTIYYAGTGSTTYAKSTAVPTAVGSYAVTFDVAAAEGWNPATGLSAGTLVLNTSQTPVAGDYEIGGLWQTYNNATAVTITPKSGKSPGARTIYYEGSSGTTYTKSTVVPSPVAPGGSYLVTFDVAAASGWNPAAGLSAGTLVLNTNQTPVAGDYTIDNLEQSVGSVTAVTITAKAGKSPGAVSSIKYAGNAALPT

SEQ ID NO: 103474 - protein, 240 aa, Unknown
  Obtained from environmental sample
  misc_feature (1)..(240): Xaa is any amino acid
VRSIGYPAFNNCRSLTAIYVDDSNSEYSSEGGVLYDKNKTTLLTYPAGKTGNFTIPNSVESIWYSAFAYCSITSVTIGNGVTDIAYDAFFPCYNLTAINVNTANTMYSSEDGVLYNKNKTTLLTYPAGKTAKTFTIPDSVTTIEYNAFAYCDSLNDVTIPDSVTSIEYFAFAWCYGLTSVKFEGTIDEDDLAHNAFGYDSYYSDDDGGYIGDLRAKYLAVGGGPGTYKREEYSYTWTKQP

SEQ ID NO: 103475 - protein, 257 aa, Unknown
  Obtained from environmental sample
  DOMAIN (166)...(247): Cache domain
  misc_feature (1)..(257): Xaa is any amino acid
MKISFKLMAIMTALGLITIAAVSISLLVRSRSSIIKLSEQYAVSMANDSAADITNFIDVYMYKAETTANVMEQYHYMIIANRRTFFNFILDGITRENSGIIAAWCVWEPNALEGDDRQFMGTKGTSSSGRFAPYYYWDNGIVKQTVLEDFEDPAYVLPKKTGLPVILDPYEYEVGGKTLLITSVAFPIHNGGNVVGVIGFDLPLTDIQKISQTQKPFPDSITAVFSNSGTIIAHFDENRIGQNIKDTEGDMAGKHID

SEQ ID NO: 103476 - protein, 275 aa, Unknown
  Obtained from environmental sample
  DOMAIN (7)...(264): Bacterial extracellular solute-binding protein
  misc_feature (1)..(275): Xaa is any amino acid
AAGELEGGGSSNTLELWSIQTDGNGPDIYRRAIARFRKANPDIKVNLTLIANDSYKQKLAVALASGRAPDCFFSWGGGPMQEFIKNNQIADLTPYMNTGNYKAKFLDAAVNQMTYQGKIWGVPVNNVAVGTIFYNKEIFTKYKLGVPSTIKELELVCDTLKKNNVFPFALANKTQWTGSMYYMCLATRRGGTQPFQKAVDGTGTFTDPAFIYAGEKIQEWVKKGYFITGFNGLDWDAGQARATIYRGEAAMVLMGSWFNMQALNENPVFHAKMGF

SEQ ID NO: 103477 - protein, 66 aa, Unknown
  Obtained from environmental sample
  misc_feature (1)..(66): Xaa is any amino acid
EYFDLIYVMTGGGPGVATELMATYMYKMSFISFDMGYGAAVAGGMFILITVVAMVVVNTLNRNAEV

SEQ ID NO: 103478 - protein, 263 aa, Unknown
  Obtained from environmental sample
  misc_feature (1)..(263): Xaa is any amino acid
MVRIARTTGAHVPKRQLQETVANFARDFDAFYAQLPIDLSRYCKPNKDLLVATVDGKGIVMRTEDLREGTRRRAEGANHKLNKRLSRGEKRNRKRMAVVAAVYDVAEHERSAEDIIGNEHRSKAAPRPTNKRVWASVEKEPSEVLDDALAEVKRRNPSGKRTFVILVDGQEEQLRQVEEALKRHDMTAIVIQDFYHVTEYVWSAAWCLFSEGDAAAETWVDEQLVNILNGRAVAVAAQMRATATRRNLAQFEREPIDRCANYL

SEQ ID NO: 103479 - protein, 288 aa, Unknown
  Obtained from environmental sample
  misc_feature (1)..(288): Xaa is any amino acid
DPERSGAAQMAYLWGFYAPYEDAVVMRFSTSRGAQVVLDFYPPDWAGTAHTDGYSAYSSAFAKRPKVVHVECMNHLRRYLLNAVKAGHKEAIALLAQVSELYEIEAEARKQELTPHAREQLRQAKAKPVLEALKGELLKLQLRKEPLMGRLKEAVTYATNRWDHLKLYAEPGYGYVEIDQTAIERIWRPEKLGLKNYLFIGHPDAGWRSAVIYSIIETCKMVGVDPEEYLLWVLPQLAMRPRTGPPEPRAKGLLPHDFKKLKEQKAAKARPRRAPPQHPDDPFCSARP

SEQ ID NO: 103480 - protein, 259 aa, Unknown
  Obtained from environmental sample
  misc_feature (1)..(259): Xaa is any amino acid
MDWDEDISTKIPLESGETVIATLNMESEENIPEEQFVVYRTSRASDPVFITFLGYDENARGYRRIWNQPTIASRSETIALSSQDLIGDKNNCIIVTGMNQKNEHTMTVFRRSPSQARAEPYRKIAELQSTGSIVIQQTSRSLAYQQGLTKGQSFNIATYGHDSASANILDQIETIYAYNSTSERYEQINVSRIPGSQIEQRRLRELLSGAPGVFEKFINDLWYSVSPQGTIDTKQYIYFDPVKKEIIFFSDEAQQVFTW

SEQ ID NO: 103481 - protein, 257 aa, Unknown
  Obtained from environmental sample
  DOMAIN (167)...(257): Glutamate/Leucine/Phenylalanine/Valine dehydrogenase
  misc_feature (1)..(257): Xaa is any amino acid
RIIVDQDNTYEKAGLLERLIEPERAITFRVPWIDDAGKVQVNRGYRVQFSSAIGPYKGGLRFHPSVTLSIIKFLGFEQIFKNSLTGLPMGGGKGGSDFDPKGKSDNEVMRFCQSFMSELFRHIGPDTDVPAGDIGVGGREIGFMYGQYKKIRNAFEGVLTGKGLDWGGSLVRTEATGYGLVYIVSEYLNTKGDDFRGKKVAISGSGNVAIFAAEKAQSLGATVISMTDSNGSIYDKDGIKLDTIKDIKINNRERLTK

SEQ ID NO: 103482 - protein, 86 aa, Unknown
  Obtained from environmental sample
  misc_feature (1)..(86): Xaa is any amino acid
MKKQNFDDNLSNVNRNNKDSMFSSLFSNPDILRELYSAIEGIPIPPDVPVEINTLSGVLFKGKINDLSFIIDNRLVVLIEHPVYYN

SEQ ID NO: 103483 - protein, 273 aa, Unknown
  Obtained from environmental sample
  DOMAIN (1)...(273): Protein of unknown function (DUF1703)
  misc_feature (1)..(273): Xaa is any amino acid
MTRRLPIGIQDFVSIREEGFYYVDKTSRIHQLITGSGKAFFLSRPRRFGKSLLCSTLGALFNGRQELFGGIAGQNALAIDSLEWKWKKHPVIQLDLNPGNYHEGTVILVSALHNALNNITKMYGVELRGQFISDQFSNLIQDLHEHYQEKVVVIIDEYDKPLLSTMENDELHVAMRNELKGFYSVLKSSDKYLRFVFFTGVTKFSHISIFSDLNHLVNLTLDPRYADICGITQEELELNFQPEIKEILENNGKSREIYLEELRRYYNGYRFSK

SEQ ID NO: 103484 - protein, 267 aa, Unknown
  Obtained from environmental sample
  DOMAIN (1)...(204): NAD dependent epimerase/dehydratase family
  misc_feature (1)..(267): Xaa is any amino acid
VLDQADVHIFFEKEKPEYVFLAAARVGGIGINSTCPADFIYQNTMIGFNVIHAAYKNNVKKLVNLGSSCIYPKLAPQPMKEEYLLSDLLEPTNEAYAIAKINVIKLCTFFNLQYRTNYLSVMPANLYGPGDNYDPNSSHVLPALIRKFHEAKISGSDRVILWGDGSPRREFLFSDDLASALVMLMQKYNAGDLSNPAGDFVNIGSGKDLTIKELAEKIRDIVYRGIQNRTCHIEWDSSKPNGTPQKLLDISRITNLGFSPKIGLQGE

SEQ ID NO: 103485 - protein, 91 aa, Unknown
  Obtained from environmental sample
  misc_feature (1)..(91): Xaa is any amino acid
LKIISWNVNGIRAVQKSGFLEWLDNEAPDILCLNETKAEPGQLTQTLVNPQTGSKPYHSYWASAKKKGYSGVAIYSSIEPQEVRFLGKRGI

SEQ ID NO: 103486 - protein, 220 aa, Unknown
  Obtained from environmental sample
  DOMAIN (40)...(220): ABC transporter
  misc_feature (1)..(220): Xaa is any amino acid
MPLLTVSGLQKRFNLEAGFFARFGRFVYAVNDVSFTIERNEAYGLVGESGCGKTTTARLLVRMYEPDSGHIYYHHGDERTEIGGLRKEPLRQYRQKARYVFQDPARSLNPRMSVYDVLVSGFRWGGTPDSKLNKKKLREKAATALEEVGLNAADLEKRPSEFSGGQRQRISIARGLLPQPELLICDEVVSALDVSIQCQILNLLLDIREKRIKDKRTMSF

SEQ ID NO: 103487 - protein, 287 aa, Unknown
  Obtained from environmental sample
  DOMAIN (1)...(286): Sodium:neurotransmitter symporter family
  misc_feature (1)..(287): Xaa is any amino acid
MVGWMILVCVLGFSICAGGLVKSVEKVAKVMMIGLFVIVAILAIRVVTLPGAGAGLEFYLKPNLNAIREQGLFTVLFAALGQAFFTLSLGIGSMAIFGSYINKEKRLAGEAITVTILDTSAALLAGLVVIPACFAFGLSPTGGPGLIFMTLPNVFNGMGLGQLWGALFFLFMTFAAMSTVIAVFENIIAFAMDITGCSRVKSTLINLVVVIVLSLPCALGFNVLSGFSVMGGVLDLEDFILSNNLLPLGALCYALFCVSKLGWGFDNFFKEANTGSGLGLSAKLKPC

SEQ ID NO: 103488 - protein, 140 aa, Unknown
  Obtained from environmental sample
  misc_feature (1)..(140): Xaa is any amino acid
MLFRPLNPIYIFGLRLPFTPGILPRQRKRLALSIGAMVERELLTAEVLRNRLANIDIKNFQGIVTEFLSRDDIRKEFESKGRILMRNIFAKMNTLQRFFISAGQYDQTLEQKMPEIINELIASVETLLQEDRIKAKILAA

SEQ ID NO: 103489 - protein, 269 aa, Unknown
  Obtained from environmental sample
  misc_feature (1)..(269): Xaa is any amino acid
IYTEMYIPKNDRTIRRLTEEFNKACKIYGINYCIQKIHFLSQIYWESDHFNTTLEYASGTKYNPGRHKDAKNMDHTEDGDGPRYKGRGLMQLTWRKNQMRYLKYAKDKFDILVGQTDADIEDRGNNFQEIISDTLSGSMDSAGWFWCIGNNISYPKMEDRVRFEAILGKTLNAAALYADKYQEGISISVNGGGKGKSERKKYYDELKKIMKADQCPNMTKANSDQAPHNTSEADKAKQNTAPKAKASETSLKELHPDVRKKAEKLLALC

SEQ ID NO: 103490 - protein, 272 aa, Unknown
  Obtained from environmental sample
  misc_feature (1)..(272): Xaa is any amino acid
MDFFFTENQQIAAVFFVIPGRQEQLLINRQFFSSRQINENLIPQFFDGNKAALGRAVQGETVLQNAASHFSKAVLGLFYPWQGGGVAAVLFSCEDLNKNLGYGANNSYMVNNDGDILSYADFDVVKEKINVRDLDFIRIILDSSEQSSRQTIETNFGIIRSSSDNAGNANLGVFEPVWEKAKPALKSVIDKSAEILKKYGILKPRIKEKEPLQFVAYTKLNTANAVVITSIEYDKVFDSINAAAMSNICIAAAVLILSIIFILFFSKQFPIR

SEQ ID NO: 103491 - protein, 118 aa, Unknown
  Obtained from environmental sample
  misc_feature (1)..(118): Xaa is any amino acid
MKTVDEYIEQFSPEIQKGLKELRALIKVEVPEAKEKISYGMPAYHLNGALVYFAAFKNHYGLYPTPSGIKPLENELVPYIYGKSTLRFPMDKPLPWELIRKVIQIKKDENLKKVKWEK

SEQ ID NO: 103492 - protein, 131 aa, Unknown
  Obtained from environmental sample
  DOMAIN (2)...(110): Glycosyl transferases group 1
  misc_feature (1)..(131): Xaa is any amino acid
KKDINRYKKNDLITFKGRVSDEEQAKLFAEAKALLFPGIEDLGLVPIEANACGCPVIAYRSGGALDTVKEGVTGIFFDEQTPDSLIKAMDHFEANQERFNNRESFNAQVQQFSRSAFKERIQRIIAEKKRV

SEQ ID NO: 103493 - protein, 249 aa, Unknown
  Obtained from environmental sample
  misc_feature (1)..(249): Xaa is any amino acid
VSKNKALKELWCINNQLTTLDLSNNGVLEMLWCGNNQLNTLDLSNNRVLLMLNCGGILGNLLNTLDVSKNTALTNLNCEKNQLTMLDVSKNTELTGLSCDNNRLTTLDVSKNTALTELSCGNNQLTTLDLSKNTALTGLSCGNNQLTTLDLSGNPALKTLWCASNQLTILDGSNVLEDLICDYNRLTMLDVSKSTVLKTLSCRGNQLTKLDVSKNTKLTKLDCFSNKLTMLNVSNNTALAGLGCGENEL

SEQ ID NO: 103494 - protein, 287 aa, Unknown
  Obtained from environmental sample
  misc_feature (1)..(287): Xaa is any amino acid
VAAQGCGGHAAAAVKRTPANGGYAVGKDYGGEAAAVPKHVRINGGKHAGGGKGYACHGGAAVKRALANGGNLVGNGYGGELAAVVKRGATYGGYAAAYGGGGQGGAVGKRAVAKGGNLVGNGYGGQLAALVKRGIVNGGYVAAYGGGGQGAALVKRALAYDDYACRNGYGGQGGAAVKHVLVNGGKHARGGKGCAGQGGAIPKRTVAHGGNLVGNGYGGQGGAAVKRALANGGNVAAYGSGGQGGAAGECAHANGRYAVGNDYGGQLAAAAKRAAANGGYAAAYGGG

SEQ ID NO: 103495 - protein, 275 aa, Unknown
  Obtained from environmental sample
  misc_feature (1)..(275): Xaa is any amino acid
AADAIPGFRLSGAQIAKDITRILALGVQIQYNQRVDEARFAKLRAENDFVFVGIGAQVNKKMDVPGEDSEGVLGALAFLSKVRRGESVDIGRKVAVIGGGNSAMDAARTAFRLVKAAPDGSDSKVVILYRRTQAEMPADHEEIAAVLEEKIEIMELVAPVLITRSGNNTQIVCRKMRLGEPDASGRRRPVPVDGSDFTMDFDTIIPAIGQDTIYDCISRDDLKVDPETMMTKLPKVYAGGDAVHGPLNLITAIGDGRKAAADMIAAVSGKKVGCG

SEQ ID NO: 103496 - protein, 201 aa, Unknown
  Obtained from environmental sample
  misc_feature (1)..(201): Xaa is any amino acid
MKAYYEYEDGMFWAILTAGGECFTAEGNKYEYFDPESMLKAGSNEKWRMPPNAKRIPFESPETVEQEAAKMAAEKSISTIKQDAEFWRIAIEINALLLFFVPDEYLTPELCSLAVAREGKALRYVPSQIRNREMEKQAVHNNWYAITYINENERTEKMCQIAVEQCGSALKYVPEKFKTAKLCFKVVKDHGFALKYVPEKL

SEQ ID NO: 103497 - protein, 157 aa, Unknown
  Obtained from environmental sample
  DOMAIN (10)...(157): Putative transcriptional regulators (Ypuh-like)
  misc_feature (1)..(157): Xaa is any amino acid
MEENLQKETALVEAVLYMEAEPIDEAGLSRISGLSKEMVKAALDRIEERYAMTDCGIELSRIDGGIMISPKREYWENLKDRYGKKNDARISRAAMETLAIIAYSQPITKAEIKDIRGVSPDNMIHLLVEKELIHEVGKKDVPGKPVQFGTTRKFLKQ

SEQ ID NO: 103498 - protein, 115 aa, Unknown
  Obtained from environmental sample
  misc_feature (1)..(115): Xaa is any amino acid
MDPKLVKALDKMILTASGWRSVFSGDGDGESRCKDISPEYKTIAAVAAKAFADSISDIDGVVIVGRDTRPTGEAVADAVIRSLLAEAREIKYAGIVAAPDIMAFTRKTLSAGFVY

SEQ ID NO: 103499 - protein, 268 aa, Unknown
  Obtained from environmental sample
  DOMAIN (53)...(268): Phosphofructokinase
  misc_feature (1)..(268): Xaa is any amino acid
GDKIANYVTNDKFVRLDPFVVPGHQPSLKENQMLECAGPREFIYFSPAHVHAGIVSCGGLCPGINDVIRAVVRCLWYRYGVTRISGIRYGYRGFLPESQFGTKELDPDCVDDIHKIGGTFLGSARGGGREVEKIVDAMEKLNLNMLFTIGGDGTQRGTLDIAEEVSKRNLKIALIGIPKTVDNDFALMDRSFGFNTAVEKAVEVVSAAHMEASSAINGVGLVKVMGRDSGFIAAHTALASHEVNFVLIPEVPFNLRGYNGFLSHLEER

SEQ ID NO: 103500 - protein, 110 aa, Unknown
  Obtained from environmental sample
  DOMAIN (1)...(110): D-mannonate dehydratase (UxuA)
  misc_feature (1)..(110): Xaa is any amino acid
IEKYINTLKIIAQADIRLVCYNFMAVFDWTRSDLAKPRPDGAFVMAYQQKLINKVNPDNMFDVMSEKAQGHLLPGWEPERMANIRRLFELYGKIDEDVLFANLVYFLKAI

SEQ ID NO: 103501 - protein, 282 aa, Unknown
  Obtained from environmental sample
  DOMAIN (12)...(282): CorA-like Mg2+ transporter protein
  misc_feature (1)..(282): Xaa is any amino acid
KLQAGRIVPSEKHEAQVTMLVSPDHDEINSLVKVSGLDEHTISSAFDVEELARLEYEDDYTAIIFKKPKSYNAEDQFMFRISSFGIFLYADKIIILSDAVLPLVDEKRFFRITSLNMLVLKLLNYSSYHFSEHLRIISRVNDELEAKLVSSVDNKYLLYMFGLCKSMVYYLDAISSNQTVLRKLQNSRNLVFTEPEKDLLDDIYIETSQCLQQTENLSNILSSMMDARASIVSNNLNSMMKTLTVLTIGIMVPTFVVSSFSMNLKYPLYMESDWAFWVVMSL

SEQ ID NO: 103502 - protein, 287 aa, Unknown
  Obtained from environmental sample
  misc_feature (1)..(287): Xaa is any amino acid
KHTSPKHGPNLFFDANRVTALAVVIAIPAAAAPKDTLTFAAVGDIMMGLNYPDNAPVLPPQDGALTFESVAGVLRDADVTIGNLEGVLLDSGGYAKRCANPSVCYVFRSPERYVKHLTAAGFDLMSVANNHSGDFGDAGRAGTVRSLRSAGLGFAGFEGIAESCIIERDGIRYGFVAFAPNTGTVSFHDQPRARELIAEVKKKCDIMIVSMHIGAEGSRHSRITRNSELFVGENRGNPYAFARLAIDSGADLVIGHGPHVPRAVDLYKGKFIAYSLGNFATNTSVNI

SEQ ID NO: 103503 - protein, 142 aa, Unknown
  Obtained from environmental sample
  DOMAIN (3)...(142): Thiazole biosynthesis protein ThiG
  misc_feature (1)..(142): Xaa is any amino acid
MDELILGGKKLKNRFFLGTGKFAGKEQMRETIEKSGTEVVTVALRRVDIQQSAENILNFIPKNVQLLVNTSGARNADEAVRIARLAKAAGAGNWLKIEVINDSKYLLPDNQETIKATEILAAEGFVVLPYISPDLYTARALV

SEQ ID NO: 103504 - protein, 239 aa, Unknown
  Obtained from environmental sample
  DOMAIN (1)...(158): Adenylate and Guanylate cyclase catalytic domain
  misc_feature (1)..(239): Xaa is any amino acid
MTAILIEKHYGTLDKYEGDAIIAFFGAPMPMPDHAEQACRAAIEMQEKLSELRKTWRENKEGKNWPPIVCEMRMRIGINTGEIITGNMGSKVRKNYTMMGDAVNLAARLESAAKYYGVYTMISHHTHALVSDLFEMRKLDVITVVGKSEPITVYELICEKGKLKDLAADAEMKPEMANMPELLDIYNKGVDVYYNERDFSKALEYFEKAAELEPNKKINPAKPTPSGRFIEKCKMYIEN

SEQ ID NO: 103505 - protein, 134 aa, Unknown
  Obtained from environmental sample
  DOMAIN (1)...(127): Putative undecaprenyl diphosphate synthase
  misc_feature (1)..(134): Xaa is any amino acid
GRPPDLGRDPGTTRANRGLTLTLALSYGSRAELTRAARLLAEAAAAGRLDPADITPERLAAELWTASLPDPDLLIRTGGDMRLSNFLLWQCAYTEFYFTSTLWPDFSEADFQAALDAYAGRERRYGLALEPLRA

SEQ ID NO: 103506 - protein, 237 aa, Unknown
  Obtained from environmental sample
  misc_feature (1)..(237): Xaa is any amino acid
MKPTDPTVQRLQKYLRGIIERYPRAWDQLADFRKAKKELGGWPDWCDVPLSGAYAIAKIGRGGLPKVDGVPPNPEDIFVIAGLGTWRMTQGVYRFDPDILNSLWTTPIERISTELLYRLPEWCIYIETPEKSFSDRNTQYRMDGAFIWLNCTDDERAELRILIDDGKMLHVGELLLDHATLNECVDSTIERIVHHETPKITDNVKRFLKDIMPPILSLVLYLCSDEPDIEDGKGRPV

SEQ ID NO: 103507 - protein, 193 aa, Unknown
  Obtained from environmental sample
  misc_feature (1)..(193): Xaa is any amino acid
MLHIINQYHAEVERIIQFGGTAKETAIRNVFYNLLNEYARQRGLMMVAEISIKTPAGKTVTPDGTLKDSLRQDWGYWESKDEADDLDEEIEKKFAKGYPRDNILFEDSRNAVLIQNGEEVMRCLMSDRDALHRLLTEFFTFERPEVRNFRKAIELFKQDVPKVTATLRGIITDAEMSNAVFKEKSQDFLTLAA

SEQ ID NO: 103508 - protein, 83 aa, Unknown
  Obtained from environmental sample
  misc_feature (1)..(83): Xaa is any amino acid
DIYIGLASFEGYIVFVFQKYNCAVMDCTEVGNALYLMDANKWKSLSKLSKTELLIHHRKEVKRIVHGQNWFFELQHELQIGME

SEQ ID NO: 103509 - protein, 240 aa, Unknown
  Obtained from environmental sample
  misc_feature (1)..(240): Xaa is any amino acid
DTTFKQGIKYTATITLKPKDGYTLQMVKANFFTVAGADTVTNGANSGIIKATFPQAIPVYAINIASIQGVTVPAVGITPVSKITETGQYGGTVTWSPEVSGTFVLNTPYTATITLTAKRGYTLKGVTANYFTVAGATTTNGANSGVIRAVFPPAVLVGMVQIPGGSFQMGNNSGENNERPVHTVTLGSFYIGKYQVTQEQYQAVMGNNPSNFTGSPASGEVQGNRPVENVSWYDALVVLQ

SEQ ID NO: 103510 - protein, 76 aa, Unknown
  Obtained from environmental sample
  misc_feature (1)..(76): Xaa is any amino acid
ATYWLWVSEKRSDWWNVPYSERYHPPEKVIKIFESYGFVWGGKWEMFDTMHFEYRPEVFIMNGLPLGVQIQQLEDL

SEQ ID NO: 103511 - protein, 183 aa, Unknown
  Obtained from environmental sample
  misc_feature (1)..(183): Xaa is any amino acid
VYKELKSGARAYAYEDAMNWLFNTRLVYKIARTEENKLPLASFADESIFKLYMLDIGLLGAKSELDINTVLEPNNELFSIFNGTMTEQYVMQELKVAGFTPYYWGREKGAAEIDFVVQWRNEIVPVEVKAGLRKKSKSLEVYRNLYHPSHTVRTTLKNFGVTDDVYSVPLYMIANLSDFLTYR

SEQ ID NO: 103512 - protein, 177 aa, Unknown
  Obtained from environmental sample
  misc_feature (1)..(177): Xaa is any amino acid
VVEIPKCGSVEYNPSTEQCCGSGKYTLATQFCYDNSKVVNLCGNRTEHYDPDLYECKPSINVNGIYLKNKPKDSAGKEYEAVLIGTQTWMAENLNYNASGSRCYGDNTGGDSQNRCDTYGRLYNWETAIAIAGCNATTCASQITAKHQGICPAGWHIPSNAEWNVLMKFVNPSAQII

SEQ ID NO: 103513 - protein, 281 aa, Unknown
  Obtained from environmental sample
  DOMAIN (1)...(190): NAD-dependent DNA ligase adenylation domain
  misc_feature (1)..(281): Xaa is any amino acid
VQYKLDGASLELQYEQGALIRAITRGDGITGDEITANARRMKGVIEKLDMSFTGGVRGEVVMTHEVWRNKYASKANCRNAANGIMRRKDGSGCEDLMLITYDAASAGDDRYFTDETHKVEWLGKRGFETAVTKIFKDVEEVIAYREKVAKSRDKLPFDIDGLVVKDTVTDMADLRRARPEKQIAFKFELETAFSILRQVEWSESGATYTPIGVVDPVRIAGTTVQRANLNNPGMIRALGLKIGSAVSVVKRGEIIPKIEGLAPQGAMPETSVAEEKEMNFL

SEQ ID NO: 103514 - protein, 294 aa, Unknown
  Obtained from environmental sample
  misc_feature (1)..(294): Xaa is any amino acid
AAAFACAHAYLLIPMDGAQTDHLKAYGVVYKMVSEGTRVYWLLNYRGGSFVAENDDKFLVAARAAGVEARKVSNSEWASILDIIDGNNMEKVALEKSPRIAVYTPSGKRPWDDAVTLALTYAEIPFDKVYDGEVLGGKLKDYDWLHLHHEDFTGQYSKFHASFSNAAWYQKQRLELETLANKLGFKKVSDCKKAVALTIRKYVESGGFLFAMCSATNTLEIALAALGADIVDQVYDGDGVDPDYKKKLNFANCMAFENFTIYTDPYYSSFCNIDVNQVNTPNRRPALDFALFDF

SEQ ID NO: 103515 - protein, 238 aa, Unknown
  Obtained from environmental sample
  misc_feature (1)..(238): Xaa is any amino acid
FTELLFAACAEERVVAVVDALDQLADSEEALRMLWISGKLPENFRLLCSITEGPETEAFKQLGGELRPVPSISTEDEAAIIHGIAARHHKQINNAVVEYILQKQTPDGAQAAQNPLYLSLITQDLVMMDRYELETVQKYMEDGASQPEALAKFMRERVDETPGDPEGAYLAVLDRLDKLIGKDFVRAVCGMIAISRNGLRESDIEGAFRELGLKFNPADFSWLRQMMRGHVSHGDMQQ

SEQ ID NO: 103516 - protein, 137 aa, Unknown
  Obtained from environmental sample
  misc_feature (1)..(137): Xaa is any amino acid
MGTVYAEITLRNVVDAANVRAGQLKEQDMRSATVTALVDTGAMTLVITEKLYKTLGLSKVGERMVRTASGQRLACTVTEPVDIHWKNRGSSTRAVVVPGAEDVLLGAIPLEDMDLMVNPVTQELVGIHGDIVECIVM

SEQ ID NO: 103517 - protein, 86 aa, Unknown
  Obtained from environmental sample
  misc_feature (1)..(86): Xaa is any amino acid
MNHAELGALIAEKWNFPEKLVSAIRYHHDPDTAPFDCKDMVDTVYLGNMFCEYENKNISYDQLEQGPLENYGLKHRRRFDSLLQRL

SEQ ID NO: 103518 - protein, 241 aa, Unknown
  Obtained from environmental sample
  DOMAIN (26)...(241): Queuine tRNA-ribosyltransferase
  misc_feature (1)..(241): Xaa is any amino acid
TLRKVLPEGVWFQSHIDGSRQFLSPEKAVEIQYILGSDIQMQLDVCSGWGASRKDSEKALDITSGWLERAKSAWEDRQGQGYKGSLFSIVQGNFFPDLRKRSAEACVASGTPGIAIGGLSVGEPAEVFAEMLALSSSMLPDEKPRYVMGIGTPDYILEAIGNGIDMFDCVTPTREGRNGRVYTRQGPLSLKKIENQQDFAPIDKECGCKVCRQYSRAYLRHLFKSREILCSMLASYHNLFF

SEQ ID NO: 103519 - protein, 68 aa, Unknown
  Obtained from environmental sample
  DOMAIN (1)...(44): Protein of unknown function (DUF739)
  misc_feature (1)..(68): Xaa is any amino acid
FDYSKLRERIREKCGTPEAFALAVDLSPAGIRAKLNNSLDFKLPEMDRVCSFLGIRNEEIDGIFFTVK

SEQ ID NO: 103520 - protein, 275 aa, Unknown
  Obtained from environmental sample
  misc_feature (1)..(275): Xaa is any amino acid
VYAQWNDLAKVTFNPGTGGSVIPTSAYANVNGLLEGSLPNPTRAGYAFDGWFTAATGGTEVTLDKVYTGNATIYAHWTLITYTIAFDLNGDTGTIAPAVTGTGGKLASLPTPAARTGYTFGGWYTEPAGGVKVATSTAFSENATIYARWTLVNYAITYNLGGGTVTPANPTTYNIETDVTLNNPTRTAYEFAGWTGANGTVKELYVTIPQGSSGAKSYTANWTAIIYDISFDVNGGNDLASATAKTVAGGRLSSLPAPTRENYAFDGWFTQATGG

SEQ ID NO: 103521 - protein, 286 aa, Unknown
  Obtained from environmental sample
  DOMAIN (51)...(280): Reverse transcriptase (RNA-dependent DNA polymerase)
  misc_feature (1)..(286): Xaa is any amino acid
NADPLVLRKTMAVKRVTGTTGKRTAGVDNEKWDSPGKKYRGAMKLKQEGYKAKPLKRVYITKSNGKKRPLGIPTMTDRAMQALEALALDPIIESMSDKRSFGFRKGRSCQDAMEHLVRRLASGKCAEWVLEGDIKSCFDEISHDWLLEHTPMDKRILKEFLKAGYVYNKELFPTEQGTPQGGIISPILANFTLNGIDNLMQDNFKQKWVRGERHSISITPKVNPVRYADDFVITARTKEIAEEAKEIVRKHIAGRGLKLSEEKTLITHISEGFDFLGFNFRKYNGK

SEQ ID NO: 103522 - protein, 273 aa, Unknown
  Obtained from environmental sample
  misc_feature (1)..(273): Xaa is any amino acid
MEMYDDAESGFNLFDKKDLEQAIFGPIDEKNKLKNAHEKLLAIFEALENKNRKDSNIWQVYLKNDDFGDKRRKEFYEALKNFAIALNLAHTNRAIFIAVGLKQIEIYNNDYLFFRKLKDSVIMRYNDNAEDLSKYENGIRNLLNTFIKGDEIKTTVKPIQIGDEKSMREMLDKLETNDARADAIRTRIESKLRQVRYEDPLMYEEFSAKIRKTLAEYELLRDTDKYLANINRIYDDFNQGLTSHDYPAFIANDSEAKSFYGVVYKNLQNITKL

SEQ ID NO: 103523 - protein, 248 aa, Unknown
  Obtained from environmental sample
  misc_feature (1)..(248): Xaa is any amino acid
MKSFCLFENDVSDIFYEESALNGVKRVANTVSEDLLLVTGKKPNVTSILEKCRSEHIIITATLGNSALIDYFIERKLLNVDGITGKRECYLIKLVETPFADFPKIKQALIIAGSDKRGTIYGLFRLSEMCGVSPLVFWGDAVPEKKDKLHLEFENDIVSKQPSVTYRGFFINDEWPAFGKWCSEKYGGVNAKAYDKVFELLLRLKGNYLWPAMWRSSFSEDGPGLENARLADEYGVIMGSSHHEPLCR

SEQ ID NO: 103524 - protein, 275 aa, Unknown
  Obtained from environmental sample
  misc_feature (1)..(275): Xaa is any amino acid
MLIRRADNVIEMGPGAGEEGGEILNFVPERKIDLDLPKNNVKKYLKISKINFNNLKNLKIEIPMGAMSVICGVSGSGKSSLLWGVIEPYARKHTDLAVLAARTGRAFAQKRSTIATAIDIMQVIKNLFASLPESKIRGYLAPKFGTDKPGGRCETCKGDGYLLDPSGYEESECPICQGKRYRDEILEIRFKLMSIADVLDLSVSKALEIFANFENLTSKLKPLADTGLHYLRLGQPTTHLSGGELQRLRLAQDLAKAKSPNTLYLFDEPCRGLSA

SEQ ID NO: 103525 - protein, 91 aa, Unknown
  Obtained from environmental sample
  misc_feature (1)..(91): Xaa is any amino acid
MWPGPYGEWGSRKYLIASLDASLKRLGLDYVDIFYSHRPDPDTPIEETMKALADVVRQGKALYAGISNYKAEQTDRAISALRAFGVPCLIH

SEQ ID NO: 103526 - protein, 167 aa, Unknown
  Obtained from environmental sample
  misc_feature (1)..(167): Xaa is any amino acid
MSLALLLADTVMRRYPRADSYPYRSWCYPQGFVLRSFIRLYEKTGKQEYRQYVMDYCEQHVRENGDVPAFTGGSMDDMMAGSVLVWAWQESGQEKYKTACGRVRRAFDGYPRNQDGGFWHSRNLPSHMWVDGVFMGLEFLARYGNAFADDRDFCFGETVRQLSVVFD

SEQ ID NO: 103527 - protein, 258 aa, Unknown
  Obtained from environmental sample
  misc_feature (1)..(258): Xaa is any amino acid
MHSDSADTGSRKRVLAEICVFPIPEALPDTACIVTARNGEPSLTLGNKYVHSAYDPGREAERIVSPFRDAEAGVLIGYGLGYIAAAWMRDRPRPLFIVELIPELLARETDNENLLTLAPCCCIAGTEIRKEEHFANFLRGLSLGTIKKIAWMETPGITAQAPAPAKAALHFLKHIFEAHLTNIYTELEFERLWFRNILRNAFLVPKTKPFAALRGILRESAAVIIGAGPSLDGEIAVLREIRSRSHAVLMACDTALPS

SEQ ID NO: 103528 - protein, 101 aa, Unknown
  Obtained from environmental sample
  DOMAIN (23)...(97): ACT domain
  misc_feature (1)..(101): Xaa is any amino acid
IPPYFSSAGKRNCLPFGKTRNRYYMRFTILDHPGILSRITGILGENNISIARMIQKEENPDHPVPVVMISHSAVEEDMARAIRTINGLPEIHSPTVLIRAL

SEQ ID NO: 103529 - protein, 99 aa, Unknown
  Obtained from environmental sample
  DOMAIN (5)...(99): Transketolase, thiamine diphosphate binding domain
  misc_feature (1)..(99): Xaa is any amino acid
MDIKALEKTALSVRALSIDAIEKANSGHPGLPMGAAELGAILYGELLRHDPSDPAWADRDRFILSAGHGSMFLYSLLHLSGYMDMTLDEIKNFRQLGSR

SEQ ID NO: 103530 - protein, 288 aa, Unknown
  Obtained from environmental sample
  DOMAIN (154)...(287): Probable molybdopterin binding domain
  misc_feature (1)..(288): Xaa is any amino acid
RLLRIPLRTPLFRKGHVISEADIPVLLSLGKDHVYVWEKTEGMLHEDDAAEILRQICQGAGMRATDPKEGKIELIAEIDGLFLADIERLRAINSLGEIVIATRASGFPVKKGDKLCGTRVVPLMIDEKKMEKAHRTAGNEPLLRLLPFHAKKYGLVTTGNEVFHNRIQDTFSPVVREKMAKFGSEMLHHKILDDDHEKITGAINWMLAEGADIVLCTGGMSVDPDDKTPLAIKNTGAAVVSYGAPVLPGSMFLIAYTHDGRPICGLPGCVMFAGNTIFDLVLPLLLAD

SEQ ID NO: 103531 - protein, 232 aa, Unknown
  Obtained from environmental sample
  DOMAIN (113)...(142): Helix-hairpin-helix motif
  misc_feature (1)..(232): Xaa is any amino acid
TGLGRNSPFSSKWRKGLQAEKTEAGAEKEPSVTTVAENYSHEPWAVLVSTILSLRTKDEVTLDTSRRLLAKAPGPAELAALSEDKVARLAYPAGFYRTKAKSLKKIAAILLEQYNGKVPACMDALLALPGVGRKTANLVLIEAFDLPGICVDVHVHRISNRCGWLRTENRYGTKTPEETEMTLREILPKKYWKGINALLVLYGQNLCRPVSPWCSRCVIKAYCKRVGVEKSR

SEQ ID NO: 103532 - protein, 291 aa, Unknown
  Obtained from environmental sample
  DOMAIN (99)...(243): Alpha-2-macroglobulin family N-terminal region
  misc_feature (1)..(291): Xaa is any amino acid
DQRVPPDMDENEKPKIAVKVTPIPGAEAVRKITIQAERVDIRQKQEAMRREISTDAQGKASIELPSLPAGEYDITAYTIAKNGERIESSLRLTSGGAQDPNKIYILSDTEELESGREARVRVFSRLDRPQTALISYETSRMIRRQSILLPPGASVISFTPGEEFAPHFRVTLDAGTADGFHTASAAFTLKHKLDIELNIGKAKAEPGTTVPLAITAKAPDGKGRRAGIFLFVIDDAIYSAVENAQPDIAASFFPGYGPADARSASFTPFVYAASAALRNKNVAALRNSART

SEQ ID NO: 103533 - protein, 195 aa, Unknown
  Obtained from environmental sample
  misc_feature (1)..(195): Xaa is any amino acid
IDGLTRKRGSPPTSLLWFVSKSAKNPEAAIRYVNWLSRFENYHFLQVGQEGINHDMVDGIPKIKSASGPWIQNSAGNGDYAFILNGYDLGDPELNARILANSYNWPSEVITEAYRISSTNANPEPYIPVKLLAATAVQQTLTDKAEVLFTQSVTAKPEQFSKTWDDGVKDWLTSGAQAVLDERRTKYREPVSRNQ

SEQ ID NO: 103534 - protein, 234 aa, Unknown
  Obtained from environmental sample
  misc_feature (1)..(234): Xaa is any amino acid
AELVKVTKKLAKDVDVLGLNYHEDLFKDYSAAIDKPIIATECYEYYSGTAVNYEDVTTKNPWSYVLENDNVIGQFIWAGIDYLGESSWPAKGWTGSILDICGFRKPNAWFRKSIWSDEPVVYLAFHDQGVKPDYCRGRWSFPPLSSHLNHDHFKRRTVTAVIFSNCETVSLWINGKKLGSRNPKDFTNNIIEWTFEYTSGEIKTAGYKNGKEVCNYCLKTAGEAKNIQLVPDKT

SEQ ID NO: 103535 - protein, 86 aa, Unknown
  Obtained from environmental sample
  DOMAIN (1)...(65): Ribosomal protein L22p/L17e
  misc_feature (1)..(86): Xaa is any amino acid
AYPQDGKSAASNALAGNKQLDEDMLFVKEIYIDEGPRLKRVWFRGRGRADMQLKRMCHITVVIGETVKAGTDKAAPAKAAGVKAGK

SEQ ID NO: 103536 - protein, 211 aa, Unknown
  Obtained from environmental sample
  misc_feature (1)..(211): Xaa is any amino acid
MRGFRVRVCLAVLLPVFATITGCAKKQSQESAPESPDTSAVAVDTANILTDARDGKTYKTVKIGDQVWMAENLNYAAKDSSRCYVYRDSADSNCVTYGRLYRWETALNICPKGWHLSTDAEWQTLMDSAGGREIAGKNLRAKSGWRDDVTGDDALGFSAMPGGGVLFVFSGDSYDYDYAYNGSGGFWWSATAKNTYWIILDYTTKVDRSDG

SEQ ID NO: 103537 - protein, 182 aa, Unknown
  Obtained from environmental sample
  DOMAIN (32)...(95): Elongation factor Tu domain 2
  misc_feature (1)..(182): Xaa is any amino acid
VLTLAEVMELKANPHRDAIGTVVESRLDKGKGPVATILVKNGTLKVSNWVVAGTAMGKIRAMADDKGRTVKSAAPSIPVTIQGLQDVPSAGDMLLVVKDEKTAKEIVEGRLLKPITIDDDAAKPGIDIAGKIAAGKIKSLNLVIKADVNGSAEALKPQLAKLTNEEVRINIISCGVGAINES

SEQ ID NO: 103538 - protein, 274 aa, Unknown
  Obtained from environmental sample
  misc_feature (1)..(274): Xaa is any amino acid
THDETIEVIGKNGESALVTVSFTVEDKATFTISAAPEALSFGALLGPDYAQPPAQTVTVKNTGTNPVTGLAVVKGSNSAYDVSNVASTIAAGDSAKFTVRPKSKADLGFGVYNETIYINGANEATAEVAVSFEVALSPKYAFAVKPDTMKFGIMKEDYKAPPAEQTATITNNGTSPITLSKPTSKLFSNTKYDIGLLSSATIAVGDKATFTIRPKAGLAEGNYQEDIMVEGVSGSADLKDSVVVSFRVTKTTENAIAAAPDSVLFGSKQGPSYE

SEQ ID NO: 103539 - protein, 275 aa, Unknown
  Obtained from environmental sample
  misc_feature (1)..(275): Xaa is any amino acid
EINKDAAVSAFNRGISAASAIGLLQRLSGNRIDENTAFTLLDWEKRHKEVSLCKGLVLSLSPERLYLAETKPLSKYIIAKLAPGIYMIPESMEEKVYAALKKAGVTIFARPNSEAIYADEGNTLSGSAPSGAPDSRIYFPRLNTGAPHTEKLRQFKLEKDINNAASDSSAAAIIEGFHSIISKMRLGVEERDELTARINRRLVLSESQLKDAVVRYEKLEARGLDYNGKTMIAKQAIARQSPLEISWPGRQKQESVTGIPKALEKKGDESVLVRN

SEQ ID NO: 103540 - protein, 195 aa, Unknown
  Obtained from environmental sample
  misc_feature (1)..(195): Xaa is any amino acid
MKNVSKHIGIAVIAAIATAFAAAALFLAGCPDDSSTDTDPVDTGLKTLSGTITISSATGFTTGKELTANYSGSETVTYRWNKDGTAVSGATRNKYTPPTAGSYTVTVSAAGYDSKTSAAVTVTGASLPALTGTVSITGTAAVGQTLTANTGSLGGSGTISYQWKRGATEIGANNSAYTVQSADVGSAITVTVTRS

SEQ ID NO: 103541 - protein, 227 aa, Unknown
  Obtained from environmental sample
  misc_feature (1)..(227): Xaa is any amino acid
MNGTAKISCNTANSNGGGVYITGTDTGISFTMSDTAQIIGNTANSYGGGVYKTGTVAFTMSGGTIGGTTAEKNSADYGGGVYIDNGNFTTSGSSKISGNAAQNDGGGVYINNGKFTMNAGTIGGTTGSENTANRGGGVSNYSGTFEMKGGEISGNIASTYGGGVFNNGTFEMSNGEISLNKTTNGSGGGVYNNKAFTMSGNGKILGNTANSGGGVYAIVDGTNYFTM

SEQ ID NO: 103542 - protein, 266 aa, Unknown
  Obtained from environmental sample
  misc_feature (1)..(266): Xaa is any amino acid
MGLMTGLAIFLDDGTILAFGFSALAVGLAAGFLIRLGRRRAETSEIRGRDGLAVVGLAWPMIALAGALPYLFSGHKLGFMNSFFESVSGFTTTGATILTSLDTLPPSLLLWRALTHWLGGMGVIVLMLAVLPFLGIGGAHLLRSESFLGQARLRPRIAQTAKILWLIYLSLTVALVLLARACGLPWFEALCNGFSAIATGGFTTRDLSIGHYGRPGLEMLFTVFMFLGSLNFALYYQASRGDWRSLFQDAEARGYVLVILLSALLI

SEQ ID NO: 103543 - protein, 251 aa, Unknown
  Obtained from environmental sample
  DOMAIN (166)...(251): TrkA-N domain
  misc_feature (1)..(251): Xaa is any amino acid
VAVTGNDEANILACRLAQLLASPETKRLARIRSSAFSDFFDEKRFQNELGIDFLINPGVEAVETIMDFIKFPGATDVIEVAHGRLHLVGLRLPRGHALLNKPLAKIHLENSASILLAAIHRHHQLLIPRGDTILKAGDLIYAAAADGDAEKLKASFGLSTDQARQVTIVGGGEVGYHLARRLTADPRAFKVTLIEMSQIRCEYLSQRLPGATIICGDGTDQEIMLDENVSETDAFIAVSTDDEKNLISCLL

SEQ ID NO: 103544 - protein, 220 aa, Unknown
  Obtained from environmental sample
  DOMAIN (2)...(80): Type I restriction enzyme R protein N terminus (HSDR_N)
  misc_feature (1)..(220): Xaa is any amino acid
WTITENSEKRPDIIVFLNGLPIVIFELKSPSREETDASEAYRQLRNYMHEIPSLFVYNAFLVMSDHAMSKAGTITSSEDRFMEWKTKDGSYENTQYAQFDTFIEGMFDKARLLDIIKNFICFSGDTKILGAYHQYFAVRKAVASTTNATKTDGKGGVFWHTQGSGKSLSMVFYAHLLQEALNSPTIVMLTDRNDLDDQLFEQFAKCASFLRQTPQQAESR

SEQ ID NO: 103545 - protein, 292 aa, Unknown
  Obtained from environmental sample
  misc_feature (1)..(292): Xaa is any amino acid
EGTNTLTADIFYPGYSFAGIHTTDGNLTIDGTGILNAISNGVGAGIGGGYGQDGGTIIINSGTVIATSRWGGAGIGGGCGYDGGNGGTITINGGTVTAMGNMGAGIGGGGYGGDGGTITINGGTVIATSSIGAGIGGGCGNASINGGNGGNITINGGTVTATGDGAGIGGGHGVASDSGGSGGNITITGGIVRATGVTFFSSSAAIGGGGGDVDGGNGADVTISGGLVELDLGQWIGGGHNGSGLGSVYGPNGKTTITNGNLSITDPGTNIRGGATDGSANAYRVQVFLDGA

SEQ ID NO: 103546 - protein, 270 aa, Unknown
  Obtained from environmental sample
  DOMAIN (1)...(264): BPG-independent PGAM N-terminus (iPGM_N)
  misc_feature (1)..(270): Xaa is any amino acid
MGNSEVGHLNIGAGRVVYQDLVKINIACRDNSIAQNPEVAAAFANAKSSGKKIHLMGLVSDGGVHSSLNHLLKLCDIAKDYGLQGRTFVHCFMDGRDTDPKSGKGFIEQLSKHLKASCGEVASIVGRYYAMDRDKRWERVKEAYDLLVNGVGAADSNPVQAVQKSYSEGVTDEFIKPISCVGKKGCIEGGDTVIFFNYRNDRAKELTIALTQQDMPEHGMKTLPLYFCTMTPYDDKFKGLHILFDKENVQNTLGRGSIERRKSAAAHCRN

SEQ ID NO: 103547 - protein, 268 aa, Unknown
  Obtained from environmental sample
  DOMAIN (86)...(251): Phage integrase family
  misc_feature (1)..(268): Xaa is any amino acid
FYEFASLNASSISELNKTLVQSYIEEISKKYAAKSLKRKIASVKAFFNYLEFEDLIVVTPFRKIRINIKEPKRLPKSLSLFDMEKLLSFLYSQTHIKKISIRNLAIFELMFATGIRVSELCNIRLSDINLETQTLSIKGKGNKERLGIVNNHHVISALKSYLSIRPITDSPFFFINRIKKQISTQSVRFFIEALGKTVLNKLVTPHMIRHTFATLLLEEGVDITYIKSFLGHSSISTTQIYAASTTYKQRQILTALHPRNRIGGVNEG

SEQ ID NO: 103548 - protein, 177 aa, Unknown
  Obtained from environmental sample
  misc_feature (1)..(177): Xaa is any amino acid
MNNKVYYGEYSLKHWIELIEKENIILPPYQRYFVWKEEDVRNLIKTIKDKQFVPPVTIGAFEESGKNQNLIIDGQQRLTSILLAYYGLFPEKDDYEKIAEQPVELFVDENDVYDEEDRLANVIYWTLRKYLKEKKENKKGYYKDIDYEIGDRKEFEETFLGFSYLVPDSSEAKEQQK

SEQ ID NO: 103549 - protein, 88 aa, Unknown
  Obtained from environmental sample
  misc_feature (1)..(88): Xaa is any amino acid
LKSRYGITPWGKWFIEVLDSYEMGERLDRGRSYANTGKVHSLDFKDGQAAAKVKGHYRPFYNVKIAFPPLKKAEQVYRMIEEDPMLLA

SEQ ID NO: 103550 - protein, 205 aa, Unknown
  Obtained from environmental sample
  misc_feature (1)..(205): Xaa is any amino acid
MARKSGLSARTLQSIFLDAGVVYANWGSEDPQHPPRKLGCTRNGNSFKLTSTTHDMALDGITGIARGARRFLGVTAELTCNMVEISKEILQMAVPGATYGEPLPAKDERGEVINGENHYLIQRKLVATIPEITYHNLAIVAEVSNTKAPVIIGLKNGISDGGLELSFQDGDECVLALTLTGTVDPNDPDEERVVHYLPAKASVRR

SEQ ID NO: 103551 - protein, 216 aa, Unknown
  Obtained from environmental sample
  DOMAIN (1)...(216): MreB/Mbl protein
  misc_feature (1)..(216): Xaa is any amino acid
MKDGMIYEVDAAEKMLAAFIQKARPRRKFNTRIVVSVPPRAHQVARRAVRQVCHDAKAGDVFLVDQTMVAAIGAGLSIYEKRGCMVVDVGGGTTDVAVISYNGKVFADSIPIAGDEMNEAIIKFIQKKYSVMISESAAEEVKWEIGSAYPSENTRTITVSGRDLFEGLPKTLQLSDSEIREALSEPIVAIMNLVRRALNETPPQLAADLINRGICL

SEQ ID NO: 103552 - protein, 283 aa, Unknown
  Obtained from environmental sample
  misc_feature (1)..(283): Xaa is any amino acid
AITIIGYHNYINKIPAISEESNLYRYKLSTEDNMLAKLDEESNLKLVDNLPVLDGATALYPVYASFAQAVYHENLYATARTQVICTTTIGAYDNLLKGEADIIFCAAPSDSQMKQFYDNGINLKLVPIGREAFVFFVNKNNTIDNLTIENIQDIYSGKIKNWKELNGTNQRIMAFQRPENSGSQTMLKKVMADIPIMRPRRENVSSGMGDIINQVAVYRNFSNAIGYSFLFYSTEMVKNDQIKLLSIEGIYPSEGTVQNGTYPFSDDFYAIFIDSDNKNENIE

SEQ ID NO: 103553 - protein, 277 aa, Unknown
  Obtained from environmental sample
  DOMAIN (100)...(165): Bacterial Ig-like domain (group 3)
  misc_feature (1)..(277): Xaa is any amino acid
GGGGGGTASVAKPTATPPGGTYTSAQTVTLSATEGAAIYYTIDGTTPTTASTPYSSPISISATTTVKAIAVKEGNSSDILTALYTIDSGGAKTLVSISVTPPSKIEYNIGESLVTAGIVVTATYSDFTTEEITGYSISAFDSSTAGNKTITVTYNGKTTDFSVNVINPELDTVATPTATPPAGTYSTALNVNLITTTPGAAIRYTTDGTTPTTASTLYSGSSPISIIATTTVKAIAVKEGMNNSGVLEAVYKIGAVPVISTSSLPKGNVGIAYRTTL

SEQ ID NO: 103554 - protein, 274 aa, Unknown
  Obtained from environmental sample
  misc_feature (1)..(274): Xaa is any amino acid
TGGASKKVDAAYGTLIEKAGNEFAILMDMAPEKIETLSCPGISGELLAKAICRMRRGEVSISPGYDGEYGVIRTFAPGEAKENGTGLFEDNTVNDTNIKRKPRQTKQKAHSFVNNKKLLLQTREFSLDEDQLAAVSSSLCKGIIIAGPGTGKTAVLAAKIARIVSEGSNLASILALSFTVKAAAELRERVLRITQKQEAEKPVVATFHSLCASILREQYTAAGLPADFKILSETERDDLLAKICAAAHNKALSPRRLGEYIEEKKRYLLLPEES

SEQ ID NO: 103555 - protein, 157 aa, Unknown
  Obtained from environmental sample
  misc_feature (1)..(157): Xaa is any amino acid
MLVLKFGGSSVGSHDGIKQVIGIIKNSEHSGKVPVVVVSAFSSVTDALIKMSRSACIGEPYVQSLNTLSERHIDCADKFLKGNEKKEAVKVIKKNIEELSQVLDGISLLGELSPRSMDLAMSFGERLSASLIAIIFSANGIKAGFLDSRGLCKTNDD

SEQ ID NO: 103556 - protein, 275 aa, Unknown
  Obtained from environmental sample
  misc_feature (1)..(275): Xaa is any amino acid
MKRIYFLLVISVISLPPASFAQTIADYDWGEAKFEEAPGAMYDTTGAYFLKSLNRLEMVYNEEGELSGYQLIHQKIKINNSDALERFNKLSFSLNSYNDIIKLKARYIGKNGKVIELDQSHLKTIENEDESYMLLAIEGAESDGIIEHFWVRKGYRKLFGNWVIQNNYPKRNLLFEVTSPANLRYMAKSYNGAPAVAESIDTTAGTRTLSLIAHDIPALRRERYSFYDSNLQRVEYTIAYNYSNNRNRIFNWSQFAQYVHNVVAILQPEEQKQSK

SEQ ID NO: 103557 - protein, 46 aa, Unknown
  Obtained from environmental sample
  DOMAIN (3)...(43): UBA/TS-N domain
  misc_feature (1)..(46): Xaa is any amino acid
MEISASQVKDLREKTGIGMMICKQALIEANGDMALAIENLRQQGQM

SEQ ID NO: 103558 - protein, 101 aa, Unknown
  Obtained from environmental sample
  misc_feature (1)..(101): Xaa is any amino acid
TTDTAAAVRSAEIGADAILKATKVDGVYDSDPMKNPDAKRFDTITHAEALSRKLKVMDTTAFSFCMEQEIPIIVFKLLEDGNLAKCLMGEPVGTTVTPSCE

SEQ ID NO: 103559 - protein, 274 aa, Unknown
  Obtained from environmental sample
  misc_feature (1)..(274): Xaa is any amino acid
MGEFNRPALYTMVLDQDGNILLENPVAPQRILRENTAYLLIDTLKDVLTASGATGGSANFKNQELRRNIPIMGKTGTSQDSADLGFSGATPYYTASIWMGNDSNQRMSRSASSIHTAAWSEIMQEIHMGLPARQFTRPSGVESVTVCQDSGQLPNEYCRSDPRGSRLVTDIFASQYKPTRTCRVHQQFTYCSEYGFLVGAYCPSDAIVTRVGIVREIPIADPRANVRDRRWEFPQGVLSGTTCTQHQPQALTPELGPDTWDPWGPSTWQEPVGR

SEQ ID NO: 103560 - protein, 293 aa, Unknown
  Obtained from environmental sample
  DOMAIN (7)...(239): RNA polymerase Rpb1, domain 5
  misc_feature (1)..(293): Xaa is any amino acid
VHPHIQVYDGETRVANMAMPTGCYLQVKEGDTVAAGDILAKMPRESAKSRDITGGLPRVAELFEARRPKDPAVVSEIDGAVSFGDTERGNRKVKISNEHGDVREYPIPLGKHLRVHEGDRVKAGDRLCEGAIDPHDILRIKGENAVQEYMLNEIQAVYRLQGVTINDKHVEVIVSQMLRKVRIERLGNTDFLEGDEVDRNELRKANEKVLAEGGEPATFTPLLLGITKASITTESFLSAASFQETTKVLSKAAVEGKTDMLSGLKENLIMGNLIPAGTGSRMYRKFKVKDWRR

SEQ ID NO: 103561 - protein, 60 aa, Unknown
  Obtained from environmental sample
  misc_feature (1)..(60): Xaa is any amino acid
MIIIGNEAKGMSIKLKELCDKIVKIPIEGNVNSLNVSCAASIIMWEIRKNNQDLFALPDN

SEQ ID NO: 103562 - protein, 285 aa, Unknown
  Obtained from environmental sample
  DOMAIN (107)...(282): haloacid dehalogenase-like hydrolase
  misc_feature (1)..(285): Xaa is any amino acid
VGSSQESGVSLPDVKALGQAYGYKVFSISNNAEINSVVHEVLNTEGPVLCEVLMDPNDTLYFRASSRIRPDGSAVSTPVEDLYPFLPRKEFYKNMYIKPINATGINICTALFDLDGTIIDSKPGIISSMKSALNDVGITNVNDAAIAKTIGLTLKDMIIKLQPDIGDEQVGKIIASYRKYYNEAGVYNCTLFDGIDKALQELSKEFDLYIVTFKLQAMAEKAIAHLNIGHYFLDIKGIDTDQSKKTKTMLIKELVEERGLDHSTMIMVGDRREDITSAGTNKCEA

SEQ ID NO: 103563 - protein, 233 aa, Unknown
  Obtained from environmental sample
  misc_feature (1)..(233): Xaa is any amino acid
MTRPEILAYSKSAGREANSKGWTLRVIPNNQPVLTIEGNLKRRGEGMYDKMEGIGAHEIIIETPDHDIKQDKITPQYYESLYGAAVSRIRDLRNDLRLEYILVFKNYGILANAIFEHPHSQLIAMPIVPKRVREEINGAKEYFDYKERCVFCDIISQEISSETRIICENESFIAFCPYSARYPFETWILPKNHASDFDSISASEIASCARITKSVFSKISKVLDDSAYSVLIH

SEQ ID NO: 103564 - protein, 188 aa, Unknown
  Obtained from environmental sample
  DOMAIN (1)...(157): Glycosyl transferases group 1
  misc_feature (1)..(188): Xaa is any amino acid
SRFDNQKGFDIIENALYSLNGKNMQFVILGSGDHYIKYALQEANRRMPKNTAVFVEYNEELAHKIYAGCDAYMMPSRFEPCGLSQLIALAYGTIPVVNRVGGLSDTITYYNHYSKEGNGFVFNITYGENFVQTLLKSEKIFNDKKEWELLMQNAFKSVFSWDKSVAEYEEMYQNLIDRKRHETVFARS

SEQ ID NO: 103565 - protein, 85 aa, Unknown
  Obtained from environmental sample
  DOMAIN (2)...(81): Ribosomal L27 protein
  misc_feature (1)..(85): Xaa is any amino acid
MARKRGGSGAKNGRDSNPQYLGVKVFGGGVVKAGTILVRQRGTRIHPGTNVGCGGDYTLFALKDGTVSYAQRRGRKMAVVLPTES

SEQ ID NO: 103566 - protein, 274 aa, Unknown
  Obtained from environmental sample
  DOMAIN (2)...(175): TraB family
  misc_feature (1)..(274): Xaa is any amino acid
NLNMVKVFKEGKGFLLLANLVLSGFQRRMGAELGVKPGEEMKTALEIASELGIPYALCDREVQVTLRRAWASCGLWNKSKLLSALLASAFTTEKLSPEDIENLKNRSELDGMMEELAGYLPEVKETLINERDQYLAAKIWTSTPAEAKRIVAVVGAGHMQGIKTCMEKIAAGEKSDDVSALKEIPPRGFLSKALPFIIPLAILALFVSGFLRGGAGVSLSMLRTYILWNGSLAALGAIIALGHPLAVLAAFVFAPITTFTPFIGVGLFSGVIQA

SEQ ID NO: 103567 - protein, 259 aa, Unknown
  Obtained from environmental sample
  DOMAIN (52)...(249): ABC transporter
  misc_feature (1)..(259): Xaa is any amino acid
MNFAASAQAEQEKQTEENDDILLDVKELTVIYKTDLEIVEAINNIDLHIKKGGSLGLVGETGAGKTTTALSILRLLPHPTGQIKQGKILFHGDNLLDYDMRFMQDIRGNRISMVFQDPMTSLNPVLTVREQIAEPIRLHNKDLSEEEVQRRVEETLFMVGILPQRKNDYPHQFSGGMKQRVVIAMALCCEPELLIADEPTTALDVTIQAQVLSMIRDLRNRLGASMLMITHDLGIVAKTCDDVAVMYAGQIIEAGTKRD

SEQ ID NO: 103568 - protein, 222 aa, Unknown
  Obtained from environmental sample
  DOMAIN (2)...(129): ABC transporter
  misc_feature (1)..(222): Xaa is any amino acid
SIDPRKSIIEVIAEYMFIHKSCKNRRETFNQAAKLMDQVGLARRYANSYPHELDGGRRQRVGIARALSLGPRFIVCDEPVSALDVSIQAQILNLLMDLQDDLGLAYLFVTHDLSVVKHISKNIMVMYLGQCVEMAPSDELYKNPRHPYTKALLAAILKPDIAISDEEFQLIRGEVTSPINIKPGCRFAARCDFYKESCVQINPELAEISPSHFVACHMAIGV

SEQ ID NO: 103569 - protein, 210 aa, Unknown
  Obtained from environmental sample
  misc_feature (1)..(210): Xaa is any amino acid
MLQSTTQTVIPGRFFKQVSEDTVQCELCPRRCVLPEGKAGSCKVRFNRGGKGEIPYYGYITARALDPIEKKPLYHFRPGSQILSLGFAGCNLHCPFCQNWHISQSTDTGGQVFSAAEIVDAVKKSTETAQPSIAYTYSEPLVHIEFLLDCMKEARKAGIANVLVSNGCVNSEAAAEILPLTDAANIDLKCFAEETYRKVLGGDLKTVTAL

SEQ ID NO: 103570 - protein, 286 aa, Unknown
  Obtained from environmental sample
  misc_feature (1)..(286): Xaa is any amino acid
DEQTSTVQINVTSTTITTVNISITAPVKLVAPSTSVTSPEPERFTQGTITWDPADNPFKVDTAYKATVTLTAKTGYTFNNFSATPQVNGNDATIVSNTGTALILSYTFPKTADKTVSSWKVNTQQTKVSYTHGDLLDLDGLEVELTYDDGSTEDVPYTSFTAKNITAVPAHDTPLEGKTYGGKPVTISYGGQANLTTGNLTINPKDIATGITVAAIAAQTYTGSAITPSLTVEYPVLSGTSRTLVVNTDYTVAYDDNENAGTVTVTLTGKPGSDYTGDKTTTFTII

SEQ ID NO: 103571 - protein, 123 aa, Unknown
  Obtained from environmental sample
  misc_feature (1)..(123): Xaa is any amino acid
YYKTESGDIFTAQKAEGLILLDEIENGINPYLTEQIIFLLRNLVKKSNRQVIISTHSPVMLNDFNKGEIVFMWRDKKGFVHAKNFFDTEEMKEALSFLNPGEIWENFGKDTILTKLGVNQEDR

SEQ ID NO: 103572 - protein, 286 aa, Unknown
  Obtained from environmental sample
  misc_feature (1)..(286): Xaa is any amino acid
YKNYHRKVSYVVISNFEKLRFYIDNAIDFIEFNLFTLTSDEFALLWLCLACENIASDLPKQLKDESKNSEELITKQLYKEYSAFKRALFADLTELNPDYDRLLLFKKSQKLLDRLLFILFSEDCGLLPPNSITEIIKQWETLKELDEYKPLYDRFKKYFGYMNTGHKGKKHDIFAYNGGLFKEDEVLNNILISDEILRTHLINISRYDFSSEIDVNILGHIFEHSLTETEEITNVLSSSSDKGACPLVNRNVISKRKKDGVFYTPRYITSYIVDNTLGKLVRKENI

SEQ ID NO: 103573 - protein, 281 aa, Unknown
  Obtained from environmental sample
  DOMAIN (124)...(281): ATPase family associated with various cellular activities (AAA)
  misc_feature (1)..(281): Xaa is any amino acid
DTLTPDANEAAKDAITDMVNNKGPNFGNAGEIRVFFEKTTSRQATRLSALSKEERADKLKTIEACDFPSDEKEARSVDDILAELDAMIGMTDVKKTVREIANKIQIQKEQEEKDGTKSSGEGNHIVITGNPGTGKTTIVRTLGALFKAIGLIRTDNVIEVNGNDLKGTVVGESKEKTNDKCNEARGGILFVDEAYVLANTDRVGGGAADSYAKEVVETLMTRLENDRTKFVGVVAGYEKQMDIFLDKINPGMRRRFKHYLHLNDYSAEELFAIFNSMVAKA

SEQ ID NO: 103574 - protein, 289 aa, Unknown
  Obtained from environmental sample
  misc_feature (1)..(289): Xaa is any amino acid
SFWYVNHFYHSAFLWFPHPKNINPELIFSNYITNTQFPIQAIEKEKGIMITQGYMPIFGNIIGTFNNYYKYIWSRKELCILIDKVSNWWDADKKYLLRDDDNKYFDSINNEFKARFNNMLSIFACVFQPNIDKIEKNYISIITHILSELNQYHIPDIMARASIIKKNPDTINSIINDICESLYSKDENTIPDAIAGTIVLLRQKYKEVEKIIEVIAQNIKSRIDVDLYRFLSIMNIIVCDYYEYINEKILADVGFGLQKMISETIIYNESTDKDTHSRQLCRKHSVELS

SEQ ID NO: 103575 - protein, 68 aa, Unknown
  Obtained from environmental sample
  misc_feature (1)..(68): Xaa is any amino acid
MSLTTNFSSGELSKNMFDRIDLPQYHSGVAHLENWDVIPTGGIKRRGGMERLKKLAVEGRIIPVIISA

SEQ ID NO: 103576 - protein, 137 aa, Unknown
  Obtained from environmental sample
  misc_feature (1)..(137): Xaa is any amino acid
MKKRIYRDFFVLVLICVICLSVPIIFIFYGASKNKEIETIRAAANLAAEFINVNSGGGYTDFTDDSANSVRITVISPDGTVILDSLTDALVLENHSDRIEFNAAIRDGFGESTRYSETLKSTVYYYALRLDDGNVLR

SEQ ID NO: 103577 - protein, 248 aa, Unknown
  Obtained from environmental sample
  DOMAIN (76)...(181): PAS fold
  misc_feature (1)..(248): Xaa is any amino acid
MSEVENKNLSSRNILSIFVVPVFVQGAFWGFVGYDDCSHERLFTEDEQSVMRSASMMITSAWLRNDMTNSLQASAAKLEAVIANYPGIILCVDQNRVITLFNGQYLNTLGKKASFFENKKLSDALSEERFKGIRESIESTFFVGLQDIITEINGRNYRIRTTPIYEDSGKLISIIGNFDDITERIRLEAKLEAALKAAQDASQAKSHFLATMSHEMRTPLNAIIGLSELTLESMMSDENPGNLEKINN

SEQ ID NO: 103578 - protein, 95 aa, Unknown
  Obtained from environmental sample
  DOMAIN (6)...(95): Response regulator receiver domain
  misc_feature (1)..(95): Xaa is any amino acid
METVRNKIVLVDDNMANLTMGRNLLKASYEVYPAPSAAKLFEILENVIPALVLLDIEMPEMNGYEAMKKMKADERFRDIPVIFVTAKSDEGSELE

SEQ ID NO: 103579 - protein, 235 aa, Unknown
  Obtained from environmental sample
  DOMAIN (73)...(231): Binding-protein-dependent transport system inner membrane component
  misc_feature (1)..(235): Xaa is any amino acid
MTVRLTVTDRIFYTGINAFLVFILIIVAIPMWSTITLSFRPNTFIGSNLRGMFLAPWDWSTAAYRALLGNNGFVNAFGNSLKIFVMGVSTALFLTIPLAYVLSVKSLPGRKALTILILIPYLFNVGLIPSFLVVTRLGLTNSLAAIFLPGAIGTYNCLIMRGFFEGIPEELKESARIDGAQEITVLLRIILPLSKPIIMTIGLYYGVSFWNDFFNAMLYINNNALQPLPILLRNI

SEQ ID NO: 103580 - protein, 266 aa, Unknown
  Obtained from environmental sample
  DOMAIN (130)...(207): Cache domain
  misc_feature (1)..(266): Xaa is any amino acid
VLIAACWYFISGAMGDLLNRRANDLLANLESQVANDLRESETALRGASFTMEAMIRNGRKESELREYIEEFNGYALAGVKRATGITGVYGVFNVFDNVYINASGQLDKDPTRLLQHWYGAAVTAKGKVVVTLPYQDASDGERKVTFSRAIYDKKGKQAAVIGLDMRLSGLKNFIDNMRSSENDCYGMVVDSSLNIIVGAVDETFGQPLNVLKSPDIYRIMAELNKGVNISGYKTTNTRDGHEPILIYSRQLENGWHIGVVAPVRAY

SEQ ID NO: 103581 - protein, 299 aa, Unknown
  Obtained from environmental sample
  DOMAIN (151)...(267): Response regulator receiver domain
  misc_feature (1)..(299): Xaa is any amino acid
SKLRVTLPQRFRDPGAHAVVEDKNGKNALIYERRDLYANSIVRTVRQLGVNCAPVDSEAALDEKVASGSYNFIFTASALYERTKNILQKYNSNAKVVLLTEFGDVIADKNVTVLSMPAYSVTAANVLNGHADNNNYGAKAESFTRFIAPDARVLVVDDANTNLRVAEGLLSPYKMRVDTCRSGPDAIAAVQAEHYDIVFMDHMMPGMDGIEATKRIRGILGDYYRKLPIIALTANAVAGAREMFLSEGFNDFISKPIDVAKLKAVIDKWIPQELRKSPTEVIASGEKRRRRRHRREENQ

SEQ ID NO: 103582 - protein, 63 aa, Unknown
  Obtained from environmental sample
  misc_feature (1)..(63): Xaa is any amino acid
MLVKTDDFIYCFEFKLDGSAEAALAQIDSKEYAVPWTVSGKKVFKVGVNFDSKKRNITEWVSA

SEQ ID NO: 103583 - protein, 278 aa, Unknown
  Obtained from environmental sample
  misc_feature (1)..(278): Xaa is any amino acid
DSVRLFEELDKKTAVPMIRAFREYVLDELQNRGILTKLQVISCFEKFDAWALNLSKDEANVISVVNDGLKSGAIAIPGSGKARFPAIRSVTQYLNSFGIMIAERIKKQFNPLFDPANETLSSEILAVNKYIKAYTGYSLYDAQLAVAEAHKRCLKQMKSTLCISECGSGKTKIGLTALHAYQQRNNAGAQVKHFNIILCPSHMTKKWVREIEESLPNTFAVIVTGISEINTAYEAYQQDTKTCYAIMSKEKARDGYMKRPSVTWSRRRKAFICPACHK

SEQ ID NO: 103584 - protein, 279 aa, Unknown
  Obtained from environmental sample
  misc_feature (1)..(279): Xaa is any amino acid
VQGSANGSAVVKANTGHAIHIANETYVPSNKSNLELKDAVVARTGTPAAGFDYLVKVTGGDITVDGASLTSTAINVAAGSPATTSLGIGLFAAPNNDAGTNGGDVTVSGGSVHGKGGAIEAVNVTIGSGTRKNTDIKSTDGVTVKASGNITIDNPAANITNTNGVFGNAVVQSTDGTILVTKVGTILGTTQATALLTTSVKTNAGTIRVYGGVVKSGQGPAIVSSNWVDVGMTSDVVVLVTSGSAGQTAANPWNSTIYVDAARVKANYDASGGIDEQSV

SEQ ID NO: 103585 - protein, 69 aa, Unknown
  Obtained from environmental sample
  DOMAIN (6)...(69): Domain of unknown function DUF
  misc_feature (1)..(69): Xaa is any amino acid
MKLFEIVLIAIGLSMDAFAVSITLGLSVKKPKIREMLIPGIFFGGFQALMPITGYFAGYYFASKVEEFA

SEQ ID NO: 103586 - protein, 225 aa, Unknown
  Obtained from environmental sample
  misc_feature (1)..(225): Xaa is any amino acid
KIQNNTVTVKDNDACGGGVSISNLGTFIMDGGTINGNKVDVTATSSSYNNTLRAKGGGVYCNGGIFTMNDGTISNNTAYSNKFPSAGGGVYVEEGEFTMDGGTISGNTAESSSILATSYTYGGGVAAWDSQFTMVSGTISGNSVKSADNRLGGGVYVDNTWFAKIGGTIYGSNASPSTLQNTAKDTNSGHAVYAKKGSVTLLRNTTAGTTVDMDIYTNGNAGGWE

SEQ ID NO: 103587 - protein, 179 aa, Unknown
  Obtained from environmental sample
  DOMAIN (1)...(178): Uncharacterised protein family (UPF0157)
  misc_feature (1)..(179): Xaa is any amino acid
MIFNKNTKIGLNNFTVELHDHQIEWEQNAKETIEYFKNIFGDLIVDVEHIGSTSIKSIKAKPIIDLVVGIKDFNNLDIIMEKMKSNGLTYCQKKDGPEYRMFVIGDLNGILTHIIHLVKYNGTEWNNKINFRDYMNNNIEKAKEYETVKIKSMETNKDNVPSYHKSKEQFVLEKIKEAN

SEQ ID NO: 103588 - protein, 293 aa, Unknown
  Obtained from environmental sample
  misc_feature (1)..(293): Xaa is any amino acid
VWDRLFEQSAVYSGDLVRIARLSGATLNIDNNSIELGENTLIRIQKDEGPLQIEFSYGNISVTSGNDRGTILLSIGDQVVQVLPGAEINAFSGNDGLVLRVTEGAAQVIRDGQVTDVPAGGIVVRDAEGNEVRQPMAAVIHPRPNAVLLKTEAGPLIVEFKWARINLQPQDLLRLEIAEDKYFRKIIQTADNLDSSAVTSLNTGLWHWRLLHENNTLASGRMSVIEAAAPTLLAPMAGGLTQVPVRYAGQEVQFRWAEVPDASYYMLNVSRSPEFIAPEISVQVQTTSYINSD

SEQ ID NO: 103589 - protein, 93 aa, Unknown
  Obtained from environmental sample
  misc_feature (1)..(93): Xaa is any amino acid
LAEVGKKFGLKIITEASGLHYHVGRDGVREKRNVLENVIEYTDIIQIGARNMKSYGFLQELGILTKESKQPILLKRGDSSKLKDFLLAAEYIV

SEQ ID NO: 103590 - protein, 272 aa, Unknown
  Obtained from environmental sample
  misc_feature (1)..(272): Xaa is any amino acid
GPWYEHKDSIKTVIIGAGVTSIGDMAFAYCKNMAFIVIPNSVTSIGGGIYSRAFIGCSGLTSITIPGSVTFIGTSSFSGCTALTSINVASDNAKYSSVGEVLFNKVQDTLLAYPAGKSGAYDIPNSVTTIGRGAFSDSRGLTSVTIPNSVTSIEYYAFYESTGLTSVTIGNGVTSIGHAVFSGCRNLTSVIIPNSVTSLGNYAFSWTGLTSITIPNSVTFIDKWAFNYCENLASVVIGNGLTSIEGNTFAHCPNLTSIAIGKNVTSIADSAF

SEQ ID NO: 103591 - protein, 84 aa, Unknown
  Obtained from environmental sample
  DOMAIN (2)...(77): DNA mismatch endonuclease Vsr
  misc_feature (1)..(84): Xaa is any amino acid
MPDQFDLEVRSKIMFKVHSSGTTFEIHVRSFLKEIGCTFSLKDQNLPEKPDLFLSDYNKTIFANGQFWPGYPICRQAEIIEIIR

SEQ ID NO: 103592 - protein, 86 aa, Unknown
  Obtained from environmental sample
  misc_feature (1)..(86): Xaa is any amino acid
AVLLPDAGPEEAVSIAEKAREKMAARKISVPIKPNGSKMTEISVCTSIGIATAPIHANNWENLLLAADGALRQAKTLGRNRVVVAG

SEQ ID NO: 103593 - protein, 228 aa, Unknown
  Obtained from environmental sample
  DOMAIN (27)...(228): Phosphoadenosine phosphosulfate reductase family
  misc_feature (1)..(228): Xaa is any amino acid
MAKQPLGIDVYTAARQRISWVFDTFPRIYISFSGGKDSTVMLHMVMEEAIIRKRKVGVLFVDLEAQYKLTIDFILNIYKLYNDNIDPYWSSLPIALRNAVSTYQPKWTAWGDGADWVRQPPDIAITDRKKFPFYSYNMEFEEFVPAFGKWYAGDKLCACFVGIRADESLNRYRTIVSNKKSMFEDKRYTTWCGDGLYNVYPIYDWNVNDIWVYHAKTGKPYNHLYDLM

SEQ ID NO: 103594 - protein, 211 aa, Unknown
  Obtained from environmental sample
  DOMAIN (4)...(127): NusA N-terminal domain
  misc_feature (1)..(211): Xaa is any amino acid
VATDMSEAIRQLMQDRHMSEELILKTIENTLIAAFKRRFGNADNAIVRFSEDNNEVSIYAKKRIVDSENFYDPISEIELEEAKELNPEAEINDELLIEVDPKEFDRGSVQSAKQTAHQSIREIQKDSLYAEYKDKIGEIIIGYYQRERNGTIYVDLGKIEGKLIKKYHSPREEFHVNDRIKSLIVEVNKNQNGPLEIILSRTHTDFVRGIF

SEQ ID NO: 103595 - protein, 85 aa, Unknown
  Obtained from environmental sample
  misc_feature (1)..(85): Xaa is any amino acid
SEEQQKALKSLIEEHIEIVEEEYDDDPAEREEEISEDAQEVDVSGTSVEEYECPDCGAKITVEMTNCPNCGIGLSFEYEDDNIEV

SEQ ID NO: 103596 - protein, 174 aa, Unknown
  Obtained from environmental sample
  DOMAIN (4)...(160): Glycosyl transferase family 2
  misc_feature (1)..(174): Xaa is any amino acid
MLISVITPSYNSADTIERAIQSVVDQDYPQWEHIIVDGGSTDGTLDILKKHPHLHWVSEPDKGQADAMNKGFARSKGDVIVYLNADDYFFPGAFSAVIPEFKRGAFFVVGNILVKSKRLGAEFLNVPRITLEGMMRHWEPHAFCHNPVGYFYRREVQNACPFNTTNYATMDIEF

SEQ ID NO: 103597 - protein, 49 aa, Unknown
  Obtained from environmental sample
  misc_feature (1)..(49): Xaa is any amino acid
MPIYLHLVKSDYPVAEDIAERGINLPSYPALTNDDIDYICESTIQFIKQ

SEQ ID NO: 103598 - protein, 74 aa, Unknown
  Obtained from environmental sample
  misc_feature (1)..(74): Xaa is any amino acid
IAVYKDCELEPIRKFTEGIQKDMDPVINAVVEDYSNGFVEGTNNKLKAIKRVGYGRCKLPLLRSKIVLSSFFWP

SEQ ID NO: 103599 - protein, 226 aa, Unknown
  Obtained from environmental sample
  DOMAIN (1)...(225): Glycosyl hydrolases family 8
  misc_feature (1)..(226): Xaa is any amino acid
MGWAMITRRIWAIRKRLTGFITFYNSKTSSTAGGMMAWDVSCNGVNDQGSAADGDLDVAFGLVVATWQWGESYLTEAQKVINNCKKLIVKCASDTVLALAGGYNGGQWGGNCNAYTDISYYTPAFFKIFAEFTSDTTWKKLANDTYVHLARNAHPTTGLVSGWQNASTGAAMMGPGGTQNDSSYNHDASRVPWRIALDYFWNGEPRAKAWATKITNWAYGYGISNL

SEQ ID NO: 103600 - protein, 253 aa, Unknown
  Obtained from environmental sample
  misc_feature (1)..(253): Xaa is any amino acid
VKRIKTTLDDYRYTSDDTVIEGEIDEGKLYEEKDFNRSIEIIEREEKRVKIFLDDVDQNEKAIVFCANQPHAALIRDLINQNAANKDPFYCVRVTSNDGEEGERFLRDFQDNEKTLPVILTTSQKLSTGVDARNIRSIVLFRLVNSMIEFKQIIGRGTRLFDGKKYFTIYDFTDAYRHFSDPEWDGEPVEPEGTSEPKPPPYETEKLKTNPEREPKQKIKVKLRNGKEREIQFMVSTSFWNSDGKPISAHEFL

SEQ ID NO: 103601 - protein, 230 aa, Unknown
  Obtained from environmental sample
  misc_feature (1)..(230): Xaa is any amino acid
MPGEEAIFIKGGVIEQTFDNGTYKLSTENYPFISRLRNAFTGGISTFNCVVYFVRKTHSMEILWGTTSPIQVRDKLLGIATKLRARGAYKIHVGNPQKFLTKLVGNNINSIDQQALLDEYFANEFQGKIKASITRALNETQTELLGIEARIEEFAEMVEPFLGEVFDDYGLKMIKFSIAALDIDDNELRRRYDEIGMDAIAQMRNAQADRGVMDVLGNDSGKQQAANILG

SEQ ID NO: 103602 - protein, 254 aa, Unknown
  Obtained from environmental sample
  misc_feature (1)..(254): Xaa is any amino acid
LQADGFAMAHPSLPLNTKVQVVNTFSRKEIEVTVVRRITASPNRIADLSLSAWIELGLTPNTEVRIYSKPPAPPSTTTQPTTPGTTTQPTAPGTNPSTTPQITTTPPNEPASQVTQTQPPPPAGSSETNPQLDRLLEILLEREAREAQEREEARLAKEAQEAREREEAERLAKEAREAKDREEAERIIREAREEAERITREAREEAERVAKEAREAREREEAARAAREAQEAKAREEAEYIARETREREEMVRL

SEQ ID NO: 103603 - protein, 201 aa, Unknown
  Obtained from environmental sample
  misc_feature (1)..(201): Xaa is any amino acid
MIYGGSIIRVAGAQVPLWFNEGLAELLSSGWDSGADMFMLDRLLNSTVPPPGPTLDGYLAYKGGQSFLYYLYSIGGDSLFNRMLVEFKITRSAEAAIEHVYMKNLDDLGKNWLRELRRIYWPEAGRRANPEAQAALFAAKERSRMNVRPRVSPNGSRVAFFSDRYDYARIIIADTAGKEVRRIGGEHSLGSSFESFRPMNG

SEQ ID NO: 103604 - protein, 271 aa, Unknown
  Obtained from environmental sample
  DOMAIN (2)...(207): Methyl-accepting chemotaxis protein (MCP) signaling domain
  misc_feature (1)..(271): Xaa is any amino acid
MSSITKQNADNSGQAMILASEASAAAKDGDITIKRMANAINLIKQSADNTAKIVKSIDEIAFQTNLLALNAAVEAARAGEVGKGFAVVAEEVRNLAMRSAEAAQNTADLIDESVKSAGEGVKITEEVAVSLGKIVNRTGKVGDLIAEIAAASKEQAQGIEQVNIAVAQLNHVTQNNAANSEESASAAEELSSQAAELANMVSEFRLGADGNPPRPIRMDYDDRRRTPRPAGADRRATPRPRQRPIVAHTPHAHHDGKNEKHNAAENPAHQT

SEQ ID NO: 103605 - protein, 240 aa, Unknown
  Obtained from environmental sample
  DOMAIN (9)...(240): DegT/DnrJ/EryC1/StrS aminotransferase family
  misc_feature (1)..(240): Xaa is any amino acid
MWKIQLHRINYDEREYQAVKEVLDSGWITISQKTHDFEAAFAAFLGHDMKCLAVSNATAALHMALLVCGIGEGDEVITPSLTFIADQNVTRMVGAENVLADITSMEDWSMDPDDIEAKITPKTKAVMIVHYAGFACDMERIAALCRRHNLLLIEDCAHTPGACYYGSSNQGRALGTFGDISAFSFFGNKNIAAGEGGMVVTRSQELFNKLKGLRSHGMSVLSFDRFKGRAVSYDVNRPVK

SEQ ID NO: 103606 - protein, 128 aa, Unknown
  Obtained from environmental sample
  misc_feature (1)..(128): Xaa is any amino acid
MAYLRLLVNPKDGVSFERIANVPARGLGDKAIEALSALAKERGVSLLQAVLSGEAETLNARYRKGFADLRELYALLSEMLDADTPPAEVLRDMLKESGYMDMLTERAAASEEEAARVENVNELMNAMA

SEQ ID NO: 103607 - protein, 305 aa, Unknown
  Obtained from environmental sample
  misc_feature (1)..(305): Xaa is any amino acid
FTVGSADAGSYKVYVEDGSCGAFSNEVTITVDPSASTLYVPTVSMSSNSYCDGFGSVALWIDNGDSYTHTTVYQWYRDGAPILGANQASYPAATAGSYKVSVTDGGCAAMSDEHVVEGSNGGSLTTQPSLTYSPSNVICGVNGSVVLGVDGTYTDYKWFKDGQIILGANQPTFIVSSASAGSYKVYAEDGSCGAFSNEVTITVDPSASTLYVPTVSMSSSSYCDGFGSVALWIDNGDSYTHTTVYQWYQDGAPILGATQASYPAATAGTYKVSVTDGGCAAMSDEHVVEGSNGGTLTTQPSLTYS

SEQ ID NO: 103608 - protein, 282 aa, Unknown
  Obtained from environmental sample
  misc_feature (1)..(282): Xaa is any amino acid
SSITADNDITLCSATLGVLTDDSWIEFDDQCPGETFTFKWDVLWNGNWHGVSADTSLLNNYPFEKGTSELYFTVTDESGNPATCTITIVVSDAEEPVLIAPRDTTVACAIDPIIIDTALVIKDMRDPAKDSSIYGLVKDNCTDFAGGNGSVFCKDVVYAGDSICAAHYTITRTWYAVDESGNSLTRSQKIYVRDTITPRVDNINTPKVDCNNPDLAALLDTWPTFTAYCNGGTVTGSKVVNNTTRIDTLTNGATLEVRMISDMIDEATGERVRRFEAEDACG

SEQ ID NO: 103609 - protein, 115 aa, Unknown
  Obtained from environmental sample
  misc_feature (1)..(115): Xaa is any amino acid
CGKLSAALQQGQFLKALNGLDASGKKVPYHLGHFFIAMDINAFVDPEQFKKTTGDILRDLRASAKAPGHSRIFTAGEKEYHAWLDRQDTGVPLNDSLIKTLNSLIEEYKLDNYKF

SEQ ID NO: 103610 - protein, 87 aa, Unknown
  Obtained from environmental sample
  misc_feature (1)..(87): Xaa is any amino acid
MAKYILSLDQGTTSSRSILFDHGQNIVAVEQKEFTQIYPHEGWVEHDPLEIFSTQYTVMADLIRHTKINIKDIAAIGITNQRETTIL

SEQ ID NO: 103611 - protein, 260 aa, Unknown
  Obtained from environmental sample
  misc_feature (1)..(260): Xaa is any amino acid
LLLLAISASLWLIELKAKGADNKTGSETIQNLLPWIREQDSLRFLDAYFSAEKSEKLKNFISSNRSIQIIQDFSAGSNATTMLAMNDTGTFYRKYAFGNDAEKLYTQFKWLCEYTDILPLPIIVNHQYDDNFCIYDMEYNAMATDLFNYIHYTSSERSWPILEKALDCLRNNLHTRNVRPADLEQVSQYIREKVYANIKRIETAKELRGLLEYDTLVINGEQYHNLKYLKRWLNSDFLTHIFLNDIYTDIHGDFTIENLI

SEQ ID NO: 103612 - protein, 297 aa, Unknown
  Obtained from environmental sample
  misc_feature (1)..(297): Xaa is any amino acid
FYGCSGLTGSLTIPDGVTRIGDSAFSGCTGFTDSLTLPSGVTSIGAGAFYGCTGFTGSLIIPNGVTGIGNDTFYNCTGLTDVTLPTNDNFTSIGSNAFYGCTGFTSIIIPSTVTSIDREAFRNCNKLTSITIPFVGNTLNGNTNTFFGYIFGATVPGSNSSYVPSSLKTVIITGGNSIPTGAFNGCNNLTSVTIPNSVKSIGNEAFINCSSLTGSLTIPGGVTSIGASAFRGCSKLTGSLTIPNDVTSIEANVFYGCSGLTGSLTIPDGVTSIGDSAFSGCTGFTDSLTLPSGVTAL

SEQ ID NO: 103613 - protein, 179 aa, Unknown
  Obtained from environmental sample
  misc_feature (1)..(179): Xaa is any amino acid
VSQARNLGKYFLLIDNMLVVLGFFVVFPLISIRFVDQMGWAAVMVGIALGLRQFIQQGLGIFGGAIADRFGAKPMIVTGMLMRAAGFATMGIAHEPWLLWFSCLLSGLGGTLFDPPRSALVVKLIRPQQRGRFFSLLMMQDSAGAVIGALLGSWLLQYDFRLVCATGAVLFVLCAAFNA

SEQ ID NO: 103614 - protein, 152 aa, Unknown
  Obtained from environmental sample
  misc_feature (1)..(152): Xaa is any amino acid
DAIEKISDNEQVVIKVSAQDLQSVRNEKDLIIDLVEAKNLSIVPDKHCAEGGCMIETKLGFIDAKIVTKLDMIQSALLDIYHEEKTKRETAIKEAVERGEEIDVAAEERKDIDDLMKETSLEEIKAQEKKMLEEQQERAKANEGGADTPAEL

SEQ ID NO: 103615 - protein, 187 aa, Unknown
  Obtained from environmental sample
  misc_feature (1)..(187): Xaa is any amino acid
MAWRNMFRERRRAFIVLLSLFLGITVFTGAMAIVSSTDIAANIDYWYDHDIGISNTNASSNDFGLIGMNKEFIEEIKNVPGVSEVMEQTMGFGLFDYPSEVEEAVKSSGGFFLPLLIVTGIDRAYMEVLNGKLETPIDIEAFERGEIVLVDDRDVPYTLKENSDIFYKHFPVGTELHFEIGQHARIP

SEQ ID NO: 103616 - protein, 118 aa, Unknown
  Obtained from environmental sample
  misc_feature (1)..(118): Xaa is any amino acid
METTQTVRHPKNATSPSFETVWAILQEVGKNQEELAESQKETARQMKETDRRLDKQLAKLGNRMGEVIEYMVAPNLREKFRELGLNFPQVHQNSTVADYDNKIFLEIDAKLENDDKVM

SEQ ID NO: 103617 - protein, 130 aa, Unknown
  Obtained from environmental sample
  DOMAIN (10)...(129): Protein of unknown function (DUF1016)
  misc_feature (1)..(130): Xaa is any amino acid
MPYTTKAYIADIKKILISARNKAYTAINSAMIEAEMKEKTADFQDRLEFIKNPAVLEFLGLPNNSGYIEAELEKAIIDHIQQFLLELGKGFAFVSRQQLIKTETAEFYIDLVFYNFILKCFVLIELTTNN

SEQ ID NO: 103618 - protein, 229 aa, Unknown
  Obtained from environmental sample
  misc_feature (1)..(229): Xaa is any amino acid
MNFKWIWFVAARYIFRKRKKSPAPVLSILGIAVGVLALIVILAVMNGFQLGFIESILEISSYHLRIGPINENIDEARKAVLALPGIKAVVPFREFHGLVQGRRGGQQAAIIRGLPSGAAEMDSGLAGRLSFEPQPSPWGVEPEVRGSPLEEGSFGFNKKSDALMGAELARRLGLKAGDEITLFSVPSLFNTSANGSDADDEGLQFFTITGIFRTGFYEYDTSWIFIDID

SEQ ID NO: 103619 - protein, 232 aa, Unknown
  Obtained from environmental sample
  DOMAIN (1)...(224): 4-alpha-glucanotransferase
  misc_feature (1)..(232): Xaa is any amino acid
MAQNGFSWWLSRLRFSLELYDVIRIDHFRGFESYYSIDASATDATGGEWVKGPGLAFIEAINRELPGAAIIAEDLGFLTDEVKALLEASGYPGMKVLQFAFDSRDSSGYMPYTYGRNCVAYTGTHDNTTCRGWFTSARGEDVARAFEFFGIKTVKEGSQAFIRCALACAANTAIIPMQDYLDLDDRARMNTPSTFGGNNWRWRMMPEAASDALAEKIYRMVEVYGRCGGAAD

SEQ ID NO: 103620 - protein, 261 aa, Unknown
  Obtained from environmental sample
  misc_feature (1)..(261): Xaa is any amino acid
ARNRHNHQAFTELSYAADQSNISQETLSGAMKALNKNIAAAAEGGKDAQFAFKRAGVSIYDAAGNLKTADTLMMEMSETFAKMPEGIYKADLAMAVFGKSGAELVPLLEQGGDEINKLRKDAIRFGLVLDDQTAEKATAFSGSLTEAKSAVKGLGMAVGAQLWEPLTKITDAFSKFIVENRELISLKVGEVFKAIQETITPERIMAVVNVVKSLWDKVDGLAQALGGWGPLIKTIVIGWGAFKAVNIAGDIVGVAKKTGSL

SEQ ID NO: 103621 - protein, 265 aa, Unknown
  Obtained from environmental sample
  DOMAIN (87)...(265): Cytosol aminopeptidase family, catalytic domain
  misc_feature (1)..(265): Xaa is any amino acid
AAAAAVKMALNLGGRRLDLILPRLKSPSPGDILELAALGGLLALYQPDRLKTSPRPKPTLTGLRLWGWEVKDEPERVRLAEATAEAVILARSLGDEPGNLLYPESFARRAVSLARARDLKTQVLDEKGLAREKLNLLLAVGGGSRRPPRLVTLTYQGDRAAPLVALVGKGLTYDSGGLSLKPAASLAAMHTDMVGAAAVLAVILAAAELKWPLNLAAILPLAENMPGGGAYRVGDVHLSRSGRSVEITNTDAEGRLALAEALTWA

SEQ ID NO: 103622 - protein, 232 aa, Unknown
  Obtained from environmental sample
  misc_feature (1)..(232): Xaa is any amino acid
GGVLWYQGESNDGNRNEYEELFKSMINDWRSKYQSAHCSLLSPALLALANCSLPFIFVQLPIWGEPEDNNESDSWAIIREAQASALSLPMTGMAAALEFGEWNDLHPVNKKGVGLRLALAAEKLIFKKQNTAPGPQLRSISRANGRLLLTFDNCGKGLIADETPYVSITAGRDIFRIPAAIESPDCLSVDISSIENPEKVLYAWARNPRDRQLYNSEGLPVIPFKAKIAEEE

SEQ ID NO: 103623 - protein, 299 aa, Unknown
  Obtained from environmental sample
  DOMAIN (1)...(299): Formate--tetrahydrofolate ligase
  misc_feature (1)..(299): Xaa is any amino acid
EVAKKTEFPEDFIEYYGKYKAKVDLNYLAEMQNREDGKLILVTAITPTPAGEGKTTTTVGVADGLCKIGKKTLVALREPSLGPVFGVKGGAAGGGWAQVIPMEDINLHFTGDFHAITAANNLLAAMIDNHIYQGNKLNIDPRKIIWRRCMDMNDRQLRFINDGLGGKANGFPREDGFDITVASEIMAILCLASGIDDLKERLGRIIIGYTYGKQTDGEQPVTAAQLNAQGAMAALLRDALKPNLVQTLEGNPVFIHGGPFANIAHGCNSIMATRLALKCADYVVTEAGFGADLGAEKFW

SEQ ID NO: 103624 - protein, 117 aa, Unknown
  Obtained from environmental sample
  misc_feature (1)..(117): Xaa is any amino acid
MLLLQNEKVIDIMEKTLNHVDSRLIDHGKRVAYLAFTVLNKMNKFKDDQLRDICILAMLHDMGAYKTEEIDKMVIFETVDVWEHSIYGYLFLKYFSPLKALAQIILFHHADCDEVKY

SEQ ID NO: 103625 - protein, 65 aa, Unknown
  Obtained from environmental sample
  misc_feature (1)..(65): Xaa is any amino acid
MSDYKATLNLPQTDFPMKANLSRREPEILKQWEEGDAYGAMLAASGAKGSYVLHDGPPYANGHIH

SEQ ID NO: 103626 - protein, 83 aa, Unknown
  Obtained from environmental sample
  DOMAIN (1)...(83): HupF/HypC family
  misc_feature (1)..(83): Xaa is any amino acid
MCLAIPSRIVELLDDGMARARVGNSHTYLTACVSLLPEPAQVGDYMIVHAGFALHKLDPAEAENSLSLLREMTHMVEGKPAGF

SEQ ID NO: 103627 - protein, 61 aa, Unknown
  Obtained from environmental sample
  misc_feature (1)..(61): Xaa is any amino acid
MAEMLYKKRPKLLVLGMEPEDFTSWNIGLSSSVQERFEDFLTAARKEIRALAGIETEASAG

SEQ ID NO: 103628 - protein, 302 aa, Unknown
  Obtained from environmental sample
  misc_feature (1)..(302): Xaa is any amino acid
LFKAKIANTSTGKEVEVTVTRLIPASQNRIADVSSDVWKELELNSGTDARIYTVVTPKPQTVASPAAAPRTTVSQTATPQVIAPQGGTVQAAAPQYIVSSGGAQGAAAAPQSSGSLGDLPGGIKFENNNNFIINGNPMAPSAAAPETPAQQPAKPAVSYYQPPAQPSVSYQQPAQPAQPAVARPQPAQPSSDIWAQIIKPANETRTQPSVSFETRQPQPAAAFDMRPAKPSNVTYYEAPRPAQPAVNVQNWTLPLAPPAQPNPSAVVYNTSRQSAQPSVVIENWQQQPSEARAQQAQPVVNI

SEQ ID NO: 103629 - protein, 140 aa, Unknown
  Obtained from environmental sample
  DOMAIN (15)...(123): Toprim domain
  misc_feature (1)..(140): Xaa is any amino acid
MILNKHKGTTIIMAKNLVVVESPAKCKVISKYLGKDYAVKATMGHVIDLPEREFGVDIDKGFKPKYTISKGKSRVLRELKEEAAKAEKIYLAPDPDREGEAIAWHVANNIAAEGATVQRVMFNEITKRAVLAAFDTPREI

SEQ ID NO: 103630 - protein, 261 aa, Unknown
  Obtained from environmental sample
  DOMAIN (90)...(261): AICARFT/IMPCHase bienzyme
  misc_feature (1)..(261): Xaa is any amino acid
VPVVAVEAYTGHPEIMDGRVKTLHPKVHGGILAVRDNPTHVKEMEECGIVGIDMVVVNLYPFEKTVAGGAGIEECVENIDIGGPAMVRSAAKNHAFVAVVVDPADYGLIEAELSANGGAVTLDTRRRLAVKAFRHTSAYDAAINAHLSKIYLDEDVLQLYYGGGEVLRYGENPHQSAVFYRAPDADGAAIASADALGGKELSYNNIVDGDAALEAVRELSGVPAAAVVKHNNPCGYATGSTLERALEAAWSGDTVSAYGSV

SEQ ID NO: 103631 - protein, 160 aa, Unknown
  Obtained from environmental sample
  misc_feature (1)..(160): Xaa is any amino acid
MKANKHSQSIPAATLELAKTKIEEVAELLKPYLIALTPDEKHEIPKMGPKTLNFVEKSHEYAHENPTLVPNYLNLAEFDTDFTDAHGLWTLHNRVTQLEEGINDTQMTAGSEAYQAALIFYNSVKVAASQGISGAKAVYEELKKRFPGSKHRTAEAGETT

SEQ ID NO: 103632 - protein, 279 aa, Unknown
  Obtained from environmental sample
  misc_feature (1)..(279): Xaa is any amino acid
VPNTGDEGYLESGNVYVRGGSIAGTSGAVDAYGVTVGQAANGQYSDTLTAISSASGVTINSVKAVVVNNGNATITNKGTVASTRDIPAAAIYSSDGSITIYNVDFVDATGAATTLLTKNVVTGSVTVNSGVIKAKDGIAINSAGPVVVDFADQKQTDPVPGTTPDGLTNLGVNGDGYAIGPKLGLVRKNITVSTEAKTSSYAAIITVNKDVTIGKADIKSLGTTGNVPAIRDSLANVYVTNDTARISSKSGSGIYVFRGLVEVRAGEVSSTAPSASYAA

SEQ ID NO: 103633 - protein, 276 aa, Unknown
  Obtained from environmental sample
  DOMAIN (1)...(276): Glycine cleavage system P-protein
  misc_feature (1)..(276): Xaa is any amino acid
VVPSAIDALAGRQEWFTAYTPYQPEISQGTLQHIFEYQTLICDLTGLDVSNASMYDGGTSCVEAALLAVRAQKKKNTILVSQGLHPHYQEVIRTNITTREGLKIVTVALKDGVTDMDDLKSKLTPDVACLLVGYPNFLGCIEDLAAISSAAKPTGALLVSVTQEAMSFGWLEAPGKLGADMACGEAMSFGNPTSFGGPYLGFLAVKDGHKREMPGRIVGQTQDLNGKRGFVLTLASREQHIRRDKATSNICSNEGLVALRANIFLQLAGPCGLKGL

SEQ ID NO: 103634 - protein, 265 aa, Unknown
  Obtained from environmental sample
  DOMAIN (2)...(259): Sodium:dicarboxylate symporter family
  misc_feature (1)..(265): Xaa is any amino acid
STFWIFVGLVMGVVLGGFFPKDEFPAAYQLFRFLSRSFIALIKGLIVPLLVSTIVVGIAQTGDIRAVGRMGAKALIYFEVVTTIALFFGLFIANWLKPGANLPLDLSAHTAVAAVAPQTGWDIVFHMFPSNVIDHAVKADILPVVVFAALFGIALTKVGPKGQPVLAFFDGVAQTMFKYTDMVMRLTPLGVFGAMAYNVSAMAAGHTVNGTFLKGWPAVFQLLKQYSLLVGSLYFALTCMFVLVFIPRGVDDRREDMGLHQDDTR

SEQ ID NO: 103635 - protein, 59 aa, Unknown
  Obtained from environmental sample
  misc_feature (1)..(59): Xaa is any amino acid
AYKLALFPKGDRVLLFGVIPIERHLFGLRGNPKDARIYLMGADAVGRDLFSRIVYGSRV

SEQ ID NO: 103636 - protein, 263 aa, Unknown
  Obtained from environmental sample
  DOMAIN (1)...(164): Glycosyl hydrolases family 11
  misc_feature (1)..(263): Xaa is any amino acid
NGGNFSCQWSNIGNMLCRKGRKLGASQTYSQIGNITIKYDASFTPGGNSYLCVYGWSKDPLVEYYIIESYGTYKPTGTNKGSFSADGGTYELYETTRNNQPSIEGNKTFKQFWSVRTSKRTSGTITVSDHFKQWDSKGMKLGKIYEVALTVEGYQSSGNAKINSHYLTIGGSSSSNNNNTTTNNNTNNNNNNSSGGTVSSTTTSSGATKVEAENMTKGGKYTGSCSSPFNGVTLYANDDQVSFSQNFSNSSHTFKVRGASTND

SEQ ID NO: 103637 - protein, 83 aa, Unknown
  Obtained from environmental sample
  DOMAIN (17)...(75): Hemerythrin HHE cation binding domain
  misc_feature (1)..(83): Xaa is any amino acid
MNMYSNLITWSPSYAVGIKIIDDQHKELFKLVNEMYKHIAGNEEAERVYFKNNIKRIIEYIRVNFATEEKILQAAKFPELLEH

SEQ ID NO: 103638 - protein, 202 aa, Unknown
  Obtained from environmental sample
  DOMAIN (2)...(78): Queuosine biosynthesis protein
  misc_feature (1)..(202): Xaa is any amino acid
MAEKYGHIPLPPYIKREDVPSDANRYQTIYAKETGSSAAPTAGLHFTQEIMDRLSANGIESVFITLHVGLGTFLPVRSENIEDHPMHSESFSIDENTARKIEEAKIEGRKIIAVGTTSVRTLESAWSDGKFEKKEGSTSIFIYPGYKFKIVDALFTNFHTPESTLLMLVSAFAGRELILESYAEAVREGYRFFSYGDAMLVF

SEQ ID NO: 103639 - protein, 274 aa, Unknown
  Obtained from environmental sample
  DOMAIN (137)...(268): Thiamine pyrophosphate enzyme, C-terminal TPP binding domain
  misc_feature (1)..(274): Xaa is any amino acid
VYLQNSGIGNIANPVASLTSPLVYGIPVFYIVGWRGQPDIADEPQHAFQGIVTEVQLEELGITIFKLTERTIDGELIQAMNNFKHLLAEGKSMALLVSKGALSNGVSQNYSSNWTLSRETAITRIAEMAQDAIIVSSTGKISRELFETRKRLNLKHDHDFLTVGSMGHDSMIALSIALQQPHRHVWSVQGDGAFLMHMGAVAMIGSVAPPNLRHVVLNNAAHESVGGMPTAGAAVDFCGIAKSCGYKHIFRIETMGELDSIILKMPAVNGLCFL

SEQ ID NO: 103640 - protein, 105 aa, Unknown
  Obtained from environmental sample
  misc_feature (1)..(105): Xaa is any amino acid
MSIYQMSNEQSETVFYCKNVTRNYDNAPVVKDISLSLPQGGFISLLGPSGVGKTTLFNVLAGLDPPDEGKVFLNNEDITGIPGRVGYMPQKDLLLEHRTVIDNVI

SEQ ID NO: 103641 - protein, 237 aa, Unknown
  Obtained from environmental sample
  misc_feature (1)..(237): Xaa is any amino acid
MIVSTCLAKGAVAMSKQKTIIKNLNSIQNLGSMNILCTDKTGTLTQDRVVLQYHLNIHGEEDLRVLRHAFLNSWYQTGLKNLMDVAIIDRTQLEQETHAEMRDLANKYTKLDEIPFDFVRRRMSVVVTDGKTQMITKGAVEEMLAVSSFAEYDGKVHPLTDEIRAYILRKVDDLNDDGMRVIAVAQKTNPSPVGAFSVADESDMVLMGYLAFLDPPKESTSKAVKALSELGVGIKIL

SEQ ID NO: 103642 - protein, 145 aa, Unknown
  Obtained from environmental sample
  DOMAIN (6)...(144): GAF domain
  misc_feature (1)..(145): Xaa is any amino acid
ESLLPQVKALLDGESDWVAGLANLSAALAIAFKWWWTGFYIVKGGQLVLGPFQGPIACTRIALGKGVCGAAWKDNKTIIVPNVYEFPGHIACSSLSKSEIVVPLRNSLGEVIGVLDVDSEHLNCFDETDAKYLGEIAGLAARLFG

SEQ ID NO: 103643 - protein, 158 aa, Unknown
  Obtained from environmental sample
  misc_feature (1)..(158): Xaa is any amino acid
MKTYGSVTYQGQTYKTVVIGTNTWMAENLNYNATGSKCGLNSELVNSNTATCDTYGRLYDWATAMAFTASCNSSDCSSSIKPKHKGICPDGWHIPAGEFSTLASYVGTNPGTKLKATTSWNEHGGIKGTDNYGFAALPGGIGRSDENAFPNVGTDGYW

SEQ ID NO: 103644 - protein, 263 aa, Unknown
  Obtained from environmental sample
  misc_feature (1)..(263): Xaa is any amino acid
VVFGTTVDAWQAWVSSPQGKAWLASPEGSAWLAGAAGQAWQAWMAGPDGKAWLAANTGQAWMKSPEGQAWLAEEIAKAWLLQPTAQDWLESPAGQAWISDSAVKAFQSFVKTPEGSQWLAAAQFEWLSSAEGREWIQNPEILEFLEWLLGLLRKPAGSEISPSWAISLINKGPREFTIEDNAVLVADTGQKAEYALTLSDMPAFRSARSAVDEWKTGTGGRVNFSGLSPNTEYYVWARSKENDIYRPGPARASLGGTVTTRAL

SEQ ID NO: 103645 - protein, 94 aa, Unknown
  Obtained from environmental sample
  DOMAIN (1)...(93): Thiolase, C-terminal domain
  misc_feature (1)..(94): Xaa is any amino acid
ALAAAKKSVEDMDLIELNEAFAAQVIACHRLLSFDMAKLNVCGGAIALGHPIGATGAKILTTLLYSLKREKKEWGMASACIGGGQGVAMVVRML

SEQ ID NO: 103646 - protein, 195 aa, Unknown
  Obtained from environmental sample
  misc_feature (1)..(195): Xaa is any amino acid
MPIESVEIAIEGFSGPLDLLCHLVESRQMHASKIKMTQLVRIYGAYLSKTQKAPADILAEFFFMAASLLLQKALSLFPGAEQETLKEHEDPETPYSEEEVLARLERYRPYRAATLCLMERKARCERCYRRIVPKEPGLEQKNIRYDIGDLYFLSRIWWGILEKSSINGNRLDFSSDLDEDWDGIPEALPEESQIQ

SEQ ID NO: 103647 - protein, 151 aa, Unknown
  Obtained from environmental sample
  DOMAIN (22)...(79): Bacterial SH3 domain
  misc_feature (1)..(151): Xaa is any amino acid
MAKIKANPQSTQTLTITQHADITSNANFRKGPSTSDEIIRQLKKGDTVTLTGEVSEGWTQIIHNGDTGWVSSEFLKVWGGEKTASPQTATQTQTQPQTQSAEAQQVATQTERKEEVPQVVAQQPAAQQTAGITEEIVDWARGKYPASMSSA

SEQ ID NO: 103648 - protein, 57 aa, Unknown
  Obtained from environmental sample
  misc_feature (1)..(57): Xaa is any amino acid
MFDAGKEGFEGGMTAKKYITIAKTTKATATRDLQELVEKDILLQKLAGRSTNYSLNL

SEQ ID NO: 103649 - protein, 292 aa, Unknown
  Obtained from environmental sample
  misc_feature (1)..(292): Xaa is any amino acid
SGNVPGGQGGQETSGEFSDIEAMGEWLRARPSNTADKPYNIKLNVSTLGTSYSASDSVRSAIKSYASSSYNSKYVYLDLSGSTFTNVIDNAFMDCNNLTGINLPNTVTTIGKDPFSSCTALTVVNIPVGVTTIPSNGIFYACTGLTAINVDPANTVYVSEDGVLYNKAKNTLIRYPAGKKATSFSIPNTVTAIGGGAFDHETSLTTVNIPTSVTTIGISFFYVSSSLTSITIPSSVTSIGNLAFAQATKLTAINVDSANTKFSSEDGILYNKDKTTLVVYPNGKSGETFSIP

SEQ ID NO: 103650 - protein, 299 aa, Unknown
  Obtained from environmental sample
  misc_feature (1)..(299): Xaa is any amino acid
MGKFDEALVESRKMQIYFNEWERKGAADKKYRTDGMFHLFSALAYERVGESDNSLISTYQSAAAYKMGPVPLAREVEGFAYDRLTAGDRESDVSSLNLRPDTGPNKWTAKMGETEILIVGYAGKGPKMVEMNWRGTMTPGGRLRISVADGKRKGGQNTTFEAVAPTVPDSHRGKVKSGVSQNIKISLPDLVTVTSRVDRFSARLNGSDQVYESVDVNDINLQAQKALADDFGAIVARTALRAVIRAVASDQIRKTDTGVPALNVIQDIGTLVANEALEHADVRMCFMLPQKIVVTRIPV

SEQ ID NO: 103651 - protein, 119 aa, Unknown
  Obtained from environmental sample
  misc_feature (1)..(119): Xaa is any amino acid
SYKDALFVYRIVAKIPAGYTIAFASNATGDNPGGGWATSQEGTGAFEEYVYWRKCGSTGTFSTTGFFYVNPKNTGATLVWHLAYAACFDMTDPAVNPPPAYLGPVSSPPDANTPNVVGI

SEQ ID NO: 103652 - protein, 284 aa, Unknown
  Obtained from environmental sample
  DOMAIN (188)...(283): Fumarate reductase/succinate dehydrogenase flavoprotein C-terminal domain
  misc_feature (1)..(284): Xaa is any amino acid
NFGAGVGAKQINSLGEVYENKYGLTTSQRLHGTVMEILSGRGPCYLKTTGITKEQEADLIKAYLNMAPSQSLRWLESGLPPGVQDVEIEGTEPYITGGHTAAGYWVDTNRETTIRGLFAAGDAAGGCPQKYVTGALVEGEIAASGAVKYMDKETSAPDTDGAEAVKQKLEDYLSPTRGEASFAVDGLEEEMQAVMDKYAGGIGASYRFSETSLNDADKKIRELEARSNHVSAADMQELVYILELTERLTLCKSLIVHLSARKETRWHSFAERVDFPEKSDKWEC

SEQ ID NO: 103653 - protein, 273 aa, Unknown
  Obtained from environmental sample
  misc_feature (1)..(273): Xaa is any amino acid
MSWGFDPEISQNSPYYGAVFAVVYSLAKIIASGGSRKKFWLSFQEYFERLGSDPERWGKPAAALLGALDAQLGLQIAAIGGKDSMSGSFSYNGKNIDVPPTLVSFAVSVTKLDKIITPEFKKAGSFVYHYRPPFTSFDKPDFTALCEYFNTVEELIKKEKILSAWAVGSGGTAEAVVKMCFGNRIGFCAENALAKTSGFGGFIFETDSPLPFAELLGRTTGEYRLAAKTFEISLEKLQDIWESALQSVYPYLEKQDGKTENFLFDKTVSIKAN

SEQ ID NO: 103654 - protein, 182 aa, Unknown
  Obtained from environmental sample
  misc_feature (1)..(182): Xaa is any amino acid
GVVTKGHPLCWHTVCAPWLMKYSNTEIIKKQLERIRRDVGAFKGLINKWDVINEVVIMPIFDKYDNAVTRICKELGRVRMVKEVFAAAKEANPGASLLINDFDLSTSYEILIDGCLQAGIPIDTIGLQTHQHQGYMGLERLDVILDRYSHFGLPLHFTENTIVSGHLMPPDIVDLNDYQIPE

SEQ ID NO: 103655 - protein, 84 aa, Unknown
  Obtained from environmental sample
  misc_feature (1)..(84): Xaa is any amino acid
LGGRMSKDSWGGSWTEQKLDAFTKYVDAYLTIMNKHRDNYGWKLIYFDAFAGSGKRSLPNKDEQTSMLFDITPEEENIYQGAAE

SEQ ID NO: 103656 - protein, 214 aa, Unknown
  Obtained from environmental sample
  misc_feature (1)..(214): Xaa is any amino acid
LAKKVKLDGLCDGMDITEVYARLDRLRKMREKDIVTVTIEHELEDVVEIFSRLNSRGTRVTEVDIYLGVVAARNPKWVRDNFLPYLNDLSYSGFHIDPNLLFRSLTGIGEHTTRFKNISDNFWNPDAILPSWKKTKDAWKRLILRFQEYGILTNLIMPTQAALVTMLALIDKFNDDRQFSKSLYWFLQASRFSRYSGSGTTSLDEDLKDIYTSN

SEQ ID NO: 103657 - protein, 288 aa, Unknown
  Obtained from environmental sample
  misc_feature (1)..(288): Xaa is any amino acid
AVDVTVLDIDTDQGRPIEVKKEIKGGFEYWYYRLNVASDVNKIRLYPNTNDYIVFWSGNFENEPKLNNTDKVLIYSLKQGLNELELVCLAQDEFTAKFYYLEVTRAAPDASKDARLASLGIKFKLANNAWSAAETITLSEGQYEYSLSMPYECTAFALVPTPTVASVTLGGSWSALGTPVDPGQTKTVSLVIKALDNKTERTYTVSVRRAAGVGEDIFAESNAYLSWLYSNMGALSPSFTMSGTNYSINLPGTANLILFYPTLSNPNSEIVLSSGTYDPNGNRVFPGT

SEQ ID NO: 103658 - protein, 291 aa, Unknown
  Obtained from environmental sample
  misc_feature (1)..(291): Xaa is any amino acid
YDDLGWNILPGTVIVKTNSGTLLVEGEDYDLDYEMGILELLSTRARSAESIFITYQRESDFVLEKKVFAGLRGEMRLPFISDNSFMAASVLYQSAATTAGDIPQLGNEPFSKLHLSFNTSLDFQPEWMTKAVNMIPLVKTEEESAAKVDFEIVHSRMNPNTSIERGAYIDDFERTKDGYTLSMRHTLWHPSHYPFKYADPQSIADSMLNKLRIPVWDFYWYTPNAYDDARKIRRFDVWRRDQNSRYSSSDTYIDVLRLNATPASRNHPMDVQDRFKNAYASITSSFGRNGL

SEQ ID NO: 103659 - protein, 216 aa, Unknown
  Obtained from environmental sample
  DOMAIN (77)...(201): Transglycosylase SLT domain
  misc_feature (1)..(216): Xaa is any amino acid
MALVGALLVPLLSVSLIILRNELTIHSQNNEIAAMKAERVNILNALAVMREKERLVRMLDEIAGQKITPEARYRLAELIHQNSTQYGYSPELLLAVIAVESKFDPQALGRYRGGTLSGALGIMQIKYETASHIAKTLGMGKINREDLMDPEINMVLGTAYLVTLITRFKSFKHGILAYNLGPTKVRAALANKEPLPMRYYEKVLKQYYRIKDVESD

SEQ ID NO: 103660 - protein, 293 aa, Unknown
  Obtained from environmental sample
  misc_feature (1)..(293): Xaa is any amino acid
ASIFDGALGQGLVGSIKNMAERFKYGGSPGKDQRVYYFNTKEILGNKYGTPNPIPYLIVDPNINLRLTISLRANGEYSYRMVNPALFYANVCGNVDEQYTRDKIDSQLKSEIITVLGPSLGKLGTGLEYHEISFHTDKLAEILNEALSAKWREGRGLEIVNFGITCTASPEDDNRIKQLQTAAVMRDPTMAAASLVGAQSDAMRAAAENKAGAMTGFLGMGMAAQAGGMNPQALFQMGQQQAPQQPPQQQAAPATPAAAAATWVCSCGVSNTGKFCAECGKPSPNSPGLFLWQ

SEQ ID NO: 103661 - protein, 74 aa, Unknown; identical to SEQ ID NO: 94518
  Obtained from environmental sample
  misc_feature (1)..(74): Xaa is any amino acid

SEQ ID NO: 103662 - protein, 260 aa, Unknown
  Obtained from environmental sample
  misc_feature (1)..(260): Xaa is any amino acid
MQKPGELLESVLNEIEKRIKEDINADFLADNVGLSSIHLQRLFKFAFNQTIGAYIRSRKLTASLESLFNTNSKLVNIAIEYGFDYEQSYIRSFKREFGVTPGIIRKTGQIVKVTPPLNLHDVKLFENCIIFKPELVMIPQFHVISKNYQVSRSDAINHVHKLIKYFWENERNKITDVSEPDVYIGLVRAHDMDADYNWYLPSIQVKTLKNIPEGFEGYTINPSLYAKFRYIGQHNYLEINQDNIINIHSTMEKFFICEYD

SEQ ID NO: 103663 - protein, 277 aa, Unknown
  Obtained from environmental sample
  misc_feature (1)..(277): Xaa is any amino acid
MSQHVESPTDKAANLLALIRNGLHLHAERTSAMTLGDRNRYIGLSDIGRALECPRAALASKLFPRQQGNLEKQLVLQRGHWLEHGIGQALAAQHLRILPQLELGLVHKGVPVKAHCDFVLAWEKPRPAIRILEIKSTGRLPDTLFTSYEVQLHGQTGLLAHLWDQPAFSLRDTDGAFLHGNLTMPQLCKARFGLAMPADPEQVDIEAWVLCVSMTDARPFGPYTPDAAMRDLCLHTAERLWLEKLAVENGQRDINSVAHATGFHALCAYCDWNADCP

SEQ ID NO: 103664 - protein, 91 aa, Unknown
  Obtained from environmental sample
  misc_feature (1)..(91): Xaa is any amino acid
MLDFAPYQSTDTTKLATALIAVQRAIQPAFRDAENPFTRSSYATLNSVMDACREALLDNGIWLCQYPAHVEAGHMGLVTQLTHAESGQWQA

SEQ ID NO: 103665 - protein, 221 aa, Unknown
  Obtained from environmental sample
  misc_feature (1)..(221): Xaa is any amino acid
LPGGRSYADRIFEDIGTNGTWWTATKADSGRAYGMGIYLLRGENMNETVYNVTNKVAYLSGQNKHGEDENELVYDVTSKVVYGSDQPKRGEYEKETVYEVGVGHSVRCLMDSDSGKPSNLTERKKDAKEKKKEAKRAMERGSDYFTDSRDGRIYRVVTIGGKRWMAQNLNYQPQTGKSWCYGDSASNCDSLGRLYDWYTAKRAACLSGWHLPTEQEWDDLT

SEQ ID NO: 103666 - protein, 302 aa, Unknown
  Obtained from environmental sample
  misc_feature (1)..(302): Xaa is any amino acid
MTADLIQGSNTLVLRFERPDSPPERGNDLPDPANVRLSVRLDLEDRNFHQETKKWPGADDYLNGITKPNERGFAFEPAGDRRLLVSVDSGTFNAEPEWSMNLPHTVEATRGMTDCGDAWSPGWFDIDLPKGKVVHLVATAEHEAPSDLADFAAARKDLTKRFANLGETSFERRLLRSMDAYMVTRDGGRSVIAGYPWFLDWGRDTLIACRGLISCGLVHDATQILLTYAALEKNGTLPNMLSADSTANRDTSDAPLWLALASKEAARVLGDDFLRTPLTDGRILIDVLASIAEGYMAGTSNS

SEQ ID NO: 103667 - protein, 149 aa, Unknown
  Obtained from environmental sample
  misc_feature (1)..(149): Xaa is any amino acid
VKRGCSQCGDCLNVCPVYRRFRREEYSPKAKRLLMEPLSGDFADPRTEAELNWEQVRELSRLCAGCGRCRTACARKLSTADLLADVRAANPHWTQQLWELWITRMGPAWLSFGYMAGIVPDWCAPGPFKPLLATAKALVDREMQTPGSN

SEQ ID NO: 103668 - protein, 99 aa, Unknown
  Obtained from environmental sample
  misc_feature (1)..(99): Xaa is any amino acid
AAVGGGNNPGYVWKSASGWDDIGFDGSGIDGKGFSALPGGNRYYDGNFYGVGKSGYWWTATESTSDLAYSWSIYADGDGVGWGDDNKSNGFSVRCVKDN

SEQ ID NO: 103669 - protein, 237 aa, Unknown
  Obtained from environmental sample
  misc_feature (1)..(237): Xaa is any amino acid
MDMPVIITGSGPGLEKVMPAIQKAQEECLVIAASSSVTALSFYGIKADIVISTDGGNWALRHIYPFFRKSDFDTQYGVYNGIENTASFAVNLCAALPSQCAGFPMLIMNDGSFWQSIILHELSLPSVIIPQRGTVTACAVELALALTSGNIYLAGMDLSVKDIRSHARPYAFDHLLFDNASRFMPVYSQSFIRSSQIHEGGSLDIYAAWFKKQLASWPKRIFSMGGSNELLKTRLRL

SEQ ID NO: 103670 - protein, 89 aa, Unknown
  Obtained from environmental sample
  DOMAIN (1)...(88): Rnf-Nqr subunit, membrane protein
  misc_feature (1)..(89): Xaa is any amino acid
IYLPLITTNCAVLGVAAINVQKEYNLLMSTIYGAGAGLGFTLALILMAGLRERLEDCRIPRALRGAPIAFITAGLISLAFMGFAGMIKE

SEQ ID NO: 103671 - protein, 225 aa, Unknown
  Obtained from environmental sample
  misc_feature (1)..(225): Xaa is any amino acid
ILIPGHRCVPFANPGLFPHEYSFSWKGSLVPFTTTEGPPEEFYPYYNIFGEEYAPQYVARDNPENEEAFNRDLYDDPPEVSIKTLDMRNIYRETSFVPGDRFVVRTLDWKQGNFSLERVGKDEWSEAELNAWLLAAEEGFENSFSKLGPASCTEEQIAYAYWFGRTRMREFPAYSLEDYLYEKTSRIETSAYGIETRFWYAGREIPDKKELDSDIVLSDMSPFEL

SEQ ID NO: 103672 - protein, 76 aa, Unknown
  Obtained from environmental sample
  misc_feature (1)..(76): Xaa is any amino acid
MAKINMNTPLVEIDGDEMTRVLWQVIKEKLLLPFVDLKTEYYDLGLTNRDNTNDEITVKSAEAIKKYGVGVKCATI

SEQ ID NO: 103673 - protein, 261 aa, Unknown
  Obtained from environmental sample
  DOMAIN (155)...(238): Methyltransferase domain
  misc_feature (1)..(261): Xaa is any amino acid
VIESSGGYLSELYYPPTSGNNKCEEVIAVDGFLMATQYDIPWRADLFKGWHFYEIAQCLEFRRAGYKVIVPMQPCAQVMHDCGIVNQEHYLQYRDVFRAEYAAEATKQRDSFIATDRISDKDYLHPDVPLAKTIGHTQWLEYLYKIGNKSGTRILEIGSREVTGKSTARARFSKAEYVGFDYYPGNNVDVVGDAHKLSEYFKGQKFDIIYSSAVFEHFAMPWLVAEEIAKLLKLGGLVFVETHFSFSAHERPWHFFQFSDL

SEQ ID NO: 103674 - protein, 88 aa, Unknown
  Obtained from environmental sample
  misc_feature (1)..(88): Xaa is any amino acid
MVKKVNVSISDRLYKRSEKWKYSPSELYQKALEDFVSKKEQLDERIKGEPEAMEQIIERLKRQKKEADLGIYEDGQEHGIKWAKTADF

SEQ ID NO: 103675 - protein, 89 aa, Unknown
  Obtained from environmental sample
  misc_feature (1)..(89): Xaa is any amino acid
MAMSQNQTKRAVEAGYWHLWRYNPLLRAEGKNPFVLDSKPPSMPLKDFLMTEVRYSALYLKFPDRAEALIAEAEQYARERYAMYLQMLK

SEQ ID NO: 103676 - protein, 278 aa, Unknown
  Obtained from environmental sample
  DOMAIN (50)...(73): 4Fe-4S binding domain
  misc_feature (1)..(278): Xaa is any amino acid
MPEFVRDVVMPMARLKGDELPVSAFKGREDGRWPMSVSRHEKRAIATNTPVWQPENCIQCNQCAMVCPHAVIRPMLATEDEIKDAPAGFQVKPATGFKGMRYHLAISPLDCMDCGVCVETCPAKRKALVMTPLASQRPQAEIAWEFSQANISYKSMAGQKMTVKNSQFLQPYNEFSGACAGCGETPYTKLVTQLFGDRMMISNPAGCSHAWAAGAPAVSFSTNALGQGPTWNASLFENCAEYGLGMFTAVQYERQRVADMALAILAKGVHGELKDALD

SEQ ID NO: 103677 - protein, 69 aa, Unknown
  Obtained from environmental sample
  misc_feature (1)..(69): Xaa is any amino acid
GLKSTLPFPRLGRLQLTRVFRGATYNITVKNPNKVSKGVTKLVVDGAETAGNVVPPFDGGIHEVEVVLG

SEQ ID NO: 103678 - protein, 290 aa, Unknown
  Obtained from environmental sample
  DOMAIN (1)...(170): Mur ligase middle domain
  misc_feature (1)..(290): Xaa is any amino acid
MLYEMAENGCAYAVVESSSHGLSPRTNRLGDVEFDAAVFTNVTHEHLEFHGSWEQYRDDKANLFRALDKRCAKTDIGGAPHTAEIIPEPFGVINADDKSASYFAGMTKHTTLSFSVNGKDADLTMRAIESGALGNWYNVFVSAENTVIDIRDRLPGAFNAGNVLAALLTVSGLTGVPVRKIIPLCPRLLPVRGRMTAINKGQPFEVLVDYAHTPSSFQAVFPPLRKRQDCSGGRIISLFGSAGERDTQKRAEQGKIAAAYSDYIVLTDEDPRGDVPGDILDEIARGVYAE

SEQ ID NO: 103679 - protein, 164 aa, Unknown
  Obtained from environmental sample
  misc_feature (1)..(164): Xaa is any amino acid
MKRKTILFTVVLFIASILPAQDASGKLTVWTFTDEVDSMVKKYFTPSHRGIQVEQTIIPSEEFQNKLDPVLYSDRGTPPDVMALESAFVRKYIESGLLLDITDIYNANKNKLIAYPAEAATYNGKVYGLSWQVCPGAFFYRRSLAKKYLGTDDPAAVQKYFSNF

SEQ ID NO: 103680 - protein, 244 aa, Unknown
  Obtained from environmental sample
  misc_feature (1)..(244): Xaa is any amino acid
LPRLICLILLAAVAVSAQGVLRIASFDDLLRIGRYAGYPLSGDYELVCDIDASASRVRPFEPIGGVGSPFTGRFFGRDGAVFVIRNLYISKPSAGHVGLFGVVGYGAEVSGVGVVADTVAGRYAVGVLAGSNNGRIFNCFGSGVVVAGRAESNAGGLVGVNGGEVRGSYSAAEVRGVENVGGLVGLLRVTAAGEVRQCFALGGVSGVGSVGGLVGQVFGGRVSESYSAGRVAAAGGAAGGLSGG

SEQ ID NO: 103681 - protein, 292 aa, Unknown
  Obtained from environmental sample
  DOMAIN (118)...(289): RNA polymerase Rpb1, domain 3
  misc_feature (1)..(292): Xaa is any amino acid
MALELFKPFIFNRLEHKGHAATIRQAKEMVEQGVPEVWDVLDDVIKNHPVLLNRAPTLHRLGIQAFQPTLVEGKAIRLHPLVCTAFNADFDGDQMAVHIPLSPMAQIEAKVLMMSTQNILNPANGRPNVVPSQDIVLGAYYLTKKRLGRKGEGMAFGSIDQVIAAHDAGVVDTHAIIRLRFTGDLVDTEAWHKSDPRKRSEQEVFECPSRKAEDEIIATTVGRIIFNRSLPQGIPFVNGLLKKEGLLSLVNRAYKFNGPETTIQMLDQMKDMGFLWAMRAGVSVGIDDLGSR

SEQ ID NO: 103682 - protein, 59 aa, Unknown
  Obtained from environmental sample
  misc_feature (1)..(59): Xaa is any amino acid
MKEKIIILGAGVMQGPVINIAKELGFFSIALDGSKEAPCVSMADQFEQIDLKDKEGIEA

SEQ ID NO: 103683 - protein, 285 aa, Unknown
  Obtained from environmental sample
  DOMAIN (58)...(137): Bacterial pre-peptidase C-terminal domain
  misc_feature (1)..(285): Xaa is any amino acid
GLTVDDVYYIRLMNSTANGGTYKVAYSASSSTPKITFPAATTLTVDTWANGNITTAGGEQWFKFKATAGSQYIHFDAGSLNDVYVQLYKNDGTTNGSRVNLFINSPMTNQSVTTDSDYYIKVTAYSTTGTGTYKIGFTTSETAPKTTIPTQGVILIGDTGVNGNITTAYGEQWFAFTATTTKYFYYQGVTLSRSNISVQLFNDDGTVATNKLSFDSNNTINLSSIIISGKAYYVKVTNNNNTGTYKILLLDIVPDTWADGNITTAGGEQWFSFFATANTQYIHFN

SEQ ID NO: 103684 - protein, 50 aa, Unknown
  Obtained from environmental sample
  misc_feature (1)..(50): Xaa is any amino acid
IIGIYVYEMGLGKAQFSYTAAIGLFTNVINFIIIMLVNSFSKKVSETSLF

SEQ ID NO: 103685 - protein, 208 aa, Unknown
  Obtained from environmental sample
  misc_feature (1)..(208): Xaa is any amino acid
MGKKTLAIKYKVGKTNADKIFDRCNTVLWIIILGLILYPLWLIIIASVSDPDSLLMGKVLLLPVNPSWMGYEAVFQHRELLRSYANSIYYTVVGSFLSVVVTLMAAYALTRKFRGKKAVNLYIIITMFFNGGLIPSFIMNRNLGLYNTVFIMIVLNTVSVWNLMIARTFISTNVPNELYEAAAMDGTDHFTYFVKVVLPLSSTIIAVL

SEQ ID NO: 103686 - protein, 283 aa, Unknown
  Obtained from environmental sample
  misc_feature (1)..(283): Xaa is any amino acid
SAGGGGYTGSYGSVVHCNQTYKTVVIGTQTWFAENVNCPTDTGSKCYGDDPTNCSKYGRLYSWATAMTVCPSGWHLPDYTEWGTLINSAGGEGKKLKATTGWNDYKDGKYKGTDDYGFSALPGGGWQGGFGAIGSNGFWWSSTENDSDKSRARFRGMYYDYEGVDSDYFNKETMLSVRCIIGYSNSSISSSSAKPSSSSLSSSSITPSSSSTFVLPSSSSVYVPPTPSSSSVASGGDYCYYGQGDCYKMPTEDNCKDGVLVNSCDNYKAEYCDYGVCEGGKDG

SEQ ID NO: 103687 - protein, 235 aa, Unknown
  Obtained from environmental sample
  misc_feature (1)..(235): Xaa is any amino acid
MTVFLVIIGIVLFLIIILLILSPQKMFLRRLDKEAKRIVTEVLSYISYDCDDENSLFSTACKILGIDEKNQKQELIAGIKKYCINIEGICYFIALNFRIPEKMIKLRCAQFVNRIDYYLYQSGIKPCSKENKKKLLEYCDLDDIYTQSPSVFSEYNNIIKTVMEKYERAHTLIVENKYHEAIVIYNDLLNIVSNSTPIFLDRGYAFFCLKEYDNAIDDYTKVIHKKSCEGNTYYL

SEQ ID NO: 103688 - protein, 135 aa, Unknown
  Obtained from environmental sample
  misc_feature (1)..(135): Xaa is any amino acid
MVIGIILSLLLLTYIAYRGLSVILFAPVCALLATITAGWPLLPSYTEIFMTRGVIYVKNFFPIFLLGAVFGKVMEESGCARSIAKLFMEKLGTKHACIGVALTTAVLTYGGVSMFVAPFAVYPFAYALFKDAGIP

SEQ ID NO: 103689 - protein, 289 aa, Unknown
  Obtained from environmental sample
  DOMAIN (165)...(289): Plasmid pRiA4b ORF-3-like protein
  misc_feature (1)..(289): Xaa is any amino acid
VDLVLERLVPAGIELDGKDKFFLLEYIESVMDEFRVFYTPFTDKVTGPIRSRAAELHTAVIELVSRLNKGDIDLSWLPRHTFIILSQIQTHTAGILSQVQIHTASIMGDLDSNDILQEAELEALDNSLDSMIETYEEVKELIDEALESFRRNRIAVLRSGSELVTERLLQLSIGGTDTWRRVIVPEFCTLGDLHRIIQTVFAWSDTEAYKFNADCPLDVKTCIKDMEGLNVVEMLYEYGTKWNVKVIILSRQEMPGPKPVRCVAGAGAAPPDFISGPVKFRRLLYALES

SEQ ID NO: 103690 - protein, 129 aa, Unknown
  Obtained from environmental sample
  DOMAIN (46)...(129): Hsp20/alpha crystallin family
  misc_feature (1)..(129): Xaa is any amino acid
MKTLSLYRPNVMENALSGFDRYLDSFFRDNFLDPAERVFNRLPTVDVRETEKAYVLEAELPGLDEKDVEIRLDGSTLTLQSKKEEKEEKEANAGDGSYLIRERRYSSFSRSFKLPENADKEGITASSKT

SEQ ID NO: 103691 - protein, 258 aa, Unknown
  Obtained from environmental sample
  DOMAIN (1)...(74): Histidine kinase-, DNA gyrase B-, and HSP90-like ATPase
  misc_feature (1)..(258): Xaa is any amino acid
MEYAVIDTGMGISQDKINNIFLEHLVDDKASRRVDGAGLGLPITKRLVDLMDGIINVESEEGKGSTFGFRIIQGYVDDEVLGKEVSDKLRSFQYIESKRAATQKLVRIDLSYARVLVVDDMQTNLDVASGLLSKYQMQVDCLNNGQAAIDRIQKGEPVYNAIFMDHMMPEMDGIETVDRIRALGTEYAKKIPIIALTANAIHGTEMMFYAHDFQDFVTKPIDIMVMDVAIRKWIRDESREEVMIEPEEPSEKKEMTIE

SEQ ID NO: 103692 - protein, 218 aa, Unknown
  Obtained from environmental sample
  misc_feature (1)..(218): Xaa is any amino acid
MCGQHRSDIIAEIKEKLKNNKPVRVVSTNLVEAGVDIDFPFVYKALAGMDSMAQAAGRCNREGKLSGMGELHIFIPPEKPPSGELRKAADESLTLLKQGGYGPLDIKTYEMFFRNVIWEAHTTDKGDVMTALTKDAVDLTIQFRTAAENFKIIENEEQYTVFVPYKEKGQELIALLKRKGPEKWLLRKLQRYAVSIYERDYRRLMSKGVYCRGVSWNF

SEQ ID NO: 103693 - protein, 312 aa, Unknown
  Obtained from environmental sample
  DOMAIN (16)...(271): Amidohydrolase family
  misc_feature (1)..(312): Xaa is any amino acid
NDDDRYYARQLTYCESLLAGTTFICENMYWSLGERSVSAMGEIGIKGALVEDIRHDFSNSDSFVPAQKLKEISAACREADLVPVIGLMAEEDFETTRLRKAFDLLRDIDALQTMHLAENVWRIDIILKKYGMTPVEYLARNGFLNDKLIGSHVVCVTDNEIRLLKESGVKVANTPLCEMKIADGIAPIPEMVRRGVTVGLGTDGPLWNNSSDIFREMKAAALLHTVSKGIRSLSKKDILNMATTGGAAVFGKEKEFGMIKEGMKADMILLDPDKPHMQPLLLGKNENVTSRIVFSATGADVTDVFVNGKRLV

SEQ ID NO: 103694 - protein, 176 aa, Unknown
  Obtained from environmental sample
  DOMAIN (1)...(167): Protein of unknown function (DUF1016)
  misc_feature (1)..(176): Xaa is any amino acid
KGITINSPADILKNPYVFEFLGVPESKPILERDLEAKLIRRLEDFLLELGRGFMFVGSQQRITLGNIHYYVDMVFYNKVLKAYVLIDLKTGDLKPEYVGQMNAYLNYYKTEVNDAGDNAPVGIILCRNQKDFVAEYALGGLSNQVFAANYVYYIPAKEQLIAEVKTLLEKEEEPYA

SEQ ID NO: 103695 - protein, 160 aa, Unknown
  Obtained from environmental sample
  misc_feature (1)..(160): Xaa is any amino acid
MKVTSPSENSNLLDIGVTPDTSLPENNFIEKWYPWTHNIVMTSVEDASNLEREFKGTKFVRTIPGAAFPFFDKQFDIVFCSAVLEHVGDYPAQAFFIQECLRVGEKIYLTTPNKNFPIEMHTYLPLVHLLPRKIHHGILRFFGMDFFAKTENLNLLTSRK

SEQ ID NO: 103696 - protein, 187 aa, Unknown
  Obtained from environmental sample
  DOMAIN (2)...(177): DctM-like transporters
  misc_feature (1)..(187): Xaa is any amino acid
SAFSVVYIAVVEIFIKKDIALKDITKVFSKAVPIIGGVLAILAMAKALSYAFVSSGVPDRFASWMQEAVSSKYVFLLLLNLSLLVVGCLMDIFSAILVVLPLIVPLGFAYGIDPVHLGIIFIMNLEVGFLTPPVGLNLFLASYRFEKPFIKICRYVLPYLVIQLVVVLLVTYVPWLSTGLIQIIGNR

SEQ ID NO: 103697 - protein, 201 aa, Unknown
  Obtained from environmental sample
  DOMAIN (31)...(195): Binding-protein-dependent transport system inner membrane component
  misc_feature (1)..(201): Xaa is any amino acid
KTQADAMRFPLMPPVKWEFGGYVRAWVNMDYPNAFKNSFLITSISLVGGIFISCMAGFTFARKQKHNRFYTVLFYVFLAGMMVPMQMSIMAQYGLVQSLGLMSNILSVIFINIAGTLSMSIFFIRNFIIASVPPQIEEAALIDGCSIFRIFLSITLPLLRPVIATLAVMNSIGLWNDFLTPLMFLQRKSSRTIMLAVNSNV

SEQ ID NO: 103698 - protein, 98 aa, Unknown
  Obtained from environmental sample
  misc_feature (1)..(98): Xaa is any amino acid
MKNDAKRVEHLERVIQKYQKSYYGGEAEISDGEFDLLWDELKALAPNSPVILGIGDAVDNIDGFPKAKHLIPMGSQDKAANPQEFLEWAAKHSLPEYL

SEQ ID NO: 103699 - protein, 259 aa, Unknown
  Obtained from environmental sample
  DOMAIN (97)...(208): TonB-dependent Receptor Plug Domain
  misc_feature (1)..(259): Xaa is any amino acid
VLEKNTREPLPGANIIIVSDGRQFGASANEKGECAVSGVPVGRCNIAVSMIGFTTYVSNNVLVYSGKETVLEIVMQEDVYALKEVAVTAKVDKEQPLNKLAVVSARMLSSEEANRYAGTFGGDPSRMVAGFAGVIAADDQRNDIIIRGNSPTGLLWRLDGFEIPNPNHFGAMGGTGGPIGMLNNNQLSNSDFYTGAFPAEFGNATSGVFDLRLRNGNNQKNEFLVSAGMNGFEIGAEGPLRHVIKPKDTGASYMINGRY

SEQ ID NO: 103700 - protein, 217 aa, Unknown
  Obtained from environmental sample
  misc_feature (1)..(217): Xaa is any amino acid
YQAGIFVNVLKDSISPVVIGLFLGAAKTGMVNMAATIAAFPVMLLAILNRVFFPAFSRAINDKAALEKLFGISIRLSNAFVAPIAIFILLMAEPFTLYVFGEKWVGETTNYSYLLWPTNLFLPTMIVCICLLNAFGLSKTVLKFNLLWMALTLGLGIPLILAFGANGFGYASIIVNIATIIIPLTARKYVDCKILMEYALGWLPAIVLAVIPLAFRH

SEQ ID NO: 103701 - protein, 84 aa, Unknown
  Obtained from environmental sample
  misc_feature (1)..(84): Xaa is any amino acid
MVWVIKSELKEDYKVFIEFNDGTSGVIDFYDKLQNDHRQIIRELLDLEKFRTVKTGLDTLCWDNGVDFAPEYLYEQIKSKQKAA

SEQ ID NO: 103702 - protein, 269 aa, Unknown
  Obtained from environmental sample
  misc_feature (1)..(269): Xaa is any amino acid
DYEDEFAGAIAEADICSSDTYLSLHWGWPHDIAEPGGKSHKRTPNKNILEGLCFDFERFTARSGKSKPFVLSEINADGDVNGPYEQAEQLVEFYRLVPKKAPDITGITFYQFRDRGRLGLEIEDSNNPDVGIAQPVLKDYKKIMTNEYFSPKMERGKKVVFPAKLRWGSSEDSDGITIPIDFKDNPVFCEVMFTNPDDAEKLNAMMEINGKWFYKKPGVKSIDLSPAFFKNKLNGKQRLEFKLFAPPASGTNDPGQEEDWRINYYHTLN

SEQ ID NO: 103703 - protein, 248 aa, Unknown
  Obtained from environmental sample
  DOMAIN (1)...(248): tRNA methyl transferase
  misc_feature (1)..(248): Xaa is any amino acid
MSGGVDSSAAVILMQKAGFECIGATMKLIANGGSKCCSLEDINDAREAAWKLGIPHYVLNYTEDFTNRVIEPFIKSYENGETPNPCIECNRYLKFSLLIRRALELEAEKLVTGHYARIEKSGERLLLKKGVDAHKDQSYVLYMMSQKALSLTHFPLGELTKAQAREIAAEKGLSNADKEESQDICFVDHGNYAGFIENYTGKTYPEGDITDAEGNVLGRHHGLIRYTLGQRRGTGVAVNYPVYVAAQN

SEQ ID NO: 103704 - protein, 294 aa, Unknown
  Obtained from environmental sample
  misc_feature (1)..(294): Xaa is any amino acid
VGIIGGLNSNPLMGLLSGNETEDAIETIFDSKSLKRKVIDRFNLYENYDLMKSPNKFELAVKRMNKQVTLVSSLKGRGIGMSKTLAYSVMCYHSSPDTALQMAEYVFSCLDSVMVNISINKASRNRAFIESQYNASNEKRDSLNMVFKEFQVNHKAFDISEQMKLTLKVYADVKSVAVMNDLKLLSLQREYKGNTPEIVEAQNIKRVYEKKLAELEQKDEHDVLPSLNLSSELMPQYANIFTALEVQNKISILLATELEQARLQEARDVSPLMLIDPAYKAEYKARPKRVSLIL

SEQ ID NO: 103705 - protein, 207 aa, Unknown
  Obtained from environmental sample
  DOMAIN (144)...(167): 4Fe-4S binding domain
  misc_feature (1)..(207): Xaa is any amino acid
MKLNETWKQYLKDNGADFVYFIDASTFSIDVVNGYACVVLFGKVLSKEYINIIKADQKPKQQEFINTERKMDALADKLVNRLETEGYKSISKFKFARLPHKTVALRAGLGFIGKNNLLINDKYGCALVLGKVLTTTPFVTIKSVSPKKPKCGDCKVCVDMCPTKALHGKTWSITTTRDEIMVRKLCCCCLKCMVWCPYTEKYANLME

SEQ ID NO: 103706 - protein, 239 aa, Unknown
  Obtained from environmental sample
  DOMAIN (23)...(238): Lyase
  misc_feature (1)..(239): Xaa is any amino acid
METRDIFLNISPIDHRYSLSEKAVFDALVPWLSEEASVAACVKAEIALVKAHLTMRGKSLEELREALEKAGESVAPEEVYAEEEKTRHNIRALVNVIKQKVPPEVAPLVHLGATSVDILDTSLAYRMKGSCRGVVLPALRKLETALCDFTEREAETAQVGRTHGQHAVPITVGFAMAEYVSRLGKAILEIERLSAQLKGKLAGAVGAYNAASMLVRDPEELERLYLAEMGLEPSEHSTQ

SEQ ID NO: 103707 - protein, 293 aa, Unknown
  Obtained from environmental sample
  DOMAIN (19)...(56): SWIM zinc finger
  misc_feature (1)..(293): Xaa is any amino acid
SREDDLLFGLCAGSGKNPYACSVDFFDKTKGPVARCSCPSRQIPCKHALGLMYAYANGAAFAAADVPQDIQDKRNKAEKRQEAKAKASEKAESREVKPPSKAQISSALKKIDAQLEGVAVADKLLQAIVNMGLAGIDAKTASAYKDQVKQLGNYYINGIQAAFSGLFLLLEEEKGKDYGKSIFQAQYIKALLKKSAEYMAGKKNVEGEIVMDTESAIEEQIGYAWKLEELRRYGKCKKGEELLQLAFYSYGDDSRKEFVDEGYFISLGGGEIYAAKNYRPYKALKYVKEERFG

SEQ ID NO: 103708 - protein, 289 aa, Unknown
  Obtained from environmental sample
  DOMAIN (2)...(288): CO dehydrogenase/acetyl-CoA synthase delta subunit
  misc_feature (1)..(289): Xaa is any amino acid
KPLYGVSVNAENVDAKLNDIKKIDYERINERMYIEAINVEYTGDAGVFLDAVRKVLAAKRTLILDVKDAGAAQGALEIAKDSKPLLNAANESNYREMNELAVKYGVTLGVSGGTLDSLHDTVAALEAAGNKNLVIDIGSTGAAGAVSVKDAFARAVQIRRAALKDGDRTFGYPSLVNIAKIAPNNHEMQTALASLFTVKYGSIIIMDGINYAQALPLFGLRQNIYTDPHRPMRIEPGVYPLNKADENSVCATTVDFALTYFIVSGELERSGVPVNLPDSDAGGYSVLTA

SEQ ID NO: 103709 - protein, 170 aa, Unknown
  Obtained from environmental sample
  DOMAIN (5)...(138): Type I restriction modification DNA specificity domain
  misc_feature (1)..(170): Xaa is any amino acid
RVLHNGTIPWLNSGEVNQGIVHKAKNFITQVGLDNSSARIVPVNSVLVAMYGATAGIVGLLSFSSAINQAICAILPNDIFDSCFLYRYLQTQRNEMLSKTAGGAQPNISQEIIKSLLIPLPPLDTQRRIAAEIERQFAAVERAKKAAVEQLNTINAMPVAILRQAFSGQL

SEQ ID NO: 103710 - protein, 127 aa, Unknown
  Obtained from environmental sample
  misc_feature (1)..(127): Xaa is any amino acid
MNKRKIAKKSRVSKPSKISKVKKAVKASNVKKVTKIAKPKKAAKTTNAQNVTKVAKAKKVSKAPKVKAVVKTANVKTPSKAPKVAEPLNAAQRTSLKSEIKAICDIMRRSNCAGAMQYVPELTWLLF

SEQ ID NO: 103711 - protein, 168 aa, Unknown
  Obtained from environmental sample
  DOMAIN (11)...(168): Relaxase/Mobilisation nuclease domain
  misc_feature (1)..(168): Xaa is any amino acid
MIARRIDRQIRNDSYRALALYIADAKQAGEKVLARWVVGGLADEYLTAIVEAEAIQSLNTRSTKAKTYHLLVSFRPEDEDKLTPAIIQEMELAFAQGLGLAEHQRHAAIHKNTNNLHFHIAYNLIHPERLTIHEPFRDFFVLSRVCRELEDKYNLVIDPWDGKRPRKN

SEQ ID NO: 103712 - protein, 286 aa, Unknown
  Obtained from environmental sample
  DOMAIN (1)...(151): tRNA synthetase class II core domain (G, H, P, S and T)
  misc_feature (1)..(286): Xaa is any amino acid
SFNEIRTPIFEHTELFTRSSGETSDVVQKEMYTFEDKGGRNMSLRPEITAGAARAFVEHGMYAETQPTKFFYIGPVFRYDKPGAGRWRQHHQFGVEHYGSFSPAADTEVISAAYELFNRLDIKGLTLHINSLGGKECREKYNSKLKKFIAENLDSLCATCKTRAEINPLRILDCKEEKCRIALADAPAPVDSLGDECKNHFNELQELLAVMGIPFLLDNKLVRGLDYYTRTVFEFIDNESGLTIGGGGRYDSLIRDCGGPAMGGVGYGLGMERLILMLERREKIES

SEQ ID NO: 103713 - protein, 111 aa, Unknown
  Obtained from environmental sample
  misc_feature (1)..(111): Xaa is any amino acid
MMVVDASSGAIAHSSVVDLPEWLPGGSILVPNEVKVRRARLALRRIGGGVGEALLVKWLGEGRFEALLRPGAQLRAGKIALVVGQNGVELGEAKLTVERELDEGLRIVRLE

SEQ ID NO: 103714 - protein, 41 aa, Unknown
  Obtained from environmental sample
  misc_feature (1)..(41): Xaa is any amino acid
MRVDVNKKGIFTRDRQPKAAAFYFKNRWGNLPYNFKENGNN

SEQ ID NO: 103715 - protein, 264 aa, Unknown
  Obtained from environmental sample
  DOMAIN (94)...(165): HAMP domain
  misc_feature (1)..(264): Xaa is any amino acid
DDYRRITTSIKDASGKRAVDTFLGEKSAAYPHVKSGNAYIGNAVILGKNYLAAYYPLFQPNTKNVIGILFIGIEMSSIEEMISNSINAEIKIVGIIVAGILLGSILLISLISKLIVVNPIVKVANTLQDISEGEGDLTRSITVSSNDEVGDLAKFFNKTLEKIKNLVLLIKKQAGLLSTIGNDLSSNMTETAAAVNEITANIQSVKTRVINQSESVTETNATMDQVVANINKLNGLIAKMAENVHAVTNTLINNAEHVKTLQEA

SEQ ID NO: 103716 - protein, 75 aa, Unknown
  Obtained from environmental sample
  misc_feature (1)..(75): Xaa is any amino acid
RIRTAGIWETEGCALARLVRQGLRKRGFTGDFTTVYSDERLENIDNNAVGSAVTVTAAAGMALASLVLRDITGYR

SEQ ID NO: 103717 - protein, 295 aa, Unknown
  Obtained from environmental sample
  DOMAIN (1)...(269): pfkB family carbohydrate kinase
  misc_feature (1)..(295): Xaa is any amino acid
VRPGETISSTSLIRSAGGKGANQAAALAKAGMPVYMAGKIGQDGEFLLQLLQSYGVKTGGVIQYEGVTGQAIIQLDRNKQNSIVLFSGGNGEVTVEEIHNTIAQFSAGDAIVLQNEIAHVREIVDCAKRQGLRICLNPSPYNEKIAEIPLDLVDIFFVNEIEGAALASLPRETAPPAALDCLVRRFPKAEIILTAGKDGAYYGCGEIRAKGDIINVPVADTTGAGDTFTGYFIAAREKNMTVSQALAVACKASSIAVSRKGAMVSIPFAEEVFENGPLRCQQCTDHKEARYAGIH

SEQ ID NO: 103718 - protein, 282 aa, Unknown
  Obtained from environmental sample
  DOMAIN (1)...(282): Transaldolase
  misc_feature (1)..(282): Xaa is any amino acid
VADTGDCESMKQFKPIDATTNPSLIYAAAGDNRYKPLVDEAVSWAKEKSGDPAKRLALCLDKLAVNFGLEILKIVPNRVSTEVDARLSFDAEASVTKARELIALYAAAGIAKERILIKLAATWEGIEAARVLEKEGIHCNLTLLFSIAQAVACAEAGVTLISPFVGRILDWHKKDRGVDAIPAPEDPGVISVTAIYNYYKHHGYTTEVMGASFRNTGEIIELAGCDLLTIAPSLLAELEQAEGTLTRKLEPSRVTAVPRIPCDEKNFRWLLNEDQMATEKLS

SEQ ID NO: 103719 - protein, 298 aa, Unknown
  Obtained from environmental sample
  misc_feature (1)..(298): Xaa is any amino acid
LGAASGQESLSRYGFTQGEVDGAKAYLLSNLEQRVSEKDRQHSVNFGSAFVNHFLKAEPVPDLEWELDAVSKLLPGISQNEINRAVKAYFSDDDLTVIISAPQGENVPGKTGIAAMTAEARKAKIAPPGADSGQGELLARLPEPGNIVSETSDSETGAVRILLSNGAELILKETKNKNNEVSLYAQARGGVMSVAPESAVSAFLAADMLNASGLGPYSRPELTKTLLDKQVSLSFWTQNYLRGFQGAASTKDLKTLFELIYLNFTQPRLDPGAIEALLDRLRSNLIWQENDPNAAFRR

SEQ ID NO: 103720 - protein, 299 aa, Unknown
  Obtained from environmental sample
  misc_feature (1)..(299): Xaa is any amino acid
ATAETERYRVLLGTMIGDQEKANKIIHDLDYSPLSDFYGTANAIGGLQGMVTFGMQAEEASGILTRLGDVAQGNSEAFVTMSNNMGQVFANGKASANNLKAFVNQGFDVVGEVARQTGKSREEVTKTGVTYEQTKAALEALTNEGGKYNQMLAKQMNTLGGVIKQFNSFKAATAEAIGFGINDDLKDMLKYILEIAKAGQDAFVGKFVKFLKEVIHWIFQVIIMWEVLGYRLEDMGAFEVIGAFFEDLKAIAGQVLTGIMKLIVAVGKTFFYAFKTAYTALRPALLALGELVQKVLNFL

SEQ ID NO: 103721 - protein, 128 aa, Unknown
  Obtained from environmental sample
  misc_feature (1)..(128): Xaa is any amino acid
SERTDDDWGGRDAGKDKAFHYWAERTGAALAERDFLCGLFPSPFPYAERTLLAVPVDAPMPDSPDFQGFTGNAVTELVRMAGGSALILFTSYQALQNTWDKAAPVLENEGIRCLKQGDDDRTRAAPAV

SEQ ID NO: 103722 - protein, 121 aa, Unknown
  Obtained from environmental sample
  DOMAIN (1)...(121): DJ-1/PfpI family
  misc_feature (1)..(121): Xaa is any amino acid
SHGISLTADTTIAELEKAGALRAASWDAVFVPGGMPGASNLAACVPVGNFYKEMAAAGKIVAALCASPAVFLAPLGLLEGKKYTCYPGMEKQVSGGTWLADRVVVDANLVTSRAPGTAADF

SEQ ID NO: 103723 - protein, 75 aa, Unknown
  Obtained from environmental sample
  misc_feature (1)..(75): Xaa is any amino acid
IYAGAHHEKWNGKGYPRGLREEEIPLQGRIMAIADVYDALVSERPYKPAFSCEEADDIIRKDSGIAFDPLIVEIF

SEQ ID NO: 103724 - protein, 278 aa, Unknown
  Obtained from environmental sample
  DOMAIN (1)...(59): Collagen triple helix repeat (20 copies)
  misc_feature (1)..(278): Xaa is any amino acid
ERGEQGERGEQGERGEQGERGEQGERGEQGERGEQGERGEQGETGPISVLVPRYMWVDGSVGTGGHISSGSGVHTDGISQNSSVGTSVIFDDTIGDAFLHSNTEVSIQGGYYNTGKVSATVVFIFPSQEENQSIPFYATFALTINGVVIQDTRVTRTSESGNEVQVTLLMGETVQASGRLGIKHVAGNTQIIIRQANLTATSYEFFGNYFVSPVHAEFYVECDPNSLPWWKCGESISMNGYFPYGTDDLTKTNSAKFKEIIDKERKTKPQEYFTERGI

SEQ ID NO: 103725 - protein, 96 aa, Unknown
  Obtained from environmental sample
  DOMAIN (1)...(36): Pentapeptide repeats (8 copies)
  misc_feature (1)..(96): Xaa is any amino acid
DADLTAADLSHADLSFAHLTGTRLPGSQLMRADLSGADLTGADLAGADLTETTLIDSDLTSASLQGARFNGSTWRNVHGMSDAAARGATGVPAAGP

SEQ ID NO: 103726 - protein, 245 aa, Unknown
  Obtained from environmental sample
  misc_feature (1)..(245): Xaa is any amino acid
LGFDRYIISDWIGIGNSLTPGATDASGYQGGGTTSQSAIKNAINAGIDLAMEPGTETTFINGLKALVQNGSVPQSRIDDAVRRILRAKFRAGRMDNPASISAMVKSNNGDIGSVAHTAIAREAVRKSLVLLKNNAALPISKTTDKVFVTGSHSDNHGYQCGGWTAVGSTNTGWQGKGGTMSGATSIKTGISNVAPSVVLNSASDATVIVYVTGETPYAEWERDVTSLTFQDNLSSPNLATLKSQN

SEQ ID NO: 103727 - protein, 279 aa, Unknown
  Obtained from environmental sample
  DOMAIN (1)...(279): PEP-utilising enzyme, TIM barrel domain
  misc_feature (1)..(279): Xaa is any amino acid
IDELSALRELPAETLDGHRVALKANIGLPEEAEGVVHYGAEGIGLYRSEFLFIAPGRHAAEETQFHAYSKVLKTMGKLPVTIRTVDLGGDKVIPAFQTAVERNPLLGWRAIRLSLANPELFKVQLRAILRAGVSGNVRIMFPMISGVEEVEQARALLDEARVECKKKGQPCAETIEIGVMIEIPSAAMTADILAEKSDFFSIGTNDLIQYSMAVDRGNEKVGYLGESHHPAVLRFLKLTIDAAHEKGIKAAMCGELAGDPSATALLLGLGLDEYSMTAS

SEQ ID NO: 103728 - protein, 253 aa, Unknown
  Obtained from environmental sample
  misc_feature (1)..(253): Xaa is any amino acid
VVSHAGLCEKYQGRSSGRVRGFCLYGDTTGETDEFGLPVRLNWAEEYRGKALVVYGHIPSAETRSLNNTICIDTGCVFGGKLTAYRYPEGELIEVSAKREYYAPVKPLNYSASITANGCNEPDIADILGKRRVSTRIYREVAISEEASSLTLEIMSRFSANPRWLIYLPPTMSPSGTSKLDSFLEHPLEAFNYYKKHGVSKIICEEKHMGSRAVIVLCRNSETAKTRFGIDDDSLSQNIPGIIYTRTGRHFSR

SEQ ID NO: 103729 - protein, 257 aa, Unknown
  Obtained from environmental sample
  DOMAIN (45)...(108): Ribonuclease B OB domain
  misc_feature (1)..(257): Xaa is any amino acid
MSMTDLYALAESQGVGESRSLRRQELVFKILQSQATQNGQMFAEGVLEIMPDGFGFLRSPSNSYLSGPDDIYVSPSQIKRFYLKTGDTVSGQVRPPKDSERYFALLRVEMINYEDPEECKRKINFDDLTPLFPDKKFDLEYNPKETATRIINLMAPIGKGQRGLIVAPPRTGKTVLLKNLANAILANHKEVHLIVLLIDERPEEVTDMQRSVNAEIISSTFDEPADRHVVVAEMAIERAKRLVEHNRDVVILLDSIT

SEQ ID NO: 103730 - protein, 282 aa, Unknown
  Obtained from environmental sample
  DOMAIN (240)...(272): Ankyrin repeat
  misc_feature (1)..(282): Xaa is any amino acid
TYGETAINLAADNGYTDIVAMLIDAKADVNTANFSGRTALMRAVALKNMELCQLLIEKKAKVNAQDNDGFTPLMVATTVDDIELVRFLIKSGANVNLANKEKMTPLMLAVSLSSTEIVKIFIDSRADVNAVDGENTTALIYAALEDKTEAAKLLLDANAKVDIQTKAVKRKGGFGRFLSGAASHLSGGYGGLGMIFQGLAAKAAADVGYTALMFAAMNGNDTLVEQLLAKKAKVNQTANLNTTALYYAADEGHASTVKKLLDAGASIKVSHKITRNTPLLTA

SEQ ID NO: 103731 - protein, 244 aa, Unknown
  Obtained from environmental sample
  DOMAIN (119)...(215): Helicase conserved C-terminal domain
  misc_feature (1)..(244): Xaa is any amino acid
MTTKIDDDWHGRQGEIINAGPKSKIVRLIKRRFFWKGTEFEKAEWKGEDYTAIIENMLRWAVQYGFVMTQPLSSSMTGYCLNSNTLEWRLTKEKKPEKNVNSFFRVLYIQIANSLTNGNYNLFDYESHEHTAQIESAEREILEARFRFREKDLSWLKEQKAKTNKMSLQQLPVLYCSPTMELGIDISSLNAVYMRNVPPTPANYAQRSGRAGRSGQAALIVTYCTALSPHDQWFFSNKSDMVYG

SEQ ID NO: 103732 - protein, 280 aa, Unknown
  Obtained from environmental sample
  misc_feature (1)..(280): Xaa is any amino acid
SEYNTPFATVSLDNIFLQLIDGFSYIENNGIIHRDIREKNILIDKSGIVKIIDFGIGKVVKKGNVLRDSLASKINREESDTLPQEYYEGVYTSKTDIFYLGELLNRLLRTELNTFPIQDTNFSYYNILDKMMKKNPKDRYSKFSDIKEAIDKYDFINMEIAPTDKLIYQAFTDSLRNAINHFIDERKFNYDIDQFISQLEKVIKDNCFEDKIQNIKEVIRSVVSGGYNYTPSYYISCNDVKTFYEWFKKSSLQSQQLILNNVISKLSGIKIVISEPDIPF

SEQ ID NO: 103733 - protein, 246 aa, Unknown
  Obtained from environmental sample
  DOMAIN (43)...(85): S-layer homology domain
  misc_feature (1)..(246): Xaa is any amino acid
MDQGVLGGYEDGTTRPNNTLERCELLAFLNRMMGFSSPGARQFTDVTSDMWYAQDFLIARQAGYFTGFENNMAYPDQGVTRAEAATLLCRIFSMTPQTPYDDLSRFGDYERALVVSPARSNLEAMVERDFLTGYPDNTLRPDEALTRAELMSMFSKIMPLYLNQPGVNHNNNGETLNGNAVIRQTSAELRNAVVDGDLILTPGAGEGAVNLTDVTVNGRILLLGGGTVSLTNCRATDFLINKKDGR

SEQ ID NO: 103734 - protein, 86 aa, Unknown
  Obtained from environmental sample
  misc_feature (1)..(86): Xaa is any amino acid
LRHSREQGIDYGLEQAKAEALIFPSMSAAAIGARAGYPTLNLPLGLSSQGEPFSLTLAGTAFTEARLLALAYAYEQAYPKRVWPEL

SEQ ID NO: 103735 - protein, 138 aa, Unknown
  Obtained from environmental sample
  misc_feature (1)..(138): Xaa is any amino acid
FSRSPLTTVTLPKSLKTLGDDAFASTNITAVTIPAGTWVGERAFQFCRSLKTVTLPEDMEIISNGTFYGCIALTTIALPASIKEIGMEAFNDCSNLVTVTIPDSVKTIRFGSSAFSGCSKLSVASQAALRKRGFADRL

SEQ ID NO: 103736 - protein, 101 aa, Unknown
  Obtained from environmental sample
  misc_feature (1)..(101): Xaa is any amino acid
VPFLFLLLAISIAFAQDSMRISQIHVETKNVFDDAVTHTSAEKSLYRIGNIIHIKTRESVISARLPFKEGDTVSYAEIQEAEKDLRALPYISDAKIEAKKD

SEQ ID NO: 103737 - protein, 110 aa, Unknown
  Obtained from environmental sample
  DOMAIN (6)...(110): tRNA synthetases class I (E and Q), catalytic domain
  misc_feature (1)..(110): Xaa is any amino acid
VQETKPVRVRFAPSPTGYLHVGGARTAIYNYLFAKATGGTFYLRIEDTDRKRYNEDALNDLLRDLKWLGLNWDEGPYFQSERLEIYGSAASELIEKGHAYYCFCTEERLQ

SEQ ID NO: 103738 - protein, 276 aa, Unknown
  Obtained from environmental sample
  DOMAIN (47)...(225): Stage II sporulation protein E (SpoIIE)
  misc_feature (1)..(276): Xaa is any amino acid
MFIPWDVDGDGNKLNSGYKDARNAVFFGYYKGAKELSGDYFDYLDLGGRYYAVIKCDVAGNGVPASLIMMQVATMFLNYFKNWEPAAGGMRLEKLVYQINGFIETLGFKGRFAAFTLCIFDTQTGELHFCNAGDNIIHIYDASEKCVKSITLPQTPAAGALPNSIVQSKGGYKAQTLSLDHGDILLLYTDGIEDAQWSGAMGPARVHGIINAVMNRSAYHINKWHDLEGDTELCFDYSDCSGEVEEMIMALITAEKMFRSYRSPGVSSDDEVLMRK

SEQ ID NO: 103739 - protein, 77 aa, Unknown
  Obtained from environmental sample
  misc_feature (1)..(77): Xaa is any amino acid
FYLIVEGDLDSEAILLLLREFLDWVESFDGPIPGATAAECGNWREQNIDMAKWECRRYAALLRNPSQENLNYPSAMV

SEQ ID NO: 103740 - protein, 153 aa, Unknown
  Obtained from environmental sample
  DOMAIN (1)...(151): MatE
  misc_feature (1)..(153): Xaa is any amino acid
MQIYVDRAMLGHVNSEYFAAIGNVFVPFNVLVSIIGGICTGTTIMIAQSIGAQDEVRCKNYAECSFIGNSIFPFITFLVFFFGSGYIFRLMGVQSPVLENSASYLRIMSFIFLHMGFTSTAICIMQGIGITKIIMFAGILNNLLNLVLDWVLY

SEQ ID NO: 103741 - protein, 282 aa, Unknown
  Obtained from environmental sample
  DOMAIN (18)...(282): Baseplate J-like protein
  misc_feature (1)..(282): Xaa is any amino acid
TSRAPAQTRGIGFPTQIRLRLLLLTIAALNTQIAEDIDQTGKGNLLYFAGPETIELIGNLYGDRGKKLQASRAKTTIRYTLAVLRPVITPIKKGSRTTPDNKVFFGTTKAAEIPAGEMYVDIEVEANIPGMAGMGFDVGEINNMVDVYPLIASAVNITPTSGGADVEGIEEYRGRLWLLPESFSTAGPDGAYEFWARTANPSIVDAKAWMPDLDLDDFAEFLLPWGITNVPGFYKALFDYFRTSGTGPGNVNITCLLQDGEVPSEEIKQEVLDTLSDNDRRP

SEQ ID NO: 103742 - protein, 258 aa, Unknown
  Obtained from environmental sample
  DOMAIN (72)...(143): HAMP domain
  misc_feature (1)..(258): Xaa is any amino acid
MINRERGITHAVMDGKEKIIAYHGLAVVPWSLAIIIDTEEVILPALTLEDNIIDLKESTLVIFDRDITWIAVIAGVILVFIITGIMSLTGQLATDITEPLEKLTIDAARIGSGDLDHVLEAGTDDELEILATAFNSMITGIKNITAENKRLEITSAEKTREAQVIQETNQNLQSILNMLPVAIGVMSAEDHSFVFANKAFMDVFNCTSIDQILGHSGLEFMPVIQPDGGKTVEKLDEFFKKEAAVTELQCVKSGGDQF

SEQ ID NO: 103743 - protein, 251 aa, Unknown
  Obtained from environmental sample
  DOMAIN (4)...(250): Glycosyl hydrolase family 10
  misc_feature (1)..(251): Xaa is any amino acid
VGVAVPGAITNNGKGVDNALLPYNPQHSLLKHFNAVVAENEMKPENIMPSSENGTYKWANADELVSYAGANGKKVRGHVLIWHDQTPSWFFPSSGSEAERKAKLYENMEKHIKTVFEHFGGSIDTWDVCNEVVDHQNTSDGGAREDSNYTKIMAASGLSGIDRYEYVVKAFQWARKYADENGGENVKLYLTDYGIERRFPGQSVSKIDMFEQLVDYLIEKEAPLDGIGFQGHFRLYDHPVSHISEGIDKFS

SEQ ID NO: 103744 - protein, 279 aa, Unknown
  Obtained from environmental sample
  DOMAIN (219)...(263): LysM domain
  misc_feature (1)..(279): Xaa is any amino acid
TQGYAGKFKEFYDSLPDEKKTKFYRYTVKSGDNLLQIARNFRVSVDALRNVNNMKTNAIAVGKYVIIPIQVNDSVPARLASQLNAVERERPGRAGRRGRRGAATYGQGGGSRQQSGVVTSRSGKKITYKVRAGETLYSISNTFNVAVKDLLAWNYLASPRSLKAEQTLVIYQQDGSSRTETDEPAPFQNRAAAQPQAIQAAATPTQRVRGNTTLHSGKRLVRQGETLYGIAQELGIPVGELALINGLNPRRPQLFPGDVLVYTPNPGHQAPSTSGTAAA

SEQ ID NO: 103745 - protein, 80 aa, Unknown
  Obtained from environmental sample
  misc_feature (1)..(80): Xaa is any amino acid
VFAIEKHGLKGKPHPSFFYHALDCIGLQPNEALFIDDIPRYVEGYIAIGGKGLLFDERDKYAWYTHERIKNLRELSNFMD

SEQ ID NO: 103746 - protein, 277 aa, Unknown
  Obtained from environmental sample
  misc_feature (1)..(277): Xaa is any amino acid
DLKVRLEHERQLLSEKRDARKREAETKLSHARTLLETEKQNLGRLLQSANSEVAETRKLLATKSGAKAGAEKRLADARAETVRDPKEELDAVQEAIAGERASLDEYQRLLTERETALRQRELAKAQKEADEKRIGELDADLQERSREAAEIEASQKILKNEFPVYVIARIVKDLESSMNDFLKRVYGGKYAIKLEDKKNALRMVYGPKGADAGSGLSSGYEKSIFSLAWKWALSRVQNNRTLMMDEVDSAASQNSSLIFYKTIGDSMKLFDQILIVS

SEQ ID NO: 103747 - protein, 250 aa, Unknown
  Obtained from environmental sample
  DOMAIN (43)...(128): YbbR-like protein
  misc_feature (1)..(250): Xaa is any amino acid
LNVRKLILSLAENWPAKVLSVALALILFVFHEMSTLTTRTIIVPLTIETNSALAPATAYPRNVRVRLRGESDGVKSILDSDIEAYLDLDKYESEGQYHAPVQIRRRGSALIPEPLEMTVNPLEISVSLDKRINKTVPLAASVQGNAAAGFELISYSVSPAELAVSGPLRIMESINDIKTDPIDIDGRKNDFNVMVNIANPNPLLLSIRGDAYAEFKCVIRPSVPVRNIDGIAIEITGLDISFEYDLGVKT

SEQ ID NO: 103748 - protein, 85 aa, Unknown
  Obtained from environmental sample
  DOMAIN (27)...(81): HTH domain
  misc_feature (1)..(85): Xaa is any amino acid
GSIVDSIVDKGASIVDGNTEGVDENGPKMRIIEIMRSDPKVSATQLSEAIGIAQRNVQAHIKSLKELGLIERIGSPRGGHWMVRE

SEQ ID NO: 103749 - protein, 292 aa, Unknown
  Obtained from environmental sample
  DOMAIN (214)...(247): Tetratricopeptide repeat
  misc_feature (1)..(292): Xaa is any amino acid
GCRYRNKDSASTTESPPPPPLKLARGTGTPSDISLAKGDAAYLDERYSDALNAYASAARLAPRDPAPIVGTVRATLAKDNAPTTLAADPQNTLVRNCVQKLRTALRLDSTYGPALLELGRALLVLDEATEATTVLDRAVSQLPAEAEAHSALGVALLATGQLTNALRSFRRAVELSPDDVSQQMNLATALLMQGLPADAARVLEKAVQRSPNDARLHSDLGTAYLSANEVRKALPHLHRAVEIAPDRATFRSNLGYGLEVTGDLLGAVDQYRRAIALDPKLGSAWINLGAAL

SEQ ID NO: 103750 - protein, 279 aa, Unknown
  Obtained from environmental sample
  misc_feature (1)..(279): Xaa is any amino acid
TEPTCRHGIPKPPESTEYFSLDLARQLSKDDSIATAQCAIEAVNGADYGAADMLAGEAVIDGTIVTQAVQGGIYGYRYRLIFTIETALGETLTLDGDFLVGNTGPGSRDLTTLQAVKDWLGLKNDVDNAMLQRLITSESMAIERYIGRPVLPETRTDTITGYGTITIVAPASPIQSIEKVLVDGAEVKAIHDRLAIWRADNRPWPQRARIQLTYTAGYDSIPSDIEQACIELVALRYKERDHIGRTSVSLGGETTAFVTRAMPLSTETRLAPYRKVAPC

SEQ ID NO: 103751 - protein, 81 aa, Unknown
  Obtained from environmental sample
  misc_feature (1)..(81): Xaa is any amino acid
VPIDLELTKNGDGLANSQLPMPGDIALFRYGRAISHGAIVIDWPIIIHAYIHAGAVVLDDALANTDLAGRFVGIWRLKDGR

SEQ ID NO: 103752 - protein, 203 aa, Unknown
  Obtained from environmental sample
  misc_feature (1)..(203): Xaa is any amino acid
MGLKYAVLTSVTRDDLDDGGAAHFAANIRAVKESGAMVEVLVPDFRGDLGAVARVVGAGPSVFNHNLETVPELYPSVRSGADCGRSLKILIEAKRIGNAIFGDDFRTKSGLMLGLGETEDQLIAVFKDLARVGVDILTLGQYLRPTRHQLPVREYVHPDTFDRLGNIAKEIGIGTVFAGPLIRSSFSAEEAFDLAVSSSPSHS

SEQ ID NO: 103753 - protein, 292 aa, Unknown
  Obtained from environmental sample
  DOMAIN (145)...(224): OB-fold nucleic acid binding domain
  misc_feature (1)..(292): Xaa is any amino acid
ADEIVNCRKDGPYKDFMDFLNRVDIKAVGKSVIERLIQTGSFDNLGKRREILLGNLEQAVDYVQKIKDSKKFGQGSLFMDTGEKEYPDFKFEEFPEISKADKLKTEKELIGFYFSAHPMDEYQAVWKELVKADLGHPEAFVFGNQILVGLVKNVKVITTNRGDRMAFATLEDYNGEIELTFFPGAWTQCGEKIENDKVAILKGKIDYQQNKDKYSFTVDECLELNEVRIVSDNNLFSIDKNIKREDKEDAQQPDRFANLRKYAKDMELNLLDFSKAEAGSYIAIGTLKSIRT

SEQ ID NO: 103754 - protein, 179 aa, Unknown
  Obtained from environmental sample
  DOMAIN (102)...(178): Sporulation related domain
  misc_feature (1)..(179): Xaa is any amino acid
VDDAKKPTTPAATGAPSVASVNQPSNTQGQAAAAPVSPPNNTQASTPANAAKVDDAKKPTTPAATVNPPVAPVNQPSNPPAKTPTAPVDANTKPAPAGAKPAEILFTIQVGAFASKENADNLVRRLTGKYDDITVTVTASGDQTLYRVRVGTFQKKEDATAYADRLIIEAGLSARVTEK

SEQ ID NO: 103755 - protein, 182 aa, Unknown
  Obtained from environmental sample
  misc_feature (1)..(182): Xaa is any amino acid
MRGILRFASLSMALWIFLPFALFAGGGRQIETKTADGIEIWQTEFDVAGRKPGTWNVIINAKDAAGNIGVGGPYNIKVSPTAGLPEAHVVYPRPDMVVRSDIVEIVGTAESRYGLQQIILSMDGGPYVPLEGLEYWDYHIPAEEIGEGKHTVRVKAVDALGVEGLESRVDFILDNLPPIIEL

SEQ ID NO: 103756 - protein, 141 aa, Unknown
  Obtained from environmental sample
  misc_feature (1)..(141): Xaa is any amino acid
MYGTLKILTGSAHPELAKAICNHLGCQLTPTLTTTFSDGELRVEISDNIRGDDVFVIQPTCIPVNTNIIQLCLMLDALKRASAGRITAVVPYYGYARQDRKVSPRAPISAKMLADFLTVAGAQRMVTIDLHAGQIQGFFDC

SEQ ID NO: 103757 - protein, 64 aa, Unknown
  Obtained from environmental sample
  misc_feature (1)..(64): Xaa is any amino acid
MPKKISIDVTDLDINAAIHVADLTLPKGISAVYSTNYCIVAVHIPGVEEEGTEGAAAEPAAPAG

SEQ ID NO: 103758 - protein, 289 aa, Unknown
  Obtained from environmental sample
  DOMAIN (164)...(240): Helicase conserved C-terminal domain
  misc_feature (1)..(289): Xaa is any amino acid
AFINSSLTSRQISKALSNARGGAYKIIYVAPERLLTTEFVSLAEAIKISMLTVDEAHCISQWGQDFRPSYAQIPEFIAGLPKRPVVSAFTATATPRVREDIVELLKLREPQILVTGFDRANLRFDVQKPRDKYHALKTFLSDKAKRCGIVYCATRKAVEEVCGQLRSDGFNASRYHAGLDDLERHNNQDDFIYDRVRIMVATNAFGMGIDKSNVSFVVHYNMPKDIESYYQEAGRAGRDGEPADCLLLYSGKDVRLNEWMIDNDKDAQYPDAETERLLEERGHKRLRDM

SEQ ID NO: 103759 - protein, 240 aa, Unknown
  Obtained from environmental sample
  DOMAIN (182)...(240): Domain of unknown function (DUF814)
  misc_feature (1)..(240): Xaa is any amino acid
MEPDSTPSPADQIRAVRSRMKALHKREEKKLAKQRAEAEEASRYTRYSQAADTLMADPSIAARGTANAEFKNVHTGEMETIALNPALDALENAELLYKKARKGRRGYETAAANVEETTAVVGKLSVIIDTIEEIIKEKEPQDLDDSDALRVREIAVEFLPDIGVTSSGKKKPVEPQVPFKKYVIDGWEIYLGKNSEQNDEISTKFAKPSDIWLHVAAHAGSHVIIRHKKDTPNPPKDVVH

SEQ ID NO: 103760 - protein, 288 aa, Unknown
  Obtained from environmental sample
  DOMAIN (1)...(137): Domain of unknown function DUF21
  misc_feature (1)..(288): Xaa is any amino acid
NRHLAAARVWISVLRTLAALFAGFYLEHVMHNAGIPFPLATAAITAAIALAILLFGDLVPGIIARASPEKITVNFLPLFEALTLPLRPLIFLAYAGGNAAGKGLRPIFKMKQPAMTEDELRNALMEGEKSGIVESEERTMVEGVFYLGDRSLGAFMTHRSEIQWLDINDPPQDIRAKVLEFRAQRCFPVADGALDAIIGAVYLEDVILDIASDRPSGLRSIMKKALFAPETMPALKAFETFRRGETSYIFVMDEYGGFAGMVWLQDLMEEIVGELTAPVNEEKQAVQL

SEQ ID NO: 103761 - protein, 273 aa, Unknown
  Obtained from environmental sample
  DOMAIN (28)...(273): Subtilase family
  misc_feature (1)..(273): Xaa is any amino acid
MDMVLSASPDYIISVCSVPNDQYIGSQWAVNNIKLPQAWDIVVGGSDVRVGVIDSGIGADHHDLINRVDRTLSRDFSVTPATRPNPSVDYTGHGTQVAGIIGAEGDNKTGVAGACWNVNLVSLKIIDDDSGWGHISDAARAIVFAGNNAIDILNLSMIWIPWKFEHLRYYDPSLPFASIINAFPGLLVCAAGNEDGNNNDIKPCYPASYVLPNLITVGSIDSNNNISSFSNIGPTTVDIFTPGGNIYSTLNNSSYGSKFGTSMAAPYVTGVAA

SEQ ID NO: 103762 - protein, 246 aa, Unknown
  Obtained from environmental sample
  DOMAIN (26)...(246): ABC transporter transmembrane region
  misc_feature (1)..(246): Xaa is any amino acid
EYLDEKVSLFNVKRCLGYIAKAQGHLKLALLLSVIENVVGLSGPLFIKHALDVAVPAGDFRLLLLMAACLGGSIVISIGLGTVRNVMVARAGAGIIHDIRYDLFSHLQKLAFSFYDSRPHGKIFVRVVPYVNNVSDALSNGIINFVIEVLNIIFIIFFMFKVSPQLAVIALLGLPPLFIFMFTIKPEQRRAWQRVSNKNSNLNAYIQESIDGIRITQAFDRQKKNLGVMNQLTDERNHEWMRAIHI

SEQ ID NO: 103763 - protein, 284 aa, Unknown
  Obtained from environmental sample
  DOMAIN (77)...(190): MMPL family
  misc_feature (1)..(284): Xaa is any amino acid
TVFEKSFLEKIRDFSRKVENTDYIKSVNSIMSTRYITGDNDTIIVSDLVPENFSGTDEEITELKRRIASWDLFRGSLVSDDLSATQILITLDALTADFTRPEVTLSVEKIREIAGEIFTDEAEVYITGQPIINTIINKSMISDNILLIPLVVIVLLAMLFFSFRRFTFVVLPFLTVIIAVVWTIGMAALFGIKLSVITTILPVILVAVGSAYGIHIVTHYMEDTRNRQLTLNEHRDLVLDLVRKLIKPVFLAALTTMAGFISFCFTPIVPMREFGYCAGFGVIS

SEQ ID NO: 103764 - protein, 216 aa, Unknown
  Obtained from environmental sample
  misc_feature (1)..(216): Xaa is any amino acid
MEGLFNAEAQLLAMEKAEAEIAVAKRRWEENKRKHQNQETLFEAGGIQTEAILVSRFSLDTELEQIRLMEKEIEIRRIGTRDCDLEKAGFRVPLGEDERVKAIVSMMTASLRAEKEAAFARLEAAEKELSSAKIALEELKVRCPASGVVGARYLEEGERVRPQDKILSLIDTASLYAVFPVREKDALRIKKGMKADVMIDGTGENRRGIVDLIYPQ

SEQ ID NO: 103765 - protein, 183 aa, Unknown
  Obtained from environmental sample
  misc_feature (1)..(183): Xaa is any amino acid
MGIAFDDDWNVYLCDNQGWSGKPELLFKGRVLKITVDDNGVISKTVEVCRNMEHPNGIRIKDGYMYLTNSLMSPVKRPDGKLTSGVYRFALNEENVDIKNDLTDKNLFASFVTLNPECQYGVDGIVFDSKGDLYIGNFGDGEVWRLTFNPDGSLKTQTSFAKDPAQLQTTDGMIFDGEGNLYI

SEQ ID NO: 103766 - protein, 281 aa, Unknown
  Obtained from environmental sample
  DOMAIN (67)...(198): Pyridine nucleotide-disulphide oxidoreductase
  misc_feature (1)..(281): Xaa is any amino acid
VTNIDAGSKNVVLQDGKKLPYDKLLVATGSSPFVPVFEGLDTVREKCTFMSLDDADRLDSMLKEDKRVLIIGAGLIGLKCAEGILKRVKHITVLDLAPRILSSILDDGGAKLVQNHLESQGLEFRLSANVKNFNNNKAFLENGETIDFDILVLAVGVRPNTALLNGIAKIERGIVVNEKSETTAPDIYAAGDCTQTLDVSSGQNKIMALLPNAYMQGECAGINMAGSDGAVSGDADGARFDKAIPMNAIGFLGMHVITAGNYDGQVYVENKKSRTGEPAYK

SEQ ID NO: 103767 - protein, 52 aa, Unknown
  Obtained from environmental sample
  misc_feature (1)..(52): Xaa is any amino acid
IVKVDVVRPGKVRRAKLYYIREKIGKGAKIKELIVKKGAKGVHVPATAAEQE

SEQ ID NO: 103768 - protein, 277 aa, Unknown
  Obtained from environmental sample
  DOMAIN (147)...(277): DEAD/DEAH box helicase
  misc_feature (1)..(277): Xaa is any amino acid
ILEDGDETSLHSGRIVPVYRKLGDLRTRALRQILYSTLSILPAEMPDTLPAYLVRKFRLPSKIEAARLIHFPVLRGESEAEREEELRAYNAGTSRAHKRFIFEELFQFQTAIYIAREGRLRHEKGRRIVIGENVRSAIKKILPFHPTEAQKRVLKEIADDQCSPYPMNRLLQGDVGSGKTIVAAQAAVIAVENGCQAAIMSPTEILAEQHYFYFKRLFAPIGYGVDILKGSLKAKEKKLVRERIRLGETKIVVGTHALVQESVEFSNLGPAVIDEQH

SEQ ID NO: 103769 - protein, 137 aa, Unknown
  Obtained from environmental sample
  misc_feature (1)..(137): Xaa is any amino acid
EQTKKKTVWLCRSEKETVAGFFQTQAGSGEEPDILRVCGLENEALYRVVTHLQRLYISRFGGLVKHLLPVTLNPAGFILRIVNRHYALTDCVETYECRGNLLSSGIPLNNQFTGSYYNNKTRLLGDYGSSLYTIERM

SEQ ID NO: 103770 - protein, 154 aa, Unknown
  Obtained from environmental sample
  misc_feature (1)..(154): Xaa is any amino acid
MKNNSNRNRFTFGLGTIGRDMVYTLISTYLIYYLTDVINLPTSTLWWVAGIILFARIFDALNDPFMGFIVDNTNTRWGKFKPWIACGALLSAAFTVLLFTDFGLKGSSYIAVFAVLYLMWGISFTANDIPYWSMLPSLSVDQKEREKIGSIARI

SEQ ID NO: 103771 - protein, 289 aa, Unknown
  Obtained from environmental sample
  DOMAIN (95)...(289): N-acetylmuramoyl-L-alanine amidase
  misc_feature (1)..(289): Xaa is any amino acid
TLSGVSKGEFAQFRWDPLLQNGVFNLGDHFGAFSTTAVKGETGFLVINNRELFNVPLPYNDNGKLEFPENFVITLKDAFTKSFENDASRFHITTIIIDPGHGGKDPGAMARQVINGKTVQVSEKDIVLKSGQLLKDLLNQTYPDKKIIMTRDTDIYLTLDQRAEMANAVTVKDNEAVIFISIHANSSINASARGYEVWHITSNYRRSLLDSSKHNYSPDITVILNAMMEEEFTTESIILANSILNGLGKELGSSVPSRGRKANDWFVVRNSRMPAVLVELGFVSNRNDA

SEQ ID NO: 103772 - protein, 160 aa, Unknown
  Obtained from environmental sample
  DOMAIN (45)...(140): ParB-like nuclease domain
  misc_feature (1)..(160): Xaa is any amino acid
VTTNNKRGLGRGIAALLPEEDDAALSPAPEQDRENQKTPGDAAVELVSIEKIKTNPEQPRKIFNDEELAELADSIREHGIIQPVIVEETAVSETGEVNFTVVAGERRIRAAKIAGLSEVPVIVRKYSEEKRMAVALIENVQRADLNPIEEAAAYKRLMEL

SEQ ID NO: 103773 - protein, 130 aa, Unknown
  Obtained from environmental sample
  DOMAIN (68)...(125): Bacterial regulatory proteins, luxR family
  misc_feature (1)..(130): Xaa is any amino acid
KNQLEAGFNNFIYCGIFGIVLLILNLFIFYLYIKLITGYQAKILAIELDDTPPVYSPANGLSETFIKKYDLSKRQVEVTVALLQGKSNKEIAKALDIEVNTVQVHLQNVYRKTGSPGRYALMALIGQGSN

SEQ ID NO: 103774 - protein, 276 aa, Unknown
  Obtained from environmental sample
  misc_feature (1)..(276): Xaa is any amino acid
MSEFLGAKFIDAYPLIQFDSQYRITPKSYEDIAFALSDTNPIYVIPGFYGSDTLGNLKTFTRGGSDITGGILANACECRLYENWTDVSGLLMADPRIVQNAHSINYVSYREIRELAYSGASVLHDESIHPCRAKNIPINIKNTNSPGDQGTIIGPTPEHTSCIITGIAGRKDFSMLYIEKSMMNKERGFGRKVLTILEERGVSYELSPCGIDSMNVVVDSKTLHRVEAEVCAEIEQKMQPNKMKIFDNLALIATVGHGMVNQIGTAARLLARCKRK

SEQ ID NO: 103775 - protein, 162 aa, Unknown
  Obtained from environmental sample
  misc_feature (1)..(162): Xaa is any amino acid
MAMNKGFVFDNPWILSGMVIIIPLALSDLLSPLRKRIRGKLPKPIRIKLFSSRLFFYLFLAFLITALAGPRWGVGQARSEYRRAVDVVIAVDVSKSMLARDGGGGITEGITRLKQGLLIVKEAVAELGGMRFAVAVSRNRGILAVPLTWDDGAVLAFLETID

SEQ ID NO: 103776 - protein, 284 aa, Unknown
  Obtained from environmental sample
  misc_feature (1)..(284): Xaa is any amino acid
MDTFVYWKDYGFLTQELALSNYSRLSKPSHMEQNTSLAVIIALSAAAFFLMSIRRKQIIISALFIAVISFTVFGITDVVKTGAAFTDMKKSGIKSNNNQLDTIEHTFKFSKNGKNVVVLMMDRAQSQHIPFIFEEKPSLLKSFNGFTYYPNMVSFGGHTFYGAPALFGGYYYTPVQIQKRTGELLKNKYNESLQVLPRMMAQNGFDVTASNLPFTDISEAFAEQMFADAENIKATDIIDKYINRYYRGRLPIANKPIEVKDYDPILKKNLFQFSLFKCSPYAMR

SEQ ID NO: 103777 - protein, 289 aa, Unknown
  Obtained from environmental sample
  misc_feature (1)..(289): Xaa is any amino acid
AELSGISRGTEAARKRLAEAGWTWNREGWLVAPDGRGVPMTKILCPPSTVAATTVEMAQLMAEALISIGVPAEAEPMDFQTMLARVNVQAFDACTNAWSMTRDPDGLYSFYHSSMDVEGGYNLSGIADPELDAELAALRYAPDEAAARKAASRAQKLLAELMPVIPIYSRYSISAVREGWDGIFSTDRSTADNLLTLISMTPKGGGERPIYWNISEEIRTLNPLVSSTAYDWTVLGTVYDTLLSVNPYTFEDIPWLAESWTIGTSPSGQTVLEFTLRPELVWQDGRPLT

SEQ ID NO: 103778 - protein, 98 aa, Unknown
  Obtained from environmental sample
  misc_feature (1)..(98): Xaa is any amino acid
MANEICLDILGTSFTIDADEDETYLQKVLEQYRSAVENTQSISGITAPLNVAILTGFMLCDEINKIKQQVEGQSAELQQRTGNLIAKLDQALKACDGN

SEQ ID NO: 103779 - protein, 298 aa, Unknown
  Obtained from environmental sample
  misc_feature (1)..(298): Xaa is any amino acid
SLCLSHKIDTQKIVKGIQNICFDNAVWAYTIGTAVALKSGTKDPVAAAKYIGEGIQAFTVPGSVAELRQVGIGHGNLAAMLLDENTRCFCLLAGHESFAAAEGAIGIVNAANKVRKNPLRVILNGFGKDAGYTLARINGFTYVDSVYDHAADSLTIIGEKAFSRGSRKDIKVYSSNDVMEGIAVMKHEKVDVSITGNSANSTRFQHMIAGSYKKWAEANGQSYFSVASGGGTGRTLHPDNLGAGPASYGITDSLGRMHGDVQFAGSSSVPAHVEMMGLMGMGNNPMVGATVACAVAVV

SEQ ID NO: 103780 - protein, 269 aa, Unknown
  Obtained from environmental sample
  misc_feature (1)..(269): Xaa is any amino acid
MVLASRFVWLVTEKKRCVSEILTLTFTKKAAAQMYRRIHRLLVEFARNDESEKKELALRALDEFAQARIQTLDSYCAAIVKQAANRYGISPDFIIDEDRCYRLAEDEALPFLISNRNHPAIKKLYPWKSPVRIADDIFTYALFKLTHIDSPPDPKKHFSSQCDIVCGEWERQCGIIHGKLRELMEADAKAHTEKENYHPDLGPLINIFSSGGVVFTEARKLRAFFNELINCQDSKINDNKFIECTESKTIGDEITGLLEYLSSLCSLNL

SEQ ID NO: 103781 - protein, 147 aa, Unknown
  Obtained from environmental sample
  misc_feature (1)..(147): Xaa is any amino acid
MDVVLLGIHPNTPMGQGISAYTNMLIAAIEKNPCVDIITHPNDPSYPVDYKRLAQAAKANGVALELNNSKILYARAEAQSAVDLVTVCRDEGCLMAVNSDTHAIHELGLDDSVRPILKSAGFPEGLIINRDEKSTMEFIDSRRKNKV

SEQ ID NO: 103782 - protein, 158 aa, Unknown
  Obtained from environmental sample
  DOMAIN (2)...(89): D-isomer specific 2-hydroxyacid dehydrogenase, NAD binding domain
  misc_feature (1)..(158): Xaa is any amino acid
ADIITLHTPLETGGKYPTKYLANKEFFGKTKQGTWLINAARGAVCNSEALREALQSKHLGGAVIDTWENEPNIDASLLPLVEIATPHIAGHSAEAKINANKMIIDSLCKFFKVECSIRFDIPSNKTGFYSIRADDLAFRKNPENFTEIRNGYERIYVN

SEQ ID NO: 103783 - protein, 110 aa, Unknown
  Obtained from environmental sample
  misc_feature (1)..(110): Xaa is any amino acid
MRVPLVTVDHCVSENSLSGPFLLKLDTHGFEKQIFEGALETLKDTNIIIVEAYNFKIAKDSLLFNEMCDYMLRKGFRCSGIIDVVYRPKDNFLWQMDLIFVKETRKELAT

SEQ ID NO: 103784 - protein, 281 aa, Unknown
  Obtained from environmental sample
  DOMAIN (1)...(281): Beta-galactosidase
  misc_feature (1)..(281): Xaa is any amino acid
AAHPAWMARKYPEILRVNSDGSKRKFGGRHNSCPNSLIFRQYSTRLARRLAERYGKLDNLIAWHISNEYGGVCYCENCEKAFRQWLKRKYKTIAALNEAWNTSFWGHTYYDWDDIVPPSHLSEEWSVNHTTCQIQSIDYRRFNSDSLLDCCLAEVEVLKEITPNIPITTNMMGTFWDLDYFKWGKNLDFISWDNYPSPDTPYTRTAMNHTLMRGCGEGKPFYLMEQTPSVTNWQPYNSLKRPGIMRLWSYQALAHGSDTVMFFQMRRSRGCCENFMGLLSI

SEQ ID NO: 103785 - protein, 284 aa, Unknown
  Obtained from environmental sample
  misc_feature (1)..(284): Xaa is any amino acid
GLQVGWFGKIVKDKFNMELNIIPSTDGVYQTRMSSGKLGDLIIFGSDGAEYVDAIEANMLLDWYKGDLLDKYGEYIKKNMPTALKKNSDVFGGGTKCYGFGYDVSSSAKYIDAAFYHPDIRFDLYQRIGSPRIPNMMSYLDVLKRMVDLEPKSDSGLPSYAFSLFKDWDGDLVMSVKCMGAFYGYDEFGFTLYDVESNTVQPVLDDDSLYMQGLKFFNTAYRMGIFDPDSATHTFSDVVEKYADGRVYWSLFNWLGPSNYNTPERLAQGKGMFAVAAEDQKILF

SEQ ID NO: 103786 - protein, 196 aa, Unknown
  Obtained from environmental sample
  DOMAIN (1)...(42): 1-deoxy-D-xylulose 5-phosphate reductoisomerase C-terminal
  misc_feature (1)..(196): Xaa is any amino acid
MENVTVKDALSHPTWNMGQKITIDSASMANKGLEIIEACVFFNMSSEKIKVVIHPQSIIHSMIRLCNGVIYAQLSKPDMRHPIHDALYWPVTTKSTLEPISFDSLSLEFSKPDTEKFPMLTYAWEAARRGGLYPCAYNAANEVAVQAFLEQKIKFLDIPKITERVMQADWSCGSMNLETVLKADADARRRAKSLII

SEQ ID NO: 103787 - protein, 267 aa, Unknown
  Obtained from environmental sample
  misc_feature (1)..(267): Xaa is any amino acid
ENLCDVCAIYPRLYKLVDKKLERCATLSCPEVVRVALFSEEGIAFEKVEESPSLGRIPARAPSLVPSLTKNAAKPVKFFVDVRLLCLSILQSREYTLGRRLMLLGMLCRKIDELDATGRVEEIPAMLERFGADVESGTFKAELDSVEPNFSIQMRFAKELTDERLKAALIASQPYLENVVETLAGIGFVVGAEPEDTVKKYMENRETYVAPYLKDKEYVLENFLVNEFFAHLMPFGSGETAWDAYLFLCVLYGMVKLHINGMAGCRK

SEQ ID NO: 103788 - protein, 285 aa, Unknown
  Obtained from environmental sample
  misc_feature (1)..(285): Xaa is any amino acid
LAFPIRSWALCLFLPKRPLLYQQEVDLTLSLWINNRWFVEANFVDDSALNTYRAGYQGKPGEFIQYAVIGNAGLDFPSYPYLDLGGDSPSSFGFYGRFGTDELGIHTLVRYDAASREERTFSGDRERTYSDLQPQNAIRGISFILPDTDINPDITIYIEDDKGQVRDSTGRHWRIARQSEYAFSRTQGLLELSIRPTGMVAVSYSKGGDNPWRSSMGKYGDANGFLASVQKWFDPTRAVIKMENYPQCGNGSTLPGEISFGGSRALVIYQPGTFSPFEKRNRYDA

SEQ ID NO: 103789 - protein, 292 aa, Unknown
  Obtained from environmental sample
  misc_feature (1)..(292): Xaa is any amino acid
DTVDVTVNQKQDVNFVVKPRYWIDKNEVLERITGNEYDKKPVPKWLMGWRDITNPQTLRTVIVGAIPLSGVGNNMPLIIFNKKMKPEYKILLFSNLNSIVFDFVARNKTGGTHINFFLLKQFPVLPPNAYSQDDIDFIVPRVLELTYTAVDLIPFAEDLWDCADSKMRRYFLEQRHGTQAAEFEEFTKYDTAHLPEKTESQGKQTELADFLQPFVFNPERRALLRAELDARYARLYGLSRDDLRYILDPADLMGEDYPSETFRVLKKNEIDEYGEYRTRRLVLEAWDREEGV

SEQ ID NO: 103790 - protein, 285 aa, Unknown
  Obtained from environmental sample
  misc_feature (1)..(285): Xaa is any amino acid
ISDDLYRNSLRDVISSCIYGVDLNPLAVELARMALWLESHEPGKPLSFLDHHIRCGNSLIGVMDFDVLSKGIPDDAYKVLSGDNKDIVSAFKKRNKNETTARERKQFALFEKSVDLAETALVDLHLQIDKIQNNTLEDIEKKQTLFENLFKRDEYHKIKCACDLYVAAFFAEKKNKDSIVPTTADVDRASAGLDESSFSAGVEDEAERIATENRFFHWHLEFPEIFAVQSHGGFDCVLGNPPWEQVQLEEKKFFASRKIEIVDAPNSAIREKMIEALLDGHDYDK

SEQ ID NO: 103791 - protein, 262 aa, Unknown
  Obtained from environmental sample
  misc_feature (1)..(262): Xaa is any amino acid
MLEAIASREYGMLSIKTKGKKPKAEKQVSGRSVADLLASAFLNETVRRRFLSFKEAFYKYGTGDEYRDLLFLFFQGIRMDVSSPAQRSLPAAIDRWLSPLHIHFDAYRYSLTVKAINTKEDSETALQYALSMDLLTETENGIKSTPISQVSDLEMLRAPTALSNYLPEIRELASPSKTKRGPAVPLSEERLVSFLDSASVLLTRLGMTVTLPKALHRELKPRLVIKENDSKKKQGSLVRFLGLEALQNFVWQIAIGDQTLTL

SEQ ID NO: 103792 - protein, 154 aa, Unknown
  Obtained from environmental sample
  DOMAIN (16)...(62): S4 domain
  misc_feature (1)..(154): Xaa is any amino acid
VRKSWRFTVEPGEAGERLDMIIPARTGLSRRAVREALKIGGVQVNQRRVRVAGRTPQPGSEIRIAIDESLGAVPNFTPEVLFEDDWLLVLNKPPNIPTQGTEVSDRHDFMAVARRHFQPQVLYLVHRLDTGTSGAILLAKTSKAAAEMGKMFKE

SEQ ID NO: 103793 - protein, 292 aa, Unknown
  Obtained from environmental sample
  DOMAIN (197)...(213): KWG Leptospira
  misc_feature (1)..(292): Xaa is any amino acid
EIVPLTYDDAGRFINSWAFVRIGDKLVFIDGTTGKEVASSTYYNSVGDFREGLAVAMSGNKWGFIDEAWKEAVPLKYDYVGGFSEGLAAVKLGEKWGFIDKTGKEILPFTYDGAYSFSKGLALVRRGNAYSFIDKTGQEVVRLPQYDQVYDFRDGWVMVRRGNKWGFIDETGKEVPPKYDRVDDFSGGLAGFMLGEKWGFIDETGKEAAPPKYDEVGCYVSDGLASVKLGGKWGFIDKAGKEVVPPKYEALQTPDDYCYGPRIDFHKGFAKVKLGGKWGFIDKTGKEVVPPK

SEQ ID NO: 103794 - protein, 270 aa, Unknown
  Obtained from environmental sample
  DOMAIN (29)...(269): Pyridoxal-phosphate dependent enzyme
  misc_feature (1)..(270): Xaa is any amino acid
MCYADIAFETIKPYVQGEIPDSTLEDIVRSAYTFDAPLVGVGDRFVLELFHGPTAAFKDFGARFMARAFAFLRRGEDKPLRILVATSGDTGGAVADGFFEVPGIYVTVLYPKGRITPLQERQIAGLGGNISALAVEGSFDDCQRLVKAALADEGLKKKMELSSANSINISRLIPQAAYYTAAAGCAAAAGRAPAAGRAGVGITLCVPSGNFGNLTAGLYAMKMGAPIKAFIAATNINKTFPDYLTTGEYRTMVSQATISNAMDVGAPSNL

SEQ ID NO: 103795 - protein, 95 aa, Unknown
  Obtained from environmental sample
  DOMAIN (7)...(95): Cobinamide kinase / cobinamide phosphate guanyltransferase
  misc_feature (1)..(95): Xaa is any amino acid
MLHPQSVLFTGACRSGKSSLAQAWCERRPGIKAYVATAGIHDAEMAERAARHRAARGGEWRTVEQAGGLPLAQVLRDLPPDTGAALVDCTTLWLA

SEQ ID NO: 103796 - protein, 139 aa, Unknown
  Obtained from environmental sample
  misc_feature (1)..(139): Xaa is any amino acid
MSRPVFSVIIPVHGKWELTRDCLTSLRAHSLDWDCEVLVADNASPDATATELAPLGESLFGQRFRLLRLAENRNFGPACNLAAREAAAPLLFFLNNDTLLTSGWAAPLLRALQRDKAPGAVGPLLLYPDQTVQHLGIAF

SEQ ID NO: 103797 - protein, 281 aa, Unknown
  Obtained from environmental sample
  DOMAIN (185)...(266): Bacterial Ig-like domain (group 2)
  misc_feature (1)..(281): Xaa is any amino acid
MKDLYYSAAMRNLLDRGYDFLIVHSAGNYLQDAIYNGLFSHITDPVLRQRIITVGAVDSSYQMAVFQTHPLLGAIAGSNYGSLVDIVAPGVSIYSSIAANDSSYASYQGTSMAAPHITGLAGLVWSADPGLTGPKVKQAIVDSARASGRRVTDARPEVPAGERRTYYLANAKAAVDKVIGGDNVPVTGVMLDKTSTVIGIGAMETLVATIAPGNATNKSVTWISDNPSVVSVSGSGLNATLIGMAAGTATITVRTHYNGMTATCAVTVSPGGRVPVTSISL

SEQ ID NO: 103798 - protein, 294 aa, Unknown
  Obtained from environmental sample
  misc_feature (1)..(294): Xaa is any amino acid
DTSRYTPVQVGNKTKDWAVVSCSAHPLAIKKDGSLWEWGMALFRDNDMPGYIVFIDPLPVRRVGSANDWSAASSNGMHMMAVKNDGGLWAWGLSESVEVGDGHPWREAPVRVGADSDWKAVSAGSFYKMALKKDGTLWAWGLNDYGQLGLGDTTNRSAPVWLCLQRPVIVSPKTATLAPGGAQTFTAEVVGSANTAVTWSASGGTITPGGVYTAPTSAGTYTVTATSQADTSKKDTATVTVVPSGSVASVALDKTTMTLTAGGDMWGWGSNSYGELGDGTTEGKAAPASVGASC

SEQ ID NO: 103799 - protein, 227 aa, Unknown
  Obtained from environmental sample
  misc_feature (1)..(227): Xaa is any amino acid
VKFIRFAENCSFNLCLFALLLTGLILAGSAFPPPLHGADWAFPAAPCGHRGSVSALFQKDNFIVSAGEDGFLGIWNISSGAAVDRFQVSQRKIIAMAGRPGKDEACVVENDGLGLYWISVWNYRERRKIFALQFRDAIGYISYSAGGNFIIAARTGRTALVMIDANSGSLLQSPESLTGTIDIAVTGGSERNMMVYLTSGEISYWDIRTGNRTNAFSAPPKYAFTAL

SEQ ID NO: 103800 - protein, 147 aa, Unknown
  Obtained from environmental sample
  misc_feature (1)..(147): Xaa is any amino acid
VTVGRNHVNLKKSPIEENVPATKARVKKTAKKTVKKITPEEIWTGFDRIEKILAETAKAHKETEKTLNDAIGGLSNKLGSLVEHIMTPDLPRKFKEFSFTFDRITTVKWAVDGSLYAQIDGLLENGTQAMVVEVKTTMHRKDVDEHV

SEQ ID NO: 103801 - protein, 138 aa, Unknown
  Obtained from environmental sample
  DOMAIN (4)...(132): Oxidoreductase family, NAD-binding Rossmann fold
  misc_feature (1)..(138): Xaa is any amino acid
MEKIKAAIIGLGRIASLLEEDPRREKPCTHAGAITTNTDCTLAGGSDFDEERRELFAERWRVPVYSDAAEMIREQNPQILVIATHPDSHYFYCRLAAEKKIPVVICEKTPGGYACGCQKNCHTSQAVFRHGNSNKPAS

SEQ ID NO: 103802 - protein, 95 aa, Unknown
  Obtained from environmental sample
  DOMAIN (20)...(91): Glu-tRNAGln amidotransferase C subunit
  misc_feature (1)..(95): Xaa is any amino acid
MELVTREDVLHCAALAALDLDESEIEPLRRDMEQLLSFADRLDALDLGDAKPDMHVVEPPPRRREDTALPSLSQAEALMNAPRHDRGCFIVPKIL

SEQ ID NO: 103803 - protein, 204 aa, Unknown
  Obtained from environmental sample
  misc_feature (1)..(204): Xaa is any amino acid
MKRRILVLDDFHCIEDPSVIHFVEVCILQNMPPGTSIFLISRSTPRVNIAGLVYRDQIFNMSENDLRFTDNELAQYFRQLSVPFQANTLREIMQDTEGWAFAINLIARSYQKAPGYGGYVRNAMKTNIFRFMETEIWDEISEGLQNFLVRLSLIDHLSIDLITQLAGDEKGLIDDMEKQSAYVRRDSYTNAYLIHPLFLEFLRQ

SEQ ID NO: 103804 - protein, 243 aa, Unknown
  Obtained from environmental sample
  DOMAIN (70)...(231): DHH family
  misc_feature (1)..(243): Xaa is any amino acid
MAKWEKKDVDKELVKAIANEYSCGLLTAFILVRRGIVGGEIPYFLSGDAPLHDPLLLPGIREAIGRIRQAIVSKEKVLVFGDRDVDGITGTVLLVDCLQSLGIDAVWRIPIEDEPYGLSAKAVEDFASKNGKLIVTVDCGISSHAEIEYAMRLGVDVVVTDHHTPKEVLPNALAIVNPKLSNSSYPFPEISGCTVTYKLVCALQTFSGIPDFGRKNREYIQLACLGAVGDIVPLRNENRLIVQ

SEQ ID NO: 103805 - protein, 204 aa, Unknown
  Obtained from environmental sample
  misc_feature (1)..(204): Xaa is any amino acid
MAKERLDPNPSSFVHSLRSVGYSLETAVADIIDNSIAAGATSIKIFFKDIDTSPVFAIIDNGNGMSAPELKEAMRLGSTSPLEKRSNNDLGRFGLGMKTASFSVCKCLTVASASGGKVAGTRWDLDYITENNRWDIEIIPEKEIKHIPFIEHLPDNGTTIVWEKIDRMIDGSAKNPKKELEATIAALESHLSLTFHRYIDGERG

SEQ ID NO: 103806 - protein, 219 aa, Unknown
  Obtained from environmental sample
  misc_feature (1)..(219): Xaa is any amino acid
MRIEQGFTGRDTSNDKFTQIGVGLTDYDPKYQPVSFTTVHKDFNKNTASQVGANIQNFSNPVVFVIKKNCKTLQNLIDWLKQSIQSNDEMAKIDDVPMMLIDDEADNASINTKQKPDEATKINALIRQLLGIFKERCYIGYTATPFANIFIDDTPIDGIGEDLFPRDFIYCLDAPSNYCGANRIFCKPEADSIVRTISDHQDESGKGGILPLKHAKGLP

SEQ ID NO: 103807 - protein, 260 aa, Unknown
  Obtained from environmental sample
  DOMAIN (1)...(173): Initiation factor 2 subunit family
  misc_feature (1)..(260): Xaa is any amino acid
VYAAFDEGIKVHVWVDETRPRNQGAFLTAWELGQHGVSHDLIPDNAGGHLMQHGLIDIVITGADRVTRQGDAANKIGTYLKALAAKENNVPFYAALPSSTFDFAMRDGLKEIPIEERDASEVRYIAGKTAEGKIETVQICPDSTTARNWGFDVTPARYISGLITERGICRADEKEILALYPEYAGGPQTNMAAAQLSGEGYVKYTTIHTRAPAIEVSHWAELNNARTVLFNLGLLGVNPQGVRFGNVSIRYKGDEFIISG

SEQ ID NO: 103808 - protein, 272 aa, Unknown
  Obtained from environmental sample
  misc_feature (1)..(272): Xaa is any amino acid
MFLERYRDLLMPGGRLITIIDETILSSPDYNYVREFIRKNFIIRAVISLHGDAFQQSNARVKTAMIYLEKKKRLSDKQGSVFMYSSIYLGVDDLPVTTNPSKVRDARELANKEILTILDEFKKYRNGENGDWLVDINRLQDRLDVKYCLPLVGRFVKTWEDSGTEIHILSEICTPRDEIIEPRKDFPNDEFRILSITYDGHCRSEERRIGKEINYSKMKIVRTGDIVFSEYNAFHGAIGYITEEFDGALASGSYTVVKCNDDKNSLYLWSVL

SEQ ID NO: 103809 - protein, 283 aa, Unknown
  Obtained from environmental sample
  misc_feature (1)..(283): Xaa is any amino acid
ARIPEAPYGIFGILDEPYTPPAAQIVVITNTCDSAVTLVQPKAEDFVVGNLSKTILRALGDTASFTVQPKANLSGGDIYAEEIIIACGPGGASVTVPVLFTVRGDSKLKIGVNPTSVNFGTSKYPYTTPPGRTTVTITNDGSTDVTLLQPASLSPAASYYTIGTLSSTSVWKKGGTVDFTVQPKAGLDVGNYDASIDIHTSDGTKVATVAVYFTVTDPTKPVGVYTIKFNPVGGEMDPDLAEQKTVNGMLMSLPFASKLGYTLEGWMRSDGRPVTTSTQLPRT

SEQ ID NO: 103810 - protein, 260 aa, Unknown
  Obtained from environmental sample
  misc_feature (1)..(260): Xaa is any amino acid
VDPSGRPVQGALVEFGLYNYAEFYPLASPLTNAQGRASLPTGKGDLRIWASKGDLAGSGLLKGDDEEEIVIKLAPFKAVERLELLDICPPSEPMPEPPSVSREAIEANRQRLAKEDQIRESHMATFATEAQTRRLAVEFGLYNSDLWPMLQKSQGNHLEITKFLRGARQDAIGEAMALLASVSEKDLRDTPASVLNDHFSIITDEMLLDGLEFSPMEYRRFIDYVLCPRIHNELLSPWRSGILEYFGEAELASFKKNPSL

SEQ ID NO: 103811 - protein, 268 aa, Unknown
  Obtained from environmental sample
  misc_feature (1)..(268): Xaa is any amino acid
MGAVAVPATYLLTKKDFEYRINAASIKMLITTPRFGVIQAMEEALPACPTVKKLVVFGGNVPNSRWIDLDAEWEAAAETPVKRNNVKTDMMLMAFSSGTTGYPKMVWHDYTYPLGHILTGCFWHRCEEGGLHFTISDTGWLKSLWGKMYSQWLAGSAIFTYDFDKFIASDILVKMEHYKVTSFCAPPTMYRYLIKEDLKNYDFSSLRHCTTAGEALNPEVYKVWQKATGIKIFEGFGQTETTLSCWTGFPWIQPRLGSMGLPSPGYHM

SEQ ID NO: 103812 - protein, 241 aa, Unknown
  Obtained from environmental sample
  DOMAIN (88)...(146): Transglutaminase-like superfamily
  misc_feature (1)..(241): Xaa is any amino acid
DRVEVFAVGSEIKPSSIKQEATAFSKTHVQSTNLIPSDNQKIKAAVNSIMGREQNPYLKAKAIYEWIISNMQISDLAFYSDLIDALERKQADPYAAAILYTAMARAAGVPCIPVAGVLINQNGKTVRHYWTEFWIDGFGWLPVDPAMGAGVFQIKDIANQRSDDEPLSARDLANFYFGNLDNQRITFSRGETVLSQIESRGRLVSRPQSYSLQNVWEESVGGLESYSSLWGDIVISGVYVQ

SEQ ID NO: 103813 - protein, 266 aa, Unknown
  Obtained from environmental sample
  DOMAIN (52)...(110): GHMP kinases N terminal domain
  misc_feature (1)..(266): Xaa is any amino acid
DTLRFEFGGLDGEIRLFTNWETPAEGIPDGKNLIIRAISLFREQTGFKKGLDVRLDKRIPPGSGLGGGSSDAAAALLALNLLSGTPLSMQSLTEMAAVLGSDVPFFLTGGAAFVSGRGETVEPVKSPGQLWVVLVKPAFKSDTALAYSLLDRLRKKGIIVEKARIPKETLILALEDDSEKWPFFNDFLPVFLCKEHSEFADIYGGILGSLNGSGASFAGISGSGSCCFGIFCTKIKAEKTVERLRKEGNIAISTFFLAHRADPVLE

SEQ ID NO: 103814 - protein, 282 aa, Unknown
  Obtained from environmental sample
  DOMAIN (27)...(232): Calcineurin-like phosphoesterase
  misc_feature (1)..(282): Xaa is any amino acid
EYAYRVGDGSEWSPVYTFKTADPGGAYSFIAVGDPQLLNAREGEAWKKTLERATAKAGNPGFLLSAGDQADKSNNMEQWDFVMAPKTLRSLPVAAAIGNHDTFDFIGEPVEQVALMPIHYNWPNYYELTVDKSDDLYVRAGGNYYFSYGNTLFIVLNSNVKGVEPHRDFMKKAVASHPDAVWKIALFHHDIYGTGDHAGTAYQDAQKMQPDWSPFLDEFGIDFVINGHDHVYGRSMFIKGNKVQSAQMSANLDPLGTNIVKPNAGVYILPAGIQYIALSGSA

SEQ ID NO: 103815 - protein, 230 aa, Unknown
  Obtained from environmental sample
  DOMAIN (23)...(224): PP-loop family
  misc_feature (1)..(230): Xaa is any amino acid
MRRFETNVLNQIRRRGDGVEGCPVLVACSGGGDSVALLVCLVGLRESLGIDIKAAHVDHGLRPESKEEAHYVEELCKKLGLGLTACSLDVATHASSTDQGLEMAARELRWAWLKEQATEIGAPWIATGHTIEDHTETVFLRLARGSGLGCLSGLPAVQSPRWSPLIECHREDLRHYLQAQGVEWREDYTNDQGFTPRNRWRKHLADFRNEAPSIDRHLWETHRQAADLLE

SEQ ID NO: 103816 - protein, 284 aa, Unknown
  Obtained from environmental sample
  DOMAIN (1)...(98): ATPase family associated with various cellular activities (AAA)
  misc_feature (1)..(284): Xaa is any amino acid
MLVEMDGFETNAGVILIAATNRPDVLDPALLRPGRFDRRVVVDRPDIKGRHEILKVHTAKKIPLDTDVNLETIAKGTPGFSGADLANLCNEAALGAARLNKNAVGMADFESAKDKVYMGNERRSLVMTEEDKKVTAYHEAGHTVVGASLPVLDVVHKVTIIPRGRALGVTWLLPERDKFNTTKEYMEAQISFAMGGRLAEEIFFGHLSTGASNDIKQATSMARAMVTEYGMSEKVGPLNYSAGEHEIFLGRDFTQHKDVSQDTAKLIDSEIRDIVMRNYQRAKE

SEQ ID NO: 103817 - protein, 75 aa, Unknown
  Obtained from environmental sample
  DOMAIN (1)...(46): Bacterial RNA polymerase, alpha chain C terminal domain
  misc_feature (1)..(75): Xaa is any amino acid
VRSSNCLKNANIKTIGELTRKTEDDIAKTRNFGKKSLQEIKEKLKEWNLSLGITDMNVLKSAVKVKSQKEEEDET

SEQ ID NO: 103818 - protein, 78 aa, Unknown
  Obtained from environmental sample
  misc_feature (1)..(78): Xaa is any amino acid
VRREPRLALDGGKDGLGIIREIIARAPDYLEPQGTLLLEASPEQMKSISQELEKNRYINIKAYNDLSGLERVIEGTKP

SEQ ID NO: 103819 - protein, 228 aa, Unknown
  Obtained from environmental sample
  DOMAIN (17)...(228): Homocysteine S-methyltransferase
  misc_feature (1)..(228): Xaa is any amino acid
MSADSYTELNALIRERIIILDGAMGSMLKGHGLSDPLCLSNPELITSVHEAYLEAGADIISTCSFNANAVSLADHGMAEKAYEISRAAGTIARQAADKFSTPGRKRFAAGSMGPMTKSASMASDLNDLGKRSISWDEIEAAYYDNARGLLDGGVDILLLETIFDTLNAKAGIAAVIRLREERKLRIPLIISATVSGAAGRLLSRQTLEAFAVSVSHAEPFAIGLNCSF

SEQ ID NO: 103820 - protein, 287 aa, Unknown
  Obtained from environmental sample
  DOMAIN (3)...(157): Pterin binding enzyme
  misc_feature (1)..(287): Xaa is any amino acid
VQFLNNALFNPEIARFPVMPDSSRWEILEAALKCIQGKPLVNSISLKEGTAEFLRRAALIRRYGAAVMVMLIDEKGQAIDYARKIQIAERSYKLLTETGFPPEDIVFDPNVLTIATGIAEHDSYALDFIRACSWIIDNCPGVHVSAGVSNLSFSFRGNEEIRNALHTVFLHHAIKAGVSMAILNPADLVPWDEVRKELRDAAEDAVLCRNGNGGNYADRLLAVSSKEAAEDKGESSKKKDEWRSWSIEDRISYALVKGIDKYIAEDTLELFDLGKSYIEIVEGPLMR

SEQ ID NO: 103821 - protein, 126 aa, Unknown
  Obtained from environmental sample
  misc_feature (1)..(126): Xaa is any amino acid
MKVYHGSYMEISVIDLSKCELGRDFGRAFYVTKLREQAEFWAKRKGRINNSNGYVTEYNFFENAFEHCNLKVLRFEGYDEKWLDFVVVNRRLDAPLHDYDIVEGPVANDDIAQRIFAYLAGAISKT

SEQ ID NO: 103822 - protein, 177 aa, Unknown
  Obtained from environmental sample
  misc_feature (1)..(177): Xaa is any amino acid
MKQVRKRLFINRTMSARERVKLIKWATENEYNTLVFPLDDKFFKGGGGKYIKLAKYYAFYIEAGGHDLSLFLPRNLFLLNKELFRMEQGKRKINIHFCPTNPKTTAIIAKQAKKIFIRAMQKTTPDRIFHLMPDEGCENVWCQCPPCRAFRPIDQYIIAVNAAANVLAELDPQAKLS

SEQ ID NO: 103823 - protein, 284 aa, Unknown
  Obtained from environmental sample
  DOMAIN (135)...(157): MORN repeat
  misc_feature (1)..(284): Xaa is any amino acid
MDKDFADIIQRMASEQGKEVLVNGKAKMFLGDYCGGQFKKEASVFRQILDANCGEHINNADNIPVRKQKLMQRLEEDYSLSPKATAEYLDLLVLILKGDTKIKQTLDNGDVYEGDWFNGKPHGKGKMTYADGMVYEGDFVNGEQNGKGKRTRPDGRVYVGDFVNGKTHGKGKVTYPDGVVYEGDFFDTKFHGKGKYTWPDGEIHEGDWVNGKLHGKGKITYPDGRVEEGNWKDGEFVRGSGSSPASSPSDAVQALYEKGKTSSEQNDWDAAIQAFTGVIMINPN

SEQ ID NO: 103824 - protein, 266 aa, Unknown
  Obtained from environmental sample
  DOMAIN (170)...(217): Bacterial regulatory helix-turn-helix proteins, AraC family
  misc_feature (1)..(266): Xaa is any amino acid
MIGIGPTAQRIGEVAKSCSIARRIVDRCIARGVSCITDGSPPPCDETGFDSLPLLNIDGDMFLTRLKYAAKKDIDSLILEYTKVLRNNFDENQMLVFFIFGEIIVAASKIVDALGGDIRKVAPYSLNQEDIQSIAGSREIFFEKVKSLLCAVIEYRDAHTAGRYQSIIIKTREYIDRNFPNADISLYSTASYVGISPNHLSAVFAQKTGENFIEYLTRVRIEKAKQLLRDTSMKSVDIANETGFSDPHYFSYIFKKNTGFHQGNSD

SEQ ID NO: 103825 - protein, 284 aa, Unknown
  Obtained from environmental sample
  DOMAIN (1)...(283): POT family
  misc_feature (1)..(284): Xaa is any amino acid
GELYDRKDVRRQSAFSIFYMGINIGSLLSPIIVGLVRARWGYHGGFLVAAIGMGLALISFVVGRVLLGGAGNDVPNPIRPEERGQVAKLFVSVLAFIAILYLAVLAHDHGVLLTAVIDSISYLSILVPIAFFAVMLTSKKVTRPERKRLRAYIPLFLAAMAFFMIFEQAATTLAAYAVDNTNLNFLWFNNFSPENFQTINPLFIIILTPLFASLWLKLGDRPALPYKFALGLALAALSFLFLAGAAWLAHGNRTGAWVLGLVYIIQTLGELMISPVGLAATTLM

SEQ ID NO: 103826 - protein, 192 aa, Unknown
  Obtained from environmental sample
  misc_feature (1)..(192): Xaa is any amino acid
MERKLQRLFRNPEFARLVKKCNDFGAGGVSVAIGELADGLKINLDVVPKKYEGLNGTELAISESQERMAVVVAPHDVAALSECAKRENLESTIVAEVTKEKRLVMSWRGKTIVDISRDFLDTNGAPSKASAQIPAPAASRSPFIVSEINDIKAAWLSRLAELNVCSQRGLVEKFDSTIGAASVLVPFGGKRR

SEQ ID NO: 103827 - protein, 264 aa, Unknown
  Obtained from environmental sample
  misc_feature (1)..(264): Xaa is any amino acid
FVLLAVSRIKRQLRERALLAYFGFGLSALVAYVFMISLILVVSGGEDIDSLTMFPFPFLTLIFAVVSLIFVEKEKPAQVQPNQQSSLKRTQTMVILAMFSALAYLIMLFKIRIVPVPPLSYEAKDVVIVLGGFIYGPLASVAVSLVVSYIEMITVSTTAWIGFAMNVVSTCSFACTAAAIYRTKRSFISALIGLAAGAIAVTASMMLWNYLLTPIFMNVPREAVVKMLIPTFLPFNLIKGGLNALIALLLYKPLFTAMKKSRLF

SEQ ID NO: 103828 - protein, 107 aa, Unknown
  Obtained from environmental sample
  misc_feature (1)..(107): Xaa is any amino acid
MDNTNTDRTNKTSAVGEQYTVISRYYDIFNDGTDYYETADIVENIFKAHGVTPKIVLDMGCGTGNFSLVFKKRGYDMIGLDSSGEMLSVAASKDGGDGILWLNQDMT

SEQ ID NO: 103829 - protein, 309 aa, Unknown
  Obtained from environmental sample
  DOMAIN (1)...(105): Oxidoreductase family, NAD-binding Rossmann fold
  misc_feature (1)..(309): Xaa is any amino acid
MQNLTNRFKNIEIIALWDLIRERAENRAKQFNVPKVHDLEDFYKDSEIEFVVNLTTPQSHFDVDMRSLNAGKHVYSEKPFSLNKADGMKIVEFAKSKNLLVGCAPETFLGGGLQMCRKLIDEGWIGFPVAATAFMMGHGHESWHPDPAFYYDFGGGPMFDMGPYYLTALVSMLGQVEKVAGATKITFPTRTITSQPKYGEKIKVNVPTYVTGTLTFKSGAIATIITTFDVWDSQLPNIEIYGSEGSLRVPDPNTFGGPVLYKRPGMKEWKEIPIVFPYQENSRGIGVSDMALAIDSKRNHRAHGDRQIM

SEQ ID NO: 103830 - protein, 281 aa, Unknown
  Obtained from environmental sample
  DOMAIN (1)...(281): Amino acid kinase family
  misc_feature (1)..(281): Xaa is any amino acid
MIVCKFGGTSVGTKDALSRLISIIKNPEHLGKVSVVVVSALSGITDGLIKAAHEACGDAKTDGTDGSSLQNAAKSIAEMKKRHLDISAAFLKGEEKKEAAAEIEKNFAELSRMLDGISILREISPRVMDSVMSFGERLSAPLIARIFRASGISAQHLDSREAIVTDRNFGTAHVIRGESYLRIKEKVGVAFQKNQSQKNPQETVETLFVAPGFIGSAEDGSITTLGRGGSDLSAAIYGAALRAEMVEIWTDVDGILTADPKLVKNAFRIDSLSYEEAMELS

SEQ ID NO: 103831 - protein, 186 aa, Unknown
  Obtained from environmental sample
  misc_feature (1)..(186): Xaa is any amino acid
MSLARYLDKVKENNKSLAHEIYKSRTCYLFLAPYAIVFILFFVAPLVISVFYSFTYFNILERPKFIGLRNYINLLLGDDVFLIAMKNTFIMAAITGPIGYIAAFLFAWFINELPRYIRAFVTLVFYAPSITGGAYMIWALIFSGDAYGYINGFLINLGILNQPILWLTNPKYMMPVMLVVILWMSR

SEQ ID NO: 103832 - protein, 90 aa, Unknown
  Obtained from environmental sample
  misc_feature (1)..(90): Xaa is any amino acid
MGAAARYPTANYEAFKRLSWGSEQMVVLDEQRAWTVGVPEVPGGYFVSRHIINAVRRVINKKQDTRETLLDYSITIDDELIKKRKEFGLE

SEQ ID NO: 103833 - protein, 170 aa, Unknown
  Obtained from environmental sample
  misc_feature (1)..(170): Xaa is any amino acid
MGLMYYPEYYSRREELVALAKAAAGGALACHLRGEGDTLAESVREITSVALEAGMPLHISHFKACGAHNWGIMIHRAISLIEEKRAQGADIHLDFYPYTGGATTLMSLLPPGYMKNSMAETRSFMSSPEGAKSLEQRLSQPVPNWDNYIRTLGFGRIIISSAQKPHNQIH

SEQ ID NO: 103834 - protein, 270 aa, Unknown
  Obtained from environmental sample
  misc_feature (1)..(270): Xaa is any amino acid
MLHTVFNTINTILFLPFVNQFTKFVTFIVREKPEEENEHYIFAAFSGGITVTTELKIVRVEKEIRDMADIAASMYAHFSEALRGLRESQENESDSDRQSAIAELCEEMQKKEMYTDEMREILTGVLIECTRVQLNIRTEQRITHLLRIINGIEEMTDECYSISRLLEKSVRKNRIFRKEEMDELVPYVYNVEKFLSLLQMQLSSKSTAELAVQTMELEEEINSTRKKLQKLGRKRIEAGMDVQTELIFIDLVRRIERLGDYCASITTEIT

SEQ ID NO: 103835 - protein, 186 aa, Unknown
  Obtained from environmental sample
  misc_feature (1)..(186): Xaa is any amino acid
MRVSIDKSITQERAVEMLAQHIITAPVFTALFENYAFAEENAVSIAMSKVLADLKSKWQVSADAEELQKFYDYVKRTCKELNSEARQVVIIELYNNFFKFAFPKMTEMLGIVYTPVEIVDFIIHSINDVLQAEFGKKLADENVNILDPFTGTGTFITRLIQSGLIDKKDLPRKYAKELFANELVLL

SEQ ID NO: 103836 - protein, 274 aa, Unknown
  Obtained from environmental sample
  misc_feature (1)..(274): Xaa is any amino acid
RLSEQNEALAPIEITTSPEGDASGDVSLEEIDIDFDSLVNSDKNEPQSADEELAGDDGLQDLRLEGVAPTEDAPFSLSDDGLGDISLDENDTETSLNETDLNLNLDDLSMDDMSSTVDISSADTQTTDSLSAPADMSLDDALSLDNVSSLDDALSLEDTSLLDDALSLDNVSSLDDALSLDDALSLDDISSLDDLSSLDDSSSLDDALSLENVSSPDDALSLDDSSLLDDALSLEPGAKTEDLALTEEKESSASMESSLSLESGVKEPVLDDIN

SEQ ID NO: 103837 - protein, 151 aa, Unknown
  Obtained from environmental sample
  misc_feature (1)..(151): Xaa is any amino acid
VFENLLGQGAASRLIADIEGAALAPAMLFSGPPASGKGTASLELARVISCETADNVRASWNCPCPSCNRHRLLVHLDLLCLGNKPFSAEIAASASSFLRETGSLSSRMLFIRSVRKLLMRFNPVLWEDEPKAGKISPLVNSLEEDLDDLVF

SEQ ID NO: 103838 - protein, 255 aa, Unknown
  Obtained from environmental sample
  DOMAIN (152)...(255): GGDEF domain
  misc_feature (1)..(255): Xaa is any amino acid
MVKLEETQIKYFITGEYEEFYGAKTGTPLNLLWLVDLVVNQTVEELLAEDETYYDDIKRYSLFRADTEKAYQDRIPVGSVTDYEYGKLIYGWAPFYSVEGTYVGMLGVDLYIEQYENEVKRIKAILSSVFAAPTIILTVAYIILYIRNKKHIYSKVYTDSLTSIKNRRFIEEYFPSIVRDHCKKRMPLSVIMIDVDCFKLYNDHYGHQQGDEALKKITDAIQSVLREKIDFICRYGGEEILVILINTNLSEAEMV

SEQ ID NO: 103839 - protein, 273 aa, Unknown
  Obtained from environmental sample
  DOMAIN (2)...(81): ABC transporter
  misc_feature (1)..(273): Xaa is any amino acid
APAESLTVGQRQKATILALLLRNVNWFIFDEPTAVLSAEETESLFQLFRRLCGEGRGIIFITHKLKEALEIANRVTVIRHSIALETHETSGLSAEELRREIFGTDMTDNSTGQKKSSKQNANESPILIIDGLHLEPPGLPAIKNVNLHLTTGMIMGITGNRDGGYETLEHAITGFIKIGYKSVNHSSGSIALNGHEITGMGIHAFRDAGGAYLGADRLGSNLARELPLFESLIIHAYRRERFGIFLNMAYLKALVRENHESLRRYALDVGQAD

SEQ ID NO: 103840 - protein, 284 aa, Unknown
  Obtained from environmental sample
  DOMAIN (1)...(283): AMP-binding enzyme
  misc_feature (1)..(284): Xaa is any amino acid
KIPVFKYVVYIGQQKHRGMYSFSEILLLGQHSYEKEFRLIEASLDRNDVVNMQYTSGTTGFPKGVMLTHRNILNNGLGIGDNQRLTNKDIVCLPVPLFHCFGLVLGMMAILTHGSTAAMVEWFDPLIVLATVQKEKCTALYGVPTMFIAVLNHPMFKMFDLSSLRTGIMAGSPCPIEAMRKVIDLMHMSEVTICYGLTESSPVMTQTHFDDTIEVKVETVGRALDGVEVTIRDAETGEECTDGIHGEFCCRGYSTMKGYYKMPEETAKCIDETGWLHSGDLGVK

SEQ ID NO: 103841 - protein, 232 aa, Unknown
  Obtained from environmental sample
  misc_feature (1)..(232): Xaa is any amino acid
VIEKNIARIFRRDNILEYKSPRDYLAVTDFLKVNAYANLYAAITPGVDFAELSLTFVENRHPRKLLQYLTEIRSYTVEETSPGIYLVTGDYLPIQVIESGKLPERENLWLKSLVNNLKAVNADGILNEIEKSGNKAQLGAYLDVIIRANPEAFTEAMNMARRKRETFEEVFTRAGLIPEWLERGRIQGREEGREQGLVTAARNAMSKGLPIDVIHDITGLDIETIQALQTNP

SEQ ID NO: 103842 - protein, 216 aa, Unknown
  Obtained from environmental sample
  misc_feature (1)..(216): Xaa is any amino acid
MDKPSNPDKLKMHTPSLADEKFAKLADLFPNAVTETIDEDGKVVRAIDKDALAQEINAHVVDGREERYQFTWPDKKKSVLLANAPTAAALRPCREESVNFDDTENLYIEGDNLDVLKLLRETYLNRVKMIYIDPPYNTRNDFVYKDEWTVGSDQWSGMSGDYDEQGDRLVLNRDTNGRFHTDWLNMMYPRLKIARDLLTDDGVIFISIDDNEVKIE

SEQ ID NO: 103843 - protein, 290 aa, Unknown
  Obtained from environmental sample
  misc_feature (1)..(290): Xaa is any amino acid
WAASSSRKLWFHFSYYTAETVSAISVAPSFIGASVPYPDTPNIGANAQYANQTKNIRRQFKLTYMVNQDHSLVVTYNNSSSGSSHNNTNAGDINALYPSLTKYNFLNIGWRASWSPSFTTELRTGAKLQKAAYRLGQGQAPYGPIYNEGTDSATGRGFYYNMGPYADDGGDNRDNSTLNFKGTYFLDMYGAHEIDFGLDHYLGKRHSRNEQSPWYNRTIHVAGYRYDTSGGDIVPQAMGYFARQWTSSDAEATYETIGLYVNDRWKLNANLALQLGLRLDSYQAQATDVG

SEQ ID NO: 103844 - protein, 95 aa, Unknown
  Obtained from environmental sample
  DOMAIN (11)...(80): ATP synthase subunit C
  misc_feature (1)..(95): Xaa is any amino acid
MDVNTMWIAVVSIMTAGFTITIGSIAVEIAEGWAVRQALQSMAQQPDEIPNIRSTLFVSLAMLESCAIYCLLISMILIFANPFWNHAVTLAKAAV

SEQ ID NO: 103845 - protein, 193 aa, Unknown
  Obtained from environmental sample
  misc_feature (1)..(193): Xaa is any amino acid
MQTLPQLKKSMSSAVALRSIISSQKSIAAAELIGFERASSSIEACVAMLERAIQVAVMSGEDVLQTIGTSSVPTTSVKIIIGSDLGLVGRFNRSLAGMVAKEIKRGDKVIALGRNMAASLVALGVAPDSEVAMPAGAEGIVDAAADILESLGTVTDSTEVEIFFNKRFGSLWRCERRLLAPITREYLVEIAAR

SEQ ID NO: 103846 - protein, 51 aa, Unknown
  Obtained from environmental sample
  misc_feature (1)..(51): Xaa is any amino acid
TVKGTIMGVLILAVMNNLLSLRNVESYWQSVLKGIIIIAVVLLHSRSQKRQ

SEQ ID NO: 103847 - protein, 79 aa, Unknown
  Obtained from environmental sample
  misc_feature (1)..(79): Xaa is any amino acid
MVNLEETLKKYALTLPNPPAKGGIYEPVKEFGPNFCYLSGSTPTFNGEIRWAGKLGRELSIEQGQEAARYCALNLLANI

SEQ ID NO: 103848 - protein, 117 aa, Unknown
  Obtained from environmental sample
  misc_feature (1)..(117): Xaa is any amino acid
DDSGTLARLLESFSDGAAIHASKPYLLEVLPEGVDKGRALSFLAEKLSINREEVLAVGDSMNDESMLRWAGFSVAMINADSRLKEIAALVTKRSNDEDGVAEIIERYILGGETLAGI

SEQ ID NO: 103849 - protein, 285 aa, Unknown
  Obtained from environmental sample
  misc_feature (1)..(285): Xaa is any amino acid
MRVTEKLKSYKPKSLDQAIIFLVFVILLVSVGLFLFFNFTKLSEDVTEWNLEKMNTLALAYSGILDGDSIELDFQRKIKNVYYNKWSDLSDSLLKKTEMKYLYVMNASYDDSIEFYLSARSHNGKSNFLEKLPIGDFDVDIIKKLKDKSETHICKTGYYPEYGGWLAYSYVSVKNSKDEVVAFVGVDNDMSEINDSIKKIETKFLLAAILFFIIVFLLMTHMIRKILISPIAKIIEAANSFHLLGISFKKLDSTNLKEYDALIDSFRNMESKINAAITKSTQRIT

SEQ ID NO: 103850 - protein, 298 aa, Unknown
  Obtained from environmental sample
  misc_feature (1)..(298): Xaa is any amino acid
ESHQHKAGKSQIKRSAVIEAQSRAALFAPYNRIYDFSIEFWLNPLNMENGEQILQWIAARPLNTNKTSYTSQRILCVSSKNRLQWSFTNFFASPDGKESIEINIGGVSALVPKTWSHHLIRFDSFTGVVEYQVNGKTESIEYAASGGHEGGEVYTPITGEGGCFILGNGFSGLIDEFRIHGVNAPTPVVRKYPLQGGRIETRAVDLGEGSNGILKLEASGGRIAVQNTKLNNEFKRNGRFRFSDDSEMQFFIRSSDNPYRWDSPWLAITPGADFSGIVQGRYVQLAVDFIRQKTGESS

SEQ ID NO: 103851 - protein, 278 aa, Unknown
  Obtained from environmental sample
  DOMAIN (133)...(278): UvrC Helix-hairpin-helix N-terminal
  misc_feature (1)..(278): Xaa is any amino acid
EGVLATFTVFSMRGGKMTGRELYRTRSAADEGESLELFITTYYDPTRPPPPKIYLQPETNAAISGPAVSSTAAIINNDSLMNWFKTQWGREPELIQSGEKHHTAILAMARQNALEDIRKRLKERGAGPALDELARALDLPGRPERIEGFDIAQLDGKHPVASLVSFKNGIPDKKNYRYFKLRSVIGIVDDFAAMREAVHRRYSRLIREGKDIPDLVLIDGGIGQVNAAKGVMDELGMDCAVVGLAKRDEELWLPHTQQPLILSRRSEALKILQFVRDE

SEQ ID NO: 103852 - protein, 302 aa, Unknown
  Obtained from environmental sample
  misc_feature (1)..(302): Xaa is any amino acid
EAIITSGQVGTVTAAVTYSTSAIYTTGEKQGITVYNADTVANYGAGTSSAAIRTAWGDVVVYGGSVRSALGIAINAAGNVAVGDTLKWTAAPHVDYLKAVAAVGTAGTDGYIAASVGAITEGTVVTSIDTLKLINVSSGTTLAGNSAIKAKSAEVGGKARVVISKATVEATGTTGGAAAIRDTIGSVKINDSYAVISSASGSGIAVKNASVDLLRGTVTSGTGSSPNVVAGNAAIYVIDGTANVGDIPDRGDGDGTGRDSSILNASSNALCVYVSGSGDNDAANVSRYARMNVNGTTEASGA

SEQ ID NO: 103853 - protein, 119 aa, Unknown
  Obtained from environmental sample
  DOMAIN (28)...(107): MazG nucleotide pyrophosphohydrolase domain
  misc_feature (1)..(119): Xaa is any amino acid
MTMRTPATLRAIMDHLRAPNGCPWDKEQTHQSLAEAFREEASEVLDAIAALNSDRPNKPSLYRHLCEELGNLWLQVAFHACLADEAGHFDMHDVERMIVEKRCEKAIPTYFGDLVAEDS

SEQ ID NO: 103854 - protein, 81 aa, Unknown
  Obtained from environmental sample
  misc_feature (1)..(81): Xaa is any amino acid
DYCKVAEAFGLPHIGIGVADNIREKILEALAIKGPVVCEVMLEEFGELAPRIASRVMPDGSLKAAEFDDLYPFIGPEGQNG

SEQ ID NO: 103855 - protein, 201 aa, Unknown
  Obtained from environmental sample
  misc_feature (1)..(201): Xaa is any amino acid
GVSDWRYVFISKEISDFNLTGTAGRFVSGCVFPLYLYPNPANALPDESRRPNLDGDIVKEISQRIGLRYIEEEDSNATQKSFTPIDLLDYIYAVLHSPTYREKYKEFLKIDFPRIPYPESAAQFRALSKLGGKLRRLHLLDGVEPQEGTADYPVPGNDEVEKLQYDETDHKVFINKKQFFDNVPREAWEFYIGFPRKSGHT

SEQ ID NO: 103856 - protein, 208 aa, Unknown
  Obtained from environmental sample
  DOMAIN (17)...(134): tRNA pseudouridine synthase
  misc_feature (1)..(208): Xaa is any amino acid
MPSQRDRQKQPSSSFRLLIEYDGTRYSGWQRQGPPKPKGSGPKEPGAEPKEPVVKTIAGAIGHAMHHAGLQILNFKGAGRTDAGVHALGQVAHVHLEDPMMASELQHLLERGLPYDIAVPSVEPCPAGFDARRDAVSRTYLYQVTLRKSAFSKHSTWWPKLPLDMRLIEEAWPLFEGNRSMAAFADLEEGEDPNCQIYSCSTDMDGHL

SEQ ID NO: 103857 - protein, 139 aa, Unknown
  Obtained from environmental sample
  DOMAIN (5)...(114): 1-deoxy-D-xylulose 5-phosphate reductoisomerase
  misc_feature (1)..(139): Xaa is any amino acid
MKKRIAVLGATGSIGKSSLDVISRNKDIFEVVLLSANTKGEELEKLKNLWPSAVCVLSGGQGGKEKLLSAIGEVKADITINGITGAGGLEPSLAAIESGSDLALANKETLVMAAPLVFRLAKEKNVKIIPVDSEHSAIF

SEQ ID NO: 103858 - protein, 267 aa, Unknown
  Obtained from environmental sample
  DOMAIN (5)...(258): Bacitracin resistance protein BacA
  misc_feature (1)..(267): Xaa is any amino acid
MSWWEALVLGLLQGLTEFLPVSSSGHLQIGQALFGLQGEENLTFAVAVHAATVCSTIVVLWSEVAKLLKGLFRLAWNEETQYIAKLVLSMVPVFIIGVFFKKQVEQIFGSGLLVVGVCLLFTAVLLAFAYYAKPRKKESISFRDAFIVGIAQACAVLPGLSRSGATISTGLLLGNKKEAVAKFSFLMVLVPILGEAFLDLMKGGFSENASGIPLVSLVVGFLAAFAAGCVACRWMVDIVKKGKLIYFAMYCTIVGVATLVLLACGII

SEQ ID NO: 103859 - protein, 91 aa, Unknown
  Obtained from environmental sample
  DOMAIN (1)...(90): Uncharacterized ACR, COG1430
  misc_feature (1)..(91): Xaa is any amino acid
MYRKELKDGEGMLFVFQNDQILSFWMKNTLVPLSIAYISHDGRILEIYDMQPGNLDPVKSSRSVRYALEVPQGWFSRAGLGVGDRVAIQDL

SEQ ID NO: 103860 - protein, 160 aa, Unknown
  Obtained from environmental sample
  DOMAIN (17)...(69): Clp amino terminal domain
  misc_feature (1)..(160): Xaa is any amino acid
MVKGFTQLTQRILTHDAQEEARRFNSDQLLPEHIIIAMLKDWGGTACKALMYLRIDLGEFRRSLENCLPRVAAILLKGDAPMSERAKKMLESAMEEARTMGNEYLGTEHLLAAAYKEENSAVQVYLNQLEVNLEMFRALVRSSFNRRGQTESGFSVGLKF

SEQ ID NO: 103861 - protein, 278 aa, Unknown
  Obtained from environmental sample
  DOMAIN (187)...(219): Ankyrin repeat
  misc_feature (1)..(278): Xaa is any amino acid
DYDEDFDKALSKNDLSKAEDIVRKRSEKMDLAQRLERIILNNIKGFNSDNAINVAQMLIRYGANVNAVKRVRIGEYYRDAPLLYITVADSGLNKEKTVQMINLLCHSGANPDARNQTGTAKSTALMAACDFKTEWRITYTKALVENGANVNLKDNNGNTALMLNIDDIDTFKYLVENKADLNIKNNKGQTALILAAEQEQTDIMTLLIDRGANVNLRDNNGLTAASICYDKGQIDIYNYLKAKGAIDFEPKQVTAQPAAPAPSSSTTNVYVQPSTPTQ

SEQ ID NO: 103862 - protein, 259 aa, Unknown
  Obtained from environmental sample
  misc_feature (1)..(259): Xaa is any amino acid
LDLFYNRQEPDGAIRCAYDINTGEPVAEKDNAEGLGVPLFAWAEYNIYHKSANKKRVKDVLAVLHKYTEWIDSTFKKSNGLYRVPLGVTGMANAPREGTYYSLDFNSMMAINALYMSAMADILNDKDSSFQYKKQYFALKTRINALMWDPDDGFYHDIDRSERRLPVKTIAGYWPLLAEIPNDEKAEQIIAKLSDPQFFGAPHPFPSLSLSDKNFDETGRGYRGSVYPHLTFMVIKGLERYQRWDLARECAIRHLYFML

SEQ ID NO: 103863 - protein, 283 aa, Unknown
  Obtained from environmental sample
  DOMAIN (141)...(261): HD domain
  misc_feature (1)..(283): Xaa is any amino acid
NTTGLLNAEMDLAHVRTFVMVGSDARYVALQAGTELNEHCRVIDRKDFIAFAEKIRNYSIEECVQKLGITYAEAEGFIPGILVLKLFLEQTGAARVAVPLVSIREGYLIDMAQGVDSDIQKEFYSQIIASAVNLGRRFHFDEAHSQHVARLCMKLFDSLERVHGMNQRQRMMLETAAILHDIGAFIKASGHNRHGQYIVANSEIFGLPRDEQDIIANVIRYHRGDPPSEGDIEYISLQREERILVLKMASILRVADALDRGHSQQIKDITVDRRAETIVLHAQ

SEQ ID NO: 103864 - protein, 148 aa, Unknown
  Obtained from environmental sample
  DOMAIN (40)...(148): CDP-alcohol phosphatidyltransferase
  misc_feature (1)..(148): Xaa is any amino acid
MNLATVLTTSRIVIAPVFAMVFVHGYRSDTTSVSWIYICFGLAVLIELSDMFDGMAARARKEVTDFGKVYDPIADSVSRQTVFISFMYTDIIPMWMYMVFFYRDAFMQLLRIVCACGGYVLAARMSGKIKAVLQGIAAFCMLAVILAQ

SEQ ID NO: 103865 - protein, 150 aa, Unknown
  Obtained from environmental sample
  misc_feature (1)..(150): Xaa is any amino acid
DDVDENDNTGETDKAADKEDRAGADKAPGELSPEERSVVNELRNRDREVRAHEQAHVSAGGAYIRGGASYQYQRGPDNKSYAVGGEVGIDAAPERDDPGATITKMQAVRSAALAPNDPSAQDRAVASAAARQESLSRADLAAEARNADES

SEQ ID NO: 103866 - protein, 295 aa, Unknown
  Obtained from environmental sample
  DOMAIN (1)...(293): Glycosyl hydrolase family 10
  misc_feature (1)..(295): Xaa is any amino acid
VKNPIYKNDFLVGNIINEKYMDGAYFDMIKNNFKVITPQNDLKPASLTTNRGGAYNWSYADQIVNKSIENGIPIHGHVLVWHNWTPEWMTKGTKTEVEDNLKNYITDVLAHYHGSIHSWDVVNEAMRDGLSAADTVGDWKKCLRTDSPWYRKLGANYIETAFRTAREADPGITLYYNDYGLEYPHKDEAVWKMIYDINNRYKKETGQKRNLIEGLGLQAHYNIKSFDENKIRASLEKFTSLNIELSISELDVTASGYDEGEGKDVIMSENDAALQAGIYAKVFRIYREYTDYIKR

SEQ ID NO: 103867 - protein, 291 aa, Unknown
  Obtained from environmental sample
  misc_feature (1)..(291): Xaa is any amino acid
AHASIKANLLLDDFSYTDVGLLDMTHIRFFTHKSIPSFLAKNQLIIEDFEYTAASIFGSQAENPYLELSMPVKQAIFRDPHSFVFQYVMQIRHAPESSVASCLEANAVLHVLDESRNPLLAAYRNEAFAQHGAGGYLYRIKRAARDAVVKGIAGACLLPASMVYAEGAGHWLRRMREPKAFLGEVAHYSWVVAAKLKNKTRLQKLLVQRTLDVGRVLKQTNSVRATLNKCLAVMRGKPAGTGTTPDAPVRYAAYIQRVEPHTKAHLAALTDEIASWAGPPLLTLHLHVPHD

SEQ ID NO: 103868 - protein, 285 aa, Unknown
  Obtained from environmental sample
  DOMAIN (42)...(183): YbaK / prolyl-tRNA synthetases associated domain
  misc_feature (1)..(285): Xaa is any amino acid
MVPAAVGENEIVVCHACNRAANVETARCADDVPGDSAKAMPETAAPLTKVATPKVRTIEELCAFFSCSPKIFLKSLIYAYTDKDGKRSFALAVIRGDLEVNEVKLAGFLGASEIALASDEEVRRVTGAPTGFAGPVGIRDVPIIADLSVRALNGGITGANERDTHYTGVTRDRDWTASAWTDIRTVREGDACEICGSPLALFRGIEVGHIFKLGDKYTKALGVFYQSEGGENRVPIMGCYGIGIDRTLASVIEQHHDDDGIIWPASIAPFDVVIVPKTGRMRPRA

SEQ ID NO: 103869 - protein, 295 aa, Unknown
  Obtained from environmental sample
  misc_feature (1)..(295): Xaa is any amino acid
FSTVPDTLGNCSKLEILKLISGKPINLPDSIGKLSYLKELWIDTPALTIPASFGRLSSLEDLSLLTQKELVLPKSFGGLCALDTLWLDSPQMRKIPDSIGNCGNLKSVLIKSDKLAAVPDSFCRLKKLEGLHFDTFALEALPSAFGNLSSLKSLEISSGALTAFPESMGGLKKLVRLSLDAHNVKELPASFKKLSYVKYTQIEIGQKEPVLAQKKDTVKKRSMVNFEELSTLSHQYRFKLFETYSIKQLETLLCSAPLYCVATEKDKELFKDIMLVRHRRLRDKFKWTEENKKRI

SEQ ID NO: 103870 - protein, 293 aa, Unknown
  Obtained from environmental sample
  DOMAIN (148)...(252): Methyltransferase domain
  misc_feature (1)..(293): Xaa is any amino acid
WESGLLDDRFPEWGDSCYVNLTISGKIRLQDLLRHIYVLIPVFDHRKHYWMNDEEVDKLLAHGSGWLENHPEKNFITRRYFTRLGHFTKQALERLNRLDNGEGGAESPAMEGELETESPVSVKIPRLNDQRLSAVLNELKASGAKTVLDMGCGEGHLLRLLMKEKDFTAIAGTDVSAVILNRTADNLKLDRMAEEGKKRVTLFQSSLCYRDKRFKNYDAAAIVEVIEHLDENRLPALEAVVFADAVPATVIITTPNFDYNVNYEGIMANHFRHSDHRFEWNRVQFRAGPIPCR

SEQ ID NO: 103871 - protein, 120 aa, Unknown
  Obtained from environmental sample
  misc_feature (1)..(120): Xaa is any amino acid
MRDAGRQTIQTWLRENRAPLLFLLFLLLVAPLRDLWSPDEPDFAQCIREMREGGHWLLPYLNGEPYNEKPILFYWLMKCCAIAGDWLTAGLGFKNGVSAWTLRLPSLLSAAIFVFAYRAW

SEQ ID NO: 103872 - protein, 277 aa, Unknown
  Obtained from environmental sample
  DOMAIN (89)...(136): Flagellin hook IN motif
  misc_feature (1)..(277): Xaa is any amino acid
LGPDTKQAFAGDKVFTEPFRVVEGTVEGGGESMVVRVEYRGSGATRRAEIGDNMFVDLDIGGGEAFWAEKMQVFSTVDATSYRVQEPGSFFIDGVEITAEVGDTLPTLVAKINDSAAPVKAYVDPQTRGLVLEGTNAHLIRAEDRVGGAAILRDLGIINGNMINNAPNWNSTAIVSGGSIFDMAIRLRDAMLRGDQDFIGSQGVVGMDLAINNIASKLSVVGARQERAEMAWQRISSEIPNITGMFSREAGVDMETLAMEMKMAQYAHQAALQTAAR

SEQ ID NO: 103873 - protein, 250 aa, Unknown
  Obtained from environmental sample
  misc_feature (1)..(250): Xaa is any amino acid
YKVFYTGENIDNNSFYKNLREYDKEIAKHLALSLGFKFSQANNYIRLPLWLLYYFRPYDSKDVIAYKLSDFAFRRISKTKFCTMIARYDTGNNLRTKLYTCVSQAGHVDCGGKLLHNDDSLWQKYRDNKHAYLQQYKFNICPENSAGDGYVTEKLFEALHAGCIPIYHGYNKNPEPGIINPAILLWFEPAGDNQDLLKQIKTLNSSDAKYKEFWRQPIFLDTAVDKIYYYLHSYCVKMENLIQEIQQQKL

SEQ ID NO: 103874 - protein, 70 aa, Unknown
  Obtained from environmental sample
  misc_feature (1)..(70): Xaa is any amino acid
MVYYISRTIERSLREAVKQSPVVALTGPRQTGKSTLLRHLFPQYNYISLDAADMRQSAQNDPQLFVENSA

SEQ ID NO: 103875 - protein, 292 aa, Unknown
  Obtained from environmental sample
  DOMAIN (57)...(281): Glycosyl hydrolase family 3 N terminal domain
  misc_feature (1)..(292): Xaa is any amino acid
MTLEEKIGQMTQAERNDVRLGDITEYAIGSILSGGGSIPMQNTPEGWVNMINGYTRESLKTRLGIPVIYGLDAVHGHNNVLNATILPHNVGLGAIAAGDLEKGAKAAYTAGRVTAEEMLATGAQWTFAPVLGVAEDVRWGRTYESFSENVNIVTVMGMNVIKGLQENGAAACMKHFLGEGQTIDGRNQGNALLDHAGIERILPPYRAAIEAGAISLMPSFSSVNGVKMHESKNLLTDLLKNEMGFEGFVVSDWAALTQLSGGNYKAQIANAINAGVDMVMATNGRGSWINFI

SEQ ID NO: 103876 - protein, 271 aa, Unknown
  Obtained from environmental sample
  DOMAIN (100)...(271): Integrase core domain
  misc_feature (1)..(271): Xaa is any amino acid
VAHVIKLAEAKGIAWEAASGLTNSELAERLFPETESKPAYKIPDWEYIHREMAKSGVTLSLLWAEYCEQCRESGETPYKTTQFYFYYSEHVQKTKATMRISHKPGEIMEVDWAGQTAYIQNTDKGGTIKAYVFVAVLPYSGYTYVEAFLSQDQQSWIQAHVNAYGYFGGVTRILVPDNLKTGITKHTRYETVVNKAYQEMAEHYRTAVLPARVRSPKDKATVEGNVGVISTWITAALRSQQFLSLWELNTAIRSKLADFNAKPFQKKDGSR

SEQ ID NO: 103877 - protein, 270 aa, Unknown
  Obtained from environmental sample
  DOMAIN (1)...(71): Histidine kinase-, DNA gyrase B-, and HSP90-like ATPase
  misc_feature (1)..(270): Xaa is any amino acid
VQDTGIGIRAEDIRKLFISYAQLDTKANRKIEGTGLGLAITKNLVEMMGGTIAVESEYGSGSVFIAEILQGIENDAVIGEDTAKKLRGFNYTADRKGEDIIPSWLPQVQVLLVDDLPANLLVAQGLLAPYGSQVDTAASGREAIELVKNHNYDLIFMDHMMPEMDGVETVAAIRKIEGYANTPIIALTANALRGMKEFYLENGFQDYLSKPISPEALNEVIKKWLNEQITTNNDPVPQSPFPSPFSLEIEAQRLDILNHYLVSFTSVPEA

SEQ ID NO: 103878 - protein, 139 aa, Unknown
  Obtained from environmental sample
  DOMAIN (89)...(122): Tetratricopeptide repeat
  misc_feature (1)..(139): Xaa is any amino acid
GEALRSARTARSLSRYDARVAEILGEVYYYQGNNSEALQYFQEYVNLAPGGQRIESVYYFIGEIYIRMGKYRHADIALSTAVHWMPGNAAWWTRLAFARENAGDLTEAVSAYEKAIALNPQLPDARRGLDRTRQALANR

SEQ ID NO: 103879 - protein, 268 aa, Unknown
  Obtained from environmental sample
  DOMAIN (4)...(268): Phosphomannose isomerase type I
  misc_feature (1)..(268): Xaa is any amino acid
MSEFYRLRNKAMHYVWGSTVDIPRLLGIAPNGAPWAELWIGSHPGSPSTVIMDSGEITLAELIAGDPRRFLGDARRYGALPFLLKLLSAEKPLSIQAHPNLAQAREGFEKETRAGLAIDSPERNYKDPNHKPEIIAALTPFTGLCGFRDVVEIRGLLAAFLESASVVLRESFAPLTHALSNREPAGALRDFLAGLFGLSQQAREALTDYILLLKEPPPGCGASYNDGASHSDGASHSDGASHSDGASHSDGASHSDGASHSDAMELMR

SEQ ID NO: 103880 - protein, 288 aa, Unknown
  Obtained from environmental sample
  DOMAIN (169)...(255): Transposase IS116/IS110/IS902 family
  misc_feature (1)..(288): Xaa is any amino acid
ERQVALEAGNMAFTMAREIGQRAGSEVRVLNSAKLPFIWDAPTKTDKEDAMKLAHLVEERRDEKLPVVPLPSEQEMERRELISGYGREMRGRTRTINTLHSLFWKQGHTEVVRKDVATAAKAQQAIRVLTGQIREDAEWQIKHLELYEQRIKELKAKIKETAKKDKDMELLQNIAGVGPVVAYAFVAHVGDGSRFSKGAQVSNYLGFVPRLDYSGTIQRHGHISKRGNGYLRGLLVQAAWATVRSRNGGSLKERFQYLTMFQGKSKKKTIVSVGRKLAELMYSVLRNK

SEQ ID NO: 103881 - protein, 215 aa, Unknown
  Obtained from environmental sample
  misc_feature (1)..(215): Xaa is any amino acid
MGLSLSPTLCHMLCDDLLIERYLDYTNRQIEFGQKELERLSGDPELRPLAKYCYDRITEKRAFFTERCEKNILKGFDHYQKKGRIEIMAVAATHAFLPFYSAYPEAVQAQFEVAISVYRGKFGKHPHGFWLPELGWNEELDYWLRSYNFSYTVLDSHALPFARPAAERGNFYPARTPLGMIIFGRDFYAAEEMAELVRDPVFRLNHRDQGFELPL

SEQ ID NO: 103882 - protein, 257 aa, Unknown
  Obtained from environmental sample
  misc_feature (1)..(257): Xaa is any amino acid
MARAFSIFANQGREVTPIAIRFMEDRNGKVVLDIERDIRLEHRRKGNAAQVVSPQNAYVMTSLLKKTVEMGTLANPAGWGSKFTFKDENGKNFRMPMAGKTGTPQNWSDAWTIGYSPYYATAVWFGFDKPGNSLGVNLSGAVLAGPVWADYMRQIHQGLPFRDFVRPSTGLIDVTVCAKSGLLKTPSCNQGEVTLPFLEGTQPVLLCEYHGNNSTKETAIRKIEQDTMFIDASNVLKGLTMPVLRDENLMREIHAEQ

SEQ ID NO: 103883 - protein, 252 aa, Unknown
  Obtained from environmental sample
  DOMAIN (7)...(249): Beta-lactamase
  misc_feature (1)..(252): Xaa is any amino acid
MSIDTELTGYLNAAIRRQAFPGCALAWVSGGESSIIALGRRTYDDGDFPISENTLYDCASITKAIPVSNLALWLIDRGKLRIDDRLIDFVPEYTGSFRDAVLIRHLLTHTLDFDFRLSGCKDLPPDELLRTILNVKMKCAPGEKFCYSNASSILLGLAVERASGKQLHTLAQEVFFDPLGMVDTTFFIDDEKRSRCVPTEIDPWRGRAVCGEVHDESAYTLHKIMTPGSAGLFSTAGDLLKYIKMLIDGWEP

SEQ ID NO: 103884 - protein, 284 aa, Unknown
  Obtained from environmental sample
  DOMAIN (138)...(281): UvrC Helix-hairpin-helix N-terminal
  misc_feature (1)..(284): Xaa is any amino acid
MAVLHFRDGLLMAARNFLFKRDKWEFSSEGNDSIVTQFYTLEDMEIPEEIIAPDNAGFSQPVLQEWFDMKADGTSGINNNIDNPNQQNNQQKYERAKIQVIIPQKGAKKLLVSMAEKNARAYLLQKAPPSASQDVDDLQKALSLPYAPNVIEAFDISNLGESFAVAGMVQFKGGLPNKSAYRRYKIKTVEGQNDFAMMMEAVSRRLRRLQDDGNAFPDLLLIDGGKGQLHAAMDALKDFENPPLIASLAKKEEILFSPCLDEPLSLPETHPARRLVERIATNAR

SEQ ID NO: 103885 - protein, 279 aa, Unknown
  Obtained from environmental sample
  DOMAIN (125)...(279): RNB-like protein
  misc_feature (1)..(279): Xaa is any amino acid
TLFYRNIAAIRPRKQGEVEADIKKREEKTAANNEKELFFERMRKRSPHQEDRRFIQDIEALALGKSAKSRTMKEIGLGETPEEAHALLLECGFWNEQNNPHPARFGVVLQPAEHKPEAPPPEERRDLTHLGAYAIDSPWSNDPDDAVSIEIEDGVPSFEGRQTLYVHVADPAASIGTDSPVEKEARDRGATLYIPEGSIRMLADDSLSFFALGLAETSPALTFKMTLNNTGEIEKTEIFPSTVKVTRLTYKEADEYLSNTHGNTHSDTHSTLQSLNVLA

SEQ ID NO: 103886 - protein, 284 aa, Unknown
  Obtained from environmental sample
  misc_feature (1)..(284): Xaa is any amino acid
TGHEHLDMFGLINMNGRMYDPMLGRMLSPDPYVQAPTFTQSYNRYSYCLNNPLRFTDPSGNKWWHWVLASTGLVDPLTVSASASAIITSSIVTNVVGTYLTTALNTPTIALLGLIFKNCDGAKIIKNSFRINNGLFVTDPNKGFWGRTWELSSRFTYQSFQTYIGYGASQGVNLTGNVNTVSYYGGATVLQTYSSKYDFGAITLSNYIIGNSTIEAEPDNPWFQHEYGHYIQGQRLGGLYLPTYGVISLISGELDDHHRRLYIEQNANALAYNYFSRYVTGFTE

SEQ ID NO: 103887 - protein, 293 aa, Unknown
  Obtained from environmental sample
  DOMAIN (188)...(293): S-adenosyl-L-homocysteine hydrolase, NAD binding domain
  misc_feature (1)..(293): Xaa is any amino acid
EFAGKQPLKGAKIAGSLHMTIQTAVLIETLVALGAQVRWASCNIFSTQDHAAAAIAQDGVPVFAFKGESLEEYWGFTHKIFDFDGGANMILDDGGDATLLLHLGAKAEKDIHVLDNPGSEEATVLYASIKNRLKSDPSWYSRQLSGIKGITEETTTGVHRLYEMNKNGELKVPAINVNDSVTKSKFDNLYGCRESLVDGIKRATDVMVAGKIAVVCGYGDVGKGCAQALSSLCAQVWVTEIDPICALQAAMEGYRVVTMEEAAPLADIFVTATGKLHVILFEHMKEMKQQAIV

SEQ ID NO: 103888 - protein, 111 aa, Unknown
  Obtained from environmental sample
  misc_feature (1)..(111): Xaa is any amino acid
DAPVLARADVGIAMGVLGSDAAIEAADVVLMTDEPSKLVEAVGIARFTKHIVWQNIVVALGIKGAFLVLGALGLASMWEAVFADVGVALLAILNASRAIRSIPTLRGKKPY

SEQ ID NO: 103889 - protein, 273 aa, Unknown
  Obtained from environmental sample
  misc_feature (1)..(273): Xaa is any amino acid
SAEVWVELNPDGGVTVGTCWEDHGQAADAGVLGTAHESLRPLNIPMDKIRLVMNDTSKAPNAGPAGGSRSQVVVGNAIRVGCETLMEAMRKPGGGFYDYKGLKDAGREPRQKGVWTAPAAACDDKGKGTPFCCYMYGLFMAEVAVELATGKTTVEKMTMVADIGKINNRVIVDGQIYGGLAQGVGLALSEDYEDIKKHSTITGAGIPHIEDIPDEMELIYVETPRPDGPHGASGVGEIPLCAPHPAIINAIAAACGARIRHLPAYPDKVRRLE

SEQ ID NO: 103890 - protein, 204 aa, Unknown
  Obtained from environmental sample
  DOMAIN (38)...(170): Probable molybdopterin binding domain
  misc_feature (1)..(204): Xaa is any amino acid
GGTRVIPLIIEEEKIARLEALTPSPFIEVLPLRDARVGVVTTGSEIYHGRIQDAFGPVLERKFRELGSSILGQRLTSDDVDLTSAAILDFIREGADMVMVTGGMSVDPDDRTPAAIRQAGAEIVSYGAPTFPGAMFLLAYLDKIPVLGLPGCVMYHQASIFDLIVPRLLAGLEVTRRDIAMLGHGGFCAACSECRYPLCPFGKG

SEQ ID NO: 103891 - protein, 63 aa, Unknown
  Obtained from environmental sample
  DOMAIN (6)...(63): 2Fe-2S iron-sulfur cluster binding domain
  misc_feature (1)..(63): Xaa is any amino acid
MLTKTLVVNGIPRQLLADKDAMLSDVLRHQLQLTSVKVGCGQGQCGACTVILDGEPVRSCITK

SEQ ID NO: 103892 - protein, 78 aa, Unknown
  Obtained from environmental sample
  DOMAIN (6)...(78): BMC domain
  misc_feature (1)..(78): Xaa is any amino acid
MAETQQALGMIETKGLVAAIEAADAMVKAANVSLSGKVHVGGGLVSVFVRGDVGAVKAATDAGAAAAGRVGELMSVHV

SEQ ID NO: 103893 - protein, 90 aa, Unknown
  Obtained from environmental sample
  DOMAIN (1)...(84): Ethanolamine utilisation protein EutN/carboxysome structural protein Ccml
  misc_feature (1)..(90): Xaa is any amino acid
MLIAKVLGNLWATKKDERLNGYKLLAVQIKGSGSKETIVAVDTIGAGVGEDVLVVSGTMTRNILRDSNTPIDAAIVGIIDSMEVDESLLK

SEQ ID NO: 103894 - protein, 260 aa, Unknown
  Obtained from environmental sample
  misc_feature (1)..(260): Xaa is any amino acid
MYSENGKKSIYLDNKLDIIILISVFILIISPVIFSTLFRLSVKSRQKDIYLSARCEEFFGLDTMEMLAREFEKQNPDLRIRLLAVNGEKSAEPDILFFDESEFNALAAAGALLRLGSFSGEGSGDQNTEEPGGQNTAVPLVSFMDALFYNIELLLAAGFDRPPKTREEFLVYVKTISAADNGVLSDAAGTVMIQGQEDSRALYREYFSWIWAGGGNFWSNEDSSPSAPVINTKQMIGDFNFLGSLYSAESSSVPNNQALS

SEQ ID NO: 103895 - protein, 253 aa, Unknown
  Obtained from environmental sample
  DOMAIN (125)...(253): Phage integrase family
  misc_feature (1)..(253): Xaa is any amino acid
MIELKQAIADYLAYCEYQKKLSAKSIKAYMIDLAQLRRHTASENIPVKTEISAYITRLHKTYSPRTVKRKIASIRAFLNYLEFEEILSENPIKKVKTNFHVPQMLPRTIPLSIIESILRAAYQELKQAQTNYALNTALRNASILELLFATGLRVSELCSLNADFIDLGNGKILIMGKGAKERVLQIGNPEVLSILRRYAEGNTAYIRKTGCFFINRLSSRISEQSVRFLIKRLCSKANIRQNITPHMFRHSFA

SEQ ID NO: 103896 - protein, 174 aa, Unknown
  Obtained from environmental sample
  misc_feature (1)..(174): Xaa is any amino acid
VEQDLVISRVLVSVFQDEYLKEKLAFRGGTAIYKLFMTPPARYSEDIDFVQIDAEPIGQVLDKIRAALSFLGDPKTRQKASNNVLVYRFNAEEPQGVVMSLKIEINCREHISVYELETRYFKMESQWFSGECGIVTYNFNELIGTKLRALYQRKKGRDLFDIYLALKSGELDVS

SEQ ID NO: 103897 - protein, 225 aa, Unknown
  Obtained from environmental sample
  misc_feature (1)..(225): Xaa is any amino acid
VPKLLFSAFMHLSFLWSICPLGSFDLNTPSWALSAMFLCYLLLGPLLKWSLTMKSRYEVMGWMALFFVPLVLWGLLYGAIGSPESLYQLFHGFAPVRFFEFGLGVLLARFFMLRDPLKRSGLFVAARCDAAVLLLCALIFINLSPAVRSTHGMKWLSYHAFMIPIYLTAVYTMSIEKGLFARIMALDIIRKLGRTSFYPYLMHIPLVSIITLFCERVLGYKKFLH

SEQ ID NO: 103898 - protein, 67 aa, Unknown
  Obtained from environmental sample
  misc_feature (1)..(67): Xaa is any amino acid
MITSKKLSPERIKEIKNFPIIYDEDSPKLTSDQIARMKPLHSKYWKVEPVKVSLSIKIDADVLKWFK

SEQ ID NO: 103899 - protein, 213 aa, Unknown
  Obtained from environmental sample
  misc_feature (1)..(213): Xaa is any amino acid
MPLGMYALGQLTVAMGSMLSFLTVRPKFYEVAVSSALFFTALGLWLILGNSSAKKARFIEIASGSLCMALAVGCRPTYVFYLLLIPVVLFEELKRLWNDKKRFFGFCACVAIPCIIAACGLMWYNYIRFGSVFEFGINYLIGVAGRADSPLNPIGMLTRFLVGCFCFLVPSFDVRVSFPFIFFKNIDTGLAYKTYFYITPVFGLLALPVTWFI

SEQ ID NO: 103900 - protein, 63 aa, Unknown
  Obtained from environmental sample
  misc_feature (1)..(63): Xaa is any amino acid
VLRQKFEKELEKDRKFVEGLKARLANGEFLKNAPPELVEGEKLKLEEGLKKTGKLESYIRDMA

SEQ ID NO: 103901 - protein, 295 aa, Unknown
  Obtained from environmental sample
  DOMAIN (13)...(294): Sodium:neurotransmitter symporter family
  misc_feature (1)..(295): Xaa is any amino acid
KRRAIFPELEPKGSKWHLFSWAAMAGNYLLMMFYTTVSGWMIAYMVKIAKGDFVGLSPDQVGGVFGAFVSDPAQMVGWMILVCLLGFGICAGGLVRSVEKVAKVMMIGLYAIVAILAIRVVTLPGAGAGIEFYLKPNLSAIREQGLFTVLFAALGQAFFTLSLGIGSMAIFGSYINKEKRLAGEAITVTILDTSAALLAGLVVIPACFAFGLSPTGGPGLIFMTLPNVFNGMGMGQLWGALFFLFMTFAAMSTVIAVFENIIAFAMDITGCSRIKSTCINLVAVILFSLPCALGF

SEQ ID NO: 103902 - protein, 255 aa, Unknown
  Obtained from environmental sample
  misc_feature (1)..(255): Xaa is any amino acid
MRFLSCVLLVLLLSSCVGRVVTPIFEDENTVIEVIDPLRVRASEIAASLDNRLLASQVLISGIDDNKSLSVKMTELFTAIPAGGIMLFKYNLNTDNDTIQVRLAQIKKLIKSESNISPFFAVDHEGGGVNRFRRGVADLPAASGYYERISQGRAETLAVIEADSLKAGREIHNLGLNMNFAPVAEYLFDGNRKFLSKRSYGPDPLFTAQAAEAFIRGMEQAGVLCVVKHFPASAGPDPHRSPSVLDMDRTALDNL

SEQ ID NO: 103903 - protein, 59 aa, Unknown
  Obtained from environmental sample
  DOMAIN (8)...(59): Plasmid encoded toxin Txe
  misc_feature (1)..(59): Xaa is any amino acid
MQIEIKAWHKKAWEDYLHWQENNCAILKRVNELLKTIERDPFHGIGQPEPLKYDLAGCY

SEQ ID NO: 103904 - protein, 215 aa, Unknown
  Obtained from environmental sample
  misc_feature (1)..(215): Xaa is any amino acid
MISKLTKFVQMAAIGFALTLTLSCSGGDDNGGGTSSDSGGYVSSSSGDNGSGSSSSVTGGGGASSSSATNGGGSSSSVTGGGGGSSSSVGGGGATISYIINGSGTTFTATKNGATVGTADQSISNVINAIRTDANGANLTIQFGNGTSVLDIGDNSASFDGTWGIITITGKIISANRYTITLTSSANVSINSTADISNRNTSISGGGIISGNGIY

SEQ ID NO: 103905 - protein, 289 aa, Unknown
  Obtained from environmental sample
  DOMAIN (8)...(115): RNA polymerase Rpb1, domain 2
  misc_feature (1)..(289): Xaa is any amino acid
NGFGAVQPFIYSELEKRGHASTIKSAKKMVEREELVVWDILSEVVREYPILLNRAPTLHRLGIQAFEPLLVEGKAIQLHPLVCSAYNADFDGDQMAVHIPLSMEAQIECRVLMMSTNNILSPANGAPVIVPSQDIVLGLYYMTVDRHFEKGEGMTFCAPWEVVAAYDANRLALHARIKVRMPDGTLAETTTGRILIGEILPKGVPFELVNCVLTKKNIARLVGSAYRDAGIKATVILCDRLKDIGYEYATRAGVTIGVKDLTVPAGKKNILEQSQAEVDDIERQYRDGI

SEQ ID NO: 103906 - protein, 118 aa, Unknown
  Obtained from environmental sample
  misc_feature (1)..(118): Xaa is any amino acid
MKTITTIGIDLAKNSFSIYGVNAKGKPVMQRTLTRAGVVRFFAHLPACLVGMEACASSEYWARTLESLGHEVRRIHPRYVKAYLLGAKNDVNDAAAICEAVQRPNMRFVSHKSPAQTD

SEQ ID NO: 103907 - protein, 288 aa, Unknown
  Obtained from environmental sample
  DOMAIN (132)...(164): Putative Fe-S cluster
  misc_feature (1)..(288): Xaa is any amino acid
IEYFLGKKMSVDSAVGCQTFERLATYAETPGEMLPRVFDVLNCDDGCNMGTACLQEVNPFEVNRKMDGARSAALDGRDRAHYDKVYKLYDSTLDPSDFARSYSPRPVKIPQVADADIAKAFMALGKDTFEKQNVNCGACGSDTCLGMARKLVLGVNIPANCIVKSKEDARVEHEQSKAVREQLAEMENIRNLEERIRSLLDAIPLCIHFWSSDLKMVDCNKATLDFFKVSSIEELLAKHHMLNPEFQPSGDRSEELHHYLVKKAFDEGYMHTEWMHRTLDGELIPAEV

SEQ ID NO: 103908 - protein, 294 aa, Unknown
  Obtained from environmental sample
  misc_feature (1)..(294): Xaa is any amino acid
GGPFAREVFINRLGLNATMLREEPREDLGGLDAHGHPLHPEPDFDYIGELIKLNASGKYDIVAAWDSDVDRRLDGGKGFFIESADEFALFSMHAELIGVEKLFPHEIYFGRSTVTAGTIDLMQSYLEKKFPKHSVHAVETPTGFKWIAELGNWGVEESNGAGNPYIREKDGIFATAFLLKIVLETGKTVQELMETVWKEFGRVFFTRGEVSGSDEGEKTLLTSILKDAAKYAGKTYGTLKLEKAGAWDYIHPKTKQTADTNCAFFLQFSEGDTIKARFSGTGSGGYTLRVYCTK

SEQ ID NO: 103909 - protein, 184 aa, Unknown
  Obtained from environmental sample
  misc_feature (1)..(184): Xaa is any amino acid
MEEMGSPEEEDWTFNERNPHMKGTTSVLRLLFGKNLGVDYESEFINMTNGEKCHIFEAFALVNYLFCSALKEGHGMAGHSTRKMKDNCCEHFKNTIKRLKPNIIIVQGFMIGKWIKDSFDNIEPIRGSEIIYKANLNDVSAIIAFFSHPSSRGKLNWGSNDHTEYLLNTVKPIVKKIQKIIGII

SEQ ID NO: 103910 - protein, 280 aa, Unknown
  Obtained from environmental sample
  misc_feature (1)..(280): Xaa is any amino acid
DKASDSVEKLIAKQRARTIGNALDEKDKELAESKLTASELYQRSMDKEIAKQFEYANALKERAAALRAIGKDATAMEKNAAAVEGDAKKMKERLAGVVDKMEINEAKSAMSAVLGAGIRNAELEKVLLQQQTEELHKQIDLVARKNNLSAETADGLKEQARVKQLEAPLREFAPNYFKAADEAKKIREAEAAIKAYVATLEEGSSKVAAANLTAAAFENLTEWGRKAREIKDALDPMRGYRRELALIDEAYKQNALSADQYKKALEKLSIDTMRQLAEQG

SEQ ID NO: 103911 - protein, 247 aa, Unknown
  Obtained from environmental sample
  DOMAIN (2)...(225): RecF/RecN/SMC N terminal domain
  misc_feature (1)..(247): Xaa is any amino acid
MRLLSLEIHGFKSFADSQRLVFPGGMTAVVGPNGCGKSNISDALAWVLGEQRVSLLRGAEMADVVFAGTSERSAMGMAEVKLVMEMEGHSQLQAKEHPQQPADAAKREVTVSRRLFRDSGSEYRINGRECRLRDVQDLLMDTGMGTRAYSFIQQGQIDQILSAKPKDRRQLLEEAAGITRYKARRAEAERRLLDTRANLQRLDDILFELGKQQDSLKRQAARTRRAVELEQGIKAAQRILLTGKALE

SEQ ID NO: 103912 - protein, 163 aa, Unknown
  Obtained from environmental sample
  misc_feature (1)..(163): Xaa is any amino acid
FRSGYRGKLQAAQRQAVNAAATDRGDSDVCTVLEAAYKVWHEIHRLMGLLRFCPNEDGVYIARCEPDHFVLPALWPHFRERFGETPWAIIDEKRRFCLRYTTGELFEFFNIDKNPTFLKSSPNGEWDNLWRLYHKTINNESRNNPGLQRRFMPQRYWKYLTEV

SEQ ID NO: 103913 - protein, 138 aa, Unknown
  Obtained from environmental sample
  DOMAIN (1)...(138): Domain unknown function (DUF388)
  misc_feature (1)..(138): Xaa is any amino acid
MKKYTILIVCCLISLVAVATVSAQGFTGPGANPPPPSGSGYYPPPPHGPGHYPPPPHGGPGHYPPPPPHLEGITERYGFTGPVRTVTIEQAITYAHRTPVIITGTIVQAIGGDLYLFRDSSGEIVLRIGPREWYALGS

SEQ ID NO: 103914 - protein, 266 aa, Unknown
  Obtained from environmental sample
  DOMAIN (154)...(266): GTPase of unknown function
  misc_feature (1)..(266): Xaa is any amino acid
MDGFIAGKPIRLIDTGGFKLERSVGRGTSLQSAAAENNDIIDDLVVTKTLAAIKKASLIVLLLEAGEINSEDEEFIALLRPYQQRLIIAVNKTEGGRREADSWNLLSYGFEKVFMISAEHGDNVGDLEQEIVSRLDFSAIQEAVAPSVEERQPIRIALLGKPNTGKSTLSNRLTSSNASIVSDIPGTTRDVIEGSFCWKSRDRRSHDCKSHDFVILDTAGIRRKSKVTENIEYYSVNRAIKTINEADIVILMIDAQEGLTEQDKKI

SEQ ID NO: 103915 - protein, 269 aa, Unknown
  Obtained from environmental sample
  misc_feature (1)..(269): Xaa is any amino acid
MSLTLFLILYFLINFRPNPVTLVQNRIKTLRNNLFEQLYIKKTWQDRAKWILELEQRRDEIRFELKSRLKIKRRLEKKIDDIIDKAWDELLAVMKSGYDKASLEEIVKTRSVKIEKSGTEEAEDFEEIDEAEALEEAEEIDEIDEIDEIEEIDEIEEIEDSDEVEAEKVKSYKEIRLSKGLLKAASEILAKIKKEETKGFAPAHTGKGLLKRAIELNNTKEIFSRPAGGKGLLNHAIELLNSSERKSKKPTGKGLLALASAIKRKCRFL

SEQ ID NO: 103916 - protein, 69 aa, Unknown
  Obtained from environmental sample
  misc_feature (1)..(69): Xaa is any amino acid
MLQSLFIENYALIDKLEINFKHGLSIVTGETGAGKSILLGALGLLVGQRADIAVLKDKERSCVVEGMFV

SEQ ID NO: 103917 - protein, 125 aa, Unknown
  Obtained from environmental sample
  misc_feature (1)..(125): Xaa is any amino acid
AIDDAWENARLNGIDNAAFYAGDMKDVLNDTFIAQNGKPDVIILDPPRAGIHPDVAQAILRAAPQRIVYVSCNPATQARDLSLMAKQYAITEVQPVDMFPHTHHVENVVVMELKKVESGELRIAN

SEQ ID NO: 103918 - protein, 265 aa, Unknown
  Obtained from environmental sample
  DOMAIN (1)...(134): DEAD/DEAH box helicase
  misc_feature (1)..(265): Xaa is any amino acid
AGKTVTALLAALPALNSGRQAAWMAPTEVLAKQTKATVEKYLEGVGIGVGYLGAGDTPEKRRTLAELASGALRFVVGTHALFMPSVKFSNLGMVIIDEQHKFGAAQRLRLHEKGPASDVLLLSATPIPRTLAKTLYGDLDVVEIAARPGRAPVSTHIVPEGKRADMEGFILERIGAGGRAFYVVPRIDQQDDDSEDDGEAGVSESVKTVDSVAAALKRGPLSSVPIYKLHGRMPADERDEAIRAFKEGPPGVLVSTTIVEVGVDV

SEQ ID NO: 103919 - protein, 247 aa, Unknown
  Obtained from environmental sample
  misc_feature (1)..(247): Xaa is any amino acid
LEHIELFGDLAGYKDIDPFKRWDPVNIEAAVKMGELHNRLKDIGYSGHQLELYLVRLMFCLFADDTGIFEPPNLFNKYILERTNEDGSDLALHIQKIFEVLNKPKDQRLKTIDEQLNIFPYVNGHLFEERLETADFDRPMRDTLIECCTLDWSKISPAIFGAMFQSVMNDEERHDIGAHYTSEENILKLIRPLFLDGLRDEFEKIKKHSSALRRERLIKFHDKLASLKFLDPACGCGNFLVISYREL

SEQ ID NO: 103920 - protein, 289 aa, Unknown
  Obtained from environmental sample
  misc_feature (1)..(289): Xaa is any amino acid
VHIYDIEKNLNANAFTRENYRFIGWAESPLGTVKYDDEQSIKNLTHENGATVSLYAVWGHFYTVAYDANGGSGTMANSDFVYHVPQNLRANSFTRTGYIFTGWATFAAGEAVYKNQDSVKNMTTIAGETVTLYAIWASTVTYDINGGTGTTPTAQTVYAGSSIKLPDGGGLSRTDYTFSGWNINPAGTETNYNAGSSYTPTGNITLYARWVSSVTYNINGGTGTTPTAQTVPAGSSIKLPDGGGLLRTDEQSGSNVFSKADYAFIGWNTNPAGTGTNYDKGSSYTPTGN

SEQ ID NO: 103921 - protein, 242 aa, Unknown
  Obtained from environmental sample
  misc_feature (1)..(242): Xaa is any amino acid
MPFFAGTPLDKITEGDINDWLVGFKNRKIEKDGKTEIISYQNTYANTVLKTFSLMLGEAVRRGLLAVNPCEKVQKLKNDRRKLEILTVEEVRKLYPKNYTEVWGDRKIAYAANRLASLTGMRIGEILGLRGEYVFDDYIMVCGQYGEKGYKPFTKTKENRNIPLMPEMIGLLKGLMKNNGQGFVFSDNGGAKPLSDDCISRAFHAALVKIGINEVEIKRRGLSLHGWRHFLNTELQRQGLTI

SEQ ID NO: 103922 - protein, 266 aa, Unknown
  Obtained from environmental sample
  DOMAIN (18)...(266): Glycosyl hydrolases family 35
  misc_feature (1)..(266): Xaa is any amino acid
MGTAVNPEGKTISFDAQSMLYNGKPALPVMGEIHFSRYPDAEWKKELLKMKAGGITIVATYIFWIHHEEVEGKYDWSGQRNLRKFVQLCKELELPVVLRLGAWCHGEVRNGGIPDWLVSSGIRLRESNPEYMEKVRTWYGSIYAQVQGLMWKDGGAVIGVQLENEYRGKWEHLMELKSIAQKVGFDVPLYTRTGWPELRTPAVFGEIVPLYGDYADGFWDRSTKEMPGDYGRSYLFRSFRNSTVIATEQLPKQSDKDNVSDLAYPY

SEQ ID NO: 103923 - protein, 282 aa, Unknown
  Obtained from environmental sample
  misc_feature (1)..(282): Xaa is any amino acid
VYPLDYDNWLLSHQSPVRTLGMVSQERLAEVARDDSFLAALNEVYERFLKYKKGETWYRGSRKEVVAYFSMEYGMDVSLPIYSGGLGILSGDHMKTSSDMGLPLVGVGFLYRQGYFTQYLNADGFQQESYPENDWYNMPVELKTDKSGSPIKISVDMAGRVAVAQIWEVKVGRSSLYLLDTNIQENAQDIRNITAALYGGDKETRIQQEILLGIGGIRALRALGINPAACHMNEGHSAFLGVERIRELMVEKGFNFDEAREAVWPTNVFTTHTPVPAGNERF

SEQ ID NO: 103924 - protein, 273 aa, Unknown
  Obtained from environmental sample
  misc_feature (1)..(273): Xaa is any amino acid
MVFSSIIAEELKIEEHRVKAALKLMEEGGTVPFIARYRKDQTDNLDEIQLRDIQHRKESLTELSERKETVLKTIEELGKLTPELKAQIDACRDKNLLEDIYAPYKPKRSTRATIAKDKGMEPLAKIIWEQEETSNSAETIAMAFLSEEKGIADPAAAIRFALDILAEDVADNTEFRQYLRAQIEKQGKMVSKVKKEFEGKESKFKNYYDFTEALGTIPSHRMLAMRRGEKEKVLRLSIEVPDEALIGYLCEKVIKEKEFGSPTGSYVQGFWDR

SEQ ID NO: 103925 - protein, 82 aa, Unknown
  Obtained from environmental sample
  misc_feature (1)..(82): Xaa is any amino acid
MGDSQTVKEILELRQAGENMAKRWAATCCCRAAIKDGDILGDETAFELGREALLLPDPRCPHGRPVWTEISREALFKAVRRE

SEQ ID NO: 103926 - protein, 159 aa, Unknown
  Obtained from environmental sample
  misc_feature (1)..(159): Xaa is any amino acid
MDLLRSYRPLRVVTHINHAKELSPDTRAALASLVEAGIPVHVQTVLLKGINDNAETLALLFRECLNLGLSPYYLFQLDLAPGTAHFRVPLKRGLAIYRELERQISGLGDGRLLALPTYAVDLPGGGGKIHLGEETIAGEDGGVLLLKGHDGKLWKYPIE

SEQ ID NO: 103927 - protein, 282 aa, Unknown
  Obtained from environmental sample
  misc_feature (1)..(282): Xaa is any amino acid
MILASVAVLSVFTLNRSAALEVETTYEYAGELAKLNAKEIQRQMEVFTDYGNVLVQIFNSYEDMEMNRRRDTYDDILQSLISTVDSITGIWTAWFPGTIDNQDARLGQYQTYFHRMNGPVVKEASGYEGWQGHLARVTAKGLTSTTGAEPAFQELTDPYWANVAGKGNVPIVSAIFTVKNNSGKIVSLIGINFISTVQELVDDLVKEVYNGEGLAAIYSDDGTIVAHWDKDRVRDNIKTNAKEKELFGNDINRLAAAILYGGENGKNQVTLEKFSPVHNTDI

SEQ ID NO: 103928 - protein, 54 aa, Unknown
  Obtained from environmental sample
  misc_feature (1)..(54): Xaa is any amino acid
GSSLERDLALKIGAPHLSVSFPVANRAAINRGYTGFDGGLTLTEDLLSAAVAAR

SEQ ID NO: 103929 - protein, 65 aa, Unknown
  Obtained from environmental sample
  misc_feature (1)..(65): Xaa is any amino acid
TYIKPGLPPGPISAPGIVALRAAIFPEKTEYFYFRLNDPAAGRHYFSKTLDEHIEAGQLIPKGRS

SEQ ID NO: 103930 - protein, 295 aa, Unknown
  Obtained from environmental sample
  misc_feature (1)..(295): Xaa is any amino acid
MCAIAGAMFGFIVFGGKVMELFGFSLVEVLIYPNLMCIAIFALRRATWAPRGRGGIADFYRQPPAATFGYTLVCVMANVGQYAPLFMGVSVSLVLFLMYLQPVWTIIASALFLREKFTRANCAACMAAIAGLVLLLAPWRGAEYSVPGVILALMGGMGLSGWVLMNSYFSKKGISPAIQAMIMNINQAVPFIIALPVIAAILPDPAVSGIAWRGAMPLLCVFAFSFLVYIVGHTLFYRAERRISATHAGLIILLEPVVGTTLDIIALGSPFGWNMAAGGGLILSVNAWIILANKN

SEQ ID NO: 103931 - protein, 288 aa, Unknown
  Obtained from environmental sample
  DOMAIN (211)...(288): Bacterial Ig-like domain (group 2)
  misc_feature (1)..(288): Xaa is any amino acid
AVTAVSAAQATITVTTADGSRTATCSVTVTSAYVPVTGVTLSQTSLSLEVGNSATLIATVSPSNATNKNVAWSSSNPNVATVTYGTVTALAAGSATIIVTTADGSRTATCSVTVTSPYVPVTGVTLNKTSLSLTVGNTETLIATVLPSNATNKNVAWSSSNPNVATVTYGTVNALATGSATITVTTADGSRTATCSVTVTNGGGGGGSNVPVTGVTLNQTSLSLVVGNTETLIPTVLPSNATNKTVGWSSSNPNVATVTYGTVTALTAGSATIIVTTADGGKTATVPY

SEQ ID NO: 103932 - protein, 237 aa, Unknown
  Obtained from environmental sample
  DOMAIN (1)...(70): MoeA N-terminal region (domain I and II)
  misc_feature (1)..(237): Xaa is any amino acid
MTGAPIPEGANCVIRQEETDGGLTLVKIFKELSPFESFCRQGEDVQRGEVLVRAGERLNYAHAGLLAGAGLPSIRVYARPRVGILVTGDELWLPAQGALPPGKIFSSNQALLAARLLELGVKTSQLGPCADNGPAIAGRIGDAAWETDFIITTGGVSVGCRDLVPEALESLGAKTLFHGVNMKPGGPAMFSLYGRRPVLSLSGNPFAALTTMELLARPALAILARDAALELQYGSGL

SEQ ID NO: 103933 - protein, 182 aa, Unknown
  Obtained from environmental sample
  misc_feature (1)..(182): Xaa is any amino acid
MQFHCLRPESGEKFNFGLKGENGEIIKVTDCPVAVPGIRELLRKKETFQLPPEKDRFTVFSKDAVLLSEGGRQRGKISLLEKDILLDAGVFFQSNCSVLEKLILELQKIAEGVPKNLPMADLYCGVGLFAVFLGGMFPKIILAEENKSAVSLARENLRGADAEFFALRDTDWPRALLRRKDS

SEQ ID NO: 103934 - protein, 91 aa, Unknown
  Obtained from environmental sample
  DOMAIN (2)...(89): RadC, DNA repair protein
  misc_feature (1)..(91): Xaa is any amino acid
VGIDEISAGTVNRCVIFPRLVFEAALKNGATSVILVHNHPGGTAAPSEEDWNTTERVSKVGRLIDIPVHDHIIIASPTNTVSMREFSQWPD

SEQ ID NO: 103935 - protein, 285 aa, Unknown
  Obtained from environmental sample
  DOMAIN (38)...(232): ATPase family associated with various cellular activities (AAA)
  misc_feature (1)..(285): Xaa is any amino acid
MSVQSEAATALIGGAERVIKGKREFLELLTAGILAGGHVLLEDNPGLGKTTVAKTFAALIAGRDGNPLCFKRIQFTPDLLPYDITGVDVFDPETRSFRFVPGPVLANIVLADEINRTTPKVQSALLEVMAERQVTVGSTVHKPPEPFFVIATENPIESEGTFPLPAAQLDRFMMRLSLGYPDRESELSILDENPAVKALAELKPVLTEAEFLSARTAAADVYCHQSLKEAAADIVRETRNHRSFVLGASPRAALHFLGAVKALALVRGRDYVYDEDLLVFGAPVL

SEQ ID NO: 103936 - protein, 62 aa, Unknown
  Obtained from environmental sample
  misc_feature (1)..(62): Xaa is any amino acid
VGACGTAAVITPVYSITRGDKIYTFGKENEAGETLTRLFKEIQGIQYGEIEDKYGWMLQVKG

SEQ ID NO: 103937 - protein, 86 aa, Unknown
  Obtained from environmental sample
  DOMAIN (1)...(60): Global regulator protein family
  misc_feature (1)..(86): Xaa is any amino acid
MLVLTRKKEESIRIGDDITIKIVDIDNRQVKLGIEAPKHVTINREEIYQRILAENEAASKAPASVDNGLMHIADLLNGIIPFNAKN

SEQ ID NO: 103938 - protein, 166 aa, Unknown
  Obtained from environmental sample
  misc_feature (1)..(166): Xaa is any amino acid
MTLGALRFALAVVILFFIKRKIAPEDKIEEKDIPLLAGAGVSGVTLYFFFENNGVALIPASEASIFVGSIPVITMISEAVWARITLSRKKELKKEEPKIDETTTVSKKQQSLFLKIMLPGIGALISLAGVALVAGVSLALSGTALGYAYMSGACISWVAYCLLTRP

SEQ ID NO: 103939 - protein, 191 aa, Unknown
  Obtained from environmental sample
  DOMAIN (21)...(168): FAD synthetase
  misc_feature (1)..(191): Xaa is any amino acid
MAMSMQVISWEEYISSFSVSSPLAVTIGVFDGVHKGHQSLIQRICASPYTPAVVTFRQNPLCTLKPDAFAGDIINLEQKLSFLEVLGVQLTVLIDFSPKFSKINGRDFIDLLLNGQAVKLIALGRNFRCGYQLDTGAEEIQNLAGARGVEVWIAPPVMDEGQPVSSSRIRQALAAGRQTEAERLLGRPLGR

SEQ ID NO: 103940 - protein, 180 aa, Unknown
  Obtained from environmental sample
  DOMAIN (37)...(180): Phage antirepressor protein
  misc_feature (1)..(180): Xaa is any amino acid
RSSLPEAERVERWIFEEVIPSVLKTGGYLHAQADESPEAILARAVIVAQDTIKRIEAKAASLAAKIEADRPKVVFAESIEVAKNSILIGELAKLIRQATGRDIGQNRLFDFMRDNGYLHKHGSQKNMPTQRSIEAGWMEIKEGTRIGAGGECHITKTTKITGKGQIYFINMFSHPCEERQ

SEQ ID NO: 103941 - protein, 200 aa, Unknown
  Obtained from environmental sample
  misc_feature (1)..(200): Xaa is any amino acid
MYTRPYDETHQVVRLDETNRQLIEEIRLPRPVQPGQPALYDYEYARNGTANLFMMFEPLKGRGEVNVTERRTANDFAHCLRDLAEIHYPHAEKIVLVTDNLNTRTLASLYAAFEPEVALPLAPRFEIRYTPTHGSRLNMAELEIGVMSRQCLGRRIPSIEETAGEVQSWVTQRNNNKTTVHRQFTTADARIKLQHLYPRI

SEQ ID NO: 103942 - protein, 95 aa, Unknown
  Obtained from environmental sample
  misc_feature (1)..(95): Xaa is any amino acid
MVTLSKYDPIEYLDTNEDIAEYLAAAMERGDEAQMRSCLADAAKARAINQLAKETGIDRLELCRMFAQGGEAPPPSLESMAKVAKAFAVPAHAGA

SEQ ID NO: 103943 - protein, 285 aa, Unknown
  Obtained from environmental sample
  DOMAIN (25)...(249): Glycosyl hydrolase family 3 N terminal domain
  misc_feature (1)..(285): Xaa is any amino acid
SGGGSTPSENNPKAWLRMVNGFTEESLKTRLKIPVVYGLDAVHGHNNAKGATILPHNIALGAIAAGDQMKGAQAAYTAGKITAEEMLATGVRWTFAPVLGVAQDPRWGRTYESYSENVVLVSALGEYFIKGLQENGAAACMKHFLGEGQTVDGHNQGNALLDRTGIEQILPPYRAAIREGAMSLMPSFSSVNGIKMHQNKELLTDLLKGEMGYKGFIVSDWSAFKQLTGGSYRMQIANAINAGVDMYMAADNRDHWMSFITNLTKLVEDGIVPMSRIDDAVIRIL

SEQ ID NO: 103944 - protein, 287 aa, Unknown
  Obtained from environmental sample
  DOMAIN (6)...(72): N-terminal ig-like domain of cellulase
  misc_feature (1)..(287): Xaa is any amino acid
SQKAVITVNPPNNNIGINFSIVRVSDKTVVYSGTASEAVSDSASQDTVRIADFSNFTEAGEYTVCSGALHSFPFAIGDNPYADLRAAALEMFHYQKCGVDLECGLWSHPACHITPAVIYGTEKKKDVSGGWHDAGDYGRYIVPAAKTIADLLWAYKLAANPDQRILDIVWFEIEWMLKMQDEESGGVYHKVSCEKFDALDEMPQDEKSGLFLSPISATATADFAASMALASRFYPDKKETLLKAAQYAWNWCLARPDAVGFTNPPGISTGAYGDDDSRDERFWAACA

SEQ ID NO: 103945 - protein, 270 aa, Unknown
  Obtained from environmental sample
  misc_feature (1)..(270): Xaa is any amino acid
MYPMSLFESGESNGTVSLLKLFDDRDYAIDGAKSDLSVEQLIFAACRGGWPASLFKKTDKASLFTASSYIDNICESDASTVDGVSRDPRRTREILRSYARNISTLSGNKTIIKDITANFGTISENTFYSYFNALNRLFVIDEVPAWSPAIRSASAIRASNKREFIDPSIAAAALKISPEILMQDLNTFGYIFENLCIRDLKAYSHAHGGEVSYYHDRHGLEADCVLRLNDGRYTLIEIQLGSRQIEEGAKHLLTLQNLIRKIYADESVKI

SEQ ID NO: 103946 - protein, 226 aa, Unknown
  Obtained from environmental sample
  misc_feature (1)..(226): Xaa is any amino acid
MVNGRRLGKDELSAASGAVGLQPGKASITVTGNQKTLNFTLPVNLDPGDNRIEVVAFNGYSENRRYVDVNWNAPVGNKPALPNLYILAIGVNKYDNSGPQLGNLRNLDYCVADARGVIESLKAQEGIRYGKVNSLLIADNAEIQPTAENIRKNLSFLERAGPKDVALLFLAGHGMSAAEGKFYFLPRDAVISAGGNVNTSRAISGDEIVAVLDAPGNRLVFIDACQ

SEQ ID NO: 103947 - protein, 153 aa, Unknown
  Obtained from environmental sample
  DOMAIN (7)...(120): TRCF domain
  misc_feature (1)..(153): Xaa is any amino acid
EPSGTFDVKISLGPAQISKQWIGQSSERVVAYKRLSRIRSERDLELYRLELEDRFGPMPQGDKDTRQFFKIMGVKLQAQQLAISEITHSEGKIIFKLSPQTPIDPAKLMTWVQQKKGATFSPDGSVSVSAQAGSAQSLARSILNEWAECVGGN

SEQ ID NO: 103948 - protein, 276 aa, Unknown
  Obtained from environmental sample
  DOMAIN (127)...(224): CarD-like/TRCF domain
  misc_feature (1)..(276): Xaa is any amino acid
MLHLTEWQSEASLPLQAQPVREFSGRLGELGEYLQHSALTGNRIFLAGSTAGMRDRFKEIIRDYELPLSSGTDAGCHALALNLSGGIHLVGQKLIVLTEREVFGRRAVPPPKPQKNRISAFLSDLRDLKPGDRIVHLDHGIGEFIGFGEITVGGEEQDVIQIRYADGGRVNVSLERADLVQRYVSPDGTVPPLDKLGGASWAKVKRRAKKAIRDMAEELLKLYAKRKMEKGFAFSTDGPEMAEFEAGFQYEPTPDQVEASEAIKADLESSKPMDRL

SEQ ID NO: 103949 - protein, 232 aa, Unknown
  Obtained from environmental sample
  misc_feature (1)..(232): Xaa is any amino acid
MLNTRLLTVLLLFIITILFFSCENKSNKNESDKQNEITVDFDLGSDDENEIKTIHVFVALCDNKYQGITRVSAALGDGQNINTNLYWGARYGIRSYFKNSDEWKLLTTQKKKGIIMERLIFKHKEKNFFLIADAYDGKYIKQCTLDFLNSGSGNQKDTLKINGKTIGISGNASLLAYIGHDGLMDFQLSETFVNTDNIKRDMIILACYSKKYFTPVLEQANVNMLVWTTNLM

SEQ ID NO: 103950 - protein, 80 aa, Unknown
  Obtained from environmental sample
  DOMAIN (43)...(77): Putative Fe-S cluster
  misc_feature (1)..(80): Xaa is any amino acid
MTIVLTTALLSLAIAFILGLALGFFKEFFAVEEDPVKTQIRAALPGANCGACGFPGCDAYAASIAKGGAGINSCSVGGQA

SEQ ID NO: 103951 - protein, 163 aa, Unknown
  Obtained from environmental sample
  DOMAIN (98)...(162): KH domain
  misc_feature (1)..(163): Xaa is any amino acid
RAQEYIELRFRSVKDRCFEVSANTGQGIDALLNALFTLAPEGDALYGDEYYTDQETGFRITEIIREQAINRLRQELPHSLYVDIADMEFKDEKLWVRAFIVVERESQKGMVVGKGGEMIKAIRLASLKNLKQIFDWKIDLDLRVKTGKDWRHNDNTLKKIISS

SEQ ID NO: 103952 - protein, 292 aa, Unknown
  Obtained from environmental sample
  misc_feature (1)..(292): Xaa is any amino acid
LGRATPEEKADNVAAFLLDYYNDRSPNEEIKRDIINALGDTGSKDGISFLTDLISDSEEKGVIRMAALDAISKLGDEVSLDAVIEAVSSADPNVRSSAIAALAPFSGEATENAILEAFRDSYYRTRIGAAQAAGKRRMESAVPYLKYRAENDEVPTVKDEAIKALGAINNDEAMAILDSLFSERKNSDRVRIMAADMLLQNNAEVYGSRVFAEMDDAKLKNQIPLYNGFIRVMGNAKAAAMENVALRLIQGGGVIEKSLALDLILNNEFRQMADVIRSLWMKRNTAPVCKKS

SEQ ID NO: 103953 - protein, 174 aa, Unknown
  Obtained from environmental sample
  misc_feature (1)..(174): Xaa is any amino acid
MSGKTAFEYFRDEKLLIGWNIGNSLDAYINGRANETGWGNPRINQELLNGVKKAGFDLVRIPVTWMGYIGPARDHHIDETYLARVAEVAQMAHKAGLKAIINLHHDGSTESVGKENGWLSINKARASKEGYNEVTHKFARVWKQIATYFKNHGDWLIFEIMNEIHDGNWRERSV

SEQ ID NO: 103954 - protein, 219 aa, Unknown
  Obtained from environmental sample
  DOMAIN (4)...(219): NAD dependent epimerase/dehydratase family
  misc_feature (1)..(219): Xaa is any amino acid
MKKALVTGITGQDGAYLSEFLLKKGYEVHGIKRRSSSFNTQRIDHLYQDPHVENKRFILHYGDLTDTSNLIRIIQQVKPDEIYNLGAQSHVQVSFEVPEYTADSDGIGTLRLLEALRILGMEKKVRFYQASTSELFGKVQEIPQKETTPFYPRSPYAVAKLYAYWITVNYRESYGMYACNGILFNHESPMRGETFVTRKVTRAAARISLGLHDKLYMGN

SEQ ID NO: 103955 - protein, 166 aa, Unknown
  Obtained from environmental sample
  misc_feature (1)..(166): Xaa is any amino acid
MEHRNPNAVGAILIHSEMSCEIIADNFHIHPDLLQFLLRDKPIEKIILITDGLKPTEQQEGPFFANGEEVVFHDGAFHRVSDNVIAGSGLTMIRGIQNLVSAGFSLADAVKTATINPAQVMRYTKQGALIPGKLADITVFDKNFNIRLVMVDGKIIQGEDNADSYS

SEQ ID NO: 103956 - protein, 124 aa, Unknown
  Obtained from environmental sample
  DOMAIN (15)...(123): Glucosamine-6-phosphate isomerases/6-phosphogluconolactonase
  misc_feature (1)..(124): Xaa is any amino acid
MRIVIHKTHEEASRWAASYIANRINGYGATADKPFVLGLPTGSSPLLIYKEFIRLNREGKLSFANVHTFNMDEYAGLPSDHPQSYHYFMMENLFKHIDIDPANIHLLDGMAKDPVEKCLLYEEA

SEQ ID NO: 103957 - protein, 280 aa, Unknown
  Obtained from environmental sample
  DOMAIN (1)...(196): RNB-like protein
  misc_feature (1)..(280): Xaa is any amino acid
DAVSIESAGEGKRVLYVHVADPASSVAPGSPAEREARDRGATLYLPETTIRMFAENALPLFALGLSEKSPALTFKMTVDEDGEILGTEIFPSVVKVRRITYEEADNIMDTTGETNSEVLRALYDLAALFYKRRSLMGSVNIDLPEVHVTVEDGNVEIKPIIHYRSASLVRECMIIAGEGAGNWAIGKGLAFPYISQEIELQGKVPGGLSGSWQLRRCMRPRVLSTKPGRHQGLGLDTYTQVTSPLRRYTDLLAHLQIRAFLRGEKPLPSEEVMAHRERGG

SEQ ID NO: 103958 - protein, 294 aa, Unknown
  Obtained from environmental sample
  DOMAIN (13)...(294): DNA gyrase/topoisomerase IV, subunit A
  misc_feature (1)..(294): Xaa is any amino acid
DYLNYAMSVIVARALPDVRDGLKPVHRRLMYSMGELGLRHNASTKKCARIVGDTMGKFHPHGDLALYDALVRMAQDFSLRYPLLEGQGNFGSLAPDGAAAMRYTEAKLSRFGEEMLRDLEKETVDFIPNFSEEEMEPTVLPTVVPNLLVNGSSGIAVGMATNMAPHNLGEVCDAVCALIDNPEISIDELMKFVQGPDFPTGGIIFGRKGIKDAYKTGRGKILVRGRFTVESSRSGKETIVFNDIPYGVYIKPLLERIGILVRDKVIDGIANFNDESGKDDPVRLVFELKRAQSS

SEQ ID NO: 103959 - protein, 252 aa, Unknown
  Obtained from environmental sample
  misc_feature (1)..(252): Xaa is any amino acid
MAENANLEILSTRFGFNTAVRHIKKTMEIASKTNSNLADVIYELDDEELTSGRIALLLRMLLVDKLGYKSASTNLESTVSDLSALAKEFGKWSGVDLVAAYMHPEMGVLVANPKVAEELAGFGQLRKRELMVVYAGLQDKPADESCQKAAELALKLFEGSKVTPPAALTKGKFTVKNVSKPKKAGEDKPAAKAKAKAPAKGKTATKKAAAGAGAPVKKAASVVQVQSSGGPAKMTPRYAVVVQNELFHNGNV

SEQ ID NO: 103960 - protein, 257 aa, Unknown
  Obtained from environmental sample
  misc_feature (1)..(257): Xaa is any amino acid
MANKTANSITINAVTITPNPGNQIVEYAIAATATAPSTGWQTELTFNGLNSNTVYYVFARSNETANYNAGAAQRSAEIKTDLLSDSIEFAASLNESVVYGAAFTKALSSTGSGTGAITYASSEPTVATVNNSGVVTILKTGTTIITATKAADTTYAQATASYTLTITRAAGGTVSGNPTSASTTVNSITITAVTISPNPGNQTVEYAISTTSSPVPTNGWQTGLIFSGLTPNTNYYVFARSKENENYNAGAAHVSAA

SEQ ID NO: 103961 - protein, 173 aa, Unknown
  Obtained from environmental sample
  misc_feature (1)..(173): Xaa is any amino acid
MNENGIGWMFNSSIHWSGSVIFDPFNSDKVWVTSGNGVFATSNIKDYSIDSTESWNIKVDQKAVWKVMSHGIEETVPGEVVSIPGGPLVSAILDYDGFRHDDITKYPSNRHLTEVGGEKVSLGNTRAIAYAPKSGKLVKVSDARVYKAQYNEIPIWPLQFSSDKGSTWSVTAY

SEQ ID NO: 103962 - protein, 239 aa, Unknown
  Obtained from environmental sample
  misc_feature (1)..(239): Xaa is any amino acid
LRKIQKNYVIDNKTVDEFINQTHKELISKPDGTGFTQGQADALRHILTTDCQYSAVQGDAGTGKSFSMRYAKELLEKRGYEVCGVTPTGKATDELAAAAGIKTIMTIDSLIKTADKPLKRGKKYCLIVDESSMGGSRTINELLKITQEYNVKVIFVGDKKQFQPVGAGKFFSDLQKTEVKVTHMKDVVRQKTAQTRSVVKALADKEIHEAFNHLAGHTGYKNCIQEIKDGNARQQAVAD

SEQ ID NO: 103963 - protein, 117 aa, Unknown
  Obtained from environmental sample
  DOMAIN (1)...(117): Short-chain alcohol dehydrogenase
  misc_feature (1)..(117): Xaa is any amino acid
MIIKPMVRNNICLNSHPIGCAATVQRQIEHAKKALQPASGAKPRMALIIGCSNGYGLASRIAAAFGYGAVTVGISKEKAASENHTATPGFYNNMTFESEAAKAGLVTRTLDGNAFLG

SEQ ID NO: 103964 - protein, 215 aa, Unknown
  Obtained from environmental sample
  DOMAIN (175)...(198): 4Fe-4S binding domain
  misc_feature (1)..(215): Xaa is any amino acid
DGQREDIYKEARDLGVMFVRYEPERKPRVSQAGGKLAVEVHDPVSGRDLIINPDFLVLASAIVSGRENALGMKYKVPLDEDGWFFEAHQKLRPVDFATDGMFMAGLCHYPKPLDEVVAQAQAAAARAVTILTQPKMTVGGIVAEINHDKCSGCGVCAAVCPYSAINLDPAKAGKAVVNEAMCKGCGTCAASCRSDAPALRGFTNAGLFAQIAAAL

SEQ ID NO: 103965 - protein, 257 aa, Unknown
  Obtained from environmental sample
  DOMAIN (7)...(225): Asp/Glu/Hydantoin racemase
  misc_feature (1)..(257): Xaa is any amino acid
MSAGTLPIGLFDSGVGGLTVLAAMRRRMPHEDMLYLGDTARLPYGTKSPDTITRYALQAASKLVEQGIKLLVIACNTASAAALPVLCRHFAPLPVIGVVEPGAAAAAASSRNGHIAVIATEATIGRGAYQEALQRLRPGVRITSRPCSVLVALAEEGWLSGRVSESVVARYLNPIFKKRDAPDCLLLGCTHFPLLLAPIRKVLGPDAQIVDSAETTAQYVYDELVVTGLLRLRRGKGTVRFFTTDDPERFARTGARF

SEQ ID NO: 103966 - protein, 143 aa, Unknown
  Obtained from environmental sample
  DOMAIN (6)...(121): Semialdehyde dehydrogenase, NAD binding domain
  misc_feature (1)..(143): Xaa is any amino acid
MSTQCRVAVVGATGAVGREMLATLAARKFPATSVVALASSRSAGKKVPFAAGELLVRELTAASFKDLDLAIFSAGGGTSEQFAPHAAAAGCVVVDNSSAWRMDDRCPLVVPEVNAHALDTHNGIIANPNCSTIQMVVVLKPLH

SEQ ID NO: 103967 - protein, 67 aa, Unknown
  Obtained from environmental sample
  DOMAIN (1)...(66): Bacterial DNA-binding protein
  misc_feature (1)..(67): Xaa is any amino acid
LDAILAVLKDALAAGQAVSFTGFGSFKVVHRAARKGRNRRTGKDIAIPAAKVAKFTPGKLLKEAVKK

SEQ ID NO: 103968 - protein, 157 aa, Unknown
  Obtained from environmental sample
  misc_feature (1)..(157): Xaa is any amino acid
MNATHPYARFWKCALQVNPAGYSGAYQGQAHGLDEAAYNQAIVARCLDLNIKVVGIADHGNVEAIDTLRAALEAADIVVFPGFEIASTEKVHMVCLFPEKTTRDQLNRNLGSLGVTDSSNAVRPSNLSCLEIARTIQDELHGFWFAAHMANNNGLLR

SEQ ID NO: 103969 - protein, 54 aa, Unknown
  Obtained from environmental sample
  misc_feature (1)..(54): Xaa is any amino acid
MTDFALKMGITRQGLYKTLSENGNPEFATIQKLITALGLQMSIITPTKAVGKGH

SEQ ID NO: 103970 - protein, 98 aa, Unknown
  Obtained from environmental sample
  misc_feature (1)..(98): Xaa is any amino acid
MANEICLDILGTSFTIDADEDEAYLQKVLAQYRAAVENTQSISGISAPLNIAILTGFMLCDEINKIKQQVEGESAELQERTGNLIAKLDQALKACDGN

SEQ ID NO: 103971 - protein, 101 aa, Unknown
  Obtained from environmental sample
  misc_feature (1)..(101): Xaa is any amino acid
GWVDPLSGEIIKADNEGRPLGRKGEEIPLGGRIVAIADVYDALCSKRVYKEPWGEDDVLKEMRKLSGTKFDPELIEIFFEILPNIKQTQNHFPDLPDTQGS

SEQ ID NO: 103972 - protein, 270 aa, Unknown
  Obtained from environmental sample
  misc_feature (1)..(270): Xaa is any amino acid
MRQHGLKNQPNGLVYAGKVAYIYKGTMPANTSITLLVGTKGISEAAFWSCENLASIAIPNSVTNIGERAFWSCRSLTSITIPNSVTTIGNRAFSACTSLIEINVNTANTAYSSENGILYNKDKTVLISYPAKKSGNSFIIPNSVAKIEDNAFWFCTNLTNVTIGNSVTSIGEWALNSCSNLTSVTIGNNVTSIGSHAFEYCTSLTGVTIPNSVTSIGHFAFDGCTNLVSVKFEGSIASDNFISSSFRGDLRDKYLANGIGTYTTTAPVSF

SEQ ID NO: 103973 - protein, 265 aa, Unknown
  Obtained from environmental sample
  misc_feature (1)..(265): Xaa is any amino acid
SVTSIGSMAFYYCRSLNSVTFASKIDNIESDAFDGLGDLKAKYFAVNGGIGTYTTTNPGQDAVWTKQGGSGGNASDFTYTEENGAITITGYTGAGGRVTIPAQINGKPVTGIGYTAFSYKTSITSVTIPDSVTSIGQNAFASCTNLASVTIGNIVTTIGSFAFDGCTSLASVTIPNSVTSIGQDAFHRCNSLTSVKFEGTIAADNFGSYTFGDYIIFISPFDGDLRAKYLAGGIGTYTRPNGNSDTWTKQGSSSGGGGGGGEGGT

SEQ ID NO: 103974 - protein, 81 aa, Unknown
  Obtained from environmental sample
  misc_feature (1)..(81): Xaa is any amino acid
MDTITVCMGSSCFGKGNSSNAEFITGFIEKHNLQDRVEVSGCLCNGACARGPNIKINDKLISGISEQTVADIIEKELGLKL

SEQ ID NO: 103975 - protein, 245 aa, Unknown
  Obtained from environmental sample
  misc_feature (1)..(245): Xaa is any amino acid
VNNDALIGYTGFVGGNLSRQCSFGGMFNSKNIHEIRGRHFSRLICAGVNAVKWLANKEPEKDLAGIQSLLDVLKTVTADEAILISTVDVFANPVGVDEDCDPYTDDGLQPYGRHRLMVETFFRTHYASLVIRLPGLFGEGLKKNIIFDFLHNNNLKQINSHSVYQFYNLAHLYKDTMRCRAAGLNLVHFATAPVSVQSVALTAFGLEFENGDEQGAARYDLQTKYAELWGQDRHINTQEESLREI

SEQ ID NO: 103976 - protein, 229 aa, Unknown
  Obtained from environmental sample
  DOMAIN (73)...(183): Beta-ketoacyl synthase, C-terminal domain
  misc_feature (1)..(229): Xaa is any amino acid
LQDIMIAGGADELSPVDAAIFDTLFAASTKNDRPQSTPAAYDKSRDGLVVGEGAGALILEEWEHAVKRKANIYAELVGFGTNTDGSHITQPTSETMAGALKLALDSGGIAPDAIGYVNTHGTATDSGDIAETQATYDVFRRAVPASTLKNFTGHTLGACGAIEAWVSILMMNRGWFIPNINLVELDPLCAPLDYITGTGRAIDTQYVMSNNFAFGGINTSLIFKKRGNS

SEQ ID NO: 103977 - protein, 195 aa, Unknown
  Obtained from environmental sample
  misc_feature (1)..(195): Xaa is any amino acid
EEKKYLNACFRAIGSASSGDKKLADQTAEFLVDFYNDRDPGNDNRSAVINAIGATGSSVGVDFLTELATNTDERTALRIAALGALSKIGDPKGLDAIISCISANDPNLRSSAVGALGPFTGAAAENAILDAFRDSYYRTRIAAAQASRDRKLVSAIPFLKFRAERDDVPTVKDEAIRALGAIANDEANAVLESLF

SEQ ID NO: 103978 - protein, 277 aa, Unknown
  Obtained from environmental sample
  DOMAIN (70)...(199): Response regulator receiver domain
  misc_feature (1)..(277): Xaa is any amino acid
MEKSDSAFFDGKKPPLALMVEWGTEVYIPGIRFVSIPVQSLSIANVLNGMADSKDYIKNSGINLFTFPRARILVVDDIATNLKVVEGLLAPYQAAVDTCLNGLKAIELIKHSVLEKREYDIVFMDHMMPEMDGIETTAVIRLWEKQKLEKKAGSPRKQIPIIALTANAVVGMREMFIENGFNDFISKPIDVSKLDEMLNRWIPSEKKDQGPGNHDTPNPELRSRYPVIRNPGPKTTIPIIPGVDTARGIVMTGGTVDAYRQVLSLFCKDAQDRLPLL

SEQ ID NO: 103979 - protein, 152 aa, Unknown
  Obtained from environmental sample
  misc_feature (1)..(152): Xaa is any amino acid
MAMNMNYYVDGSKCYGDIVDNCNIYGRLYTWEMAKSVCPSGWRLPSNSDWQKLVNLAGGDDSAGAKLKAISGWNHNGDSSGNGTDDYGFTALPGGGNSDGLGTKGYWWSSSTESFNNSANRMNMSYENQKVNYTNNSTSKSNMFSVRCLRDE

SEQ ID NO: 103980 - protein, 61 aa, Unknown
  Obtained from environmental sample
  misc_feature (1)..(61): Xaa is any amino acid
VGKDLGYGKGYQYDHDVPGAYAGQEHLPEKLKGSEFYEPTEYGKEKILAERLKELEKRKNV

SEQ ID NO: 103981 - protein, 246 aa, Unknown
  Obtained from environmental sample
  misc_feature (1)..(246): Xaa is any amino acid
MEMEFPFDAKSGMTFNFTGDDDVWVFIDNKLVLDIGGIHSEESASFQLSNVLPSSEMGRRHTLRVFYAERHSTGSNILIQTNIVAPPAGVGISTKDNTGTGGMVGTTINKSADTTITLYSVVRNEDGTVRQPNTEYDCNNVTWTVNGTVIGTGCSIQIRDSVARAEGVKIEVTYRDPDAGELKGSTNMNVRALPPVAVHIQRDSLPKPATTPPANRSDNIYFGVGEEEVRIYAVLRDKYGNFAGYA

SEQ ID NO: 103982 - protein, 268 aa, Unknown
  Obtained from environmental sample
  DOMAIN (4)...(158): Pterin binding enzyme
  misc_feature (1)..(268): Xaa is any amino acid
MCAFLDLALSDPEIAKVPVMIDSSRWSVIEAGLKRLPGKGLVNSINLKDGESEFLRRASLIKRYGAAVVIMLIDEKGQAVNFDRKIEIAGRAYRLLVDSGFPPENIVFDPNVLAVATGISEHDACAIDFIRACAWIRDNCPGVNISGGISNLSYSFRGNNKVREAMHSVFLAHAQAQGLSMAIVNPAALIAYNSIEENLRNAVEDVILNRSPNAAERLLELAEQIAAASSSIPNSSFLIPHSSSSDWRNQPVEKRIVHAMLRGIDDFI

SEQ ID NO: 103983 - protein, 102 aa, Unknown
  Obtained from environmental sample
  misc_feature (1)..(102): Xaa is any amino acid
VTAEVAIMNTRGIAMAADSAVTLGGSGKIYNSADKLFALSKTHPVGIMIYGSASIMGVPWEIIVKGYREFIGSKSFDKLIKYVADFKKYLSRFQFFTRKNNV

SEQ ID NO: 103984 - protein, 285 aa, Unknown
  Obtained from environmental sample
  misc_feature (1)..(285): Xaa is any amino acid
EYRRTAEHPWKGQNLGVFYPLFGDFCLRVYGPELFMSVNTIAPYGQNDGVLWQGRGFNALLKGGVRFEGYGIELTLMPHFAFSQNADFEIMSSHYESEYGYFWGYGEPKSNSGGADAPQRFGNKPFFDWDFGDSEIRYTWKTLTIGFGTQAIWLGPSYLNSMLHSNNAPAYPKFDIGLRRQKIILPWLGWYIGDMEARLWVGQLKESNYFDNDNSNNYTMIHGFSFAYAPSFLSGLTLFVNRICLVPWEWENLKFMFPSGAHTIEDQKVSFGFSWAFPQVGFELY

SEQ ID NO: 103985 - protein, 278 aa, Unknown
  Obtained from environmental sample
  misc_feature (1)..(278): Xaa is any amino acid
GTVSVIPGIYFAGIGEGWEVFFNGKLILSELHLSETGRIRERRTWNDVSFPVDSSFIVSGTNILAVRIMGDPTYRGTGLYYTSAPIYMDNYRNIETSRFDYLYIFLCGFFAFTGIYYLMLFFSVKKKSEIFYLYFGTFSLLICVYIVSLQRLINSLVSNSDISKRLEFGSLMLAIPMFGMFFEALGRGGITKTSRGYAAFSSFLCLTQALFCRQYGEEAIIIWNVMTMVYVTYLLAYEVIYFHFLNKQRNKKQSRESVPIDSILVGMAICYLCGAFDF

SEQ ID NO: 103986 - protein, 280 aa, Unknown
  Obtained from environmental sample
  DOMAIN (44)...(158): Response regulator receiver domain
  misc_feature (1)..(280): Xaa is any amino acid
IIQGISDDKPIGIGDETAEALRNFRYAPEGKDKIITPVWLGPQVQVLVVDDLPANLLVAQGLLAPYGLKVDTVASGREAVELAKSHSYGLIFMDHMMPEMDGIEAAAAIRKMEGYAHTPIVALTANALRGMRELYLEKGFDDYISKPIGQEALDAIINKWINEQITNNSEQLSESLGQNAKPSDDNPLFIANRSLLIEIDARRLDKLNHYRAAFEMSKTSGGLEIDAEYYRRFAALVGSFDNLPDDLQADKELLIEAGQKEDAQRILKTLPAFCESPGDH

SEQ ID NO: 103987 - protein, 277 aa, Unknown
  Obtained from environmental sample
  DOMAIN (114)...(147): Tetratricopeptide repeat
  misc_feature (1)..(277): Xaa is any amino acid
FTQAIVLNPKFEQSYNHRGAAYRNIGELDRAIADFTQAVALNPKYAGTYNNRGAVYYNKGELERAIADFTQAIALNPKFEQAYTNRGTVYADKDEPDKAIADYTQVIALNPKNDYAYYNRGIAYTQKGEPDRAIADYTQAVLVANGNANILNIFHRSWEFAGYFYKNYPFLGAALDANTFDRKRAGVAREALALSIAKAERARAGLGSRGAALMAGLVYQYYASLDFESRFGSAERAFAVSEGLRSRGFLEQMGTEAALRLPGIAPADAQRVRELTE

SEQ ID NO: 103988 - protein, 261 aa, Unknown
  Obtained from environmental sample
  misc_feature (1)..(261): Xaa is any amino acid
MLTEALINWSALIAPKPLVILFDEVDVLEGESLISFLRQLRGGFAGRGIGKFPVSVALVGMRDLKDYITITKGGVAPNPGSPFNIKEDSAVLSNFTQADVENLFAQRTEETGQTINRDALEYVFEQSGGQPWIVNSLFKRATMRILQKDDYRAVRLEHIKEAMEQMILARETHLDTLAYRMEDPKIEKLMATLITGDVDLGLAKSEAFRICSDLGLVTMKKGVPSIANPIYKEVLARQMTIAVQAMIAEPEWQWENADGSL

SEQ ID NO: 103989 - protein, 270 aa, Unknown
  Obtained from environmental sample
  DOMAIN (29)...(121): THUMP domain
  misc_feature (1)..(270): Xaa is any amino acid
MTKGRVFIRSPEDAEAKVEDALRRLIGIAGWAKTQVCEKDVETVVASCVEEGRLLFEKGIRTFKIEARRTDKSFPLDSYGIRCAAGEAVRREVPGLKVDVKNPQGVIDVEIREKAYIYGNAQEGLRGLPVGSAGRGLLLLSGGIDSPVAGYMMASRGMALEAVYFHAWPYTSEEARQKAVTLAEIVGSYCVGIRLFVVNFTPLELRIKERAPEPWMTVLLRMAMMDCAEKLALSRGDKCLISGESLSQVASQTIENIACTSSRIRLPILR

SEQ ID NO: 103990 - protein, 227 aa, Unknown
  Obtained from environmental sample
  DOMAIN (128)...(227): N-acetylmuramoyl-L-alanine amidase
  misc_feature (1)..(227): Xaa is any amino acid
TPYSPILLLIAHCSLLIAQTAETRNYTLDETLSILYSVSNKGKEEFRWDPFFQEGSFAIGGHYGVFSTSPRPGDNGFLMLDNRDIYPVSLPYLDNGRLVFPDQFVMTAKDAFTRSIDEDSSNYRIAAIIIDPGHGGKDPGAIGNVTINGKPKKIIEKDIAFNASKILKDMLARAYPDKRILMTRESDITMSLEERTVIANAVPIRKNEAIIYISIHANYVSAKGPEA

SEQ ID NO: 103991 - protein, 80 aa, Unknown
  Obtained from environmental sample
  misc_feature (1)..(80): Xaa is any amino acid
MAADKLLDEIEKYEEILEDTPSIYKLVPDEYLAKRGLRYVIIKNFLMFFIVNEEEKTVNVIRFLYGLRDWKYLLRQGEFI

SEQ ID NO: 103992 - protein, 197 aa, Unknown
  Obtained from environmental sample
  misc_feature (1)..(197): Xaa is any amino acid
LEPDIVCIAGDIFNGNIYALHNPSGTLDLLKSINAKYGVYACLGNHDGGKTFREITRFLEEGNIKLLNDEHVTIDNRLVLAGRVDSSPIGGFDGLKRKNFADIKTSINTDLPVIVMDHNPLNMGQYGNEIDLILSGHTHRGQIFPANLVTRVMYTIDYGRYQKDEDSPNVIVTSGVGTWGMPMRIGSNNEIVVISLR

SEQ ID NO: 103993 - protein, 239 aa, Unknown
  Obtained from environmental sample
  DOMAIN (10)...(239): GcpE protein
  misc_feature (1)..(239): Xaa is any amino acid
MEQGIINKIIKIGNFPHIHPVYMGGDYPVLVQTMWKDRLSVSDLQGAVGRIEALGALGCGLLRFAVPDIESAEVLGRLSEMVSMPLCADIHFDHKIALRCMDFPVSKIRINPGNIGDREKICAVLEKAAKQGIPIRIGVNAGSLPLDLRERVEQGEGGSLSACEALVQAAQREISLFDEFGFNDYLVSMKASTIADTINANKILRLRTPAILHVGVTEAGPLTAGVVRNTAALLTLLAE

SEQ ID NO: 103994 - protein, 271 aa, Unknown
  Obtained from environmental sample
  misc_feature (1)..(271): Xaa is any amino acid
MEKTGLPGRDAHDLPTSKKSFPDGAQYRIEIAGIEYYSNFVAMIDEARKCKLPVHRAICTVGGSAYLDFEDMRKLARHARGEGVELIMVIGHRKGWDVGSKELGYPEGLPQGARHRGCDSISYWLEDMMRCLEAGIRGFLVLDEGCLRLVSQMRREGFIPRETIFKWSVFGGQCSPAGAKLLAELGADTMNPISDVSLPILGAIRATVDMPLDVYMIIVDSFGGMFRAYDAPEIARIAAPVYFKIEPGSSESDIYKPWVEAARHDEMVRMK

SEQ ID NO: 103995 - protein, 244 aa, Unknown
  Obtained from environmental sample
  misc_feature (1)..(244): Xaa is any amino acid
LGIRGRQANEFAELSFPILPGIILDTNIASDIDIKKIKKDIIDLLGKCSKLVAKTYGDPQNPMLLKVVISSNLAITNYPALHNFGLVKPTIDGFAKWVGADFAANEVLFLISGMMMIQERIKELEGKTKDKEEISEKIKLLKRLLGVKGPSNELHNKEEKTPEPKKKSAKEYMEEYSKYFPKGFFEDAESQLLITLSEISKMLSIDEQNDNDTAIMIQPMVYGNYGKNSCAGGFYTRNVVSSEK

SEQ ID NO: 103996 - protein, 252 aa, Unknown
  Obtained from environmental sample
  misc_feature (1)..(252): Xaa is any amino acid
MTQPSWGISVHMNGAGGSRVLSWDYDKKTFFAGAISEQYREYMRYWHKLYAEGLLDPEMAEPINGDVWTRKLATGNAIATYAYYDQIGGVAAASSISGFKLQMYPPLAGPGGAHHQQKNRTGSGIIFPIGVSKRSDFEQVIRAVDKMFFSNEAALLWCIGVEGETYTMQGNTIKYADSILNAPDGIYKSMQLRYGCGADPTQLVWVNAREMTKYDAHYAEINKQVASMNSAIQAIPPTPRFTDATAEQATSL

SEQ ID NO: 103997 - protein, 177 aa, Unknown
  Obtained from environmental sample
  DOMAIN (24)...(141): YheO-like protein
  misc_feature (1)..(177): Xaa is any amino acid
MASKRKKKPVKLILNKLSASDRLIMDSYKTTMEGLAAYFGGAFEFVLHDITDFDHSIIKIINGSLSGRREGAPITDLALSMLEKIQSNDVSKPFMCYTSRSKYGRPVKSSTIVIFGARNKVIGLLCVNLYLDSPLTALLQNFSLDPRTDFVTENFSSDSDELIARALEKVRSEVKRT

SEQ ID NO: 103998 - protein, 72 aa, Unknown
  Obtained from environmental sample
  misc_feature (1)..(72): Xaa is any amino acid
TYNCRNRFINLTAVGCTAILGFHTFVNIAMTLGMTPVTGIPLPFLSYGGSFTMTVAILVGLLLNARVTDQDF

SEQ ID NO: 103999 - protein, 197 aa, Unknown
  Obtained from environmental sample
  DOMAIN (66)...(192): Integral membrane protein DUF6
  misc_feature (1)..(197): Xaa is any amino acid
GGTGSIIIATAPIITTVLARIIYKEKIKIIQYISIIIEFIGVGVLTLMKGIFFINVGIIWLLLASISVSIYNLLQRKITKKYSAIQTAIISIWFGTVILLLFLPGSIEEVKNASFIQIIYVIILGIFPSAVAYVTWTYAFSKAKTTSSVTNYMFLTPFLTAILGIILAKEIPDLSTIIGGTIIIIGMIVYNFCKSEL

SEQ ID NO: 104000 - protein, 201 aa, Unknown
  Obtained from environmental sample
  misc_feature (1)..(201): Xaa is any amino acid
MTTEKSGQSPAKYIYDKTYESKFLAEAAGGTGWFDASYMKFSRTGACSGGVPDGNFTLDITVTGEGTVTADPKSSSYAPNASVKLTATPKNSSWKFDSWGGGATGTTSPVTITITKNTTVTAKFVLIADDTTNLVQDGKFSKGSGSSLSSDWGWKTGKDWGNSDGTAAVSGGKVKLSITTAGSNKWEPQLIQQGINLEKGV

SEQ ID NO: 104001 - protein, 276 aa, Unknown
  Obtained from environmental sample
  DOMAIN (1)...(255): ATP-NAD kinase
  misc_feature (1)..(276): Xaa is any amino acid
LHKEYAQAAAEEIRGKLEDKGVGVTVFAFDGCPDSAPSGAWDIALSLGGDGTVLYAARIMAPAGTPILPIHLGTLGFLAGVEWHEWLAVYEQWETKTARISPRCMLSLSVDRGGINVYDNACLNDMVISSSGKAKLIRLRVTTEPAPGEYADLGCYRSDGLVIATPTGSTAYSMAAGGPILDPEMEAVIVSPVCPFTLSNRPLVLPSRQNLLVTVEKEQRSGIVLTVDGQDTFDLEPEDTITVTHFPYYARLITAGRSSYFSALKDKLSWGGLPHA

SEQ ID NO: 104002 - protein, 293 aa, Unknown
  Obtained from environmental sample
  misc_feature (1)..(293): Xaa is any amino acid
GELRELENEPQKLSDFEKLAGHVNSAADCLYDGEESVLGLARRARGSLDSAAAIDTSLAALQRRLEDMYYEAEDIAGEFRSYRDGLSYDPRRQETVDERLALLYKLKRKYGETENAHPEDAAHPEDAIIAYRTTAETEIETLSGAEENREKLKAEIAALEKEISARAAALRQKRIAAAADLGQKVSGILKRLGMPNARFSPSVTAKAKEDGTQGFVCGPWGAEDVEFLISANSGEPLKDLSRVASGGELSRVMLAIKSVLSSGDSIETLVFDEIDTGIGGEVALAVGEYRKKS

SEQ ID NO: 104003 - protein, 269 aa, Unknown
  Obtained from environmental sample
  misc_feature (1)..(269): Xaa is any amino acid
ATTKALEKDHTLYAHWSKPKSVSVKVTFEANGGKPSPASKKIDSGSKYDTLPKVAKDGYKFEGWFDKASGGTVVKSTSKAPEKDHTLYARWSKPKSVNVTVTFHRNGKDVTSAAIPKKTAKPNGTVTMPAKPVRPGYTFDSWNTKADGSGKTFNAKTPVKADIEVYAKWKKNVQKTVKVTFDANGGKPSPASRKVNVGSAYGTLPKVTRNVNKFEGWFTAAKSGTEIKVSTKVAEKDHTLYAHWADGRPAPKPIPPKPIPPDAGSNYFF

SEQ ID NO: 104004 - protein, 290 aa, Unknown
  Obtained from environmental sample
  misc_feature (1)..(290): Xaa is any amino acid
GRHLINLDHGSENEILVGCAGIVKLAMSRAFETGVAPAGYERVEIAFAGLKGGHSGVDIVGRKSAFDFLVQTIRAVCGKCGALVAGVECGSKANAIARDFRLSVFAKEGAVSEIGALVAELEKEFNGELKSERVQLLSAAAPGATDCLSAKATDFLADLLGALPNGMQTMLEGQGIAESSLNIGRTFLDDGKLKLDITVRSRVKPLEDSMMDKLRNIARTFDLSFDVEAVSPAFSPVGDELARLCAATYLRMRGAPMTRAEVHAIVEAGVFQDKIPGLDVVSIAPNLYDI

SEQ ID NO: 104005 - protein, 289 aa, Unknown
  Obtained from environmental sample
  DOMAIN (27)...(80): Regulator of chromosome condensation (RCC1)
  misc_feature (1)..(289): Xaa is any amino acid
VITRFTTVTILSKIAAGAGHTLALKADGTVWAWGSNSNGQLGNGTNEASLTPVQVKDSSGENFLTGIIDISAGGYHCLALDSNGTVWAWGLNTYAQLGIGTGTGSSRNLPVQTLGGGIVAIAAGDLHNLVLDSNGTVWAWGYGAYGQIGDNNTSTHVFPTQIPGLSNITAIATGTNHSLALANNNNVYFWGRQNYAGVTYNQSIPLLYMTDAVAIAGGNDHSFVLKNDGTVWAWGKNLYGELGDSTTTDNTTPVQVKDETGTGYLFDITALAAGSNHTLALTADGTLWA

SEQ ID NO: 104006 - protein, 290 aa, Unknown
  Obtained from environmental sample
  DOMAIN (43)...(237): ATPase family associated with various cellular activities (AAA)
  misc_feature (1)..(290): Xaa is any amino acid
SALERFSSDLTALARDNKLEPFIGREEELDRTVQVLCRRMKNNPVHVGDSGVGKTAVTEGLAQRIVAGKVPDTLKNFSIFALDMGALIAGTKYRGDYEDRVKRVLEELLKKEKVILFIDEIHTLVGAGAVSGSAMDASNMLKPALTSGKLRCIGSTTHEEYGKFFDKDRALSRRFQKIDINEPQESDAIKILNGLKSKYEEFHKVHYSDEAIEAAVRLSAQFITERRLPDKAIDVIDEAGAFARITAGQTAGSAEPAVTGKIENAASPETRKTLKQSKSALRSLRLSYQR

SEQ ID NO: 104007 - protein, 294 aa, Unknown
  Obtained from environmental sample
  misc_feature (1)..(294): Xaa is any amino acid
NDVYMDMSGIWELAAEIPDFVITGGYVTGNVDIRGPILDPELFGTARGTSFRFQVPKYIGHDIKPVPFNAVLEGSEIIFGPVAAAVGSGGGTASGWLRFEKWVPENVSIDVTVPRNTPVPYKFNIMGFNAKGDASGRVNILHENRTLEISGSVLANNTELGINFDELMQSRYENEKFAPELPTTVNLTVTTGPVVEFIWPNTSSPILRANPEIGTVMTVYADTLAGQYTINSDISIRSGEMYYFDRNFYIRHGVLVFRENEQQFNPRITARAEIRERTDSGPVTVSMIIDNDSL

SEQ ID NO: 104008 - protein, 192 aa, Unknown
  Obtained from environmental sample
  DOMAIN (21)...(162): Bacterial flagellin N-terminus
  misc_feature (1)..(192): Xaa is any amino acid
MSAMYANRQLDITQVDTAKSMEKLSSGFRINRAGDDASGLAVSEKLRAQVRGLNQAERNTLNGVSFIQTAEGYLQETQDVLHRIRELAVQSANGIYSDEDRMYIQVEVSSMVAEIDRIANHAQFNGMNMLTGAFADGGPKTMQFQIGANMDQNTKVYIGEMTATALGVLNNQGSDGPISLNDPDDANKAIGA

SEQ ID NO: 104009 - protein, 254 aa, Unknown
  Obtained from environmental sample
  misc_feature (1)..(254): Xaa is any amino acid
VFTVANEEISFNFRGGTLREFVDALNRRGRDKISASLITVQPGTKSLLIESKVTGAENRLGFSGDAELLAIKLGILERGNDTRREIVISEGTVRESSLPGSAAPASPISINNGVLNFPPLASASIPFGLDVERGSPLVLKLETMTKVDPEISRAITQPPPGPSIPSSGSITYSGITIENNPSTAPLPEWSVPTAPQRVDNLAVLSLSFSDGTKASLRPITDSGSFISWEFNLSEYAGGKTITALNIDNTNTHRE

SEQ ID NO: 104010 - protein, 99 aa, Unknown
  Obtained from environmental sample
  misc_feature (1)..(99): Xaa is any amino acid
MKIKDVLEWIQIADEDFYSAQLLNEAVRKPYEIICYHCAQATEKYLKSYLAYNDITTPKTHNLLLLHELCVEKDISFENIRTECSLLNRFTNEIRYPHR

SEQ ID NO: 104011 - protein, 60 aa, Unknown
  Obtained from environmental sample
  misc_feature (1)..(60): Xaa is any amino acid
EGNDKVTVMVGIFQFTQQRCDTNWGIVTAGTVLAAIPVVILFCASQKYIVDGVMMGALKE

SEQ ID NO: 104012 - protein, 209 aa, Unknown
  Obtained from environmental sample
  misc_feature (1)..(209): Xaa is any amino acid
MGRVMELADRPLESAELSVERKNTNESNKRPFHSFIPLGEILGELLGTGATSKKVRAAYCGLIEKTGSELSILMDMKIGEIEKIKAQGLSGELLATAIDRMRRREVSISPGYDGEYGVIRVFPPGKSIPTSGAGALFAEAPSPASKPGTGASRQKKLPEEKLQKAPNPELPLNNTGSGQSAGLSFDPVQFDSIKFDSSQQEIINYEGSR

SEQ ID NO: 104013 - protein, 274 aa, Unknown
  Obtained from environmental sample
  DOMAIN (69)...(132): Elongation factor Tu domain 2
  misc_feature (1)..(274): Xaa is any amino acid
MQMLMHYGVQVETYGGDVPSVNVSAKAKQGLEDLLETVLLVADLKDLRSVYTCPAAGSILEAKVDRGRGPVATVLVQQGTLKVGDVFVAGATMGRVRAMFDDRGGRVGIATPSMAVQILGFESIPVSGDNFQVVEDETKGRSIVTFRQEKAKASAQGRQRVTLENLFSTLKEGQVKELPLIIKADNHGSMESLLGSLDKLGTDKVRVRIIHSAVGTVNKNDVILAEASEATVIAFKVGCEREAEELAREGGVDIRSHEIIYKITEEITGAMVGL

SEQ ID NO: 104014 - protein, 270 aa, Unknown
  Obtained from environmental sample
  DOMAIN (33)...(160): FAD binding domain
  misc_feature (1)..(270): Xaa is any amino acid
MSDLPRELLSIPHRVNVPFAGLTTLGMGGVCRWLFEPATEEAAALFVKTCRAHGIEYGVLGGGSNLLVLSDVAWPVLRLRLPKGLKATPLGVYANASHSHKTLARDVADMGLSGLEWAAGIPGTLGGALRMNAGAFGSNWGMVLDRVRFVSPDGEIIEKAPEEGDFAYRSSFLVGGRVALGAAIRLATGDAASIKRTMAKHQADRRGTQPTGRSAGCVFKNPPGHSAGQLIDSAGLKGARIGGVAVSELHANFFLNLGSGSPSDFMELVR

SEQ ID NO: 104015 - protein, 290 aa, Unknown
  Obtained from environmental sample
  DOMAIN (134)...(216): Histidine kinase
  misc_feature (1)..(290): Xaa is any amino acid
NTTTGAYVGILCVNLDMGILESICAAELHVTLISLNGRVIYPEGKNPDSFSGADNWIITNSFTPRSTQNSLFEITYIIPRKTLFAPIYSMIRKSLVIIFASLAVSLIFILQIVNEVYVQKLQKEQLFSRQKEMQFKILSGQINPHFLYNTLETIRMMALGKNEKEIAATIKMLSQLLRQSLSANDKPISLEKELELVRNYLAIQKLRLGGRMDYSIDTEYDPGSCSILPLLIQPLVENSLIHGLETKQSGGYINITVKAHDKTLLLYVSDNGTGIEPERMEKLPHALASG

SEQ ID NO: 104016 - protein, 231 aa, Unknown
  Obtained from environmental sample
  misc_feature (1)..(231): Xaa is any amino acid
LPYLENGTVVFVGATTENPSFSLNNALLSRCHVAVLQPLCTEDLLELYSRAEKFLDKKLPLTDAAKTHLAQMADGDARFLLNTVEYLANAKFDEALSPEALESVVAKRPMLSDKSGDEHYNLISAVHKSLRASDTDAALYWVARMMTGGQDPMYLFRRLTRFAMEDVGLADPQAVQLAISCWQAYERMGSPEGDIALTELVIYLGTAPKSNRNDKAKMFAWAAAEKYGSLM

SEQ ID NO: 104017 - protein, 273 aa, Unknown
  Obtained from environmental sample
  misc_feature (1)..(273): Xaa is any amino acid
NAQVKDSSVAEIEIIAKDSAKVSTTARSYTLTVNVNPTEGGGVSRNPDKETYAYGDTVNLTAAPEHGYTFTGWTGATTNRRNQLTIIMNSDKTLTATFYKKLYIEPKPVPMEKTYTKASAAGDGSVTPSTDNRDGRTYKASALRAPLSDAYILPGVYISHNFREGYRKYDGVDGYVHDENTNPIIIGLSIGKRVSIDNPRLRLQALFELGRGSVRDPGEYEINTNMGPTWISLHSVYWTGGLLADAHLLFPLNERTHFVSAGLGAHLTYFDTM

SEQ ID NO: 104018 - protein, 269 aa, Unknown
  Obtained from environmental sample
  misc_feature (1)..(269): Xaa is any amino acid
LDRTFNANINRAVKICEFFLKKLEERKRAGYAPFVVHFEMVPSLFTQSLCETLALFPPDSLRLEIGIQTLNPEVCARIRRPGWQNRSINPEKELETLRFLRKKTDAIIHADLIAGLPGETLESFGRGFDRLWQAVSDDGDDAQRREAKSPRVEIQLGILKQLPGAPISRHNETFGMRYNSKPPYEIEETSSISEADLQRLKNFAAFWERLVNRGLLSIEGEFVFEKFMALSDSLLAHFGKNWGIDKTELIKKAVPKCYLLDSPFNRYFK

SEQ ID NO: 104019 - protein, 249 aa, Unknown
  Obtained from environmental sample
  DOMAIN (7)...(249): Cys/Met metabolism PLP-dependent enzyme
  misc_feature (1)..(249): Xaa is any amino acid
MNNLRFESLQVHAGQEVDKTTHARALPIYQTTSYVFDDAKDGADLFGLRKFGNIYTRLQNPTTDVFEKRVAALEGGVSGLATSSGQSAQFIALNNILQAGDNFVTTSHLYGGTYNQFKSQFKRLGIEVRFTPNDEPAEFEKRIDKNTKAVYLETIGNPELNIPDFDAIAAVAKKHDIPLIVDNTFGAGGFLFRPIEHGAAVVVASATKWIGGHGTSLGGIIVDSGKFNWGNGKFPAFTEPSDSYHGLVF

SEQ ID NO: 104020 - protein, 273 aa, Unknown
  Obtained from environmental sample
  DOMAIN (1)...(273): RNA polymerase Rpb2, domain 6
  misc_feature (1)..(273): Xaa is any amino acid
MTRDTKLGPEEITRDIPNVSSESLKNLDETGVIHIGAHVKAGDILVGKVTPKGETQTTPEEKLLRAIFGEKATEVRDTSMRVPPGTEGTILDVRMFFRRGIQKDERALSIEFMEIERLNKDKLDEKKILESGWREKIKDFLEGKTTQDGETLKSSELNQLSTAKLEKIKLASDKSQEALVAMVKDYDNLIKELEAKFEDKVKKIRQGNDLLPGVLKVVKVFVAVKRKLQVGDKMAGRHGNKGIVSRVVPVEDMPYEADGSPVDIVLNPLGVPS

SEQ ID NO: 104021 - protein, 201 aa, Unknown
  Obtained from environmental sample
  DOMAIN (1)...(201): RNA polymerase Rpb1, domain 1
  misc_feature (1)..(201): Xaa is any amino acid
VLLDIPMKKIEKVLYFDNYIVIEPGFSALKLHELLTEEDYQNALEEYGHDKFRAGIGAEALKEMLAAVNLQEEAENLRFQLKEVKFEMARKKIIQRLKIIESFIESGSKPEWMILDVLPVIPPDLRPLVPLDGGRFATADLNDLYRRVINRNNRLKRLMELKAPEIIVRNEKRMLQEAVDSLMDNSRRPRPVLANNRRMLK

SEQ ID NO: 104022 - protein, 186 aa, Unknown
  Obtained from environmental sample
  misc_feature (1)..(186): Xaa is any amino acid
MERNSLEEWFADAAPSKREVPKDVPPELIPEEWKAESKPEAKPEAKPVSKPEAKPKPEPKTEKKPEPKPEPKPEPRPEPRPEPRPEPERALPEIHLLLPGQRERLDGLTAMRQQTVFSWECTGNIIRARFVLSRNPNPLQGDAALEIQNPGYTIRLDRLDEGVWYWNVEAHTPDVFIISAPAAYQL

SEQ ID NO: 104023 - protein, 273 aa, Unknown
  Obtained from environmental sample
  misc_feature (1)..(273): Xaa is any amino acid
KFIRLEKAKSWVLIAQYRDPTLLFNAIAFEYGNRFELPVNHSFNFVELFLNGKYMGNYLLTEQNQVGAGRVDIDETKGWFVEMDGYYDEEPKFRTTHYNLPVMIKSPEFEPADMNNPAFDFVRNDINELCDSMVSPYFPENGYRDLINMNTFVDFIMIQEIADNHDFFRWAMSTFLYKNKGDKINMGPLWDMDAGYGYDDTNYNYFYNPNNRYMLIPFFGRFFDDPIFLVKYKERWNEMYADIISIDSFINATANKIGISAIENFNIWWYRTI

SEQ ID NO: 104024 - protein, 225 aa, Unknown
  Obtained from environmental sample
  misc_feature (1)..(225): Xaa is any amino acid
LLAFSAYAQLLSGSNLPAIRVGSVGISPGKIDSLVKQLAQAQAPGQNLPPETMTQLRWAVVDNLVGQELLRAEITKQGLKADPKKTDSLIVLFKKQFPSEAIFKQELKKSGSTEAEFRQKIENQLLADQILEKKVPYPKDPTAQEKKNYWEKHKGEVILNDSIGGARIILNIAKGENAQAIQDKKDILKGYAAQVRTKKANFSALAAQFSEDPSAKKDGGVMTRS

SEQ ID NO: 104025 - protein, 287 aa, Unknown
  Obtained from environmental sample
  DOMAIN (109)...(209): Glycosyl hydrolases family 2, immunoglobulin-like beta-sandwich domain
  misc_feature (1)..(287): Xaa is any amino acid
LPYTGIGWYRTRFTLPAADNNKRVTLLFDGAMSEARIYVNGQEACFWPYGYNSFHCDITEYLDRNTGINIVSVRLENLPQSSRWYPGAGLYRNVHLIVTEQIHVPVWGTYITTPHVSTEFASARLRTRVENAGNNEIRIETKIYSPTGKIVTESNDIRKIAKGTSFEQNFIINTPQLWSPETPNLYSAVSKVFVGEKNVDQYTTRFGIRSVEIISDKGFYLNGKLRKFQGVCNHHDLGPLGAAVNTAAIRRQLVLLKDMGCDAIRTSHNMPTPELVSLCDEMGFMMM

SEQ ID NO: 104026 - protein, 98 aa, Unknown
  Obtained from environmental sample
  DOMAIN (17)...(98): Uncharacterized BCR, COG1699
  misc_feature (1)..(98): Xaa is any amino acid
VKVLTKAYGTVEVNERQKITFPSGLFGFESLKDYVLLDAEQQPFYWLQSLDEDKIAFVLIDPFLFTPDYEMDIDNEELSPDGITDPEEAVIFSIVTLP

SEQ ID NO: 104027 - protein, 72 aa, Unknown
  Obtained from environmental sample
  DOMAIN (27)...(60): Tetratricopeptide repeat
  misc_feature (1)..(72): Xaa is any amino acid
EIYRYRGFYYHADIAYSTAVRLEPNVALWWYRLGSVREALGDFAQAVTAYERALRINPDYKEAENGLARTRR

SEQ ID NO: 104028 - protein, 68 aa, Unknown
  Obtained from environmental sample
  misc_feature (1)..(68): Xaa is any amino acid
MEITIGHLYPDLLNLYGDRGNIMALARRLEWRSIGADLREYRLHDDIDFSALDIVFLGGGSDREQMLV

SEQ ID NO: 104029 - protein, 292 aa, Unknown
  Obtained from environmental sample
  misc_feature (1)..(292): Xaa is any amino acid
TIGKAKIHREILPPPFLGCFDRAKIALIPFSEIQEIFYKNDFNWNVAPSNRETREFKHIHKQINKIINHDKKYVFDFEKDEKELRQFIRDNFVVGKNETSKIQIDKNNFINVYNKWLETVKPTILVNNWEKMKMAGIIDGDFYLADLLSSENQTLKEKLFVLLKKTAYVMDRHRNEMGFLTSSQVDFSDMQRAHTQFWAKYERPPKEEHWDYIIDRRDLLVPQNIRERKGSFYTPKIWVELSQKYIADILGEDWQDNYCIWDCAAGTGNLLVGLTNSTIFGHLRWIRPTLML

SEQ ID NO: 104030 - protein, 269 aa, Unknown
  Obtained from environmental sample
  misc_feature (1)..(269): Xaa is any amino acid
LEAMELMARCVDVDRMHIWENRNIDGTTMYEQQYEWLRDKEDTKTPHISSRYFYKDTLPDWENYFSAGKCINGPLSSFPEAEYKFLASFGIRSVLIIPVFFQKCFWGFVSFGDLKQERTFSHEEISFLHSGCLLLANATIRYQNQILIETRLEQQQIMADISRSFNSNKPLGRLINDALRQMGEFMGVSRIVLEPADESRPVYSWYCRKKWWQADIHAGFNNLISASFTQSEPDTGNAAIIWCNDITQEYSGKYKSLSSACIKSFIWAP

SEQ ID NO: 104031 - protein, 221 aa, Unknown
  Obtained from environmental sample
  DOMAIN (64)...(180): Histidine kinase-, DNA gyrase B-, and HSP90-like ATPase
  misc_feature (1)..(221): Xaa is any amino acid
VLDVINDILDMSKIEANKFELSNSEFDFEKMMTNIVDIASIRAQEKHHNIIVNINPNIPPFIISDELRLAQVITNLMTNAIKFTPENGKVLLNAQNLEEKDGEITIRIEVVDSGIGISPQQQEKLFMAYNQADRTIAKQFGGTGLGLAISKRIIELMQGKIWIESELGKGAKFIFTIKAKKGTGNADNFSHDESKETDLDFKGYTLLVVEDIEINREIMSA

SEQ ID NO: 104032 - protein, 240 aa, Unknown
  Obtained from environmental sample
  misc_feature (1)..(240): Xaa is any amino acid
NPFGLFYGFAFFNIELLQAAGFDRPPKTRDEFLACVKTISAANKGILADAAGSAMALSPLNKQALSRDIFSWIWAAGGDFWPNGDSAPVINTRQMINDFNFLRSLYREEALSPELSSVPQNQALSPNGFEMTGEQALEGFAQGKIAMLIASTRAIPALREKIDDDVFGITTIPGAGTAGKYSVSLSGIFAGINKNCVYPGAARVFLGFLATKSPLFCAQLKAVPGYVPDLLSGDHKSYIK

SEQ ID NO: 104033 - protein, 264 aa, Unknown
  Obtained from environmental sample
  DOMAIN (1)...(262): Glycosyl hydrolases family 43
  misc_feature (1)..(264): Xaa is any amino acid
LPGLVLNCADPYVLKHEGVYYLYGTGGNDGIRVYTSTDLATWSSAKGATSGYALHKNNVWGDKWFWAPEVYYLNNKFYMFYSAEERIAVAESLSPLGPFVQSAENKKPFHAGIYEIDTHLFIDDDGKKYLYFVRSNNGNEVWAAEMSDDFYSIKENTLVRCFGASQDWEQSPLSPAAYARVNEGPFMLKHKGTYYLTYSANSYENPNYGVGYATSTNPLGPWVKYEGNPILIGNDKIRGVGHHSFITVSPGCQYAVYHSHFNMT

SEQ ID NO: 104034 - protein, 286 aa, Unknown
  Obtained from environmental sample
  misc_feature (1)..(286): Xaa is any amino acid
STLVAGSDFTLAAGGSIAIENEAHTIGGAPPLPITSTPVNQPGITAIALGSGDRLELTLAASGASPTLVEVGKSVTLDDGTVLKNNGGGKVSIESGSLTIAGDLDTTDNVKAFTIAAQSSITKESVAKATELELVLASNLKVEGGAIATNVTIGNSSGLVLGDIQRLEAGSVLAKGSGFSRDSTSFTDDWSLKIEVKGKEVDIKWDGTTKVLTVGGEMVAAGKSITLEDGSVLTHKANLAAPTTATGNIFVEQGSIKLAETFGLGGNTLGDFMAMTSMTIAKDSTL

SEQ ID NO: 104035 - protein, 136 aa, Unknown
  Obtained from environmental sample
  misc_feature (1)..(136): Xaa is any amino acid
MAHPRRFESILDAIGQTPMVRLNRIAEGSGASVYAKLDFLNPMGSSKDRIAKYLVERAEADGRLKPGDLLIENSSGNTAMGLALMAIQKGYRLKAIVRDRTSKEKLDQLRALGVEVQKVNADLPPEHPDSYNNITP

SEQ ID NO: 104036 - protein, 280 aa, Unknown
  Obtained from environmental sample
  DOMAIN (22)...(278): DNA topoisomerase
  misc_feature (1)..(280): Xaa is any amino acid
RFWVSEALTPSVIEAGIKNAKPLSEYDSLAAQGFARQRADWLVGINLTRLMSVGNPPPPLSVGRVQTAVLAAVAARNGEVKNFVPVPYRKLEASVKSKDGVVIKAFLENPRLGNTSFFECDWPYICEAMEDCKNSIFGIDSVDVSSVEKKAKPPKLLNITALQKEAFRRHGLKPEETLDIAQALYETHKCLSYPRTPSRVMGDNNADLFREKFDLLKGESSLSGFSDLSLIDAGNRHVFNSAQLEDHHALIPLAKIPDSATDMERKVYSIVLESFFTVCM

SEQ ID NO: 104037 - protein, 295 aa, Unknown
  Obtained from environmental sample
  DOMAIN (26)...(214): Trypsin
  misc_feature (1)..(295): Xaa is any amino acid
FYQFFGDNPFFGGNPFEDFFGGPPQQRRGRPQEPQPQRQERRSQGLGSGVIVSRDGYILTNYHVVAGADEIEIKTTDGRSFDAFVVGADSLSDVAVVKIKENVNNLPVAYLGDSDLLRPGDWAVAIGNPFSLTSSVTMGIVSAIGRQTPNPGGGAAQYQNYIQTDAAINPGNSGGALVNIKGELVGINTMIYTQTGGYMGIGFAVPINMARKIMEDLIFDGKVSRGWLGVSIQELDRATREAFGLPAETKGVLIGDVFKGQPADKAGIKRGDVVQSIDGKPTENANSLRNLVASI

SEQ ID NO: 104038 - protein, 245 aa, Unknown
  Obtained from environmental sample
  DOMAIN (33)...(243): NLPA lipoprotein
  misc_feature (1)..(245): Xaa is any amino acid
MTIFSKTLLLTALLAFSLTGCKKETETKQKKVVKIAYLPITHAIPLLATAERAGENPEFQIELVKYSSWPELTDALNTGRVDGASVLVQLATKSKEQGVGLKAVALGHRDGNAVVVKKDINSAAELKGKTFAIPHRQSSHNILLRQMLSDSELSAEDVNVIEMAPPEMPAALAQGQIDGYCVAEPFGAKAVTLGAGKALYNSKQLWPNSICCSLVLTDDFINNYPEIAKKFHTLYHETSNYMSQN

SEQ ID NO: 104039 - protein, 248 aa, Unknown
  Obtained from environmental sample
  DOMAIN (38)...(248): Peptidase M16C associated
  misc_feature (1)..(248): Xaa is any amino acid
MPSPLSELKRHIEEDDRYFEKMIRRYLLDNAHRASVIIEPEDNFLEEKEAALSARLEETERSMGRGEKKGIRSKMAELKKAQEREDGQEALAAIPHLSRSDLSAEIEVVKREYADVSGAPALFHPIFTNGISYADLAFPLDLFHPEDYLWFPFFARTVVSMGLPGMDYGEVSGLLARTTGGFHAMLHTSSKAPGASREETLPTGNLDLRSRDWIIFRLKALDEKFAASLDLALRLITEADFSDLKRIR

SEQ ID NO: 104040 - protein, 257 aa, Unknown
  Obtained from environmental sample
  DOMAIN (1)...(257): Alpha-L-fucosidase
  misc_feature (1)..(257): Xaa is any amino acid
GGRTGYGEWILNSARIPVHEYEKFKDQFNPTKFNADSWAKMAVDAGFKYIVLTSKHHDGFCLFDSKLTDWSIASTPFKRDIVKELADACAKRGIRLGFYHSIMDWHHQDYLPRRPWEDRSAQGANFDRYIAYMKGQLKELLTNYGPISVLWYDGQWESTWTHEMGLDLYNYTRSLRPPIIVNNRVDKGGGSMQMTVDSSYAGDYGTPEQEVPPMGLPGVDWETCMTMNDHWGYNRADQHWKSSTELIRTLIDVASKG

SEQ ID NO: 104041 - protein, 104 aa, Unknown
  Obtained from environmental sample
  misc_feature (1)..(104): Xaa is any amino acid
METIDIKKVPGIKLVSGRVIPSIGMGTFGSDRYSPKEVSSAVCGAIWFGYRFFDCASVYGNEDLIGKVFEEAMQAGEVKREELFITSKVWNDMHGPGRVRASIE

SEQ ID NO: 104042 - protein, 189 aa, Unknown
  Obtained from environmental sample
  misc_feature (1)..(189): Xaa is any amino acid
MWMSRMTYISADEIRTIIGRLRKENYSCDVIHIDTGYFETDWVCEWDFSHERFPDPKAFMNEMLQKGFRVCLWQTPNIGKENRYYEEGISKKYLPQKKDVVGQNEPVSDFSGQDNGNAIDFSNQEAVNWYKNHLRRLMDYGASAIKTDFGERINMKADFKMNTALLHNLYGLLYQKAAWEVSSEYSDCP

SEQ ID NO: 104043 - protein, 141 aa, Unknown
  Obtained from environmental sample
  misc_feature (1)..(141): Xaa is any amino acid
ARLLWAPNPGQAPQPLDRIASGGELSRFLLALVGIQAEEEQATLIFDEVDAGIGGLTLTRLADRLDALAAQRQILLITHWPQLAARARRHFHVSKEVRNNETFTLCTCLDPEAVRKELGRMGGGGAQAEDFANSLLARRNP

SEQ ID NO: 104044 - protein, 269 aa, Unknown
  Obtained from environmental sample
  DOMAIN (2)...(266): Aldehyde ferredoxin oxidoreductase, domains 2 & 3
  misc_feature (1)..(269): Xaa is any amino acid
AFKEASKRFAKALTEHPVCGQGLPNYGTAVLVNIVNEAGGLPTFNFKQGRFDGHERVSGETMNQLTKDRGGEGVVAHGCMTGCIMRCSGLYPDKNGKLIGKWPEYETVWAFGPNSGIDDLDLIAQYDTICDDVGVDTIDVGVAISVAMEAGLLKFGDGQGALRLLKEISQGTPLGRILGCGTAAMGKIFGVRRVPVVKGQSLPAYDPRAVKGVGVTYATTTMGADHTAGYAVTANILHVGGTVDPLKSEGQIELSRNLQIATASVDATG

SEQ ID NO: 104045 - protein, 282 aa, Unknown
  Obtained from environmental sample
  misc_feature (1)..(282): Xaa is any amino acid
LCSVDVNDPSLSTFNGDITIIPNSGVTTFTELTATYNGSETVTLSYQWKKDDTNVGANLNKFTPTETGSYTVTISAEGYNSKTSAVVDVTLANLAGTIIITPNSGVNTFTELTATYNGSETVTLSYQWKKGDTDVGANSNKYTPTEAGGYTVTVSAEGYNSKTSAVVDVNDPSLSTFNGAVTITPNTGVTTFTELTATYNGSETVTLSYQWGKDGSSVGINSNKFTPTEAGSYTVTINAEGYNSKTSNAVIVTLSNLGNITISPNTGVTTFTELTATYNGSE

SEQ ID NO: 104046 - protein, 293 aa, Unknown
  Obtained from environmental sample
  misc_feature (1)..(293): Xaa is any amino acid
TILYTSKQNLSAAVYNNAGGTVNISGGTVSLTTLYMNGHTIYNNNNSTVNISGGTISYSGNTSWENNAAVYSFNNGTLNISGGTVQVVPSPMGQASPAVHAIGKTTVSGTAKIISATIPTLSDESSLRGTIYIPSSNTITSSLVIEGGTVENTVGRAVHYLSTGGVKITGGTVQGGADSYAVFMNNANATLTLGGDPSITSALRLSAPGKLAIAPEFSPGSGKKYTLAVPSPAAGDIVVPGGSSWANNFTVAPPFGLVTSGSDLKLALNYSVSVTKEDGTALTGAHTFPFVNY

SEQ ID NO: 104047 - protein, 119 aa, Unknown
  Obtained from environmental sample
  DOMAIN (12)...(119): ABC transporter
  misc_feature (1)..(119): Xaa is any amino acid
VLNNVSFEIGRGEIFGLVGESGCGKTTLAKCILGLIDYEGEIFINGRKREARPSFAEKRRSAFEVQAVFQNPSSSLNPVKTIGWILKEPLRAQRMGSETERENRVDEILDLVGLDSSYK

SEQ ID NO: 104048 - protein, 284 aa, Unknown
  Obtained from environmental sample
  misc_feature (1)..(284): Xaa is any amino acid
GNDIDLHVLTPRGEEIYYARKQDSTGGMLDVDMNVRGETTKPVENVFWGPDRAPQGRYQVVVQNYKFHESDKAPTPFRVEVKNGKNYSYFDGIVSGEGKSSNVELTSFEYKGASALKQEKALIYELAESYRQMGITTTTIGVGVGFDLEFMRTLAEEGGGSSRFISDREEMKKLFDTEFERMVALVATDLDMSLEFAGGIEILETWGYQNQIEGNRISFKLPGLHLGDYETILVRYRMQGDTQGQAGGEKELARFRVSAKDLLGRPLPPVERTVGVVLSESSSD

SEQ ID NO: 104049 - protein, 213 aa, Unknown
  Obtained from environmental sample
  misc_feature (1)..(213): Xaa is any amino acid
MTAIMTLMVTGVAAVLLQRASKIAIESNLRDLRYLAQEQATFWQGREDGHLKQLRGIADVMGEFESLPAGARRDTYDNILLATLNNNPNFVRIYSVWKPNALDGMDARYINRAGSTPTGQYAMAYTRENGKVEVIKDFALDEVNAWINGSDAFKDKVDHPFPLKVNRKDTYVFKMGVPITRRTTNEVVGHLAVLMDIAPIQELVNKTLHDTKK

SEQ ID NO: 104050 - protein, 236 aa, Unknown
  Obtained from environmental sample
  DOMAIN (1)...(228): FlhB HrpN YscU SpaS Family
  misc_feature (1)..(236): Xaa is any amino acid
MTPKLEKLNPLSGIKRIFSMRTVVETIKNILKILLIGYIAYATIKGEYEVLITLADVSVMMIWQFVLTSTYDIFLRTALVMLIIALADYGYQRYEHEKKLKMSHQEIKEERKQMEGDPQVKARIRSLQREMARRKMMDQVPQASVVVTNPTHLAIALLYDPEKNDAPIVVAKGRDLVALRIKKIAEENDVPLYEDKPLARAMYDMVEVGSPIPGEFFEAVAQIIAYVYKLKGKKAG

SEQ ID NO: 104051 - protein, 209 aa, Unknown
  Obtained from environmental sample
  misc_feature (1)..(209): Xaa is any amino acid
EIKKYIAAGKRGADIRTQFESPPYGWPADAIDGALQVMLVAGIIRAQDDRGAIIDPKELGRKNITKTFFKVESITISAQQRIRIRKLLQKAGINVNPSDEQSRIPQFLEYLFSLAEKAGGDMPKPKKPDTAFVNDLRLCTGNEQLQQIFDQADSISEYIDSCTLLAEQIEKRRPDWLLLKQLVNHAQNLNGIEVIETQIKSIEESRMFT

SEQ ID NO: 104052 - protein, 225 aa, Unknown
  Obtained from environmental sample
  misc_feature (1)..(225): Xaa is any amino acid
MKKLIQFIVLCCALSWAIAGVAIFLGLRITQKIAYTIFASGYMLLPAICSVVLQLIHKEKPFRNLGVSFCLNRWFLIAGIVPFVYTFITLGINLLFPNISFSATYEGFLSKLPAEQAELALQQLSRFPPIIFFILQVVLALVAGYSINAIFALGEELGWRGYLLKALKNKRLLPVSLIIGAVWGLWHFPLILIGHNYPHHPVAGVGMMILFCILISPIMDLYVIK

SEQ ID NO: 104053 - protein, 61 aa, Unknown
  Obtained from environmental sample
  misc_feature (1)..(61): Xaa is any amino acid
MELGKGFSFVDRQMRISSETSDFFIDLVFYNYLLKCFVIVDLKTGKLTHQHRANGYVCTDV

SEQ ID NO: 104054 - protein, 94 aa, Unknown
  Obtained from environmental sample
  misc_feature (1)..(94): Xaa is any amino acid
MSVYALDSNIVSFYLRGNITVIENIEKAIGEDHSIVITPIAYYEVKRGLLLIDAVKQIKKFEDFCNLFPVGKLGDYLIDEVNIFTILSVDRLGE

SEQ ID NO: 104055 - protein, 285 aa, Unknown
  Obtained from environmental sample
  misc_feature (1)..(285): Xaa is any amino acid
ADALKTPALCLSVVYEHGAALEYVPDALKTPELCLAAVQSDGHALEYVPDALKTPELCLEAVQNKGGTLKYVPDALKTLELCFMAVQNDGEDLRYVPEALKTPELCLEAVQNKGGALKYVPDALKTPELCLVAAQDGAYALEYVPDALKTPELCLSVVYEHGAALVFVPDALKTPELCLAAVQKYGDALEYVPDALKTPELCLVAVQRRGHALEYVPDALRTPELCLAAVQKFGGAFEYVPDALKTPELCLAVVQEYGAALEYVPDALKTPELCLAAVQKYGASL

SEQ ID NO: 104056 - protein, 267 aa, Unknown
  Obtained from environmental sample
  misc_feature (1)..(267): Xaa is any amino acid
IVTEAIRLRNFTAEEVAELYAQHTAETGQVFERHAADYVFEQTQGQPWLVNAIARECAEKITKRDYTVSITQNMAEQAVHNIILARGTHVDSLLERLKERRVRNVIQPLIIGEDIVDRNQGDDYSFTKDLGLIRDDRGCVEPANPIYTELIFRALTGDVQTLIGETHKEYAAPRYLKDGKFDMDFLIRDFQSYWRENSEIWGSRFETKFYGFDEAAAQLVMHAFLQRVVNGGGHVNREATAGTRRVDLCVVYNGDKYPVELKILQSE

SEQ ID NO: 104057 - protein, 55 aa, Unknown
  Obtained from environmental sample
  misc_feature (1)..(55): Xaa is any amino acid
MPQNELTDINEQIQAAAGIIRRGGVVAFPTETVYGLGANALTPRLWRVSLRLSGG

SEQ ID NO: 104058 - protein, 70 aa, Unknown
  Obtained from environmental sample
  DOMAIN (9)...(65): YcfA-like protein
  misc_feature (1)..(70): Xaa is any amino acid
MSQWPSIKANALLTALLEIGWSVKRQSGSHKVLERPGYPDYVCAFHDGTEIGSKMLARVAKHTGLTLRDL

SEQ ID NO: 104059 - protein, 279 aa, Unknown
  Obtained from environmental sample
  DOMAIN (1)...(152): Glycosyl hydrolase family 3 N terminal domain
  misc_feature (1)..(279): Xaa is any amino acid
VEETYGEDPVLIAQMAHAFVTGSGGGDLANSFGVISTLKHFVAYGVPESGQNGNQSLVGERELREVFLPPFRAAIDAGALSVMTAYNSIDGVPCTSNRSLLTDVLRGEWGFGGFVVSDLGSIEGLRSQHFIANTNADAAMLSASAGVDVDLGGRAFINLIDAARSGKISEAIIDAAASRVLRLKFAMGLFEKPYVDPAAAKKTVQSNEHIKLARKLAQESVTLLKNSNNTLPLGKSLKKIAVIGPNADDVYNMLGDYTAPQKDGTVATVLQGIASKVGA

SEQ ID NO: 104060 - protein, 150 aa, Unknown
  Obtained from environmental sample
  misc_feature (1)..(150): Xaa is any amino acid
MIQITNEDNMQLMSRYPDKYFNVALIDPPYGINAPKMSMGTNKNRNEKGQYPGESTAQRLRKGRLNSGAGKLKNRALLKMDCSWDCDPPTPEFFNEVFRVADKVIVFGGNYFALPPTRGIAIWDKRQPWENFSQFEYIWTNYDKQAHIFT

SEQ ID NO: 104061 - protein, 59 aa, Unknown
  Obtained from environmental sample
  misc_feature (1)..(59): Xaa is any amino acid
QFVKKIGIEGKINHKNIIIPGYAASISGDMEEELSGWKVHIGPREAAHLPKFLKEFKKA

SEQ ID NO: 104062 - protein, 185 aa, Unknown
  Obtained from environmental sample
  DOMAIN (12)...(184): Pterin binding enzyme
  misc_feature (1)..(185): Xaa is any amino acid
MAEKYMVTLAENLNVINKGVGAGFKDKDPKPVRAMVENIIKSEPDWVDINLGPARKNGEELMPWVVNIVQEVTDLPVVLDTSNIAAIEAGLKVCKKPALINSIMCRPERYNAMLPLVKKYNADYVALMWGPNGMARDANERAELTTELLMAAQALEIPVERAWIDPIITPVNIQQEQLMQNLHFF

SEQ ID NO: 104063 - protein, 75 aa, Unknown
  Obtained from environmental sample
  misc_feature (1)..(75): Xaa is any amino acid
VSERELRLRLQNLSIEFGGLKAVSDFSCELYHGELVGLIGPNGAGKTTVFNMLSGIYAPSGGEIEFRDRRGNTHL

SEQ ID NO: 104064 - protein, 285 aa, Unknown
  Obtained from environmental sample
  misc_feature (1)..(285): Xaa is any amino acid
MPSLEFRTLDDTDLLDFALADPKGFIKTSAKTLVIDEIQKVPRLIPEIKMVVDKNNRNGQFLLTGSVNLQTMPKGARRAPTVTESLAGRVKNIRLRPLTVGEINRTKPSFFRRAFKMDFPAFIRGYDKRAIFDLAFRGGYPEAVRLKKINERREWHKDYIKTIIDFDLMDIANIRRKDVLEEMLPILAAWSAKFMDMNAIGTSLSLTKVTLNSYVNWLLSLFIFDKVPPWLKTDYERVNRKSKFYAADTGLMTSILNWNIAEVILDNDRSGKTMETFVFQELAAQ

SEQ ID NO: 104065 - protein, 296 aa, Unknown
  Obtained from environmental sample
  DOMAIN (17)...(83): His Kinase A (phosphoacceptor) domain
  misc_feature (1)..(296): Xaa is any amino acid
TAELETAVKAAEAASESKSRFLANMSHEMRTPLNAIIGLSELELGAANLEGDSFVNVENIYTAGMSLLGIINDILDISKIESGRFSLVPAVYDVPSMINDTINLNIVNIGSKPIQFRLHIDGSMPLKLEGDELRIKQIFNNLLSNAIKYTDAGFVDWYISCAREGNRIKVTSTVRDTGRGISEEEQEELFDDDFQTSLKASYYVDGSGMGLSITFNLIKLMGGTISLESELGKGSAFTVEFFQKAAGDEVIGEETAVNLSQLRYAAHRRSRKQNLIRADMSYAAVLVVDDVDMNLD

SEQ ID NO: 104066 - protein, 71 aa, Unknown
  Obtained from environmental sample
  misc_feature (1)..(71): Xaa is any amino acid
MFSEVIKAAAAKPQIITVRGKETAVIISIVEYKKLVRPRQTFFEFIQDSPLRDLEFELPPRLPENMREINL

SEQ ID NO: 104067 - protein, 138 aa, Unknown
  Obtained from environmental sample
  DOMAIN (3)...(135): PIN domain
  misc_feature (1)..(138): Xaa is any amino acid
VKYLLDTNILSETRKSNCDPRVKAFTDGIDPEDMYISAISIGEISYGMEKLPAGKKKHDLAIWLYSKLPEWFHMRIISLDTDVMTEWGRSRALTDKTMPAVDMMIAAAAITHHMTLVTRNITDFEGIEGLMVINPWEF

SEQ ID NO: 104068 - protein, 110 aa, Unknown
  Obtained from environmental sample
  DOMAIN (2)...(110): Oxidoreductase family, NAD-binding Rossmann fold
  misc_feature (1)..(110): Xaa is any amino acid
MQRIGIAGIGNISKIYLDNLTGMFGKRVKLTAVCDTIFERAEKAAADYHVKAYKELGEMLNADVDIVLNLSQPQFHYEIALAAVKAGKHVYNEKPLCAKREEAAELLQLA

SEQ ID NO: 104069 - protein, 228 aa, Unknown
  Obtained from environmental sample
  DOMAIN (188)...(223): WD40-like Beta Propeller Repeat
  misc_feature (1)..(228): Xaa is any amino acid
LLALSRAQAKHYVTGSLSLLGNQATLECRLYATASQELVKGFAYIGPLEQIRTSVHKCTDNIVYQLWGVQGFASTKIAFVSKIDGKKQIVVSDYDGFRRKQITRDNSVNFLPAWSRDNSKIYFTSMRNGKPQIFERNLGGSSDKHLFPQIDQAFGPAVNPKDGTLLFSIIGQNGTDIWLGNPQTGNAARLIYTKDIEVSPSWSPYGTAFLFSSDRGGAPQIYMALKDG

SEQ ID NO: 104070 - protein, 128 aa, Unknown
  Obtained from environmental sample
  misc_feature (1)..(128): Xaa is any amino acid
MHKQKVYLETTMFNYFVEESKEDSPITVAFFEAIKSGQYEGYTSAYAIEEMENSTEPKRSAMLDLIDKYQIIVLDASEEAERLADIYIQNGIIPEKKNLDAQHIAIATIHEIGIILSYKFQHINKLKT

SEQ ID NO: 104071 - protein, 95 aa, Unknown
  Obtained from environmental sample
  misc_feature (1)..(95): Xaa is any amino acid
MRRIAMEKAKEILRLSLEMGLNQRDVARGTGCSLGMVSMVLSRVKESAVADPLSLSTKELGSIIYPPAKEKEKAEPDFQHIDREMKKKRVTLGLL

SEQ ID NO: 104072 - protein, 309 aa, Unknown
  Obtained from environmental sample
  misc_feature (1)..(309): Xaa is any amino acid
GNLERNATLRISGTAHIIFENGSNLTVKGSSDNAGINVSEGYSLSIYAQSTDADTMGKLTATGRFGGAGIGGGSNGSGGTITINGGTVTATTTSSSGVGAGIGGGSNGNGGTITINGGTVMATGDRVIYGGSAGIGGGSNGSGGIITINGGTVMATGGGNYGAGIGGGYNGSGGTITISGGTVTATSGSNAQGIGRGSGSTEVGTFTLDGDAVVFANSVGDTDESRRTGGILFIGNNGTFYGESVAIKNDVTIPENRTLIVPNSATLTIPAGITLTNNGMVLKLGNINHSGNYGEWAGNPYSVPSSNID

SEQ ID NO: 104073 - protein, 62 aa, Unknown
  Obtained from environmental sample
  misc_feature (1)..(62): Xaa is any amino acid
MEQIAIISDIHGNAPALESVIDEIQRREIKKIFCLGDIIVKGPSSDDEKYSFKNDRIFYNVD

SEQ ID NO: 104074 - protein, 131 aa, Unknown
  Obtained from environmental sample
  misc_feature (1)..(131): Xaa is any amino acid
VLTLLVLVTGYIGLAMAGGFISQSFSGLADGAIRGGIGHLQILDTRTLEVDEAQSLEFAIPDGEKLAEALRTDDAVLEVLPRVEFMGLATTDGRSVAFMGTGVDPVREPAHMACLDQVKDGSKAPGGEGSR

SEQ ID NO: 104075 - protein, 86 aa, Unknown
  Obtained from environmental sample
  misc_feature (1)..(86): Xaa is any amino acid
MHGVKFFSGDNVPLEMHKVRMVQRLYLKPIEERVQCMQGAGFNTFLLKNRDVFLDMLSDSGVNAMSENQYAAMLQADDSYAGSETF

SEQ ID NO: 104076 - protein, 275 aa, Unknown
  Obtained from environmental sample
  DOMAIN (214)...(275): Bacterial Ig-like domain (group 2)
  misc_feature (1)..(275): Xaa is any amino acid
KKTHFKNATAIILAALFLAISGCDLPDAFYIRVASIEGVPETGIVGTPLTLTGKIRPAFASNNDIIWSVISAGNTGASISGNILNTQSGGTVTIRAKIANGAAEGKEYTQDFKIVFIVPKVITDMAIKTQPAKLEYFEGETLDLSGIAVTLTFDDSSTEDIGLAQFKAKGITASPAHGTTLTLAHDELPVTITAGGHTANTDNLKVSERTTTVPVAGVSLNKTSMSLLVGGNETLTATVAPSDATNKNVTWSSNNTAVATVNNSGLVTAVAAGTT

SEQ ID NO: 104077 - protein, 285 aa, Unknown
  Obtained from environmental sample
  DOMAIN (1)...(285): Glycosyl hydrolase family 1
  misc_feature (1)..(285): Xaa is any amino acid
EHIAVDFYHHYKEDIALFAEMGFKTFRTSISWARIFPNGDDPQPNEKGLLFYDSLFDECLKYGIEPLVTLSHWEMPIHLTKKYNGWVSRELIPLFEKYAKTVFARYKNKVKYWLTFNEINMTFHAPFLGAGVIVDDPSLKEKTSYIACHNQLVASALAVKACHETLPKAKIGGMVASLTAYPYSCRPEDTWEKLQLERKNYCLTDVQVRGCYPAWLKTPLTAEDEKILRENTVDFVSFSYYSTCAVSTDPKTTVEKTTGNIYGGVQNPYLKSSEWGWQIDPMGLR

SEQ ID NO: 104078 - protein, 238 aa, Unknown
  Obtained from environmental sample
  DOMAIN (28)...(61): Tetratricopeptide repeat
  misc_feature (1)..(238): Xaa is any amino acid
MKHLKIIIFLLCVLTLFPIPLKAQSQTAPALFERGKLYMADENWYSAVESFLDCLRINPAHAEATAALAECYYELAEFDEALNWTRKARALARTNMTVANLEVFTLIALGQLDAAAALVSDILAREPYNREALFAAGELDIARNRPSQALLRYREAVRRYPDDRRLLISLALVTLSLGDGAAALNYINSALTQHSDDYRVYYYAAYIYAQNDKLTDAIRFIDRALYYRPDHIPSQSLM

SEQ ID NO: 104079 - protein, 262 aa, Unknown
  Obtained from environmental sample
  DOMAIN (88)...(262): AICARFT/IMPCHase bienzyme
  misc_feature (1)..(262): Xaa is any amino acid
VIAVEAYTGHPEIMDGRVKTLHPKVHGGILAVRDNPTHVKEMGKCGIGGIDMVVVNLYPFEKTVAGGAGIEECVENIDIGGPAMVRSAAKNHAFVAVVVDPADYALIEGELSAHGGAVTLDTRRRLAVKAFRHTSAYDAAINAYLSKIYLDEDVLQLYYGSGEVLRYGENPHQAAVFYRGARASGASMASAEALGGKELSYNNIVDGDAALEAVRELSGGAAAAVVKHNNPCGYATGSTLDKALEAAWSGDTVSAYGSVIAV

SEQ ID NO: 104080 - protein, 69 aa, Unknown
  Obtained from environmental sample
  misc_feature (1)..(69): Xaa is any amino acid
VNKKYDYLIVGAGLFGAVFAYWAVQRGKKVLVIDKRPYLGGNIYCEKIADINVHKYGAHIFHTDNKNVW

SEQ ID NO: 104081 - protein, 256 aa, Unknown
  Obtained from environmental sample
  misc_feature (1)..(256): Xaa is any amino acid
MAKSDLNIEILGTNLTISAEETPEYLNMLLDKYRRTIENVQQTTGLKDPLKTAVLTGFLLCDDLEKAGSAANAVKIEDEEQWEAERLTQGMISRLNEIIPKAQERDAYSEALAENPPVFKLKNAIKNYDWGSADWIPALLGQKNISRVPQAELWMGVNPSAPSRTEFPGGKNGPLLSELIDSEKEAFLGKEIAQKYGTLPFLLKILAAEKPLSIQAHPNLRQAQDGFEKENLKGIPLDAPNRNYRDPGDKPEIICA

SEQ ID NO: 104082 - protein, 81 aa, Unknown
  Obtained from environmental sample
  misc_feature (1)..(81): Xaa is any amino acid
MAEQLGKTADTLPDLGLVNLKEVINVPNPHNLEALKAMRKATPARIAVWRAGPRYLTSTLLRFRADHAVAMDSVFADVSED

SEQ ID NO: 104083 - protein, 235 aa, Unknown
  Obtained from environmental sample
  DOMAIN (163)...(233): GTPase of unknown function
  misc_feature (1)..(235): Xaa is any amino acid
MAESNFVDYVKIFCRSGKGGAGSAHFLRTRGNPRGGPDGGDGGRGGHIILKGNTQLWTLLHLKYTKHVHAEDGEGGSRSQLHGADGKDIIIEVPLGTVLRDAETMDIEGEITEDGQTLIVLKGGRGGLGNEHFKTATNQAPRYAQPGEPRQESWKILELKILADVGLVGFPNAGKSTLLSVVSAAKPEIADYPFTTLVPNLGIVAYRDHQSFIMADIPGNIEGAAEGKGLGLRFL

SEQ ID NO: 104084 - protein, 91 aa, Unknown
  Obtained from environmental sample
  DOMAIN (24)...(82): Hemerythrin HHE cation binding domain
  misc_feature (1)..(91): Xaa is any amino acid
MAVISTTPKKSKNYVSWSESYSMGIKIIDDQHKGLLDFVNDLFNHSTGNETEEMLYFKEVIQQAVQYVKNHFQTEEKLMVATKYPGYAEHK

SEQ ID NO: 104085 - protein, 216 aa, Unknown
  Obtained from environmental sample
  DOMAIN (15)...(216): Nitrogenase component 1 type Oxidoreductase
  misc_feature (1)..(216): Xaa is any amino acid
MLDLTPKEVKERSALRINPCKTCQPVGAMYAALGVAKCMPHSHGSQGCCSYHRMVLSRHFKEPAVASSSSFTEGASVFGGKTNITTAVKNIFEMYNPDIIAVHTTCLSETIGDDLTSFIMDVQIPEGKKVVHCNTPSYVGSHINGFFNMMMGFMNYLTGKTGMPTGKTAIFPGWVNPGDIRELKRIAKAMKVNTVFFPDQTGVLDAPMNGKYEMYP

SEQ ID NO: 104086 - protein, 275 aa, Unknown
  Obtained from environmental sample
  misc_feature (1)..(275): Xaa is any amino acid
MEGNSPQIAWVSEEQGDKLRVLLPNRRETRLGANRLLPWSGPAGSASLSKDEAVEVLTRHGALREERCKGIDALAVWEAAQGEISQAGALWFAELFENSPDVDVVAAYGRALLACKSHFKFQPPDFVIYPAELVQSRMVEQERQRRRESLAAQGAGFLRLLWEVYCRKRALPPKESPEWPDEETLKRLEQLLRSRIADPDTQEDESLWRQLGKELPELPYMPLHLACAWGLVPEHYNFWMDRADFLPGDAWAQEYGGALAELRENLRVRLGGLPC

SEQ ID NO: 104087 - protein, 114 aa, Unknown
  Obtained from environmental sample
  misc_feature (1)..(114): Xaa is any amino acid
MQFADRFPAERGRMEYFCLGCGARRPIEVLLYTCPICGGTLLLEDRDFDRLKQQGAAHWRSLFDARCASRNNALRGVFRFYELMAPVLDEEDIVYLGEGNTPIIEASPELARIA

SEQ ID NO: 104088 - protein, 279 aa, Unknown
  Obtained from environmental sample
  misc_feature (1)..(279): Xaa is any amino acid
ELIRQGVGPEQIQNINLEDLDNEPLRDYHKLYEQINRNLVPGKQNYVFLDEIQIVPEFGQVANSLYLKKNVDIYLTGSNSKIQSRDIASKIEREYVTIHIFPLSFKEYLTAWPPGANAKSQDELFDDYVTYSSFPGVLGFRIFETSSAAPAYNGWDKPALRAYLRDLYDKIVLKDIVENKKISDISRLESVIKFMADNISKETSINNIASTMTESGRKIDNKTLENYIEAFCDSFVLYKTNRYDIRGREMLRTPSKYYLVDIGLRSLLLGAKNIDRGKI

SEQ ID NO: 104089 - protein, 187 aa, Unknown
  Obtained from environmental sample
  misc_feature (1)..(187): Xaa is any amino acid
MNESSLHRKLKYQYAGKGGKTEVSAGEYVADGRRKDGEYIEVQTGSFGPLKDKVKELTANGSVRIIHPVAVKKIIEVYKPGDPCGSLLYRRKSPLKGSPWDIFDALLSAPLLPLITRLSIEVVLVDILEKRIKDGKGSWRRKGISLYDKELAACHDSILLKKRRGLLTLYPIQEKGRIYRFSFSGAR

SEQ ID NO: 104090 - protein, 97 aa, Unknown
  Obtained from environmental sample
  misc_feature (1)..(97): Xaa is any amino acid
NIVDGGIAPNSRFRYDLFMTFNEYYIVFPEGDVQEVEGRLPFNSIVDVNGNVLYPPLPTNKMIAFKVIGIRNEEKKGINETYHFLDLMSAEELTEYT

SEQ ID NO: 104091 - protein, 62 aa, Unknown
  Obtained from environmental sample
  misc_feature (1)..(62): Xaa is any amino acid
AIKPSGIRLGSPAVTTRGLKESEMAKVGAWIDEALRNRTDDETLKRIYGEVAQLTDKFPIPE

SEQ ID NO: 104092 - protein, 282 aa, Unknown
  Obtained from environmental sample
  misc_feature (1)..(282): Xaa is any amino acid
GFDAIPPLQRLSGLEHFEHPLASRYASKAMVRLLSPLYRMRVWRRLWVALAECQMQLGLPISESQISEMKATQDNVDLEAIARHESELRHDVMAAIHAYGEQAPSARPIIHLGATSCFVTDNGDLLIALDALQLLRLRLLDAISTLAVFAKKWKGHPTLGFTHFQPAQPTTVGKRATLWIQDLLLDLADTCHVIETTPVRGVKGTTGTQASFLELFDGDGARVDALEKMFCEKVGRHAIPVSGQTATRKLEDRIGQVLCGIAASAGKFASDLRLLQHRKKSK

SEQ ID NO: 104093 - protein, 289 aa, Unknown
  Obtained from environmental sample
  DOMAIN (34)...(204): Radical SAM superfamily
  misc_feature (1)..(289): Xaa is any amino acid
VLRTCVYGRIVAQNVDAVEKKPLYHFLPASETFSIAAVGCNFTCVFCQNHSISQAVEFMGDVVDQDNDLYGGDAMSPRNIVTAAARYRCPSVSFTYTEPTVFFEYALDTAKAAKAAGLKTVFVSNGFMTAECLRMAAPYLDACNIDLKSFRDEFYKKRCGAALTPVLESLRAIRDAGIWLEVTTLLIGGLNDSDDELVDIARFIVNDLGADVPWHVSGFYPRYRMSNAPPTGAAAIERACRIGSDAGLRYVYGGNVNIFQDTRCHKCGAVAIRRRGYRTDTVGLASGGV

SEQ ID NO: 104094 - protein, 126 aa, Unknown
  Obtained from environmental sample
  misc_feature (1)..(126): Xaa is any amino acid
ITPSRRPSAGASLAGAQGLALLRRNYVASFVSSPGPVRLDENSQEEVVKLRLARRSISEGFREIILSVNSASKLIRRIEGLTIAGVQVRFDFTNIRTNVGIPELRFVYDSPGSAYMYNNFLFRDAD

SEQ ID NO: 104095 - protein, 143 aa, Unknown
  Obtained from environmental sample
  misc_feature (1)..(143): Xaa is any amino acid
MVESLGDKLKTTREEKGLSLDDVGKDTKITIRYLEALEKEDFSGFPGEAYITGFLRNYGAYLDLDVQELLSLYYALKIQEQPIPEQLLTKSPQVLPKIIIGILLGLIIAGAGGIAVYSFIKRPRETRVTVPIINRAPIEYVMD

SEQ ID NO: 104096 - protein, 250 aa, Unknown
  Obtained from environmental sample
  DOMAIN (10)...(179): Radical SAM superfamily
  misc_feature (1)..(250): Xaa is any amino acid
LLSLPGSAYVKISEGCDNRCSYCAIPLIRGPLCCRTVTDIVDECKGLLARGMKELCVIGQDIGSYRSGNSGLPELLAAVAELSGKFWVRLLYMHPDHFPLAVLDIMEKDSRFLPYFDIPFQHGSQKILSAMNRKGSAESYIALSETIRRRLPAAVIRTTFLVGFPGETEDDFALLTDFQEKLRPDWAGCFAYSREEETPAYTMKAQVPPKIKARRKREIEERQIRITETSMDRFVGQNLDALFEERVQRQ

SEQ ID NO: 104097 - protein, 268 aa, Unknown
  Obtained from environmental sample
  misc_feature (1)..(268): Xaa is any amino acid
TRFEGLNQKEIIAKLFSNGNELESGPNGKFPVNIDTQNLLALFSDGTFIVSDTHKFDGRVLSFQSLIRKKGGTINKPIYVSMSVITGVYAKDAKGIADADSAKTKGSSESSSTNQMQQEFVDLVYRASDMKVSDIHVVVSDHTTIMFRIAGSMQVVLEYDKDWGESFVRSVFASADISDSNYAQNEFQAAQKMGSTPLRGQKDLYLPENVLAIRLQFNPVAFGTRYLVMRLLYANSATTKEDNLKELGFSEYEESRLYQCARYRRDFA

SEQ ID NO: 104098 - protein, 89 aa, Unknown
  Obtained from environmental sample
  misc_feature (1)..(89): Xaa is any amino acid
MKYILWDFDGTLGYREGIWSGALYSVLLKNGIKDITIDVIKPYLTKGFTWHNSEKSHKELFGNKTWLEYYEDYFSNIFIELGIQKNISK

SEQ ID NO: 104099 - protein, 282 aa, Unknown
  Obtained from environmental sample
  DOMAIN (147)...(180): Tetratricopeptide repeat
  misc_feature (1)..(282): Xaa is any amino acid
MECIRLNPAHAEGTAALAECYYELSEFDQALNWVRKARLLARSNLSITNLEVFTLIALGRLDEATSLVNEILTKEPYNREALFAAGELDIARNRPSEALLRYREAVRRYPDDRRLLISLALVSLSLGDGDTAIRYINNALEQHPDDYRVFFYAAYIYSKNNKLPEAITYVTRALYYKPNHEPSNSLMAVLRYRSSQYEEAIRLSDMSIAKDRQNMDAWYLKGLSLIRLNRQQDAITVLSTALSVNEEEEFIRAILEETLLSSTSLEEQRRARWASWHFYHAK

SEQ ID NO: 104100 - protein, 248 aa, Unknown
  Obtained from environmental sample
  misc_feature (1)..(248): Xaa is any amino acid
LAGPRTALFANGVSETYAYSANSTAGTHTVTISHTSGSVTLVASETRNLLGQAVASVAPSTSGTDASTYTYDGMGNLTQHVRTTSNGTQTRSFTYDSLGRLTSRTEPETGATLFGGYAAPHGRPGTITEPLGSGSTRARTIAYDTFGRITAVSSGSDALSYTYDAAKPLLTAASRTQAAGTATQNYTYDQYGRVIAEKTTTGWDGFIANVQFAYDAWGDVAAVTYPGASSIRRAGSYTTSTTRKGSWP

SEQ ID NO: 104101 - protein, 250 aa, Unknown
  Obtained from environmental sample
  DOMAIN (154)...(225): Bacterial flagellin C-terminus
  misc_feature (1)..(250): Xaa is any amino acid
MGEAVAGDKNWAFDGAYALVRTGKLKEGEFNAEDFMLVAPNGAQYKFDTLTEGGADVGVSVPGVIIFAEKNVGAGDTYIQFSSNAGVALAADYKSMAVGDIVTFIFSGYKAPSSNLANSFMAQIGANSGQTMFISISDMRAQAIGVADIDISTKWGAATVIETVDNAIQTVSHQRASLGAAQNRLEHTIRSLDTAIENLQAAESRIRDVDMMKEIMEFTKHNILLQVAQAMLAQANSQPKSVLELLRSSM

SEQ ID NO: 104102 - protein, 182 aa, Unknown
  Obtained from environmental sample
  DOMAIN (148)...(171): 4Fe-4S binding domain
  misc_feature (1)..(182): Xaa is any amino acid
MGSGGLIVMDENTCMVDTARYYTKFLAHESCGKCVPCREGTRQMLNILERIAAGEGKDGDLALIEELAEFMEAASLCALGQSAPFPVASTLKYFREEYEEHIREKRCRSGVCQALIAYDIDQKKCQACGSCQRACPTNAINKSGDKVFTIVQEKCIKCGACFSSCPDKFSAVIKVPAFSIKK

SEQ ID NO: 104103 - protein, 190 aa, Unknown
  Obtained from environmental sample
  misc_feature (1)..(190): Xaa is any amino acid
MTRLETHADLKKFRDEVIAKRNSKATWLAVCAGTGCRAYGADKLADALEEEVKKRGLENKIGVRRTGCHGFCEKGPLVVVQPSEVCYQGVHINDIPAVLDKVCTGKGDVEKLCYLDEGSGKRLEKLDEIPFYKFQERIVLKQNVLIDAAEIADYIAVDGYTALSKVLSGMKPDAVLNEVKEAKLRRRGGG

SEQ ID NO: 104104 - protein, 272 aa, Unknown
  Obtained from environmental sample
  misc_feature (1)..(272): Xaa is any amino acid
MNLINTEKITKKLSMALWLAVSFGVVMSLIGIVLRIKGDFFSLPFIVILAVMMAAASIYLAMSSLKTLKDSFKPINDKFLWYESILDAMPFPISITDMDMKWTFINRTVEQFLNVKRSEVIGKHCSNWGVNICNTPNCGIVCLRNNKKITYFEHMNMNFQANMHYLLDQNNKRAGHIEIVRNITRTLKIQKAQAELIEKVHNTSVAFSSVAKEIAESSHSLAKGSSEQAAAVETLSVSLAGVTEKTKENSVVAEHAASLAAAIKDNAEKGSV

SEQ ID NO: 104105 - protein, 94 aa, Unknown
  Obtained from environmental sample
  DOMAIN (4)...(91): Acylphosphatase
  misc_feature (1)..(94): Xaa is any amino acid
MAAGMVARTYTIAGRVQGVGFRHFTAMRARSFGITGYVKNRDDGTVEAYLEGSREQILAMHAELEHGPSFARVIEVEFKESVIPSRIYRSFSAG

SEQ ID NO: 104106 - protein, 270 aa, Unknown
  Obtained from environmental sample
  misc_feature (1)..(270): Xaa is any amino acid
MRECFSEALDVPGALALAQTVLDGSVAIKSYIHDVPSPMAQGVLWARTNELLYADDTPLRPARFTELPQISLSEEAAGALVLAREGLGEGYIPADTDALIDWLRLRILVSEELWHKARSLSGVKNIPEQEIIISGGSVCARADLPIVQSIREGDPDAAAAFYQWLSWRGIETMAGIAAAFQSNEEAIDRLLEPLLADERVCRLSGGGIITQDNLDWILRHARAARRLQAQSLRPIAELPLFTAVLQGVFDGFEGITRLALALERIFGCFL

SEQ ID NO: 104107 - protein, 158 aa, Unknown
  Obtained from environmental sample
  DOMAIN (40)...(158): NUDIX domain
  misc_feature (1)..(158): Xaa is any amino acid
LPGFRKISEREVLAARLIQVAEGTFESPSGEQFSREIVHHPGAVVVVPLTADGDVVLVRQFRAAINADLLEIPAGKRDVPGEDPAETARRELIEEVGLEPGRLDLLARFYNSPGFSDEFSYCYLARDLAEVSTDLQGIEEQHMTVERVPLHSVGELIR

SEQ ID NO: 104108 - protein, 240 aa, Unknown
  Obtained from environmental sample
  misc_feature (1)..(240): Xaa is any amino acid
MAFVLLFKFGPMFGLVIAFKDYRIARGFWGSSWVGLKVFQDVFSHRLFIPALRNTLLLNVLDLALGFPTPILLALLLNEVTGKWFKRTSQTLLYLPHFLSWVIIGALAYQLFSVNTGMVNNLIENMGGKRFPFLTTDVPWLISYVLIGMWQNMGWGTIVYLASIAGINPELYEAATVDGAGRFRQCFSVTLPCIRSTIVVLLIMNLGRIMGGSFERVNALMNVAAPEFTTTIPVLVYAGA

SEQ ID NO: 104109 - protein, 259 aa, Unknown
  Obtained from environmental sample
  misc_feature (1)..(259): Xaa is any amino acid
MKRLLIILLVLAVAVSAFAGGGSQSSGGGSSTNFVDYSKGFPQKVTIQIPVYDRAFQGWNVTDNYWTRWIQKEFGDKYNVTVQYVAIGRSTEIQDYTQLMASRRAPTIVFHYDMPVAVNYYSQGFMQPLNWNEIAYYAPGYWAKSKDMIERYGTINKEKVYFFADRPAADNWTTIIRKDWVERAGYKVEDLTNLETFNQMLLKWKELNLGTFGDQLKMNNYTFNYAFRDWPINEAERILYSELNVADLTTNASKEWLKD

SEQ ID NO: 104110 - protein, 65 aa, Unknown
  Obtained from environmental sample
  misc_feature (1)..(65): Xaa is any amino acid
MKQVRVVVEGSLIFDFMTKAKALPSVGQTLLGTGFAMGSGGKGANQAVQLARLGADVSMIGRVGI

SEQ ID NO: 104111 - protein, 220 aa, Unknown
  Obtained from environmental sample
  misc_feature (1)..(220): Xaa is any amino acid
MNRQELLKRVGCIDQLAGVRRFTFTSGRRDGIRGYEVYNMGGLHFTVMESRCLDIFNLWYKGIPFGFVSKPGMVAAPYADLHGPNFLRSAGAGMLYTCGLTNAGNAFQEEGVDDIFHGRIRFIPPENCGSYEGWEGDDYVLKIRGEMRDARLFGEHLVLSRIISTSLESKTIVIDDVIEHRGFEEQEYLVLYHFNIGYPVVEKGCKVYLPSASCRPMNGA

SEQ ID NO: 104112 - protein, 74 aa, Unknown
  Obtained from environmental sample
  misc_feature (1)..(74): Xaa is any amino acid
MTGNKCGKCGENARVNFKQTHMQIKVFPFMGTDQGEDFADWDMDSLRDRVKLVQGFDRLADSIVAEAKYLAENY

SEQ ID NO: 104113 - protein, 125 aa, Unknown
  Obtained from environmental sample
  DOMAIN (18)...(124): FlaG protein
  misc_feature (1)..(125): Xaa is any amino acid
MGMTISSVVTGTSFAPQPELPKLQQLRSTDQRATVEKFVSSLPGNGENLNAAQLDIHRIAADVEQVSQTFNKKLQFVVDHQSNEVIVKVIDKNTDKVIKVLPPEELQRLHRKLKETIGLLFNERV

SEQ ID NO: 104114 - protein, 144 aa, Unknown
  Obtained from environmental sample
  misc_feature (1)..(144): Xaa is any amino acid
MIELFDTGAYLLRGTQIIREDGNAASTPELKSVSKDEGRKGTIAYGILEAHAASGCEQENLCLKFDSLTSHDITYVGIIQTARASGMEKFPVPLVMTNCHNSLCAVGGTINQDDHVFALSAAKKYGGIYVPPHLAVIHTYNREM

SEQ ID NO: 104115 - protein, 93 aa, Unknown
  Obtained from environmental sample
  misc_feature (1)..(93): Xaa is any amino acid
MKSKEDNGPYNIYAEAEVTVEFFDLDPLQVVWHGNYINYFEIGRRALLEKIGYGYDEMEKSGFAFPVVEISAKYLGSLRFKDAGADKGYSDRI

SEQ ID NO: 104116 - protein, 257 aa, Unknown
  Obtained from environmental sample
  misc_feature (1)..(257): Xaa is any amino acid
MPPEKSPLPNIYTPKALMLIDDKSSMGGGLSSMLNSSGLGGLASLAGISSSSSKTNSQLAEYLVETNSMLDSIVDNFNLIDKYKIKKAPRATSRKILKKLLKAEYDTKSGVFSISFSDTDPAFARDVVNYSTAYLEKRFDELGIDKNKIEKENLEINIANTFQEIRKLEEESRNLERSVSSAAGRLPSITLDLTRIALELTAQREVYTRLKVQYELLKVTMASEKPVFQILENAEIPDQKSKPGRGLLCIITVFAAG

SEQ ID NO: 104117 - protein, 259 aa, Unknown
  Obtained from environmental sample
  misc_feature (1)..(259): Xaa is any amino acid
GSRNITLTSHGKYALVGRTSASDGDFTINAPGSGKYIINADSMAIKGYGSLIQIGSGLAGVGGTLTINGWTKTTTKEGAANAPAAIEGTNIDVIGAGSSTSSKNIIINSKGKTVLLATDDITAQEAQFEHAAPAGTVGAVVFSTAKGVATLTKLNVTNGTNSGTLPGAIAEAGFTVTVKEGKYYPSGDSKGRALASDEDVNIEGAKISSAGTATAAGGYVVSGKNVRVSSSSNDSGVVAWAGSGTFAVGGIYATDSVSV

SEQ ID NO: 104118 - protein, 208 aa, Unknown
  Obtained from environmental sample
  misc_feature (1)..(208): Xaa is any amino acid
MGTGCPCENPIYTKFVTWPNAVKEFRLASKSEGTRKLANMPTRFHVENMPATSYLVIPETSSENRTYIPMGFMLPNVLASNLVKIAANATLYHFGILTSSVHMAWVKVVCGRLKSDYRYSKDIVYNNFPWPEVNAKQRAEIEKLAQAVLDARANYPDSTLADLYDPLTMPQELLKTHRALDRAVMKLYGFPKEAPESAIVAELMGRYQ

SEQ ID NO: 104119 - protein, 43 aa, Unknown
  Obtained from environmental sample
  misc_feature (1)..(43): Xaa is any amino acid
DTTNAIESLNYSIQRVVRHRQSFPSDESALKLVFMALRNISKK

SEQ ID NO: 104120 - protein, 146 aa, Unknown
  Obtained from environmental sample
  DOMAIN (29)...(104): Mur ligase family, catalytic domain
  misc_feature (1)..(146): Xaa is any amino acid
MERRLLDFFTREVADKARIKFLDKITDCPVTGIEYDSRKVKDGNLFFALPGLHTDGSLYIDDAIKHGASVIVHENENIKKKDGITYLKADSSRFAMSPVSAAFYGNPSQRMLVTGVTGTEGKSTTVFLIWQLLTLLGKKAGFFSTV

SEQ ID NO: 104121 - protein, 76 aa, Unknown
  Obtained from environmental sample
  DOMAIN (2)...(76): AMMECR1
  misc_feature (1)..(76): Xaa is any amino acid
MTPCSDPKKVKVGVHGLYLRRSGRSGVLLPQVPVEQGWNLDQYLDYICVKAGLPAGSYNAPDAELLTFTAIVFGEE

SEQ ID NO: 104122 - protein, 132 aa, Unknown
  Obtained from environmental sample
  DOMAIN (5)...(125): Oxidoreductase family, NAD-binding Rossmann fold
  misc_feature (1)..(132): Xaa is any amino acid
MRETIGLGLIGAGRAGMIHARNFASRVPHARMAAVSDVMEDSCRQAAAELGISACYTDWRELLADKAVDAVIVVTPTKFHCAIVVEAAKAKKHILCEKPMAMTKEECQLMNETAAANGVNLQIGFMRRLTRV

SEQ ID NO: 104123 - protein, 89 aa, Unknown
  Obtained from environmental sample
  misc_feature (1)..(89): Xaa is any amino acid
MPSFNSAVNDIDPKGLRLDRYIAENLCLLSRSQIKARELEARVNGKLVKISRIVKNGDKIEISWNETPPVNLIPENIPLDIIFENNRGV

SEQ ID NO: 104124 - protein, 131 aa, Unknown
  Obtained from environmental sample
  misc_feature (1)..(131): Xaa is any amino acid
MGGIKKEFCPLPSSTTPLTVLGAAARAFAASAKIRFIVFTVPQGMEDEARAALPSNLDKELLFVSGGPSRRVSVHNALSLLENYHPPWVLIHDGARPWVKIELIEKIILALSQHGAAIPLLPLVETPKEVS

SEQ ID NO: 104125 - protein, 132 aa, Unknown
  Obtained from environmental sample
  DOMAIN (1)...(83): CarD-like/TRCF domain
  misc_feature (1)..(132): Xaa is any amino acid
EKILYYTIYLEVSDMTIMVPVNNAEALGIRPIVAKDEAMKALELMGEDYEPIPSDWKLRYQMNLDLLKKGSVMDIAAIVRSLYHRSKVKELPILERKLYDSALKLFEDEIAYSLRKPKDEVETMIFTRLEAR

SEQ ID NO: 104126 - protein, 288 aa, Unknown
  Obtained from environmental sample
  misc_feature (1)..(288): Xaa is any amino acid
ESDAITLNNPTKTAYTFAGWTGTDLTTTEKDVRIPSGKTGNRTYTAKWTAEIYTIKLVATGGTLAVDTINTVAGGTLKDLPAPTTAKTGYNFDAWYTAETGGVKVEKGKTVFGGDATVYARWTPINYKIVYLDVGKLLYDNPTSYTIETPSFELFAPTKTAFTFDGWTGSNSKIPEPTVYIEQGSTGDKNYTANWTPNYYTVTFDPRGGTMLAKESVTTKLGGKLDTLPTPSMEGNVFEGWFWTEVGGEEITNNTVFGDDATIYAMWTPICTITFYANGGGIGPSSAS

SEQ ID NO: 104127 - protein, 266 aa, Unknown
  Obtained from environmental sample
  DOMAIN (1)...(71): Bacterial Ig-like domain (group 2)
  misc_feature (1)..(266): Xaa is any amino acid
NKDSIEIEAGSSELLVASVIPANATDPSVKWSTSNADVATVNGGSVAGVSVGKAIITVTTNDGSKTATTSVNVVAPKPTITPDGFVRHLIKSDRPNTYNIVYISEGFKNLDYALFDDLVQNSVKCLFEIEPYKSYRNYFNVYSVFAASKDSGITADVETFNYSDGSPTSYHYKADTAFGMHWLVSATYGGSNNWWRLDSPDWLASKVFQYGKKATNEVNHFVFIINGLHYGVETPIDAGGIHSIYYGFASNLYNPGYSKTMVIFLL

SEQ ID NO: 104128 - protein, 266 aa, Unknown
  Obtained from environmental sample
  misc_feature (1)..(266): Xaa is any amino acid
IAAYVRDAKNNFGIDVAPPSINESESLFSVKDGKIMYGLAALKGVGAAQTDQIIAVRQEDGRFKNLTDFAKRTAGMLNKRVLESFIKAGALDCFGIDRAQLYYNADAIMLYAGKQKDGGRTLSLFENTVEDDVADDRISRDFTKSSAWGFNEQMMYETEALGFSLSSSPLDPYKKLISSKRLIKCADLATQGDRKSIQVAINVVDHNRRTTKTGKPMLIIKGTDGNAVIDAVAFGGSVAELEEVLRENDTVVLTGRTALREDNSVS

SEQ ID NO: 104129 - protein, 252 aa, Unknown
  Obtained from environmental sample
  DOMAIN (1)...(186): Cellulase (glycosyl hydrolase family 5)
  misc_feature (1)..(252): Xaa is any amino acid
DRGIYVIIDWHSHTAHQNTAKAKEFFEEMATKYGNKPNILYEVFNEPQNGGMGVTTAAFWTNTVKPYMETVVAAIRAIDPANVIIIGTPTWCQDVDVAAANPVNGANLVYTQHFYSYSHKEPLRAKARAAMNTSNKPVFVSEFGVCKSDGKTPLDTAEATKWLDFLDSNKVSWVNWSVSYKDEGASALKPAVRKFDGNWTADDLTISGAYIRNKLIAAQQREDEEWKTTAALAAERAVPHSQPTGGSAAITP

SEQ ID NO: 104130 - protein, 101 aa, Unknown
  Obtained from environmental sample
  misc_feature (1)..(101): Xaa is any amino acid
MPAARSPFVRELPAGLYEEWHELPGGQCVARGHATAKSPPARLLPPESAAPSAPDAQLGYCTHKIFGRGKKIRFVPPDKFQVNFPGFGVKTILADFLTPAE

SEQ ID NO: 104131 - protein, 82 aa, Unknown
  Obtained from environmental sample
  DOMAIN (1)...(59): RNA recognition motif. (a.k.a. RRM, RBD, or RNP domain)
  misc_feature (1)..(82): Xaa is any amino acid
DQLSELFAEFGEVKSAKVVFDRDSNRSKGFGFVEMDDEAAEKAIQSLNGKNVGNRALRVNESQPREQRPPRQGGGGYGNRRG

SEQ ID NO: 104132 - protein, 108 aa, Unknown
  Obtained from environmental sample
  DOMAIN (3)...(108): Conserved hypothetical protein 95
  misc_feature (1)..(108): Xaa is any amino acid
MKLRIISGTLKSRYISSDCDRGPTGSIGFRPTQERVRESVAEVLKRRIRSAVAADVCAGSGAFGFEMVSRGAARVDFVEADKRAALRIGENAKALGVEGRVRVIREDV

SEQ ID NO: 104133 - protein, 246 aa, Unknown
  Obtained from environmental sample
  misc_feature (1)..(246): Xaa is any amino acid
MILQIGAATNGNINRSFIELYNNTNATIDLSGYSVQYATGYSTNANWVPDPAASPTSDGSWKIIDLSGKTIQPNHSFLILGEAQTPESGLTPALTFKDGYGDINLTNFHISNRTVKVAVMRKTTVITAENPFNIGNGVREDGYVDMVGVRNASADQIRAYETAPAPNFSKQVGVRRISLTDTDNNSSDFETVTYASVTAEVKEIKRPKNHGYGAWNPITGEGETLPELSTGFELFSKKYMTYTDEV

SEQ ID NO: 104134 - protein, 244 aa, Unknown
  Obtained from environmental sample
  misc_feature (1)..(244): Xaa is any amino acid
VLSLIWGIGFEVQTLDNRIVLASELNNENKFPADEAGFKTGDRIIEVNGKKTSYYHEIQENIAINPEKLLPVTVDREGEKTTLFVRPNLDKSTGMGRIGVYFWTDAVIDDIVPGGDAAIAGLLPGDRITGVNGTPVINTIDFMRALETGSAGSAGAGTAAIDYARNGVEGTTEIVLSESGGNDLGIIWPRITYRTPPLSPPAAVAKGVSESWKTLVISLRSLSLLFKGIKLTEAVSGPVRITYM

SEQ ID NO: 104135 - protein, 242 aa, Unknown
  Obtained from environmental sample
  DOMAIN (65)...(242): Type III restriction enzyme, res subunit
  misc_feature (1)..(242): Xaa is any amino acid
MSDLSVSKAGTITADEDRFMEWKTKDGSYENTQHAQFDTFIEGMFDKARLLDIIKNFICFSGETKILGAYHQYFAVRKAVNSTAQATCSDGRGGVFWHTQGSGKSLSMVFYAHLLQDVLNSPTIVVLTDRNDLDDQLYRQFCKCAEFLRQTPEQAQNRENLKELLAGRQANGIIFTTAQKFEESAECLSERRNVIVMADEAHRSQFIDERVDSKTGKIQKSFGLIIRESLPNATYIGFTGTP

SEQ ID NO: 104136 - protein, 274 aa, Unknown
  Obtained from environmental sample
  misc_feature (1)..(274): Xaa is any amino acid
DVGKAEQKDLFIKEAMLLRQALSLCRSLVTSEQRFETAYFEAVRTLLTRVTVEGKPLSLKEINGRINELLKASIHSEGVINLFADIDTVFSLFDPKFLDEISKMKEKNLAVEILKKLLAEQVSLYKRTNLVKSEKFSERLQKCMKSYINGLISNEEVIAELMKMAKEMSTARAEGNALGLSDEETAFYDALTKPGAIKDLIGNDTLVALTHELAEMLRKSRTIDWQKKESARAGMRRMVKKLLKKYDYPPEGYDEAIATVIGQCEMWADNENKL

SEQ ID NO: 104137 - protein, 275 aa, Unknown
  Obtained from environmental sample
  misc_feature (1)..(275): Xaa is any amino acid
ILAVEKEPSVGVKNGMVYNPSEAAARVKSIITKLQNRLRPVEFEKVYVGLNGHTVKTIPNAVPFSFPSDKELSKNILDDLREKNNIYNNDETSVYEIFEQEFLLDDELEASPLNCMAKSGEANYKVLVGKSQIKSRINQVMERISLDIADIFIAPVATAEALATNADKELGCAVIDFGGETTSICVYADKIIRHVAVIPFGGKAITKDITSLGVTWTAAEKMKIEHGCALVAMQHSNACMMFPPTDHRAEEITISLKKLAQIIEARMDEIANFIC

SEQ ID NO: 104138 - protein, 55 aa, Unknown
  Obtained from environmental sample
  misc_feature (1)..(55): Xaa is any amino acid
MTVMAFTALPLKSGPGELIPSIIAAILTAIIHVWKRNTLLSISGGTALYMLLIRI

SEQ ID NO: 104139 - protein, 242 aa, Unknown
  Obtained from environmental sample
  DOMAIN (9)...(241): Putative glycosyl hydrolase of unknown function (DUF1680)
  misc_feature (1)..(242): Xaa is any amino acid
MRQPLPLSVIRIDDPYWNRYTKLIPDKVIPYQWEILNDRIPDAPPSHCLKNFRIAAGDEQGERQGAVFQDSDAAKWLEAAAYSLASRPDPRLEEKADEVIALIGRAQEEDGYLNTYFSLNYPQEKWKNLTEGHELYCAGHFIEAAVAYYGTTGKKAFLEIVCRMADLICLTFGSAEGLIHGYPGHPEIELALVRLYRVTGVSRYLDTAKYFVDQRGASPNYFIEEMKSPGFRHIYPEFSDYD

SEQ ID NO: 104140 - protein, 66 aa, Unknown
  Obtained from environmental sample
  misc_feature (1)..(66): Xaa is any amino acid
MTEAKKNMDFFNNLSEILDHCRNYREPVIVSNNGEGRFAVMTEETYEELIGKSRNELYYALQMGLD

SEQ ID NO: 104141 - protein, 262 aa, Unknown
  Obtained from environmental sample
  misc_feature (1)..(262): Xaa is any amino acid
GHYCLLHGITTAPSAAGTYNVTFDVAAAGNWKQATGLSAGTLLITADAATPKAADFYINRGVFYADGSSRTVTVYPKPDKSTGVITVKYNGSTTPPTTAGIYTVTFDVAAAGEWKQATGLSAGELKILGDDKLYIITGTDGSYTVTKESTAIGAAYTTSTLALNAIRDEANGDCVVQFGDGTNVLNINGNTGTNLAATFNNTGGTWGEVALIGKITSNNTNGSNGTVNIGGNVSITSTADITNTANGGRVLVSNSTGTVTVA

SEQ ID NO: 104142 - protein, 178 aa, Unknown
  Obtained from environmental sample
  misc_feature (1)..(178): Xaa is any amino acid
MIVDRKSLYKQRRMIIPSPEFIVLYNGDKKFPDYKELKLSDSYNFKTPDLYLELVVKVYNINKGRNAEIANRSSVLSGYEEFIAQIKENLKSMDLCEAIKLAVKTCISKNILVSFLERNASEVLNMLLREWNQDEAIEVWKEEAREERLDEILDLMKKGYTSTDIENHFREQPHPATA

SEQ ID NO: 104143 - protein, 103 aa, Unknown
  Obtained from environmental sample
  misc_feature (1)..(103): Xaa is any amino acid
PGRAVHENWFEYLKAAGIITLFSIANSALAETAAKYSNSAAAGIASASSDVVNQLGGGMIGRALNIQPTLTVENGTLINIMLNKNLYLPPVGGYAVTQKYILE

SEQ ID NO: 104144 - protein, 162 aa, Unknown
  Obtained from environmental sample
  DOMAIN (1)...(162): ArgJ family
  misc_feature (1)..(162): Xaa is any amino acid
CPHCTADYNTFYTALEYVCVALARKMARDGEGATKLVTVTVTNAASENAAETLAKSVASSSLVKAACFGADANWGRVLCALGYAGVDFSPEKTDVNFRSAAGEIEVCKNGQTVKFNEEKAKEILSEEEIEILVNLHDGSEKVSVWGCDLTYDYVKINGDYRT

SEQ ID NO: 104145 - protein, 114 aa, Unknown
  Obtained from environmental sample
  misc_feature (1)..(114): Xaa is any amino acid
MNSISNNDRAGVLVHALPYIQSFQGKTIVVKYGGNAMLNDELKRAVIEDVILMSCVGIRTVLVHGGGPEIEAMLKKTGKESRFINGLRYTDEETMDIVQMVLCGKVNKEITALI

SEQ ID NO: 104146 - protein, 180 aa, Unknown
  Obtained from environmental sample
  misc_feature (1)..(180): Xaa is any amino acid
MAQAIINIFAVILITAGVVLLFGLSPDVIGKDLLSFIERQESLKYKVAVIQGKVKKSKIKTGLSALYNALKATDSENKFAVLITVALLGFAAGCVFAALIGNVIFVPVFAVIAFALPYGYAKGMAAAYNKQMSDELETALSVITTSYMTNEDIIFAVENSIGHIRQPVQRVLRSFGKDEA

SEQ ID NO: 104147 - protein, 171 aa, Unknown
  Obtained from environmental sample
  misc_feature (1)..(171): Xaa is any amino acid
MAFPNPTTDAIGGSMDSTDNKILSFDGIHRFLSNFFPATLTMNFDGLDTTTTAAQRNTQKFANAEQAFQYAKAVFANNYQTAEKILSTPNPTDAKRLGRQVQALDTKSWNEKRNAVMLKIVRAKFAQNPKLAKKLLETQDAYLEEGNTWRDTYWGTCQGKGENALGKILMQ

SEQ ID NO: 104148 - protein, 297 aa, Unknown
  Obtained from environmental sample
  DOMAIN (20)...(202): Outer membrane efflux protein
  misc_feature (1)..(297): Xaa is any amino acid
GFAAGDCASRRDVPSDPQTLQQVIELGICRNPMTSTAYLAAESARLNKNAGYAPYLPQVDLMANTTEQKLAGKWLDPHRGAALSASWLIFDFGKRFSDLGALAAVWRATNLDYNQAVQSYVYDIIAAYYGMLAADAEVQATTDLVAVARGAKDTASKKFSAGAVAKADVYKAEVVLASRELEFERAKNNREIAKGRLLFLLSFSQEQELKIQNMPATFGGAAETKAVSELIETAKRRRPDLLSAEESANAAWHRRNAAFLRNLPSISATRALTYSFDSAPATPGGGPKRQLGTTIGI

SEQ ID NO: 104149 - protein, 258 aa, Unknown
  Obtained from environmental sample
  misc_feature (1)..(258): Xaa is any amino acid
MKKEKHAMKSKITALASRPVKWAVRHKWKLAVALCALLAVSYFSGGSKKSATDQLITSPVSRGRLRQVVTATGEIRPLNTIKVGSQVSGIIEQLFVDYNDKVGKGQVLLKIDPSVLQASADEAKAALDSSIAQRNFDKAEFERSKSLFKEDFIPRSEMEQAETRFKTSEEAVKRAKSQYERAMTNLNYATITSPVDGTVISRKVDKGQTVAASFQAPDLFEIAEDLSKMQIETNVSEADIGMIKEGQKVTFNVDAYPT

SEQ ID NO: 104150 - protein, 92 aa, Unknown
  Obtained from environmental sample
  misc_feature (1)..(92): Xaa is any amino acid
LNLSLFISRRYLFAKKSHNVINFISLVSAVGVAVGSLALVVALSVYNGVDDLIKSLYNALAPDLKITAVEGKVFNAQNFDFQKVKSTEGVLF

SEQ ID NO: 104151 - protein, 159 aa, Unknown
  Obtained from environmental sample
  DOMAIN (69)...(152): Acetyltransferase (GNAT) family
  misc_feature (1)..(159): Xaa is any amino acid
MIKLFTDRLIIRDYVIEDLENHHKLLSDKIVMYYLPDIKTDNIDESRENLMKVLNDQGQKERNLYHFIIENNNTNEFIGGIGYTVSNNTPLGKLVHMGYFILQNYWNKGYTTEALKRVIKFGFEENNVYRIHTGCIKENKYSKRIMQKCGFIKEAEFKE

SEQ ID NO: 104152 - protein, 247 aa, Unknown
  Obtained from environmental sample
  misc_feature (1)..(247): Xaa is any amino acid
MAYIHEFDSNLTEQKTLQFEKELDQLGAFTKDDEGNFYFFYARRAAGRNDANMAMVKYNPNGEKTKEYKLEAYATNSLDGVRIPFEAGTCRLELTGSMLTVYFARQMFNGHQASYGFVLDKDTFERIDRGQVGNNKYELTGNNIVPYTSHSFNQFILPIDNGFVFADHGDAYPRAFTFGKYQNGKTTKRVNAFTFPGSTGANATYAEMGGLAKTSHGYIFAGAYGRDINNPRNLFILTFDEELKSCS

SEQ ID NO: 104153 - protein, 76 aa, Unknown
  Obtained from environmental sample
  misc_feature (1)..(76): Xaa is any amino acid
MKFLHLSDPHIGKSVNGFSMIEEQRRVLWQVIEYIRSERPAAVVIAGDVYDRAVPGVEAVRLFDDFLTGLPPRGLR

SEQ ID NO: 104154 - protein, 209 aa, Unknown
  Obtained from environmental sample
  DOMAIN (56)...(132): Domain of unknown function (DUF1730)
  misc_feature (1)..(209): Xaa is any amino acid
LPVLLREIQSDIGVRSLWGVTPAMQDREAERRYRAWLALALHADMPCLTAKGADLKFAPERLLAGAKTIIMCALPLPDVGGAPPVPHDAAGLVALYARGRDYHRAVGVLLRRIIQALRGRYPEALFRPFCDTLPLSERAYAARAGLGQPVRSGLLANSRYGTRFVLGGILTTLDIAADSPMVFPAGDAHFLPQSVPPEKCTHCHACVDF

SEQ ID NO: 104155 - protein, 231 aa, Unknown
  Obtained from environmental sample
  misc_feature (1)..(231): Xaa is any amino acid
LPIFGSSKTQNIYGGWFDASGDMGKHISHLSYANYFNPQQIPLVAWALLQANESQPDAFGEAAKKEAAWGADFLLRALSSEGFFYMSVFDNWGAGYRWNENNRPDKGSQSKGEREICAWRDSEGNRTADYQCAMREGGGMSIAALARAAKADIRGDSAAKQYLAGAERAYAHLKANPTKYQDDRKENIIDDYCGLLAAIELYNATGTDGYREDAKSRAASLLGRQSPEGWF

SEQ ID NO: 104156 - protein, 220 aa, Unknown
  Obtained from environmental sample
  misc_feature (1)..(220): Xaa is any amino acid
MGKNAASHLEQIIKQGRAFGVHVVLASQTMANVGAIHQSLWGQVGIRIALKCPPSDAKQILAEDNDGVDLLAANEPGLAVYNSDCGNKVANTRFRVAYIDQDIQDELLKEISNKAPKPQTAFPETRVMVSNIEDNLYHPYQKFIDGGKPDEFNERAVLIGEPLQLYGKLKSIFKAKESSNMLIIGNDICKARAMFAFSALSLSIHAIAKNDWKKPRNPCV

SEQ ID NO: 104157 - protein, 188 aa, Unknown
  Obtained from environmental sample
  misc_feature (1)..(188): Xaa is any amino acid
MDLTRTQFDILTFLEHEKDEEKLTQRNIAHMTGLSLGTVNKVMLFLGENGLFENKSLTTTGFEALEPYRVKKAIFIAAGFGSRLVPITLNTPKPLVRVKGARIIDTLLDAVCAAGIDEIIIVRGYLGEQFDQLKYKYPRIQFLENPMYNESNNISSIMCVRYMLQNAYVLESDLLLNNPTLIRKYQYA

SEQ ID NO: 104158 - protein, 67 aa, Unknown
  Obtained from environmental sample
  DOMAIN (2)...(59): Ribosomal protein S21
  misc_feature (1)..(67): Xaa is any amino acid
LAHITVDDNEILEKAIKRFKRMVEKEGIIREFKKREYYEKPSTILNRKKKANARKLLKRNRRGKGES

SEQ ID NO: 104159 - protein, 290 aa, Unknown
  Obtained from environmental sample
  misc_feature (1)..(290): Xaa is any amino acid
YADVLRFNWKMEMEKFDAIQGYFRPRPVGDVTLFLEMGDSGIAELIVDKNGKQMKSIPKAIKQDEYVKEINEVKASLKAQFSRARQSLEKAMENRDQFSLAEVSELLGHPVISPIISKLVFRSGDELGFLSGHGLRRADGSDVKLNKKATLTIAHCYDLFILGQWPGYQRYAFEQSLIQPFKQIFRELYMVNEDEKSEKTVSRRYAGHQIQPQKTIALLKGRGWTVNYENGLQKVYYKENVIASMYALADWFSPSELEAPTLETVRFFERKTGKPLELDKLNQVCFRKSC

SEQ ID NO: 104160 - protein, 281 aa, Unknown
  Obtained from environmental sample
  misc_feature (1)..(281): Xaa is any amino acid
AKQSDFKWYKIEFFPEESGTPVPPEEWRTNATLSTEPIFVTAGKYMLRVTAFIDEEKGKPAAEGWLTIEIEENKVNTGTVILNAIISTGGTGTFSWNISFPAEITEASMTITPLDKANGTAEQKLYFKGGTPAVQKQDSCELNSGYYNVLITLFKDDKTQQIERRDILHIYQNMESEFTVTFSNTDINKKNYIVRYVYNINGWDDGIQTIETGAIITNPPTPTRDNYDFGGWYTDNGTFKTKWDFVNGTVTQNINLYARWHPMGKFTFQFSITDSAPIVDS

SEQ ID NO: 104161 - protein, 237 aa, Unknown
  Obtained from environmental sample
  DOMAIN (40)...(229): CobQ/CobB/MinD/ParA nucleotide binding domain
  misc_feature (1)..(237): Xaa is any amino acid
MEDQAEELREIMKRKKDNASAAKSAPAKTNVKSGDKARIITVTSGKGGVGKTNLSVNMALAFARMGKKVVVMDADLGLANVNVMLNMIPKYNLYHVIKKQKTIREILVETEYGISIVAGASGFSQIANLGEEDRKDFIAELDTLSSADIIIIDTSAGVSSNVLDFIEAADDAVIITTPEPTAITDAYGIIKIIATEYDSLNMGLKLVVNRAKGAAQAKSVADRMINIAGQFLNLKVD

SEQ ID NO: 104162 - protein, 258 aa, Unknown
  Obtained from environmental sample
  DOMAIN (2)...(242): FHIPEP family
  misc_feature (1)..(258): Xaa is any amino acid
RNGGRETVDPAFGLPAVWIEQSKRDEAERAGYTVVDPPSIIATHLTEIIRRHGADILGLQDTQAILDTLRKEYPAVVDEVLREGKGLRITEIQKILHGLLRERVSIRNMVSILESIADYAPVSKNIWFLTEKARQAISSQICHQYADEDRRLRVLTLDPSLEQRIIDSKYETPSGIICALDPPTQKGWIKAVVRAVTAVKEKGWMPVILCSEQARFLVKNSTDRELPDLAVISVPEIVPEIIPEAVGMIKIEETPSEQ

SEQ ID NO: 104163 - protein, 129 aa, Unknown
  Obtained from environmental sample
  DOMAIN (2)...(123): MotA/TolQ/ExbB proton channel family
  misc_feature (1)..(129): Xaa is any amino acid
WEIAKTILDPNLKTREDVEKAVEAEFAKIVPHLESRLPVISILGTTAPLLGLLGTVMGMIELFNVITMHGTADPKLLAGGISIALITTEAGLSVAIPVHLLHTWIAGRVEKTAQNMDYAAMKLVNARFG

SEQ ID NO: 104164 - protein, 107 aa, Unknown
  Obtained from environmental sample
  misc_feature (1)..(107): Xaa is any amino acid
MEDIQVIGACANNLKNVNASFRMGGTTVVCGPSGCGKSSLVLDVLHAESRRRYLETLGNSAIAMFGGPKHVPVKAIHNLRPSIALECGDKIATKKATVSSLAEIAPM

SEQ ID NO: 104165 - protein, 290 aa, Unknown
  Obtained from environmental sample
  misc_feature (1)..(290): Xaa is any amino acid
YKYQTEVDNTKKQIEELRASSQKILNINVNNLKDINTIRSTIADLNTTLSSVQTAANNAVGLVNGIEKDINAARRLEQDARNALTDDINHLKSYVDLGSGAAFAVLEPYIHDMLSDTAQEYIDYGLMALNAFEKLSEQSKKLPKSEPKPKKEKKVVFKGRDVVFPTRSYPTFYLGLVSSDCTVNSWNWDLKLRDVSSDPDLINKPITLNLGVTEVGGNLNRLVSFSGNADFRTNTQQRFGAHINGKGFPVSLGNQLEKAGISGFSGVSAFKFALNGYADGGFSTGGDVNV

SEQ ID NO: 104166 - protein, 251 aa, Unknown
  Obtained from environmental sample
  DOMAIN (35)...(251): MviN-like protein
  misc_feature (1)..(251): Xaa is any amino acid
LSSQETGGSLVRHGSALSLLTLVSRVLGLLREMTKASLLGTSALSDAFSVAFMLPNLFRRLFAEGSISVAFIPTFKEYLLENDREKIKVFLSSIFTFLTFFVTLMVMAGILAAPLIIRFFGMEEFDETVLLTRIMFPFLGFISLAALFQGILNSFHVFAPSGLAPILLNVTTILCAYGLSPFTRNPARAMAFGILIGGFLEAAIQFPFVLKQGHKFFFTGLKRAINNPGTRKVLRLISPTIIGMAAYQLND

SEQ ID NO: 104167 - protein, 200 aa, Unknown
  Obtained from environmental sample
  DOMAIN (1)...(200): Glycerate kinase family
  misc_feature (1)..(200): Xaa is any amino acid
MKIIVAPDSFKGNMSAPEACDIIEAGIARANKDAEVFKIPLADGGEGTARAVTRAAGGQFIKTVVTGPLGGKIETEFGLIDGGKTAVLDMASASGLELIGRDQLNPMKATSYGTGELIAAALDTGAKELIIGIGGSATNDGGIGLISALGFKVLDEKGREVGQGGEALAKIASVDCGGADKRLKNVSIKVACDVTNPLLG

SEQ ID NO: 104168 - protein, 112 aa, Unknown
  Obtained from environmental sample
  misc_feature (1)..(112): Xaa is any amino acid
MAPYKPKEVKEARELKVSFFSKEEYACPVCKKVFNREELLSGSGRLIAGKLTDELHRLYEPSVKYGEVYPLIYQATVCPECWFASMDKDFIDFPPAEKQRAERDRGERIADT

SEQ ID NO: 104169 - protein, 275 aa, Unknown
  Obtained from environmental sample
  DOMAIN (95)...(253): tRNA synthetases class I (E and Q), anti-codon binding domain
  misc_feature (1)..(275): Xaa is any amino acid
CETLGIHHPRQIEFARLNLSYTVMSKRKLRTLVEEGHVSGWDDPRMPTLCGLRRRGYTPGAIRDFCERIGVNKMDSTVDIALLEHCLREDLNARALRRMVVLDPVRLVIDNWPTGKVEMVEAENNPEDASAGKRLIPFSGELFIEREDVMENPPPKYHRLSPGGREVRLKHGYYITCTGLEKDASGRITLVRASYDPASRGGWSDDGRKVLGTLHWVSAAEALDLEVRIYDRLFTVEKPEGKAEGAEGIESVDDAPAREEISSQDIAAGREYLGY

SEQ ID NO: 104170 - protein, 157 aa, Unknown
  Obtained from environmental sample
  DOMAIN (2)...(157): Cys/Met metabolism PLP-dependent enzyme
  misc_feature (1)..(157): Xaa is any amino acid
MRDLGANMTAQTAFLVNLGVETLHLRMERHSENAHQVAEYLAKHPKIVSVAYPGLSGDPYNALAQKYLPYGASGIISFVIKGGREAAVKFMDSLRLAAIVVHVADARTSVLHPASSTHRQMNDAQLAEAGIEPGMIRLSIGLEHIDDIIADITMALG

SEQ ID NO: 104171 - protein, 237 aa, Unknown
  Obtained from environmental sample
  DOMAIN (47)...(237): Protein of unknown function (DUF1538)
  misc_feature (1)..(237): Xaa is any amino acid
VLLLGVFYKTDSAAVYTFDVPEAATSREVARHFIKQFPLYFKEVSIALGAVVLCFIVFQLITRRYHRHHLGRIAVGFVYTLIGLVLFLTGVNAGFFPEGRLLGRVLAASQYKWVLVPLGTLVGYFIVAAEPAVHVLNKQVEEISEGAITQKMMMRGLAIGMAIALTITMLRILLRIPIMYILIPGYVFALGLTFFVPKIFTGIAFDSGGVCSGPMTSTFLLPLAMGTCEGSGGDLMI

SEQ ID NO: 104172 - protein, 118 aa, Unknown
  Obtained from environmental sample
  DOMAIN (6)...(118): Protein of unknown function (DUF1422)
  misc_feature (1)..(118): Xaa is any amino acid
MKQANQDRGTLLLALVAGLSINGTFAALFSSIVPFSVFPIISLVLTVYCLHQRYLNRTMPVGLPGLAAACFILGVLLYSTVVRAEYPDIGSNFFPAVLSVIMVFWIGAKMRNRKQEVA

SEQ ID NO: 104173 - protein, 214 aa, Unknown
  Obtained from environmental sample
  DOMAIN (38)...(146): TonB-dependent Receptor Plug Domain
  misc_feature (1)..(214): Xaa is any amino acid
MIKKASLLTACSVTAFSAWAQDTSPDTLVVTANRFEQPRSTVLAPTTVVTRQDIDRWQSTSVNDVLRRLPGVDITQNGGSGQLSSIFIRGTNASHVLVLIDGVRLNLAGVSGSADLSQFPIALVQRVEYIRGPRSAVYGSDAIGGVVNIITTRDEPGTEISAGWGSNSYQNYDVSTQQQLGDKTRVTLLGDYAHTHGYDVVAYGNTGTQAQTDN

SEQ ID NO: 104174 - protein, 228 aa, Unknown
  Obtained from environmental sample
  misc_feature (1)..(228): Xaa is any amino acid
MKRIAFLILAVFSLLRTNAVFAQRGSMSQGETLEVRLASFMPRNSDWGRCLDRMSAEWSRVTNNAVRLRVIHDGLEGGEQKTLSSLSADNIQAALFTSFGLHNICPSVMTLSAPFLIRNEDELDLVLKDARPLLDAQVNKTNYVVLSWSKGGWVNIFSKDPVLVPDDLRRLKMATNPDDSHFNAAFKAMGFNLVETEIIDLGPKIASNMINAFYQTPASVAPLGLYRQ

SEQ ID NO: 104175 - protein, 289 aa, Unknown
  Obtained from environmental sample
  DOMAIN (143)...(289): D-ala D-ala ligase C-terminus
  misc_feature (1)..(289): Xaa is any amino acid
AKKLTVNNRLTVGIIFGGKSAEHEVSLQSARNVYDAIDRSRFEPVLIGIDKNGVWRSTGGSLSLLNTEDPRLISMDTEGEPVTLAPASAGLLSAQAAKGPKLDVIFPILHGPLGEDGTVQGLLKLAGVPFVGSGVLGSAVSMDKDVMKRLFRDAGLPIGKFLTFKSHEKIPSFAEIEAALGSPFFIKPANMGSSVGISKVKSGAEFSNGVKEAFKYDVKIIIEEFIPGREIECAVLGNENPAASVPGEIIPTHEFYSYDAKYIDENGARLEIPAKVDGDCKKRIQELSI

SEQ ID NO: 104176 - protein, 264 aa, Unknown
  Obtained from environmental sample
  misc_feature (1)..(264): Xaa is any amino acid
VFVSIWVDELGMPDFEVIGKCYSAVHKGIADGQILAVHTVGRGGISEAVAKMCFGNRIGFRVDEGVNTAGLFKPDYAGLVVELDKSVNTDRNVLGIGENCTILGVTIEERNIVCRNARIDIDELYEKWEGVLEGIFPASVGVGESGDHIYDSFFDGVNVDAENNPPAKKAKIKAAKPRVLIPVFPGINCEYDSARKFAKAGAECEFFVFKNINPGDIDGSVKIISEKILTSQILMLPGGFSAGDEPDGSGKFIAAFFRNPRVKD

SEQ ID NO: 104177 - protein, 259 aa, Unknown
  Obtained from environmental sample
  misc_feature (1)..(259): Xaa is any amino acid
KKRQQNIKNVKKQTMKYYEKINEELDNLYNEKWQVLSDKLKEYNSAPDRKLKASNPLLLKLGEHFDFDNREGKKIIMCFGQETNGNKVNGKEDFSGELGGYEKLINQNTSSSSEELAKTWKKEGKNYHRWCGVIARKWIEANSQLFNVDKNNVFVIWNNIRKISTVKNSETRGKIGKKLKEIIKEHFDVIPRELEIIKPDFLFFCTGDNDVDIECFVGKMENKKNYKFDTAKGEGSLCRFNVNNYNAVRGYYPNVNSSF

SEQ ID NO: 104178 - protein, 252 aa, Unknown
  Obtained from environmental sample
  DOMAIN (193)...(252): Histidine kinase-, DNA gyrase B-, and HSP90-like ATPase
  misc_feature (1)..(252): Xaa is any amino acid
MPVDWVSELTHDLREVLSNGEGKNIGKFVHNKHGRGYYCQTYIIPIKDPDGSGAVTGAILTMHDETNLHEAVLSAERSNMAKTNFLAKISHEIRTPMNAIAGMAELILREHTTGIVREHALSIRQASGNLMAIINDILDFSKIESGKLEIVESEYQFASLINDVISIIRMRTIEKQIFFTANIDCDIPGRLIGDEIRIRQILLNLLTNAFKYCDRGFISIHVSCENLTDTGATLVIDVSDSGIGIKPGGSRQ

SEQ ID NO: 104179 - protein, 67 aa, Unknown
  Obtained from environmental sample
  misc_feature (1)..(67): Xaa is any amino acid
MAIADVYDALISERPYKKPFSHEDAVKIISNGSGTHFDPNLVKVFLEHEHKFKEIAMSMNKGDGKDG

SEQ ID NO: 104180 - protein, 278 aa, Unknown
  Obtained from environmental sample
  misc_feature (1)..(278): Xaa is any amino acid
VSGIDYSGIKAETEMVSNVSEMLRQITVVDSGIITSTISGESGYVITMDLYPWPMADYDPRTYDWYKGAKAAGDLYWTDAYADIRGRGPSVFCAVPFYDNSGGRDVFRGVARSTVLLTDLSRIVDSEIIEKSGELFILNGKGIKIYSSSGVQLSTADDGAVLGENFLESNNQLMRSLALSMTLGATGITELEMDGVPVYAAYAPIQTLGWSLGVSVPVQEVFASAMLIEDQIWKITNTTITEIDRYILLLTVIIAILLFFMLTGIAAVAVRFTRSITG

SEQ ID NO: 104181 - protein, 242 aa, Unknown
  Obtained from environmental sample
  misc_feature (1)..(242): Xaa is any amino acid
MKNRIIASPSGASARLEKYSSAYTLSDMEVFIFPQLLYALVLANIMSPRLWAWRDLPWFSGMEELSPEKRAMRLKQYIMDHYTFNLDLETWGLTTKERELARFRDFVDPESLRESNALFGYEGDKYYFSIDIRRHFGLDKYTSDIIPYWKTETLEAMDAFAHKPGWQTGGGECVSLAGLYAAALFVVARIPLEDIFIYTTPLHSQNFIAIGEGLLTNNRRIVTKAMFFNGSEISQKARRALR

SEQ ID NO: 104182 - protein, 116 aa, Unknown
  Obtained from environmental sample
  misc_feature (1)..(116): Xaa is any amino acid
MYQIDVTAMTGKKIYPLSSEYEGKSLSGERLSFTNYYMEINGEPFFGVCGEIHFSRLWENRWEDSILKMKAGGVNIISTYIFWIHHEEEEGIFDFSGRRNLRRFIEILQKHNVYVI

SEQ ID NO: 104183 - protein, 163 aa, Unknown
  Obtained from environmental sample
  misc_feature (1)..(163): Xaa is any amino acid
MKRFAKYLKTRPIGIVSLVLLLLLYFMMVFAEFFATYSPNTSFPDKSYHPPNVRFYKGKFQVQEYRVTNTVTWKYARVRDMYSPVTFWGKGEAYRLWGLIPAQRHLLGSASGPVFLMGTDSLGRDLFSRIVHGSRISLTMGFVATFLSLALAVLFGGLSGYYG

SEQ ID NO: 104184 - protein, 276 aa, Unknown
  Obtained from environmental sample
  DOMAIN (126)...(164): Putative Ig domain
  misc_feature (1)..(276): Xaa is any amino acid
SWGYLTEEMIREGINKTFESKWYTKDQFIAAFKIMLKELGASDADANAYINQHSGDLNAMYPTVTGTIDGNTMTLSDGTTYTKDGGGNNNSGAPTIITVSLLNGTVGVSYNQTLSAMGETPITWIRESGTLPSGLTLSAAGVISGTPTTTGTSTFTVKATNAKGNDTRQLSITIAATGSGTEMTWTAVTNNPFGSGYSSSILSIAYGNGTFVAVGYNHDNSTYIVTSPDGVTWTAVTTSIYSRNNIPREIAYGNGTFVISGDRNAYSTDNGKTWTQ

SEQ ID NO: 104185 - protein, 263 aa, Unknown
  Obtained from environmental sample
  misc_feature (1)..(263): Xaa is any amino acid
DQEKLFVLGLQPSAVAAALAMNDSIFSGGTGVLGSREIIITVDGRYGQSLDNALIPLGNGKFIELADIAVITEQERMPDVFSRLNGRKTAGIAIMGRHDADLRKLSSDIKKEIAALSLPLEFTVLSDLGAEEAAAFRSVFNAALLGAIMVAAISFLLGGKNNANLSGFFCALSIPLICLLSIAVLSMFGFPSDRLMLAGIAAGVGTAVDAVILCSEKLRKQINYDDAAEALSELAGPLIAGAATTVAALFPLSRMQDVGIKTI

SEQ ID NO: 104186 - protein, 211 aa, Unknown
  Obtained from environmental sample
  DOMAIN (3)...(211): Beta-eliminating lyase
  misc_feature (1)..(211): Xaa is any amino acid
MIDIRSDTVTKPTDTMRKAMAEAEVGDDVYGDDPTVKKLESLGAKMLGKEAALFVPSGTFGNQLALFTWCDRGTEVLLGEECHIIQHEAGAASIIAGVQTRPLPAPDGVLPVSALRERLRKHDLHTPPTSLICVENAHSLGRSVPLAAMKETRKIADEWKVPVHLDGARIFNAAVALDCDAWDIASMADSVMFCLSKGLCAPVGSLLTGKN

SEQ ID NO: 104187 - protein, 267 aa, Unknown
  Obtained from environmental sample
  misc_feature (1)..(267): Xaa is any amino acid
DNYGNLILAGSGTQTVAATIIVANEMVTYDAASGTHFTGLTDFNNLVIIDGNRTGVGEIIVNGDFSLEGGSLNAASINVFGESNFEGDVTTAGGMQTYSGDVRYSGTRTFTGSTVNLGQIVTGVGGSLTINGDGVLHGGTAIGALTVNGDFTLSDYSLTAASVNVSGTSSITADISTGSGTQTYGAVTLGGDVEFTGSTVNLGTITGVGNSLTITGNGVLNGGSGINNLSISLTSTINADITTTGNQTYTGAVTLGGDITFSSTAGS

SEQ ID NO: 104188 - protein, 53 aa, Unknown
  Obtained from environmental sample
  misc_feature (1)..(53): Xaa is any amino acid
MLLAIPFPSWLKPEVIPGLPFRWYGVMYVVAFATAFLLYRRQVRERDFPMTED

SEQ ID NO: 104189 - protein, 265 aa, Unknown
  Obtained from environmental sample
  misc_feature (1)..(265): Xaa is any amino acid
IPPATMENANFLLGNGITRGKNDLTATASGFVRIGDNWADIVPLAKHSYKINTGIDGMTLFFSFEPGDKRFALPKGERILAEAVVMGADEESLVSAVELDNAIGGAIKTGAPVEAFALFNPRQAEVRVDINPDKTKASLYLRKGVAGAQPLEMKAISQAIKESGVHGFDAEKFKAAIHEFMESKEMALPEYVLVEGVSSTRGKDREVKVSVKVFSEEEKKPVITRIKDWFSRDVSAAPELDLDGALDLAFVENGQTIASVSEGSN

SEQ ID NO: 104190 - protein, 249 aa, Unknown
  Obtained from environmental sample
  misc_feature (1)..(249): Xaa is any amino acid
KQQKRYVKAQAAADKSVEKLETAKSKLPAKKTLRSERVFNEETGKAKRRLYFEREVKPQSEHLKGAKPLRPVKAAGNTALMFAHTKVHQAEGENVATEAAHKGEILAEGAVRAALRHQKTAPYRKVAKLEHKAQKKTINAAYQKALAENPKLKSNLFSRAMQKRKIKKDYAKAAREAQKTAQKVQKAGSAVGNAAKALAGVVKRHPMTAAVIVLILLLLFCLMSLISALGSAGSGGLGGLLAVSYLAED

SEQ ID NO: 104191 - protein, 279 aa, Unknown
  Obtained from environmental sample
  misc_feature (1)..(279): Xaa is any amino acid
LYPQTQLASDSENLTNLIDGLLETDPWGNLLPAIAEKWGTNDGGLTWTFNIRRGVQWVDINANPKAECNANDWATALEWILNFHKNESANTSMLIEMINGADAYYKWTKSLSAAEAKALRADAGSRFRQMVGIEIPDKYTIVYRCIAPKPYFPTLALYQCLYPMSQAMIDELGGVDNVAAMNNTNMWYNGCYTMTTYIHRNEKVFTKNPLYWDKNTSRFDTVTIKMVDSGEIAYQLYQSGEVDYTGLSESNLNMIYNNPEHPFNKYLIPDPMSQYSYLF

SEQ ID NO: 104192 - protein, 107 aa, Unknown
  Obtained from environmental sample
  misc_feature (1)..(107): Xaa is any amino acid
MSDRVIHTSDTKTLIKNNIRNYSMFIMLALIMIIFAPLTKGNNWNPRNFTNIFFQNSYVLILAIGMVQVIIVQGIDLSVGSVCAFVGALSAMVYNTRRWNAHCAAGC

SEQ ID NO: 104193 - protein, 154 aa, Unknown
  Obtained from environmental sample
  misc_feature (1)..(154): Xaa is any amino acid
MTLERPVLAIAAIVIFPLAITLARRLGSPFTASLPLEPPGGAPFKAPYNLRGIIKTLYAMEYLGLFLIFMAAAGPVMQISETVWLNRGADILFVLDVSPSMAAVDMDGSNRFNAARSLLKDFADRRPADGIGLVAVGNDAALLIPPTTDRELLA

SEQ ID NO: 104194 - protein, 261 aa, Unknown
  Obtained from environmental sample
  DOMAIN (112)...(261): Glycosyl hydrolase family 3 C terminal domain
  misc_feature (1)..(261): Xaa is any amino acid
MGFKGFVVSDWAAFKQLTGGSYRMQIANAINAGVDMYMASDNRDHWLLFIRNLTKLVEDGIVPMSRIDDAVLRILRFKQSLRLFENPLIPHTGEIGTDENRAAARALVSESLVLLRNESNAIKKLSECKKILVAGQGANDIGMQCGGWTITWQGANGKITKGTTILEGIQAATKDKIAVSYAEDGNVVGSFDAVIAVIGETPYAETEGDRSGNISIRSKDMEMLKHVYNYRCPVIVIMLSGRPMNIGNEYKKWSAFIAAWL

SEQ ID NO: 104195 - protein, 76 aa, Unknown
  Obtained from environmental sample
  misc_feature (1)..(76): Xaa is any amino acid
MYAVLEELGKIGIIPVIKLDDVEKAVPLARALAAGGIPCVELTFRTSQAEEAIRRISQETPEMLTGAGTVLTTEQV

SEQ ID NO: 104196 - protein, 282 aa, Unknown
  Obtained from environmental sample
  DOMAIN (111)...(138): NHL repeat
  misc_feature (1)..(282): Xaa is any amino acid
GVRYVEAGRYPGKYGEVVLYRQPSSVLPNKDGSVWVIAYGSNEIVKVDVNGMVKDRKRGPLNGFDRPYDMARGIDGRLYLSEYRGGRVSVLNNNGDWLSYIGSKGIKDGQLVGPQNLAIDEDGYLYVVDYGNSRICKYDPDGVFIISFAKKDALFPGMLSPTGIAAANGKIYVADNARKNIYMFDINGGYIGRLAAEGLMGPESLRFLSDGTLLAVDVNRILQIDVDSAIVRELGFIGGEKNRITGADMDSNGNVVAANFNAGEISVMTRFDDLASGFFVQI

SEQ ID NO: 104197 - protein, 266 aa, Unknown
  Obtained from environmental sample
  DOMAIN (1)...(158): NAD dependent epimerase/dehydratase family
  misc_feature (1)..(266): Xaa is any amino acid
IDSSAFAASDFITTNINGTLTLLQAARAWWEGRREGLFHHVSTAGVFGSTHGLASEDSPYNPSTPYTASKAASDHLVRAWASTYGTPVTVSIASRNYGPYHFPEELIPLIITNALSGKALPVFGRKDDVRDWLYVTDHAEAIWRIITRGRVGESYNISGENALKNTELVQHISKVLARATNRQESDFSSLITFVEDGTESPVRSTLGCDKIKKELSWKQAFNLDQGLEATVRWYLENQAWVEEIRSGEYLRWIEKNFGKKKERALR

SEQ ID NO: 104198 - protein, 177 aa, Unknown
  Obtained from environmental sample
  DOMAIN (2)...(177): ATP synthase subunit D
  misc_feature (1)..(177): Xaa is any amino acid
MAKVKLTKNALKAERDALKRFQRYLPTLQLKKQQLQMEIRGLQARVEAKRAEEETLLADMNNWIKLFAEPIEWGKYIKVAKVCLGEGNIAGVAIPVFEKVIFERNIPDLFDTPVWIDSGMRALESLISLRLERRVIEEQFRLLSEELRTTSQRVNLFEKVKIPEAKENIRVVRIFLG

SEQ ID NO: 104199 - protein, 272 aa, Unknown
  Obtained from environmental sample
  DOMAIN (58)...(270): Phosphofructokinase
  misc_feature (1)..(272): Xaa is any amino acid
KLPAILSGPIDDITVSLGSTAEAVSDREKLRGIFKNTYGKPLASFIKGKNDKIKRELKVGVILSGGQAPGGHNVIAGLFDGLKKGNPDSTLYGFNGGPSGLINNKTTILTSEIIDEYRNTGGFDIIGSGRTKIETAEQFASSFETAKKLNLDAIVVIGGDDSNTNAALLAEYFVANGSSVQVIGCPKTIDGDLKNEHIETSFGFDTACKTYSELIGNLCRDTNSAKKYWHFVKLMGRAASHIALECAFQTQPNICLISEEIEAKGMSLNAIV

SEQ ID NO: 104200 - protein, 262 aa, Unknown
  Obtained from environmental sample
  misc_feature (1)..(262): Xaa is any amino acid
VTGRPVSFIQRLYPPYRLSRPVVPLAIAGIAESRTYESGYNFGAMAPAAAPMPSAAMRMQSAADSKAMAERDYYEMEMPQSSVTSVAGGAVDTASGRAAGDQFEFTLKNPVTLDRRQSAMLPLVEGSIKAEKILIFSGARALGGATINPAISAELVNTSGMKLPAGPITVYEGGTYAGDALIEFFPENEKRLISYGEDLSVGGSVASSGTRFITAANISGGVMTITRRQSYDKVYTIKNISGQAKKLIIEHPITSGSELVEP

SEQ ID NO: 104201 - protein, 287 aa, Unknown
  Obtained from environmental sample
  DOMAIN (2)...(276): Beta-eliminating lyase
  misc_feature (1)..(287): Xaa is any amino acid
SDLDIYGNASSLHTSGRQARAGIEEARKAVALLLGSDPASIIFTSGGSESNNAVFQTMRQFRLDRNEFITTQIEHPCVLNSAWFTKEQGFKVHFIPVDEFGKIKIEAFKAALSDRALFVSVMMANNEIGTIQDIKEITRLAKEAGAYCHTDAVQALGKIPVNVKELGVDYLTVSAHKIYGPKGVGALYVKKGSPFFPLIHGGHQEEGLRAGTYNNLGILGFGKAAELAMRDIGEYQKKTSALRDKLRDGLSNNIPDIKINGHPVDTLPNTLNVSFAGAEGEAILLSM

SEQ ID NO: 104202 - protein, 267 aa, Unknown
  Obtained from environmental sample
  DOMAIN (1)...(267): Borrelia P83/100 protein
  misc_feature (1)..(267): Xaa is any amino acid
PYTRIETRAQIRNIGYSLGEVIKGGATRAGTSGRYFVIHSVSEQDGFKLDADIFGLGSDVGVDHIRNLRWIIQGYLEAAYQYTERDAALLAEYVTIYNAVYRGDMSYFSSRYKNPVMDNLTAEKAGLAIRYDEWPGQTLMVIPLGSGTGLSSIDTTTISDSRVIEQLRQEPDMGLDQRRDMVDLKEREADEASQQAAITRDAINQEEQRIAGEREAAQQQQQQAEAEQRQIAQERQQPGADQQALDARQQDAEQQLQEAIQAQEQLD

SEQ ID NO: 104203 - protein, 272 aa, Unknown
  Obtained from environmental sample
  misc_feature (1)..(272): Xaa is any amino acid
VFHYDISERELGTYGQHKIYAFYKTERGRTVASANHSVYYYHYGPILLIDSHRDGDVITNRPWLRGRAMFGRPPHPDGREYTRAEASEFAVNKVEVSYDNGRTFRKALGKGDWKWRLEPLDLPPGTQPVVVRATFENGEEAVRRVLLFMDPDVPKVETVSPEEKSRQRDELKVYGDASDNFDLTDVKVTLRPYHKFWYSVPDAIRGLYFDVKTLGATYFDVGAGLSFFDHNVRVQGQWGISPPLGAYSVMVTGGRYVGQVAGIKLVANIITI

SEQ ID NO: 104204 - protein, 275 aa, Unknown
  Obtained from environmental sample
  DOMAIN (20)...(274): UbiA prenyltransferase family
  misc_feature (1)..(275): Xaa is any amino acid
MKKILLTLIDLIFLTRPVVVVPVWGFCAFGVYAGAGGRILTHLEHYQYLLILLYSLSPACVYVLNQIADCEVDARNGGFPLLVRGGISMTAAWACAAVCGALSVIGPLFMGNAPVSALSLIAIALGYVYSFKPFSLSGRPFCDFLTNALEAVLAFLAGWAVAGAEFSPLKLCVFALPYFLLMCAGSISSTLPDIDGDKECDKITTAVRFGPTTAHRIALTALAVSIPASLFLSADLLALTCAAVALPTYIPYLIKPKKDYMELTYKVGGAAIMIA

SEQ ID NO: 104205 - protein, 258 aa, Unknown
  Obtained from environmental sample
  DOMAIN (149)...(211): PASTA domain
  misc_feature (1)..(258): Xaa is any amino acid
MVPDVQGRDLTAALLELQVKELYPRISLRYSQSSTEKGLVLEQSPQPGTIVKAGRRIQLVVSQGVMVNTIENYLGRNIDEVRMDIQTLLSTQSAGGNVQPVTIKDPVMYQFSTEPAGTVLQQKPEAGTAISGPTVLELVVSRGSENVMTKLPNLLGLGLNDALEQIGLAGIDFEFSIRQSRDGEKAGTVVYQKPGGDTLAASSTRVEIIMTIPDNLPQNQVFGLFNYEIAQNPYPLLLTLESILPGGARERLLSVQYP

SEQ ID NO: 104206 - protein, 58 aa, Unknown
  Obtained from environmental sample
  misc_feature (1)..(58): Xaa is any amino acid
EIKEAVRRIFNVHPVSCTVMVVGGKPKRLRNRAGVTAAWKKAIVRLPKDEKIAVFEGV

SEQ ID NO: 104207 - protein, 265 aa, Unknown
  Obtained from environmental sample
  DOMAIN (89)...(258): Predicted permease
  misc_feature (1)..(265): Xaa is any amino acid
GTYQAVLGSEAAKNTGLKTGDTFKAAHGLFHNPLLEGDDDHSDAYVVTGVLKPMYRPYDMGIFTSIETIWEMHGDHELDDEDGDEHGNVTALMVTPIDYVGLMQMYQETNRNNEAQAAFPGQVLGNVFSIMGNAEDILYLISYMVVVIGFLTIIITLHWSCLNRKRDHATLRAIGAHKSAIFSLVLIESLLVMLVSGIVGLIIGHGIAYAIGSYMRRISYVYAAVGFDPKELVILAAYTLAGVAVSIVPALGVYRHDAASNLSSV

SEQ ID NO: 104208 - protein, 277 aa, Unknown
  Obtained from environmental sample
  DOMAIN (1)...(218): Glycosyl hydrolases family 18
  misc_feature (1)..(277): Xaa is any amino acid
SLVSRAHQKGIKVSICVGGDYFDNVTSNTNLFNTFVNNIVSFVNLHGFDGVNIDWETPNGPAQWNQCINLLYALKHSPALSGKRISIALPLWYTDDTRYLDNSVNIPIPQRIWENVDAINLMTYDASWYPSHSDVVQSKARIDEWANFGTPRGLNKNKLHLGCAFYGWDPVVGNGGSRYPYGTSCARPGDSIANVIDKANHCYNNGYGGVFIWELGYDNPVTNPQSLLNAISPDITGSNTICNTGVYSLSNGQSAEWSVSQGFEILEGPGLHKSVTV

SEQ ID NO: 104209 - protein, 270 aa, Unknown
  Obtained from environmental sample
  misc_feature (1)..(270): Xaa is any amino acid
MVYPDTFEEKTGFVAVRELLTGLCLSPLGSRNVEEMQFHTSFEVIDALTGQTNEMRTICLMETNFPARDYYDVTPMLRNISIPGAFPNVEDVFALKKSLETIRDILAFFRGKSIEYPLLFSLMGDVAYFPDIIKAIDKILDHQGRIRDNASPALAEIRRSIAEKQSAVSRAMLRIIKQAQADGLVDEGVTPAIRDGRAVIPVNSSSKRKINGIVHDESATGRTSYIEPAEVVAVNNAIRELYFAEQREIVRILTAFADVLRPHLDVLNPA

SEQ ID NO: 104210 - protein, 204 aa, Unknown
  Obtained from environmental sample
  misc_feature (1)..(204): Xaa is any amino acid
MEKFSSKYKLNEEQLSQLKQIVPEAFKDNELDFNNLYEALADFTENEEEDIEQFGLSWPGKRAAKRAAAIPPVGTLVPVPGEGVDEENTRNIYIEGDNLEVLKIIKKAYQGKIKMIYIDPPYNTGNDFIYPDDFSESVESYQKRTVQVDKDGVKMTTNNRSDGRFHSKWCSMIYPRLRLARELLSEDGVIFISIDDNEVAQLRK

SEQ ID NO: 104211 - protein, 243 aa, Unknown
  Obtained from environmental sample
  misc_feature (1)..(243): Xaa is any amino acid
MSTRIFCRSARRWGGAVWVAVLLCLSFAVGGAEAAYRVVITSDIGEIGTALYEPGDTVIIKVGKVPEGQKFKMWTTLNSGVTFADKYSDSTTFKMPGYAVEVTATFKTAFTDKRDGKTYGVVTIGNRKWMDENLDYHTEPGSWCYGDNPENCDKYGRLYDWTTAMGLDPMYALEIWGGYGFQQQGVCPDGWHLPSREEWNGLGTAVGGTSTAGTKLKAESGWTGANNNGTNDFRFSALPGGYR

SEQ ID NO: 104212 - protein, 231 aa, Unknown
  Obtained from environmental sample
  misc_feature (1)..(231): Xaa is any amino acid
MDKTIRITEYFADVETTKEHNGYLCSVGEALTVVILGSLCGLRNVSQISQWAANERVKGFLAGHFGIERIPCYYWMLCLLALIKPTSLNQCLTRWAQSLLPEGMKAMTVSFDGKTVCSTGKMDAYDSPLHIISAHLAELGITLAGLKTDGKSNEIPAVRELTGMLEVAGCVIVADAMHCQKETAALIVGKQGGLPFKRQRQPACAEKRHRRVRAGRRFEKDHGHFHDMREK

SEQ ID NO: 104213 - protein, 172 aa, Unknown
  Obtained from environmental sample
  DOMAIN (99)...(172): SRP54-type protein, GTPase domain
  misc_feature (1)..(172): Xaa is any amino acid
MFETLTDSLESTLKNLRGQGKLTEENVATSLREVRRAFLAADVNFNVTRDFVQAVKDKAMGQNVLTAVSPGQMIVKIIHDELVAVMGGEAREVSLTGRPPTGIMMVGLQGSGKTTFAGKLALHFRSKKKRKPLLVAADVYRPAAIKQLQVLGKSIGIPVYEEGQGNPVEIIK

SEQ ID NO: 104214 - protein, 277 aa, Unknown
  Obtained from environmental sample
  DOMAIN (20)...(189): Transglycosylase
  misc_feature (1)..(277): Xaa is any amino acid
CFAFSPYPELAGYLNRSYGFTALDRKGRPLRVFPAADGVKREWLPIGEIPAGVLRIFVRAEDARFYLHPGIDPAAIAASVLRNLRAGRVVSGASTITMQLARLLKPRDHGLRGKLLEAFDALRLEARLSKKQILELWINGIPFGSNIEGLPAASRARFGRTANGLDDARSVLLAVIPRRPGLYDPARFTNAARSESASVNAALALARRCRLNLNEAALTEAASEAEPGKLAHEKTPFFAPHFTDRIAAASAKAAASVKTEGVKQPAHTTLDLDLQLY

SEQ ID NO: 104215 - protein, 110 aa, Unknown
  Obtained from environmental sample
  misc_feature (1)..(110): Xaa is any amino acid
MKKVIALSIIMILVCSMAVFARGGQDGGKERHAIVFKSTGNPYGERQMGGFKDGIEEQGFEAILRAPDLPTAEAQIQMVDQLIAQRVTSICIVGNDFDALQPVLTKAKNA

SEQ ID NO: 104216 - protein, 175 aa, Unknown
  Obtained from environmental sample
  DOMAIN (14)...(110): ParB-like nuclease domain
  misc_feature (1)..(175): Xaa is any amino acid
MKKKEFLSPAYNVQPIPVEKLRANEYNPNSVAPPEMELLYRSIKEDGYTMPIVVYYRMEDDIYEIVDGFHRYSIMLNYPDIYEREQGLIPCSIIKKPITERMASTIRHNRARGSHNIDLMSNIVAELVEMGKSDSWISKHLGMSKDEILRLKQVTGLATLFKNEEFSQSWEVDQG

SEQ ID NO: 104217 - protein, 225 aa, Unknown
  Obtained from environmental sample
  misc_feature (1)..(225): Xaa is any amino acid
ANVEIVVHLSNDVSPDKTIDALYAFTDCEVSISPNACVINDNKPHFTGVKQILRHNAQRTKELLQQELQIRLNELHNDWHYSSLEKIFFEERIYRELESNAKSWENQLAAVEKALKPFEKKLRRPITSEDIDWLVEKPVRKISKFDIKQADERIANIESEIAEVENHLANIVDYTIAYFQQIKKKYGKNFVRKTELRSFETIEATKVVVANAKLYLNRSEGFVGM

SEQ ID NO: 104218 - protein, 167 aa, Unknown
  Obtained from environmental sample
  DOMAIN (10)...(165): Shikimate kinase
  misc_feature (1)..(167): Xaa is any amino acid
MSHIVLIGFMGCGKSTIGKALSKAANFPLFDTDTVIEQLHEQTIAEIFATEGEEKFREYEHKIIIELLNNPESSIIVCGGGTPCFYNTMSLLNQRATTVYLQAPAELLYRRLLPDVAQRPMLQNKPDLKQYIITLLARREPVYSQAHQTVAIADKTIDDIVRILTDN

SEQ ID NO: 104219 - protein, 145 aa, Unknown
  Obtained from environmental sample
  misc_feature (1)..(145): Xaa is any amino acid
MQSRIIFIPVPESLKDNLAGGALIDFPINPGIPFPVEIYEDNENASLENISVESLFYGMLRVIKEGKAEQEWLDYYTNLVMYLRPDILTKIKEIKDNGLDDENFINAHNLIQEGKTEAGLACIHDFIEDRPKVWNGWFMLGWALR

SEQ ID NO: 104220 - protein, 65 aa, Unknown
  Obtained from environmental sample
  misc_feature (1)..(65): Xaa is any amino acid
MKTTRNRLVFAAVFAALIAVSNFFQIPTPLGVPIVLKNMFVVLSGTILGRWYGGIAALILIGAGI

SEQ ID NO: 104221 - protein, 95 aa, Unknown
  Obtained from environmental sample
  misc_feature (1)..(95): Xaa is any amino acid
GWRERRRFYKQPLRVRDRAGLPKDFRPLHGLRHSFASRIASSGEVDMYRLQQLMTHKDPKMTQRYAHLSDEAMKRAADVAAAVMTIPPKKDPDKN

SEQ ID NO: 104222 - protein, 99 aa, Unknown
  Obtained from environmental sample
  misc_feature (1)..(99): Xaa is any amino acid
MQNEFVKVRLGKLEKMREQGLNPYPYKFLVNCNSSELKEKAEEFIANNKEVSWAGRIVRYNRKGKMCFMHLKDAHGRFQVLAVASELSEIEYEVVKSRI

SEQ ID NO: 104223 - protein, 200 aa, Unknown
  Obtained from environmental sample
  misc_feature (1)..(200): Xaa is any amino acid
SRNEEKVEDTMAAGVHLIADMAEIDRLILCRNRIAVDNLYVSEVYRWDRSFGGSTELTATLIDIPYARLIPDWEGLLSDGKHINSPSRLMSENAANTLQSFGVLTAAVIPIHINGIFWGFALFADTKNERYFEKDIIEMMRSAAFLFANVFIRDEVDYDALTGIYNRRFFDNNIKRIISFISRSESSLSMMMIDMTLKRS

SEQ ID NO: 104224 - protein, 178 aa, Unknown
  Obtained from environmental sample
  DOMAIN (1)...(131): Phosphofructokinase
  misc_feature (1)..(178): Xaa is any amino acid
MGNKVGWLTLYAGIGGGADIILIPEIPYDIDKVIKAVESVKKNKGYCVIATAEGAMDKEEATLTKKERYQKRGERGEVTASNRIAKAIEEKLNIETRVVVPGHIQRGGAPSPYDRVLCSQVGAYAAKLAIERKYGVTVALNGDKIISNKLDDIAGKTKIIPPKHELIKAAQDIGISFG

SEQ ID NO: 104225 - protein, 233 aa, Unknown
  Obtained from environmental sample
  misc_feature (1)..(233): Xaa is any amino acid
SIASFSAGSIKSDVIREKLGITGLEKLNALAEACAVNDSPTAFALMDEILTSGVAIEQFVIDLAGFYRSLLLLKNGVTRESLLGYRPSLFSTKALETYDSIRLEQALDILLDCYRNNRYSVSPRFELETAVSKLTWLNKWVSPTELKEAVDDARNVLGIAGNHVSPETYRKQTSAVSHNVASPTAARGGVNASGGHAAQYQSSTGGNSLVDEFNRMIAKKDNAAVSDAAHGAM

SEQ ID NO: 104226 - protein, 90 aa, Unknown
  Obtained from environmental sample
  misc_feature (1)..(90): Xaa is any amino acid
MTTTEKARIAAEIKAFKNTDFTDCPPLTDEQLAQLKPSHYRNMANYKPIKKTVNVRLDADVIEWLQSAGRGYQTRMNSILREAMLHSGAQ

SEQ ID NO: 104227 - protein, 204 aa, Unknown
  Obtained from environmental sample
  misc_feature (1)..(204): Xaa is any amino acid
DSIAKIEYKKKDKSISCKIDRYYLDGIHYSKNKIVKLKPFEICNNYKIIKRHSDDIVKAKKDKKEKKAQSKLVILNNENKLSKWFCIDIEYANPNFEGRFDIIAISKEPLHKVALIELKYGRTAFSGDSGIYEHIKNFNKFNEEGYFKKQMKQEIFCIIKSLDNLGVEMHFKINEERSISDNPDFYFITLNNNAEKIGGSTPKQ

SEQ ID NO: 104228 - protein, 90 aa, Unknown
  Obtained from environmental sample
  misc_feature (1)..(90): Xaa is any amino acid
MVYASEADLLNVALFGMTAAQWRRENQDLEGNIMDYATLEQLVVLSNMESINALLIRQGLAQGERLVQLNGTAITQMKSLVNATLAKRLK

SEQ ID NO: 104229 - protein, 231 aa, Unknown
  Obtained from environmental sample
  misc_feature (1)..(231): Xaa is any amino acid
MFPKLLAVHNGTANVGVTWVANLLSSQAAGLDLIEIAQIYQRSGLVLVSKKEAGLTTGASLSPPNVTVGNWGFGNEYEIKALLQKNEIVKDLKSQDFTMDGFHSGEITAASAMTYNELGLVRNSYEGGLGYGDGVNIIDMNTEGVAMLEDCMFVNKTWAAANSETLVKFLRASLKGWKAACENTDEAAAIVFKAGSSVSDAHQKYMASEVKKLVLTDTKDNAVALTNIGRL

SEQ ID NO: 104230 - protein, 178 aa, Unknown
  Obtained from environmental sample
  misc_feature (1)..(178): Xaa is any amino acid
SAPPPPPVFTPPPPPPPVYAPPPPLPVYAPPPAPEPPTYAPLPPEPETLAVPLASAAAPMELQPMAPPPTAPAFPPPSESFPSETMAFGELGGSSFGMLETPPKKSFDDDDFDDDFGGKKKKKPKARFDDFDDDDFGVKKKKSKDPFDDDFDFKKKSKDPFDDDFGGKKKFAKESFND

SEQ ID NO: 104231 - protein, 248 aa, Unknown
  Obtained from environmental sample
  misc_feature (1)..(248): Xaa is any amino acid
GISYRQAKRIYQKYLSGGDDALIHGNKGKPSNRRIDQALLQKALSLYAEKYSDFGPTLAQEKLLERDGLDIGVSTLRRELTAAKLWMPKRNGREYRARRTAREHFGELVQFDGSHHDWFEGRMGRCCLITLIDDATKTRLSQFFEEETMFGAMIVLKMWIETYGIPESLCCDKKNAFVLTREPTDSELLAGITRPKSHFGKACGKLGVQLIAANSPQAKGRVERNHGVDQDRLVKELRLAGIPPSKKL

SEQ ID NO: 104232 - protein, 167 aa, Unknown
  Obtained from environmental sample
  DOMAIN (13)...(152): Peptidyl-tRNA hydrolase
  misc_feature (1)..(167): Xaa is any amino acid
MPDRAMILSALEGFSPIDELPEKYHFIMPETFMNLSGESVFQAASFYKIKPEEILVVHDELEIPLGTISLKFSGGLGGHNGLRSMKACFGSADFWRLRIGIGRPGHNDIYNWVLSDFTAAETETVKAALDSGAVLLLRCLTREPETLLGEWAKKKIVIKKEVTDECQ

SEQ ID NO: 104233 - protein, 165 aa, Unknown
  Obtained from environmental sample
  DOMAIN (37)...(165): ABC transporter
  misc_feature (1)..(165): Xaa is any amino acid
VIQVADIHKTFVVKDKKTRSKKTIDAVNGISFQVKPGEIYGLLGPNGAGKSTTLRMVAGLMEPQTGSITVFGNDTKKEPEKVRRNLGFLSTDLGVYGRFSPRELLRIFGEFQGIDAAVAERRGMSLLDRLDLHDFADVKMESFSSGQKQKVSIARALLHDPQAVL

SEQ ID NO: 104234 - protein, 296 aa, Unknown
  Obtained from environmental sample
  DOMAIN (1)...(245): 7TM-HD extracellular
  misc_feature (1)..(296): Xaa is any amino acid
GKVADRDIIAGFNLSFIDEEATRARMKAAAKHVNAVFRTSTEANKQILDSWNALCDFAENHSGNSRAAAIQALETEYPGSFSNDTLNAYLSVGGRDAFRGYGIEALNIILNRGIFLFNRDDIRFFNPDIAELQHATTGIEREYIPYNEIITLANVRNILGEIVKNMDTPFLFKSIAVDLLEPFIKENTFFSFSETQKRIEESKETITPINRTIEKGNRIIRKGFIITEEELEDLMLLHLSMPKRDPRSIIGTVLVMFLLYLLFVTLCGHIIIGKKLNNSERYLLASITGFYIIGSV

SEQ ID NO: 104235 - protein, 262 aa, Unknown
  Obtained from environmental sample
  misc_feature (1)..(262): Xaa is any amino acid
ASANAGSGIPVTLIGWQLAGAGSAVYYLQLPTNLTGNITQAAGAAVTTPVVAQVTDSSIIVNNVALSSSATVFQLQQQIVEYAIATTNNTAATSLTWQNSPTFNGLDAATTYYVYARSRQSQNFQAGGYQVSNSIRTTDPVVSFDTARGTPIAPMTVSKNQMLTENGISTTKPGYVFDYWYTDADRTQPYNFANPVQNSFTLYANWVNTAEQYQMEQQKNMVWIRGGWFRMGSPSGNIPGTSTPYPANENPQHSVGIAGFWM

SEQ ID NO: 104236 - protein, 155 aa, Unknown
  Obtained from environmental sample
  misc_feature (1)..(155): Xaa is any amino acid
EKDGVNWIVVNLQGREFISAIDCPFLCFDKMSNTQTGAAKRIIIVDFHAESSREKEAFGYYADGRASLIAGTHTHVQTADERILPKGSAYITDIGMTGITDSVIGMDIKICQERFRRQVQYQMKPASSAKQGQLQGVVAEIDLDTGMAVGVKRIA

SEQ ID NO: 104237 - protein, 173 aa, Unknown
  Obtained from environmental sample
  misc_feature (1)..(173): Xaa is any amino acid
MNGGLISGNNNSNFPSYGGGVHGGGTFIMNGGEISSNTATYGSGVFVGNGTFVMNGGEIKGNNSNKGGGVAMNSKSSIFTMKGGEISGNTAITNGGGVFVAAGIFTKSGGTITGYISDMVIGNVVKNGSSVQSNKGHAIYVDSNNPVKRRESTAGSEVNLDSSVSGSAGGWEN

SEQ ID NO: 104238 - protein, 219 aa, Unknown
  Obtained from environmental sample
  DOMAIN (34)...(179): Zinc-binding dehydrogenase
  misc_feature (1)..(219): Xaa is any amino acid
MALLPEGMDLASAAMLSDMVPTGFHGSELAEVQYGDIVVVIGIGPVGLMGVAGAALRGAAEIYAVGSRPNCVKVAKEYGATQIINYKEGDIVKQVLSLSKNKGVDRVIIAGGDNDTFDQAIRMLKPGGRIGNINYLGNGDYIKIPRAEWGVGMGHKYIVGGLMPGGRLRMEKLAALIHHKKLDTSKLITHKFNGFDKIEEALMLMKNKPAELIKPVVII

SEQ ID NO: 104239 - protein, 136 aa, Unknown
  Obtained from environmental sample
  misc_feature (1)..(136): Xaa is any amino acid
DHGVRGGRNYTRRGSAGFNDDDDEATKAKKLAWWATTQFTDAFPILGTEATHFAELLITGKMQYSSGINLLPTLQKSLSAGQTAVRGVQQGEFDKTLKAAAQAAEAYGIYKGLPVSGIKELEALLGIGDGDGELSL

SEQ ID NO: 104240 - protein, 105 aa, Unknown
  Obtained from environmental sample
  DOMAIN (5)...(35): Flagella basal body rod protein
  misc_feature (1)..(105): Xaa is any amino acid
VIRGWYTGASGMRAQQWRLDAVANNLANVDTTSYKKDVTSFKAFPELLLRRQGDDGVYLHPFGSADEAPIVGKLGTGVELNELFTVFSQGAPKETQSDFDLMLKA

SEQ ID NO: 104241 - protein, 161 aa, Unknown
  Obtained from environmental sample
  DOMAIN (20)...(161): Domain of unknown function (DUF323)
  misc_feature (1)..(161): Xaa is any amino acid
MKGAIFAVIVLAFAVSCTAPSSNMVLIQGGTFTMGSPANEPDRDDDEVQHSVTVSSFYMGRTEVTQKEYTEVMGTNPSSLKGDNLPVEGVSWFNAVEFCNRLSQREGLTPAYTINKTNVTWHRSANGYRLPTEAEWEYACRAGTETPFSTGDNIPRNRRIR

SEQ ID NO: 104242 - protein, 90 aa, Unknown
  Obtained from environmental sample
  DOMAIN (41)...(87): LysM domain
  misc_feature (1)..(90): Xaa is any amino acid
VIQAPVTAPEQRPQQTGKNRSQAPVASYKVPTTIPREGVNYKIRWGDTLWDIAEAFYRNPWLYPRIARYNNIRNPNLIISGRTIRIPPRN

SEQ ID NO: 104243 - protein, 266 aa, Unknown
  Obtained from environmental sample
  misc_feature (1)..(266): Xaa is any amino acid
MALDTQFSAAVASLVGLGIKLLGDLPILMNEDSCDVWAHQEIFNLHLSAGAPPDMYSPQGQNWGFPIYDWNAQTKDNYDWWKRRLKTAEKYFQAYRIDHVLGFFRIWASRRKDKSALMGRFVPSIPITTKDFEELKFDSGRIRWVSEPHIQTGEIWDAVREGWNGSEGELNEAVQKVFGSALNRVGNEELWLFRENIQGEKDIIALDIHPGAKAFLLKSWENRIFFEYEKGEYFPVWNYDKSRAYTSLYEEEKKLVKALLEKHRLD

SEQ ID NO: 104244 - protein, 243 aa, Unknown
  Obtained from environmental sample
  misc_feature (1)..(243): Xaa is any amino acid
MNEEDKTVRVDDDKTVRVDDDKTVRVDDDKTVRVDDDKTVRIDDDKTIQVSVGKTPGVAAMSGVVLSQGQTIVLNGKECTIESQFSKASGEAVVYKVKIDRKPFVLKHYKSTTPMSDNAKEIVSRIKNKPHERIVKVIDFGKYNEQDYEIMELAEGGTLDEYLKANPIRDEKKLKNIVKMINEGLLQLHGEYNVIYQDLKPENIFFKDAKKTKIILADFGISSIMENGKKRAKVSVNQTKLYG

SEQ ID NO: 104245 - protein, 199 aa, Unknown
  Obtained from environmental sample
  misc_feature (1)..(199): Xaa is any amino acid
VGRSRSLADLRRDFDSVFLGTGAGLPKLLGVTGEDLKGVYTANEFLTRVNLMRADLFPEMGTPVTVGKNVIVVGCGNTAMDAARCSRRLGANVTVAYRRSVAESTARKEELEHAMEEGVIFRWLTTPVTLIGDDGNWVKTAESAIMELTEPGEDGRRGVRDTGQRIALPCDTLIVALGCAVNPLLAQEEKGLQTQRGGV

SEQ ID NO: 104246 - protein, 215 aa, Unknown
  Obtained from environmental sample
  DOMAIN (91)...(214): DNA polymerase III beta subunit, C-terminal domain
  misc_feature (1)..(215): Xaa is any amino acid
MKSVGDGRIETCGLNGHQFALTAFTHDDLAAMLPPDGILIQKKYVQELKKWLSGLEEIELNVGEKRLYLRAGNGGESLSLPRGTYTYPDYMSFVSKLSATDISRLDADRKECMEALGRLSIFTTDNDRCTYFDLAESELTLTAQGQDVGSADERLEVGYRGDIAKIAFPTKNLMDVLGHFTSARVQMHFTAVEGPCGISGKDDPDYTVIIMPMKI

SEQ ID NO: 104247 - protein, 121 aa, Unknown
  Obtained from environmental sample
  misc_feature (1)..(121): Xaa is any amino acid
MRTITMYRPNTVQSTLNDFDRYVESFFGDSVLSPASKVLSRMPAVDIRETEKAYVMDMELPGYSEKDIEIHLDGSNLSIVAKKENTAEKKEENASTEGQDSAENQGIWLLRERRISSVSRS

SEQ ID NO: 104248 - protein, 201 aa, Unknown
  Obtained from environmental sample
  DOMAIN (1)...(201): Glycosyl hydrolase family 10
  misc_feature (1)..(201): Xaa is any amino acid
GTTVNNSAIKALMLKEFNSITMSNEMKPDATMRQSGATNANIQVQLNTGAAAILKFCSDNGIGVRGHTLVWHSQTPQWFFKSDFTNNGSWVSTTVMDQRMESYIKNMFAIIKSQYPNVNLYAYDVVNEAVSDNSNNTSGTKDGAKDPGYNDGKSPWVQVYGNNSFIEQAFTYAKKYAPPTTKLFYNDYNEYWGHKRDCIVR

SEQ ID NO: 104249 - protein, 60 aa, Unknown
  Obtained from environmental sample
  DOMAIN (1)...(60): Ribosomal protein L23
  misc_feature (1)..(60): Xaa is any amino acid
TDTIKEAVRRIFNVHPVSCTVMVVGGKPKRLRNRAGYTPTWKKAIVRLPKDEKIGVFEGV

SEQ ID NO: 104250 - protein, 249 aa, Unknown
  Obtained from environmental sample
  DOMAIN (53)...(123): His Kinase A (phosphoacceptor) domain
  misc_feature (1)..(249): Xaa is any amino acid
VRQSGEPRREELRIGSEAEGRPVNATMVPLSGGGGLVVLEDLSLIAQAEKRAAWQEVARRMAHEVKNPLTPIKLTAQRLARRVREGRLEPQAVSEGATTILEEVESLARLVESFTRFAKLPVPQPALCDACELMRQVHALYLPDQDKADLELLLPDGPVPANWDGDMVKRALFNFTDNAMHAIQGRGKITLEVRATGNRVRLSVTDDGPGVPPEARAHLFEPYFSTKQRGTGLGLAIARKIAEDHGGIA

SEQ ID NO: 104251 - protein, 131 aa, Unknown
  Obtained from environmental sample
  misc_feature (1)..(131): Xaa is any amino acid
MRRKDLSLLNEKDQYDGAVRILAPLDNMLWDRVLVQKVFDFQYSWEVYVPEEKRKYGYYVLPVLYRNSLIARLEPIKHGKGRPFSIKNWWWEPSYNECDAKIKREIREAVERGLGNFARYLEADGMEKGEF

SEQ ID NO: 104252 - protein, 168 aa, Unknown
  Obtained from environmental sample
  misc_feature (1)..(168): Xaa is any amino acid
MTEGSQQEAKKQKDIVAFISSGTSAMPNNTNVIWSVSTKDDNNLHKGKVVVVDSNGRSVLGARVSAFQPTFVRALGVPASPVKVTVRTENGNKTASCSVSVTQSPISLRSVSLEDANSNDVGDIELAPGGTQQLNIYPFPANATDKRVKEWVYDRTVVSINKEGMVIA

SEQ ID NO: 104253 - protein, 206 aa, Unknown
  Obtained from environmental sample
  DOMAIN (2)...(115): PAS fold
  misc_feature (1)..(206): Xaa is any amino acid
MFDAMPMCCHIFGEYFNLIDCNLEVVKLFGANGKQEYIDRFFEYIPPIQPGGRSSREVIAENYATAMREGYCRFELIHQKLDGTPIPTETTMVRVLHHDHPIIIVYYRDLREHKKMLVQLHEADERARLMLDAMPMGCHIWDENFNITDCNHEVVRLFNLNDKQEFIDRFYELMPPIQPCGQSSRELVLAKIIKAFNDGYCQFEWM

SEQ ID NO: 104254 - protein, 218 aa, Unknown
  Obtained from environmental sample
  DOMAIN (67)...(134): Bacterial type II/III secretion system short domain
  misc_feature (1)..(218): Xaa is any amino acid
ENTDSYRVSQIVQQLYQQVYQARRGSITMLPLVKPNTILLIGKKESIDTAKELIAKLDTPVDPQSQFIVIKLKNASAANVQAYLTSFYGNRQVLGAQVLVVSDSRTNAVIIQASPRDIVEAEALVKQLDAEGAAVNTVKTFQLRNAMASELATTIQNALSTTTTTGGGLGAGTAQNQAGRNPGLEINGVQRASVLSDVRITADARSNTLIASAPTETM

SEQ ID NO: 104255 - protein, 196 aa, Unknown
  Obtained from environmental sample
  misc_feature (1)..(196): Xaa is any amino acid
SIRHFAPPKGVEITLLAQTCRPCQETNSGNFRIVVAPNTIVEKPLQLVNVIDTVESLDVAHAFEIVVGEGSSLSLIHCDESMNKVKNTIQTRVSIELKPHSSLHYYNLQNINNHSTLNHQTDVKQHEHSHLISHTYTLNGKILNKQQHVDFVNKSAAADIQGLYLLDKNQEYAHRIRLNHNHPFGRSNQLFKGILD

SEQ ID NO: 104256 - protein, 180 aa, Unknown
  Obtained from environmental sample
  misc_feature (1)..(180): Xaa is any amino acid
IFEAEVASTFNEELLFRYLLNSPETNSKELKLYIVNKRVDEILGTLYRQTMFAEFEKRTHELEESGVPLTVNVFREEYRKLLEKYFGSEMVLEKESDLEGLRIPHFYNAFYVYKYSTGISASLALAERVLSGGEKERADYFGFLKSGGSRFPIESLKAAGVDMSSPAPVEAACKVFSRLV

SEQ ID NO: 104257 - protein, 95 aa, Unknown
  Obtained from environmental sample
  DOMAIN (2)...(95): Phage protein Gp37/Gp68
  misc_feature (1)..(95): Xaa is any amino acid
MALSKIEWTDASWNPVTGCDKVSSGCKNCYAERMALRLQAMGNPNYEKGFSVALHPQVLNLPLTWKTSRTIFVNSMSDLFHHDISDDFILQTFDI

SEQ ID NO: 104258 - protein, 222 aa, Unknown
  Obtained from environmental sample
  DOMAIN (144)...(221): Response regulator receiver domain
  misc_feature (1)..(222): Xaa is any amino acid
SNIRILAVDDDPEVLAYTRDIAHSFGVTCDTTTSGEEALALVEKNGPYHIYFVDWKMPGMDGIKLSRELKSRTSAESESVVIMISAAEWSSVAEEAKRAGVDKFLSKPLFPSAIAEIISECLGIDKKQAEKAQAADIANIFAKRRILLAEDVEINREIVLALLEPTQLDIDCAENGAEAVRKFTEAPDKYDMIFMDVQMPEMDGYEATRRIRALNVPRALTV

SEQ ID NO: 104259 - protein, 194 aa, Unknown
  Obtained from environmental sample
  DOMAIN (14)...(60): Bacterial regulatory proteins, tetR family
  misc_feature (1)..(194): Xaa is any amino acid
MSIVVEHEKRRYEILEKALDVFMEEGYEDVTFQKIADRCDITRTTLYIYFKNKKDIFNFSIKQLLQILENDIIEIKKGNDLSYTEKLVSVMTVIIDRLEGNSRLLSVVLDYLINNPKQGFDPGYQVRRRTVRMRHILATMLIEGIKAGEFSHQINVKEANEMLYSFIEAAIFRMVVLRSSSVEELKEAGSWLYG

SEQ ID NO: 104260 - protein, 83 aa, Unknown
  Obtained from environmental sample
  misc_feature (1)..(83): Xaa is any amino acid
EKSEPGFIITNPPYGRRLSDTETAEKTYAQMRTLSSRFPGWKLAVVTDHSGFESFFGKKADSCREITNGAIRSYLYQYEKLED

SEQ ID NO: 104261 - protein, 158 aa, Unknown
  Obtained from environmental sample
  misc_feature (1)..(158): Xaa is any amino acid
MLKIDAVKLNKKAKRIKLSKKTPLFRFIIRLLLAALVAVVLVTLLINAGMILAARKYIYTDRSEIPQRTAIMILGSQIRGKTLSPVLQDRVDSGITLMEQGKGKKLLLSGDHGQRYYDEVHAMRLYVLANAPVILEEDIFMDHARFNTWDSMYRARDV

SEQ ID NO: 104262 - protein, 233 aa, Unknown
  Obtained from environmental sample
  misc_feature (1)..(233): Xaa is any amino acid
MLVIPYSLELTSNKIEITPKILFLTAIKNLVLFAIAIFFGLLLSKRIGMGLPILQGVLDGKNQTKELKSILLPSIGWGILAGILIVLLCIPFNKIVPEFQNLEVSIAIWKALLASLYGGIAEEILLRLFLVSLFVWITFKIKKGKDGGPTVWGIWLSIILASVFFGLGHLPATAQITNLTGIVIIRAIVLNGVAGIIFGKLYWKKEFRVRNNCSFFSRYCFTYYYTFCCIIFS

SEQ ID NO: 104263 - protein, 50 aa, Unknown
  Obtained from environmental sample
  misc_feature (1)..(50): Xaa is any amino acid
MARKPAQIQSMIYEIRGQQVMLDADLANIYQVETKVMNQAVKRNIGPLSA

SEQ ID NO: 104264 - protein, 69 aa, Unknown
  Obtained from environmental sample
  misc_feature (1)..(69): Xaa is any amino acid
IRQGIPTERLLTYGLEYKFVTLYLLGNINKNELFEQLNTAIHQFAKRQMTWFRKMQREGVKMTIVEPLS

SEQ ID NO: 104265 - protein, 132 aa, Unknown
  Obtained from environmental sample
  DOMAIN (2)...(128): tRNA synthetases class II (D, K and N)
  misc_feature (1)..(132): Xaa is any amino acid
CDLQSEHEKYLTEKVAAGPVIVTDYPRDIKAFYMKQNDDGKTVRAMDVLVPRLGEIIGGSQREENLEKLCRRMLEMGMKLEDYAWYLDTRRYGTVPHAGFGLGFERLIQYITGMANIRDVIPYPRAVGQADF

SEQ ID NO: 104266 - protein, 47 aa, Unknown
  Obtained from environmental sample
  misc_feature (1)..(47): Xaa is any amino acid
KPEDETEEETAEAEEYECPECGAKITVDMTTCPSCGIGLSFEYEEEE

SEQ ID NO: 104267 - protein, 152 aa, Unknown
  Obtained from environmental sample
  misc_feature (1)..(152): Xaa is any amino acid
MKILKVLPILIIAGQILSCSSNKYDGSLAEKCKAQYNAAEAKYKAGKYWSSKDDLSEILQSCSGTGVMEETHFLLAEAHFHLEEWMEAREEYGSFVNFFPGSPYAETAAYRKSVAAYNLSYKDSRDQSNTTYAIRDFNRFGSDYPNSALIDS

SEQ ID NO: 104268 - protein, 211 aa, Unknown
  Obtained from environmental sample
  misc_feature (1)..(211): Xaa is any amino acid
MKRKYLTILAALLIPAALAGCTKKEDPALAEIKAQMQAMQAELEKARSGNAAPEEIAKLENAVAEIAQQEQAAEQKQDAATPATNTTTTNQTENPTSDFKMSGTTITGYNGSSKSVVIPNGVTDIFGQTFSSCTSLTSVTIPNSVKSIWDAAFRGCTSLTSVTFQGVITSNNFSSLNSFPGNLRERYLENGTGTYTRARGSNEWQKQAQGS

SEQ ID NO: 104269 - protein, 150 aa, Unknown
  Obtained from environmental sample
  misc_feature (1)..(150): Xaa is any amino acid
MGDIKKTNPIMLVLIYLLMFVFAVLAIYPLFWTVIQSFKTTQEYMMTSKLAFPQRWFVRNYPMAWESAQFGMLIINSVIYTSITVVLEILLSFMAGFAFAKLPTKLTPLLHGSFIVGILLTLQSILVPLYLMINAVGLYNTRVGGYYTIR

SEQ ID NO: 104270 - protein, 241 aa, Unknown
  Obtained from environmental sample
  misc_feature (1)..(241): Xaa is any amino acid
MREQEKAAKKTTTNKKTASMTGKKAARPAADRRRKKTVLDALRAFMLAGVIVILSIVVSLAIIMIHSIEKSGTQSVSEGIEFLPPLTTESEIIKTVPAESSETNTVSSGTKPQTTISSSGASSQGSNTGMTEKPDANLGTLAFVIDDAGNNLQELEPFLKIPAALTIAVLPGLPHSAEAARRIRAAGKEVILHQPMEAIGGQNPGPAAIYSGMSAGEIKTILTKNIAEIGPVAGINNHQGS

SEQ ID NO: 104271 - protein, 158 aa, Unknown
  Obtained from environmental sample
  DOMAIN (4)...(158): DNA methylase
  misc_feature (1)..(158): Xaa is any amino acid
ALLGVPWRVALALQDNGWILRSDIIWYKPNAMPSSVKDRPTVDHEYIFMFSKNKEYYYNADAIREPHITFSEKSKTMGGRNHFGKRNGTPEKGKNGGNPNLHNGRWDQAFHPNGRNKRTVWEIPLGKFRDAHFAVFPEKLVENCLLASTKINDFVLDP

SEQ ID NO: 104272 - protein, 206 aa, Unknown
  Obtained from environmental sample
  misc_feature (1)..(206): Xaa is any amino acid
MDQRKNVEKRAKRSIKVNKKYKDTLFKKLFGQERTAVELYNAIEGTNYEPEAVSMVTLEDTLYITPVNDIAFTIDNKFVVLIEHQSTINPNMPLRMLLYIAMCYIQLTDDVDIYGRTRKTIPRPEFIVLYNGEEEQPEEVVLKLSDMFAACDMEYPINLELIVRVYNINKGRNTKIAQRSVTLNGYEEYIAKVREYGKTIRMNKRC

SEQ ID NO: 104273 - protein, 171 aa, Unknown
  Obtained from environmental sample
  DOMAIN (1)...(169): Beta-eliminating lyase
  misc_feature (1)..(171): Xaa is any amino acid
MADNLYFIKTREPEFKDTSLNDITREIASLSDIIYFSARKLGAARGGGILTSDNGLYLKMRELVPLFEGFLTYGGMSVREMEAMAVGLRETLDIDVISQTPIFVEALCGELEAKGVPVVTPPGGLGCHIDAKQFCPHVPQTQYPSGALASALFIAGGVRGMERGTLSEQRN

SEQ ID NO: 104274 - protein, 97 aa, Unknown
  Obtained from environmental sample
  DOMAIN (10)...(95): Nucleotidyltransferase domain
  misc_feature (1)..(97): Xaa is any amino acid
MCSFTIEEIKNKVSDTARQYGVKKVYLFGSYTQGKAGPGSDIDICIEKGDIQTLFELSGFYQDLEETLGNKIDLVTTAGLSGEFKEQIEKDMVLIYG

SEQ ID NO: 104275 - protein, 179 aa, Unknown
  Obtained from environmental sample
  DOMAIN (123)...(179): Tetrahydrofolate dehydrogenase/cyclohydrolase, NAD(P)-binding domain
  misc_feature (1)..(179): Xaa is any amino acid
MPAIIIDGKAAAMKIRGEAKARSLALGEKGITPCLAVVLVGEDPASLSYVSGKEKALAEAGMESRDIRMSADTGEAALLSLIAELNRDEKVHGILVQLPLPKHIDGQRVIDAIDPEKDVDGFHPVSVGNMVLGRPGFLPCTPMGVLALLREYAIPVAGARAVVVGRSNIVGRPLANLLT

SEQ ID NO: 104276 - protein, 268 aa, Unknown
  Obtained from environmental sample
  misc_feature (1)..(268): Xaa is any amino acid
ATVTGTSNTAVTWSSGNTAVATVANGVVTPVGAGSTTIKATSSADSTKFDEVSVTVTQGSEPNVVTVTITGAPEGGLSFNKPYGGSFSPTNVTLGATVTGTLTTTVTWSSGNTAVATVANGVVTPVGAGNTTIKATSVADGSKFDTVDVTVTVEAAPPTLVLVNLGTPTGTTTTTMPAIDGNKRYTISNDISTAKFVSAGVTDATIVYFDYPAEKFSSISARVRIKKSNGGTTTETGLIMGLMTNPAQPIATRGVNFAGMRVNTAGLW

SEQ ID NO: 104277 - protein, 71 aa, Unknown
  Obtained from environmental sample
  misc_feature (1)..(71): Xaa is any amino acid
MLKIRELLVVITQNGEAKAVIIDIESYQKTINAITLAKLLSFGEKDIKDGNLVTHENAKKIFEKTLSRKKL

SEQ ID NO: 104278 - protein, 79 aa, Unknown
  Obtained from environmental sample
  misc_feature (1)..(79): Xaa is any amino acid
MYLSVNEVKALSDYRLKLTFENNEIKVFDVKPYLDTGVFTTLRDENFFRRVKVSFDTIEWPNGIDLDPEVLYEKSVVYA

SEQ ID NO: 104279 - protein, 288 aa, Unknown
  Obtained from environmental sample
  DOMAIN (131)...(288): Penicillin binding protein transpeptidase domain
  misc_feature (1)..(288): Xaa is any amino acid
YDRRGRRLAFSVSGRLALGLDVLGAGETPGKAVVQRVYPMGEVAGPVLGYVGTEGYGLGGAEYTFDHDLRGEGGWEIVHRDGKQRTYRKIGLPGQAPKDGADLYLTIDINLQKIVQSVLKQTVESLNAKGAMCIVMDPRTGKILAMANEPSFNPNITSSYSLADRQNKPISLIFEPGSTFKTVTASVALQEGAYAESDLINGNNGTFVIYGDTIRDDSRQGLITFSKALAVSSNVCFAQIANGFKNERFYGYVRDFGFGAKTGIALQGEEGGILRRANTWSGRTRVTM

SEQ ID NO: 104280 - protein, 253 aa, Unknown
  Obtained from environmental sample
  DOMAIN (1)...(214): Elongation factor Tu GTP binding domain
  misc_feature (1)..(253): Xaa is any amino acid
MAHVDWNGKKINIFDTPGSSDFTGDVILAIRASEFALLTVEGQTGVQIETIKLWRNLEGRNKPRGVFITRLDGERADFNKALADIKEKLKTEPVPVTIPIGSGAGFKGVIDVLSGKAWFAQGEAPEKEGPIPEEMQQAVDAAREKLIEAAAEGDDTLMEQYIEKGSLTAEEMQKGLVLALAGNKFLPAFAGTAFKNSGLIPFLDFVVNIGPNPGTAKDVSLDKEGKETVVPIDSSRPLSALVIKTSYDQFSGK

SEQ ID NO: 104281 - protein, 265 aa, Unknown
  Obtained from environmental sample
  DOMAIN (197)...(265): HAMP domain
  misc_feature (1)..(265): Xaa is any amino acid
MMTTVPAVMEVYYSTIVHPLNGGTFAAASGWYPFDANPGWDATTRPWFIMAIQNPDKTMITDPYEDASTGKMCVSMVHTVRDKGNVIGVAGADVSLDALTEIVTGRKITQDGNTFIIEKQGLFVVNKDSKRVMNEDDNFFQKDGKDLKELIKPDSNIIINGNTYWVSTPVSGMDWYIVTTGLTDEFYVDYWRNIYTILIISAVMALIAIVVSLRFSKILTKPIINLFGALKSVADGDLTAKAVVQSNDEIGELAGYFNTTIEKIK

SEQ ID NO: 104282 - protein, 275 aa, Unknown
  Obtained from environmental sample
  misc_feature (1)..(275): Xaa is any amino acid
TVVKSTSGSARYQLYQGGVIYGNINGSIYNSLSGSGGWTGSSSNVNGQQTAFSNYNGGSFQGNIGTSGKGNVISNSYDTSSFSTGQALFTGGNAGTAASYNVAQSTSTAATGITNANIVNYVKSAFTTGTAGAVYGVVGGNGHDSMKISPSQQGLGSSTDTNYGPNAATAASWAQTPASTVVAAARQITSNAIYGNVYTWLQSGAMSTTSGGGYNDWDGYAYGGSSNGYLEGTSVLEAGTANADNSVGGAGVVYGTAMSAGPEATLAAQGTLAYG

SEQ ID NO: 104283 - protein, 268 aa, Unknown
  Obtained from environmental sample
  DOMAIN (149)...(268): GGDEF domain
  misc_feature (1)..(268): Xaa is any amino acid
MMIYIGTCAAAALLYLFVRCRYRRNEDKIKKSPIYALITLTYLNITAFGIYLGVWANPGMIAGTYLGILICALLLFYIPAVYHLCLTLFSMIVFTVLAVIFKSPATNRIDIPNAFFAGAISLVIGWQVIMNRLSLAALARNMEDERNNYYDQSNIDELTQLKNRRHFTKTIQRTVTNYRQSDNYLCVAILDIDFFKNYNDYYGHPEGDECLRKVGEALKDLNNNMNIYAARIGGEEFALIWFEEDITETQNIASCVCEKIRSLNIRHE

SEQ ID NO: 104284 - protein, 236 aa, Unknown
  Obtained from environmental sample
  misc_feature (1)..(236): Xaa is any amino acid
MTDVVATIWTAPFLLYHFGGFPIYTLLGNLALLPLFSIGIMPAVFAGTITSLFGWGGSFAVSDWLYDFAVGFSGRLAALPFSMAEFPDIPGWCLYSAFAGFMFVILGRRRLAAAAFAVAAAWTFARPTPILRASADGELVGFTQDGRTYFNTGYSERHPFVVPRGTKRYAGCKKGFCEYRTKNWRAASVQKFMPLYANREKLCDYDFVISRLPLTLPSCPGRVVSGGVKIYSDGAV

SEQ ID NO: 104285 - protein, 227 aa, Unknown
  Obtained from environmental sample
  DOMAIN (154)...(227): Oxidoreductase NAD-binding domain
  misc_feature (1)..(227): Xaa is any amino acid
MHQGVPVAVVVPYEDYGAAARRRPLPCVLFWAKKVVSLRVFLSVSSYGVFMPTRILAKEHLIPGRTGKLVLDAPHIARKAQPGHFVILRVSEPGERFPLTIADCDPHQGSITLVYLVVGKSSALLDALDAGDDILDVCGPLGKPTHIEKTGTVICVGGGTGIAAMHHIAKGHHRAGNHVAAVIGARGKELLLFERELSSFADEMLIATDDGSAGRKGLVTDVLHERL

SEQ ID NO: 104286 - protein, 130 aa, Unknown
  Obtained from environmental sample
  DOMAIN (4)...(128): Thiamine pyrophosphate enzyme, N-terminal TPP binding domain
  misc_feature (1)..(130): Xaa is any amino acid
MTIIKLSDYVIRYLESLNVKHMFMLPGGGAMHLNDSLGKSEKIEYVCCLHEQACAIAAEAYARVTNNIGLLMVTTGPGGTNALTGIAGAYIESTPVLVISGQVKILDQIRDQKIRQQGMQEVDIVFIVKP

SEQ ID NO: 104287 - protein, 268 aa, Unknown
  Obtained from environmental sample
  misc_feature (1)..(268): Xaa is any amino acid
SAADCASVARMNAIISAWFLAGNQSAVLVPVVPGITPVRLPVANASADALPDVDLTPALTLLEPYGATPGMNGATRLLEDIGIDSLSLVQVILQIEAACGYAPAPAELRTVADVALLLLNKTLPASLPVLAEVEAAPIRIPPLKPIHEIFSRRGAVTDLTLGAHYPRSALMGYAKAVSTLLRDLPCRRTGIALPAGVAAMAAFAGCLGAGKTPVMLNYRMDSAQLAHCARLADVTHVLTSRRMYGRGMPPGAEAVYLEDMDISRSGTQ

SEQ ID NO: 104288 - protein, 240 aa, Unknown
  Obtained from environmental sample
  DOMAIN (30)...(234): von Willebrand factor type A domain
  misc_feature (1)..(240): Xaa is any amino acid
MKKAILILIVFLAFTTGTSGQSVDLSGPLDLVVLLDTSASMSNSYKENSDYLIGPFLREFLHIGDTFHLISFSGAPKLEISRKIEGSGDVETIIGRLLLMYPLDPQTDLAGALSYAEKFSSSLPGSKAKKIVVLTDGDASNTQNLINDFSGRLKNQKTDLQYISLPVTGNGPSSGRPAGSQTIAQPSGALQTQGTGPAASATGPATGTTTPAGTSSAGTAPSGAASGGTVSADIASGGTS

SEQ ID NO: 104289 - protein, 211 aa, Unknown
  Obtained from environmental sample
  misc_feature (1)..(211): Xaa is any amino acid
RSSAIAALGPFTGEAADNVILEAFRDSYYRTRIGAAQAAGKRRLESAVPYLRFRAENDEVPAVKDEAIKALGAINNEEALSILDSLFAERKNPDRIRIMAAEMLLQNNADTYGPKLLIEMEEAKLKNLTALYNGFIRVLVPAKSASLEDMARRFITSGGVIEKSLALDLILNNEFRGLQEQIRPLLDEKKNGVSIARKAKSTLEKLGLQAE

SEQ ID NO: 104290 - protein, 256 aa, Unknown
  Obtained from environmental sample
  DOMAIN (150)...(256): DNA gyrase B
  misc_feature (1)..(256): Xaa is any amino acid
VDIHPTEHVSALELVMTRLNAGGKFDKKSYKVSGGLHGVGVSVVNALSEWCEVFVHNNGKIHTQLYKIGIPEKPAHETDASTLPYNPRLQRGTVVRWKADASVFEITTYNFDVLSNRLRELAFLNKGLKITIRDERLSNPKVHEFKFEGGVKSFVEYLNENKTVLYKEPVYLEGKRDDGQGGEVEIECAIQHNDGFNEIMFSFVNDINTREGGTHLVGFKAALTRTLNDFLKKSKQAKKMEETLSGDDVREGLTAV

SEQ ID NO: 104291 - protein, 269 aa, Unknown
  Obtained from environmental sample
  DOMAIN (56)...(263): Transposase IS66 family
  misc_feature (1)..(269): Xaa is any amino acid
AGQPEAKEETPQELEKVKSFTRKKVGRKPLGVNLQRRPVTVDIPESEKTCACGAVLTRIGEETSEKLVIIPPEIYVEQTVRPKYACRQCEGTEDEDKPTVRIADIGPAIIPKSIASPSLLAVIFTQKFEMHLPYYRQEKQFAQIGADISRQDMANWQQQVFAFLKPIFDLLKAMIKTGPVMRMDETPVQVISDIKPEEEGQKGRQTSYMWLALGGPPDKKVAWYEYHPTHAAYNAREFLQGYSGYLQTDGYEAYDCAVKDLPGNIHAGC

SEQ ID NO: 104292 - protein, 96 aa, Unknown
  Obtained from environmental sample
  misc_feature (1)..(96): Xaa is any amino acid
YAIAFGKGTFVAVGTDGKIAYSTNGSSWTEATTDIPYSPNLEAVAYGNNMFVAGGSYSTIAYSSDGVTWTNVGTSNIGTIGIIAFGNGTFVASDHY

SEQ ID NO: 104293 - protein, 175 aa, Unknown
  Obtained from environmental sample
  misc_feature (1)..(175): Xaa is any amino acid
AKLSQIPPQEICQKCGVRYENGEFFIPWFNTEKPLSSASVSHKILWLHYLTADGIQKQSGHLIAYREAAPALFYETNFNKRAVKPLVNQFGKNPQSLISTGIALGGQRTDMGDASVTLHILPYLPMTFIIWEASEEFPPDGNILFDQTAKTWFAAEDLAVIASLAVYDLIAASKQ

SEQ ID NO: 104294 - protein, 71 aa, Unknown
  Obtained from environmental sample
  misc_feature (1)..(71): Xaa is any amino acid
SADHGGSGFGHGFDNPNHRKIPIVFYGSGIKNWYKISSLVNIYDITPTMAALLGLDIPPEWTGRPLYEIFK

SEQ ID NO: 104295 - protein, 244 aa, Unknown
  Obtained from environmental sample
  DOMAIN (47)...(242): Outer membrane efflux protein
  misc_feature (1)..(244): Xaa is any amino acid
MRPVIDQVENGMKLSLAQFAMFLGLNYDTNFELEPLSENIGFVSLDVIDTISKASKEKPDIKELRNTILMLQSARRAQLYALTPSLTLSWNSTSAFIKDPWNDAWFDSSDDWKKSGSFSLTFALRLHSLIPFSTDYQGIKNLDDQIKTATIGLAQLVNGTEIEVYNTVLALEKTRINTKAQEETVGLAEQSFRLTEEAYRAGLQDYFQVQNAEQSLRQARVQLLEQQFNYLNGLIDLEYSLGVP

SEQ ID NO: 104296 - protein, 244 aa, Unknown
  Obtained from environmental sample
  DOMAIN (168)...(244): HRDC domain
  misc_feature (1)..(244): Xaa is any amino acid
DIWRQLRQLFNCLTEFEETDVTIEAQKIVSCVFRLKQRGRSFGKMMIIDILRGSKNEKIIRFGFDTLSTFAIMSDTKAHRIRQILDHLIDKGFLLVEEGEYPVITLGNAESLLKEEERVLMKLPEEREKAPDGKKQRDAKLFETRDLSDTKTPRQSGEKLTDTQNVSAEIDEDLFDKLKKLRREIAAREAVPAYIVFSDATLRDMCRKRPVSLVQFSGVNGVGSVKLEKYGDIFTDLIRKYYEH

SEQ ID NO: 104297 - protein, 266 aa, Unknown
  Obtained from environmental sample
  DOMAIN (15)...(91): Helicase conserved C-terminal domain
  misc_feature (1)..(266): Xaa is any amino acid
TQNLARYLRISLGEMGMDWHNDIRFYHAGLSREEKADVEKWFMGNSRAVLCATCAYGMGVDKADVRTVIHRDCAPSVEAYLQESGRAGRDGGQSKAILLWGPDDQASLRRAKTDADRVRLTGLLDYARNVTQCRRQALLKMLNYDADGESPETQCCDVCEQQASAAQREEASVGDFFRRNKRCYTAHEAASFLAQTRQFHWSEREAQQVIDHLIKTGKVKKLKNFLWKDGVDLIKNITTEEENFRIKTRVVLRDLRGLFTMFLQVD

SEQ ID NO: 104298 - protein, 216 aa, Unknown
  Obtained from environmental sample
  misc_feature (1)..(216): Xaa is any amino acid
ALAILLLLILIAIIIFASRRLDKSPNRVISKAASPASPKTKAETKPETKPVSKSDRFTETRRTSQILEYPPARMKPLPKDKIYDETTLGSDGNPVLLNLFVEDQNTAIGKRNIHSLKPGYSLTIGGGKSDFLIFLVPVPPRIAEVRHDGRNCVLTPVKPQYLPDIGSQTIPNCIGKTFRVISDKKYELHIRLEKYEDPLHALNKMLRSIKVPGPVV

SEQ ID NO: 104299 - protein, 127 aa, Unknown
  Obtained from environmental sample
  misc_feature (1)..(127): Xaa is any amino acid
MKAYKSQEYKEAVLNHYNLLLDKLTVPYEELTIKTRTGDTFILAAGDIQNPSVFLLHGSSMNSSMWINDMNTISNGYRVYALDLPGEPGKSNEEQLPFDTTDYTDWLSDVFNSLSLQRAIIVGASLG

SEQ ID NO: 104300 - protein, 49 aa, Unknown
  Obtained from environmental sample
  misc_feature (1)..(49): Xaa is any amino acid
MVQDALDGKIDLIVTKSVSRFARNTVDSLTTIRKLKDVGVEVYFEKEYV

SEQ ID NO: 104301 - protein, 59 aa, Unknown
  Obtained from environmental sample
  misc_feature (1)..(59): Xaa is any amino acid
VKLWLAAIYSVLIIELKSNEIIHGDESTHQVINEKGRKASQKSYMWLRRGKRVYSGRLG

SEQ ID NO: 104302 - protein, 180 aa, Unknown
  Obtained from environmental sample
  misc_feature (1)..(180): Xaa is any amino acid
MAKSHDTPIQDILKGISSGTTRLPDFQRDWVWDDERIRKLIASITCSYPVGALMFLEYGGDGIRFKSRPFTNMPEDGKTPELLVLDGQQRLTSVYCALCGKAPVPTLTVKKEPIQRYYYLNIPECLNPETDRVDAVVSVPADKKTRKDFGRVVVTDLSTRQGEFKEHMFPLNIVFDAIAL

SEQ ID NO: 104303 - protein, 213 aa, Unknown
  Obtained from environmental sample
  misc_feature (1)..(213): Xaa is any amino acid
ALNADIEVGGTDQTFNLLVGRELQKNYGQMSQEVITFPLLPGLDGKNKMSKSLDNYIGIDEPAEIIFEKCMKIPDNILPVYFMLTTDIPENDYIKIINNDIWQAHLVYAREIVKMYHGEIYISRAEERYRAVANKKAPDSTRVYTIYNEEQIIRLLILTELAGTNSESRRLINEGGIKIDGITINDSALIIQKDCIISRGKNKFIKIHFDKEK

SEQ ID NO: 104304 - protein, 281 aa, Unknown
  Obtained from environmental sample
  misc_feature (1)..(281): Xaa is any amino acid
EKTKNDVVSASSGKQNPAVYIKYNGTAFLGSNSDPTPAPNPSPNSLFSLYEQLVSATGTSVITVPQDTTFTSPVTISVALSLTLRGDKAGRTILGAGYSNNGFSYPSSIIVERGVTLTLENISLFAVFVHVKQGGTLIMNNASVITGCLSCGVYVDGGKFIMNKGSEITKNGSSGVVISGGTFDMNDGKISANNDQWGGGVNINEKGTFNMRGGIIENNTASEHGGGVFVNNNSSFNMYGGNISKNRADDSGGGVYIGGGSIFRMTGGVFTVRIHQADRIQ

SEQ ID NO: 104305 - protein, 279 aa, Unknown
  Obtained from environmental sample
  DOMAIN (104)...(271): Binding-protein-dependent transport system inner membrane component
  misc_feature (1)..(279): Xaa is any amino acid
LIIIEFNLFLTLRNLRPLDQNKPTNVYAWFMGVFAVVFLVWNILALLSKKAGEKLRYNALVYASAFSLLLVYDIATLKTAALPLPYFPWPDAILNAIILDRKVLWESIWHSLILLFTGYFSGAAAGLLTGICAGWSEKARYWIQPVIRVLGPIPSTTYLPIILIVASSLFGGSVFLIALGVWYPVTMTTMTGVLNIPKSYFEGARTFGANKTRLIFGVAIPAVTPFIFQGLTQGMSIACTALLVAEMMGVEAGLGWYINWQRGWAEFAKMYAAVIIICL

SEQ ID NO: 104306 - protein, 255 aa, Unknown
  Obtained from environmental sample
  DOMAIN (205)...(255): Peptidase family M23
  misc_feature (1)..(255): Xaa is any amino acid
IRGRDVYAVTPPVEEMEAEQRVIQYATTGITDIINKLSPAASEEVSDENAKANIQNDNPHGSIITFEWQQYKVKKGDSVSGIAKKFDVSIGAIIASNNIANARKLQEGTVLKIPNIDGIPYQVQKGDNLSKISASFKVPLDVILDINDIKSDNIRAGETLFIPGARMNDIDLRMSLGETFMYPLHQKFITSSYGMRKDPINGALSFHTGLDLRANTGTAVLASLDGVVSFVGENWLYGKHIIVSHSNGYKTMYGH

SEQ ID NO: 104307 - protein, 232 aa, Unknown
  Obtained from environmental sample
  DOMAIN (75)...(229): Calcineurin-like phosphoesterase
  misc_feature (1)..(232): Xaa is any amino acid
MAVFIYLLLLLPLFDLLRLGLFLFRRNVLTPRFTAAGIGAMLCLCAVIIVCGALHARSIRTVQYALRLAGQGNSLRIALISDLHIGSSVGQKHIAKVVNVVNKAEPDIVCIAGDIFDGHLETVRNLPGIAAEFRRIRTPLGIYACLGNHDVDRMFPSGGGTERIEAFLREAGVTLLQDEVAAIGGNMYIAGRRDARPIGMKAGRKTAAELCAAPSDAATRALIVLDHQPTQF

SEQ ID NO: 104308 - protein, 257 aa, Unknown
  Obtained from environmental sample
  DOMAIN (27)...(60): Tetratricopeptide repeat
  misc_feature (1)..(257): Xaa is any amino acid
SLELERKNYDKAVQLLQLARAENPDNPAVLRCLGHSFFRMKKPKEAMSFIRKAIELAPDDKESLYTLAECYYEANQVDQAIKIFSHLRADPVMGPSACLISGNIHNEVRRADLAIQDYEMGLRHENIRPDILAELRYYLAVSYIKQNEISKALPLLHSLQADNASYKDVNVLIGKYQELNANKNLQIFLMAASADFVALCRKIVMTYFAKAKVKILNISVHKNEWADILAEINTPKWSDVVMFRFIRTQGSIGELIV

SEQ ID NO: 104309 - protein, 139 aa, Unknown
  Obtained from environmental sample
  DOMAIN (8)...(139): Nucleotidyl transferase
  misc_feature (1)..(139): Xaa is any amino acid
MAKQPNVLAIVLAGGEGKRLMPLTAHRAKPAVPFGGIYRLVDFALSNVINSGYLRVIVLTQYKSHSLDRHVSKTWRMSPLLGNYVASVPAQQRVGKHWYMGSADAIYQSLDIIEDEKPDIVVVVGADHVYRMDFSQMVE

SEQ ID NO: 104310 - protein, 78 aa, Unknown
  Obtained from environmental sample
  misc_feature (1)..(78): Xaa is any amino acid
MNPADFPNISTRGAVDLSVLQRPVVAPPGEEGGAPAAGGYVVDVTTDNFPQVVQDSARYPVLVLLWVPTDKANAELAT

SEQ ID NO: 104311 - protein, 257 aa, Unknown
  Obtained from environmental sample
  misc_feature (1)..(257): Xaa is any amino acid
LNTWTLPIGGYCFGGNLESSFKGNFDGNGKVISGLYIRRSDYEGDYKYKGLFGCSNGNISNLGLIGFYVNGCGRGAGGIIGGNSGTVTNSYAIGNLKSSRLVHVINMEEVCLSPIGGITADNRGSVTNSYFIGTVVYGGSSGGIAGYISGTVTNSYSAAEYKDKSSNNGCIYSGSGTVVSNVFYDATLGSRGCGVGKTTEQMKLGATYQGWDFENVWGIYGGYPYLLWQMPIGQAQIEPIPSEVSYTGSPIKPTPAV

SEQ ID NO: 104312 - protein, 165 aa, Unknown
  Obtained from environmental sample
  DOMAIN (1)...(78): Single-strand binding protein family
  misc_feature (1)..(165): Xaa is any amino acid
RAGRKQNRANFRIAYNHNKNKATFFSCTAWGRNAERISKLKKGQRVQVQGEVEECEWTDNQGYKKSDKQVNVRGIDYIDFPIENQQSAPRPAANPPQYAAAPAGYQQPYAAAPPQGYPPAPPNYIAPVQPAGHQYSQAPQQYAPQPAGQPPTPPPQNYNYDNLPF

SEQ ID NO: 104313 - protein, 88 aa, Unknown
  Obtained from environmental sample
  DOMAIN (1)...(88): Type III restriction enzyme, res subunit
  misc_feature (1)..(88): Xaa is any amino acid
MFQLRPYQEMLIEGVKIEFASGKKRVCIVSPCGSGKTIIMAYMASQARLKGNHTLFVAHRQELIKQSSATFSDLGISHGIIAANHPTS

SEQ ID NO: 104314 - protein, 106 aa, Unknown
  Obtained from environmental sample
  misc_feature (1)..(106): Xaa is any amino acid
EWTLEGKKKKPAEKAEILLKVCSRCYGAHWPAPVCPHCGFVYPTKKSEPEQRSGELAEVIELEKIRKKEEVRRAKDVVTLEQIALARGYNPNWVVRQCELKRIPLR

SEQ ID NO: 104315 - protein, 186 aa, Unknown
  Obtained from environmental sample
  DOMAIN (126)...(181): ANTAR domain
  misc_feature (1)..(186): Xaa is any amino acid
ALIISSSEKDTVLYTGFLSAASIHQVASAQSCESARKILIKQDFNLIIVDSPLGDESGESFSRHTAAKGVSQVILLVNSELFNSVSAACWDEGVLTISKPLNRELFWSALSLAKSVQSRIKRVQDENNQLKQKIEDIRVIDRAKWILISTMKMSEQEAHRYIEKQAMDMRSSRRIIAEGILKRYES

SEQ ID NO: 104316 - protein, 260 aa, Unknown
  Obtained from environmental sample
  misc_feature (1)..(260): Xaa is any amino acid
MFTPTDIIEHSLNQVTSTAISGAVLAIIILFIVLRSAKPTLIIGISIPVSIIITMMLMYFAHLTLNLMTMAGLVLGIGMLVDNSIVILENIYHYREKGAKLKTASVIGSSEMIVAITASTITTICVFAPLVMFQGLLEMAGELFAGLAFTVVISLGISLFTAIFLVPILASHYLPLVTRKQKPLTGALAGIDKKMENFFIWLEEKYRNAVRKVLNHKLIVIIFLLVLFAVSMLLVPVIGWEFMPQQDDDNVSITATLPMG

SEQ ID NO: 104317 - protein, 192 aa, Unknown
  Obtained from environmental sample
  misc_feature (1)..(192): Xaa is any amino acid
MGNVNKKFKSSVFSFIFSKPDVLRELYCALEGIPLSRDIPVVINTLEDILFMDMINDISFEIGGKLVVLIEHQSTINPNMALRLLMYIGRVYEKILNDEKIYSSTKILIPRPEFFVLYNGITPFPDEKIIKLSELFESTESLGFSKDEFPALELEVRVLNINKGKNEEIAKKCQTLYQYSAFIAKVREYQES

SEQ ID NO: 104318 - protein, 84 aa, Unknown
  Obtained from environmental sample
  misc_feature (1)..(84): Xaa is any amino acid
LYILPEFLGNLKNLKTLNLKHTDINKLPEWISNLEKLVVLDISSNFISIDPKLRKKLPNLKKYDDRINSFNLYKEERRLERNKQ

SEQ ID NO: 104319 - protein, 274 aa, Unknown
  Obtained from environmental sample
  misc_feature (1)..(274): Xaa is any amino acid
AVNGSLFTVGSGVTLVLGNNITLRGRSDNNASLVQVNSGGALEMRAGSVITGNTANNGGGVYVDNNGTFTMSGGEISGNFSSSYNPCYGGGVYVNGGTFAKTGGGTVYGYTDGDTKSNAVKNSSGVVQNNWGHAVYVSGGPTKRRETTAGPEVNLDSAAVGASGGWENNFGGLAAQLALLQATAVSGGSYNLEVTADEELDPTSLSYSGKTGVIICIQGDAAMRTVSLSAVNGSLFTVSNGVTLVLGNNITLRGRSDNNNSLVRLNSGSAALKC

SEQ ID NO: 104320 - protein, 173 aa, Unknown
  Obtained from environmental sample
  misc_feature (1)..(173): Xaa is any amino acid
GRFTLTAEQLFYEFNIFLKYITILPPAILLIITTHPSEFAASLNRIGVPYTAAYSVSLTLRYIPDIQRDFEAISQSQQARGLELSRKASWIKRLKRTVPLLLPLIFSSLDRIDVISCAMELRGFGKHKKRSWYSGRPFKRADKITLIAGIVLFAAGIWFTFRNGNRFFNPFLY

SEQ ID NO: 104321 - protein, 278 aa, Unknown
  Obtained from environmental sample
  DOMAIN (1)...(242): Ammonium Transporter Family
  misc_feature (1)..(278): Xaa is any amino acid
MFGGVASLIGAAIVGPRIGKYSEKGESRAIPGHSLTLGALGVFILWFCWFGFNGGSTVAMTSQDDVVSASSIFVTTNLAAATAAVLTMFITWIRYKKPDVSMTLNGALAGLVAITAGCDAVSPFGAFCIGIIAAFVIVFGIEFVDKVLKIDDPVGAIGVHGLSGAVGTILTGVFALDGGLVYGGGLKMLGVQVLGVVVVAAWVAITMCIIFTIIKKTIGLRVSAAEEIAGLDITEHNIESSYADFMVSATIESDKDAVVPLNVAVPVVNNSKPDAKMT

SEQ ID NO: 104322 - protein, 191 aa, Unknown
  Obtained from environmental sample
  misc_feature (1)..(191): Xaa is any amino acid
MEQVGRFRPTDFMGATMSFFNLRVGRFATLLALGATALYSQGTQTASATITIVDAAGAPVSGARVLLTSPSLMAERAGVTNESGVFIARLLPPGQYTIEVVKEGFATLKTKPQAIGIQQNYQPRISLSKMGSATVEVVAAPSSDVDPTDVKTAANINVARYDTVPTRRIGVDDLAGMAGGVLGSSLIHGGM

SEQ ID NO: 104323 - protein, 186 aa, Unknown
  Obtained from environmental sample
  misc_feature (1)..(186): Xaa is any amino acid
MNTLSILYAGNLSGFAFDPVFDGKNAIQLSVEQAKKFPGAGKTVLLARTDADFPGITDIQIEKKDIWTKRALLEKISELQAGFDFTFFAFADCPFLDPVLAGKIAERHIQGKAEYSYADGFPFGLAPEILSPGTAGILAKILGDDDGQIEKDIIFSVLQKDINAFDIETEISVVDLRSHRINLCAD

SEQ ID NO: 104324 - protein, 278 aa, Unknown
  Obtained from environmental sample
  DOMAIN (8)...(155): Glycosyl hydrolases family 11
  misc_feature (1)..(278): Xaa is any amino acid
LVFHDNVRMLGVYGWAFYAQSSIPTKDENGQNKNFDKAIEYYIIQDRGSYNAATGGDTKSTVKGEGTIDGIAYEYRVCDRINRNSISGNSVNFKQYFSVPKNTSSHRTSGKISVSEHFKEWKRVGMLMDGPLYEVALKVESYSESGAKGTASVTKNLLTVGGSGGGTSSNSGGGTSSSSTGGGTISSSSSTAKTQATTCPSVNLVQYGSVPANPYTACFKYPGTKNEYLNKCYVCKIDNESDGNTCGSSWLWNSVANVDDNLGKGYWYREVTCPPASS

SEQ ID NO: 104325 - protein, 194 aa, Unknown
  Obtained from environmental sample
  misc_feature (1)..(194): Xaa is any amino acid
VGEYLFLCGLESYSKHEIDNLRGSKRIAIAYSDEQVRDFVEKSLSREYRGKILLLGKIDSCLAQRIYDKVGIDFNGYNLEFRSDEIVHTFKEHGRKETEIPRGQQPISADDIVKFPSIVSNFDSVLSAADNSLHFIKNANGRTTAVTIYADGNKSLTLKTMYKSKKSGVSGPTSNAINGGNENASTGLTLDTTF

SEQ ID NO: 104326 - protein, 258 aa, Unknown
  Obtained from environmental sample
  misc_feature (1)..(258): Xaa is any amino acid
VNGILEVEGTGGNTVTLRAESISFNRLDQSLKASGNVVLEHPYYKMRCQQLEVRLTVSGEKATRTGEALGATFELPPSWILTARRLSFEDYPGDTLGILGKLLGGGRADRTTEFRFENASVSPCPDDRPNWAANASKIHLKTGSYADSSGQQGYATLHNIVLKIGPAPIMWMPWALFPARVDRAPGLLPPELGYSNQLGTIVGMSYFQPLGDAADATISPRWHSKVGTMWALESRWEPGITHKGNFSARYIRPKDTAE

SEQ ID NO: 104327 - protein, 273 aa, Unknown
  Obtained from environmental sample
  misc_feature (1)..(273): Xaa is any amino acid
VLRHYTGKKPIFSKFQTEEQIDKIYARRVPLPSGGAIVLDQTEALVAIDVNSGKTTGDNQEETALRTNLEAAEEIATQLRLRDLAGLVVIDFIDCKRETNNKAIMERLVECLREDKARMEVGKINRFGVLVMTRQRIRPSIQHVTHEPCPMCQGTGQVKNSEALVLSVLRRIKSVLSRNSTSKIHVRLSPATAMNLLNNRRHELVELETGYETAIAISPDHGITYGEISIEMTRREEEPELKPKESHERKRDAEDETVVLGGDAPISFNKALA

SEQ ID NO: 104328 - protein, 271 aa, Unknown
  Obtained from environmental sample
  misc_feature (1)..(271): Xaa is any amino acid
RKENYWENGEHCIVNALGHLLEDFSPEDYDPALKKWSLDGLPIIPEQVKYKPVEKTKAQLAVVKSCFARHKNDPFLLATDAEREGELIGAEILDYVGFAGYAVARRFWVSEALTPEVIKKGIANAKPLAEYKPYRDQGFARQFADWLIGMNLTRLATLKSNKLLHFGRVQTAVLGAVYEREKSIQNFTSEKYYEVIAALDTKTPALVKLINPDNEEFPFRFNEKSSLLREIMGKISSLTSGEITEVKKKRKRSSRRSFLILPPCRKKRTNS

SEQ ID NO: 104329 - protein, 213 aa, Unknown
  Obtained from environmental sample
  misc_feature (1)..(213): Xaa is any amino acid
SGMPKMVLHNHSLPLGHIVTAKYWQCVEEDKVHLTQTDSGWAKFAWGKIYGQWICGAAIGAYDTEKFTPKGMLDALQRLQPATFCAPATVFRYLIKEDLSGYDFSFIRHTSVAGEPLSPEVYHKLKELTGLEIREGFGQSETSVMAATFKWLPVKPGSMGKPAPLFALTLLDENGGPCDDGMVGNMSITAAGKNMYELAGAGGKASPGGVVPV

SEQ ID NO: 104330 - protein, 135 aa, Unknown
  Obtained from environmental sample
  misc_feature (1)..(135): Xaa is any amino acid
VSYLYETHLHTSIASACAKSKGSEYIRHYRELGYSGIIVTDHFYQGNTAIARCTSAGTRLPWKEWVKQFCKGYEEARNEGERQGFDVFFGWEETFDSCDDYLIYGLSREWLLEHPEVKDWTRGEQYRAVRESGGC

SEQ ID NO: 104331 - protein, 243 aa, Unknown
  Obtained from environmental sample
  misc_feature (1)..(243): Xaa is any amino acid
LNAKDGFLLVFAAWVLASFIGAIPFFLWGINFTDAFFESACTFATTGATAIGNIEALPRSLLLWRSIAHWFGGIGIILVSVALFPLLGVGGFQLIKAEETGPDKEKITPKITVTAKLLFLVYGVLTLILFVLYLIGGMNWFDAVCQSLAALATGGINVKNRGLAAWDSAFIDGVTTVFLLLAGINFNLYCRVLQRKFIEIRNNVEIKVYLGIFAAAAIIITISLIPVYGSVSSAFRYASFQSA

SEQ ID NO: 104332 - protein, 72 aa, Unknown
  Obtained from environmental sample
  misc_feature (1)..(72): Xaa is any amino acid
MLDIDQRIQALTYAQLFKVFKEYKEHIMRVTMWDFDDEFSWKSFGNPCLWDASLKPKQAFWAVVDPDKTLRL

SEQ ID NO: 104333 - protein, 94 aa, Unknown
  Obtained from environmental sample
  DOMAIN (7)...(80): Phd_YefM
  misc_feature (1)..(94): Xaa is any amino acid
MAINVRENIKPISYIKTNAAQMMKYVNERKNPVIITQNGEAKAVLIDIETYQDTEDAFALMNIIKIAEKDIKNGNVKKADDVFKDIRERITKNG

SEQ ID NO: 104334 - protein, 280 aa, Unknown
  Obtained from environmental sample
  DOMAIN (1)...(159): Alpha-2-macroglobulin family N-terminal region
  misc_feature (1)..(280): Xaa is any amino acid
LTDKKIYDPGDKLQILVQSPYETATGILTLETNAIKEYKLVTINNNAPIIELEVKADYYPNCYISLCLVQGRVDKPVTVDAYGRTQMDLGRPSFKIGYREIEVRKPSRDIQVQVTADRTSYAPGDQVSVNVKFTNTKHNQPATYCVLVVNNALFDLASLATNIGQAMNPDIPLLVNTYTNYNRIVGRRLFGRKGAVAGGGGGLEAEGKTRKAFKDIVYFAPYLTTDAEQNGSFNFTLPDNAGEFKIIIFADNGPDMFGYGELILKSTQDLLIESSLPNFL

SEQ ID NO: 104335 - protein, 282 aa, Unknown
  Obtained from environmental sample
  misc_feature (1)..(282): Xaa is any amino acid
DQADQARLKQIAYLPWRHNTEVKGTALAMRVLADVPEMEQYALKFVSYLLAEKRHNNRWYNTHDNAQVILALQNIGNKYFKGKLNFALSADGVELYSGTVRNEVKTASLDASKFSGEKTLTTEVTAKGSADNAAFYKLEVTQYLKALEQSDDKSFKVRTEYFDLNRNKVTSFKKGENYIVRINFSAYGDNTMVVCTDKLPAALMPVDFNQRNTQSTLAAKLEANVWPSYKEIRQAEVNYYFDALYSGQYFVEYAAQAVASGDYFDPGAHLEAMYSPDVYGTE

SEQ ID NO: 104336 - protein, 179 aa, Unknown
  Obtained from environmental sample
  misc_feature (1)..(179): Xaa is any amino acid
VSAMKKATEPDSIYAHNALRQISYEQKRWSLHGFSISGLSTYFQIPELDLCVDMGECPVTALSINHILLTHSHGDHSRCLMRHNSLRRMMQNPIQAVYYIPSAVYELAIEMIKAETLFEGVAEERFDLPRLECVKAGQWFDLAYRKDLEVFPFEVKHSIPSLGYTVFCKKKKLKKEYER

SEQ ID NO: 104337 - protein, 273 aa, Unknown
  Obtained from environmental sample
  misc_feature (1)..(273): Xaa is any amino acid
MAKYSSAITKAQASALDKIDVEKEAEAERKRIADSIAIEKKRIADSIAVEKKRIADSIAVEKKRVADSIATEKKRAANALARNNKRIADSTARENRRIADSTAREKKRIADSTARENKRIADSTAREKKWIADSTAREKKRVTDSTARENKRIADSTAREKKRSADSTEREKKRIADSTARVKKWIADSTARENKRAADLIAMDKKRAADSIETRKRWVADSIASRKKWVADSIASRKKWVADSIVVAEKKRVADSIEKAENMRKSQGRKKAV

SEQ ID NO: 104338 - protein, 270 aa, Unknown
  Obtained from environmental sample
  DOMAIN (96)...(268): Methyl-accepting chemotaxis protein (MCP) signaling domain
  misc_feature (1)..(270): Xaa is any amino acid
VKGNDEISDMSRYFNLTLEKIKKLIISIKGKTSILSDTGNELADNMMQTASAMNQITANIQNIKGQMTNQNTSISETGANMEQITNNIDRLNGHVEKQTANVSQSSSAIEEMLANIQSVTQTLVKNGERVNELTTASDLGHACLKEAASDIQEIARESEGLLKINSVIKDIASQTNLLSMNAAIQAAHAGEAGKGFAVVAGEIRNLAESSSEQSKIISTTLKKIKSSIDKVSESTVNTLARFEVINNDVKTVSEQEEVIRNAMEEQNEGS

SEQ ID NO: 104339 - protein, 221 aa, Unknown
  Obtained from environmental sample
  misc_feature (1)..(221): Xaa is any amino acid
SGLLRVTVFGGPKSRLRSYASPFHSGQAWVYHDPVKNTYKLSDFDVSSWRPGLREMYERAMAADAVAETMLASHGGGGNWGRALSLAQDALDALAAADEETCTRIVLWFLWQWTDFLGLRPEFDTVCCLCGKSAPARYSIREGGMVCDSCSAGAAGLAAGGHCGLVEAGPGCCHWLETTRRLHPDQLVRYTLDKKSFREAKSLATAILSEAIGKRLDSWET

SEQ ID NO: 104340 - protein, 90 aa, Unknown
  Obtained from environmental sample
  misc_feature (1)..(90): Xaa is any amino acid
MIRIEIFANHSVEEDILDALAKEQVGKYYTKIPNIYGIGSSGPRMGDAVWPEENFSLVIWCEQDEAEIIKRVIDGVKEKFHDEGIKLFGI

SEQ ID NO: 104341 - protein, 101 aa, Unknown
  Obtained from environmental sample
  misc_feature (1)..(101): Xaa is any amino acid
KFTGTNKGPRFAIAAVATIRFRPSRTPVFEKSRTDMRKWFYTIHLVLNAKRKVSGCQLQRELGVTYKTAWRMLRLIRAAMRNDDMLKVFECFYLNAIAIIP

SEQ ID NO: 104342 - protein, 226 aa, Unknown
  Obtained from environmental sample
  DOMAIN (1)...(225): Type II/IV secretion system protein
  misc_feature (1)..(226): Xaa is any amino acid
MATAQVGATDLLLCVGQPPKIRVNGFLVPLECESLTPDRSQELCYQVMTEAQQKKLEDNWEVDFSFGMREISRFRANVFLQRGTVSGAFRRIPVNVKSFEELSLPAVVETMCERPNGLILVTGPTGSGKSTTLAAMINKINATRYQHIITIEDPIEYLHKHDRCTVEQREINADTKSFHSALKSVLRQDPDVVLLGEMRDAESIQAALTIAETGHLCLATLHTNSC

SEQ ID NO: 104343 - protein, 278 aa, Unknown
  Obtained from environmental sample
  DOMAIN (1)...(93): GSPII_E N-terminal domain
  misc_feature (1)..(278): Xaa is any amino acid
ASQLNVQIATARQYASIDLNVAALIPEHMAKRFCCLALRGNDKELVVVMTDVLDLKMLDTIRDAADMLIVPILGKKEDIETSIERCYRDISSHNEATQFAESMEKEEVEIVKKKEDDIDLEQATAAGAELGIIKLVNILIANAVRDKASDIHIEPQENEVIVRYRIDGDMRKVMSPPKRSHHAIVARIKILSNLNIAERRLPQDGRMMVKIGYREIDIRVSILPTIFGEKAVLRILDKEAFEKSTSNLGFTPYDEKIFRTQIAKPYGIIIVTGPTGSG

SEQ ID NO: 104344 - protein, 288 aa, Unknown
  Obtained from environmental sample
  misc_feature (1)..(288): Xaa is any amino acid
ERLILTSTIVTPEDMNRVFLVPPSHSVLLRDAFPCEVAITLPSRGPLNLRSIRAGKFHVASLPPVAGLCAFEDAHLELNRFSEAGGRRASGTMRFLPKLHTEKPYSAVRRRGFSFAGLAAAARHTKAEQENLVANRANAVALVRGLSGAAAEGVAQIRKPIHGGQHPQPIQKLKTDAIALLTNGRGGMARLHADLGRITSKYDCALGANLHPTAPCDRHIFVKRTRVWANADGFITELNAETLIRFFAGPPASWVFLGHAGDGRAAEIYLDADILPGSNTLVLRLRDP

SEQ ID NO: 104345 - protein, 262 aa, Unknown
  Obtained from environmental sample
  misc_feature (1)..(262): Xaa is any amino acid
MDKPSMHPSPGSRLAAYVGDSLYLELEHASAKIPTWNAFLRTNLGRGAQARREVIASAGGREKESLTFGGSSWRDIPLQAELGKWVLDLTLTEVGHFRAKAYVVDPDGHQHWPDGPDIGISVLPDSLRAGNTIYCAFPRMFGPSRTRRKAADPENEEKYRQMESEGLTVIPKSGTLRDLTAQLDHIINELGCRVLHLLPIGPTPTVTAKMGRFGSPYAIQDMTAIDQALIDFDQRTTGVEQFRELADGVHLRGGHLFLDIVI

SEQ ID NO: 104346 - protein, 142 aa, Unknown
  Obtained from environmental sample
  DOMAIN (36)...(133): OmpA family
  misc_feature (1)..(142): Xaa is any amino acid
EKFAAEIEKEIDRLKIPDVVVNVVDEGISLRMENIQFYADSNKMLPGELEKLERIAAILNRYPERDIVISGHTALARGTREEHLELSQERAKAVADYLLENKVRTADRMVIRGYGADKPIADNKTEEGMRKNRRVEITILEN

SEQ ID NO: 104347 - protein, 94 aa, Unknown
  Obtained from environmental sample
  misc_feature (1)..(94): Xaa is any amino acid
DSKDAITTLKEILKSKRIVNSVPENKDKVVRATPLEAIFQAGNVHVPMAAPWLQDWIEEVEAFPLGAHDDQVDNLSSGYALFDVQGVTDALYEN

SEQ ID NO: 104348 - protein, 284 aa, Unknown
  Obtained from environmental sample
  misc_feature (1)..(284): Xaa is any amino acid
IIPTIFSKTLPPYTVVGGKERCASTGLSAVILNRNGRYPRRTFFQELEKTGFDFCVSVETPADHYDIEELSGRFPFVRFILPKRECSLGERINLAACEIESPLFFVLWNDLKIIAGGTAKRMAERLDSSQDESKDGEEKSRFKRLCTVPVILNSRYEILPTLITPISLKRKMQTMLMEPHSEGLPSLYPFDGVGIYDHDRFISLGGFDRSMANVHWQFMDFGLRACLWGEEIALSQQTKLSYDGEMPVQDSTAEASYRRFYLKNLAPVFRGDYAHLPLGRFPGY

SEQ ID NO: 104349 - protein, 59 aa, Unknown
  Obtained from environmental sample
  DOMAIN (1)...(46): Uncharacterised ACR, YggU family COG1872
  misc_feature (1)..(59): Xaa is any amino acid
VTSPPVDNRANEQLIDYLSDVLDVAKTSLSIIKGGHSRNKVVLVEGLGEDEVVERLKNV

SEQ ID NO: 104350 - protein, 100 aa, Unknown
  Obtained from environmental sample
  misc_feature (1)..(100): Xaa is any amino acid
ESAINKSLWRDMGVSFYRILGGFVLAVILGIPVGILVGTFKMAEAFTRPLCEFIRYMPVPAFVPLIMIWVGIGEEAKMAVIFMGTLFQLIPIIAEHIMSV

SEQ ID NO: 104351 - protein, 218 aa, Unknown
  Obtained from environmental sample
  misc_feature (1)..(218): Xaa is any amino acid
VSARGLTSVTIPNSVTSIGNLAFISTGLTSVTIPNSVTSIGETAFLNCENLRSINIGANVTSLDGLEYLKLTTIEIASGNANYSSENDVLFNKDKTVLIRYPSSKNGAYIIPNSVTSIEYWAFSGCTGLTSVTIPNSVTSIGGGAFAGCTGLTSVTIPNSVTSIKDPAFEGCNGLTSINIGTNVTSLLGFSFNAYSKLTTIEIASDNLNYHSENGVLF

SEQ ID NO: 104352 - protein, 237 aa, Unknown
  Obtained from environmental sample
  DOMAIN (4)...(206): Domain of unknown function (DUF323)
  misc_feature (1)..(237): Xaa is any amino acid
MGCTAEQGRDCSDNEKPARSVTLGDFYIGRYEVTQKQWTAIMGGNPSLRQGDDLPVENVNWDSVAVFIKKLNALAMAGSDYWEYRLPTEAEWEYAARGGAVSSGRAYSGGGWHEGNSGGKTNPVGSKNPNELGIYDMSGNVWELVGDWYGDYPKTSQTDPSGPQWGSYRVMRGGGWSSGVKACRVSQRMKISHDFGGGDVGFRLAIGPKKKIAALPPLSQLALLKPTYVKTSRSETV

SEQ ID NO: 104353 - protein, 227 aa, Unknown
  Obtained from environmental sample
  misc_feature (1)..(227): Xaa is any amino acid
KTGKELEVTIIRQIPASPDRIADISSDVGWELDVGPDTNVRIYTSASGKPPPRRPRVATPAPVPASTPEPVPVLTPEPVPASTPDPVSVLTPEPVPALTPDPVPVSTPAPTPPEPVIQTSVTEIFERAYDTGYDDGYDDGYYDGYSIIYQVVKPAAVNETRPAQPAPVVETRQKQAQSVPVVEPPRQQQTQSAVTSDIWAQVAKPTTLKAPPASAAVNDARPQQAQS

SEQ ID NO: 104354 - protein, 110 aa, Unknown
  Obtained from environmental sample
  DOMAIN (1)...(102): IS1 transposase
  misc_feature (1)..(110): Xaa is any amino acid
KNGMPLGYCFGSREHKNLEELKAPREPFRINIVYTDDNYAYKKLIKESEVKMGKRNTQRIERKHLSLRRWCNRLVRKGIRFSKEKVMHRIVVGMIINHRFFGRDLPVHLI

SEQ ID NO: 104355 - protein, 87 aa, Unknown
  Obtained from environmental sample
  misc_feature (1)..(87): Xaa is any amino acid
VDGLSLLGGLNHFGKVYTSLDNTTELPAFTTGDLGLRLETKTLGQDVIYRLNVNNVTNEKYWFSGGSISHLQSGQPRSVAWSAELQF

SEQ ID NO: 104356 - protein, 108 aa, Unknown
  Obtained from environmental sample
  misc_feature (1)..(108): Xaa is any amino acid
MELKGSKTEANLRAALAGKAHSKNIYDSYAYRFAYSGHQQIQNAMYDSAKVEGAHAKILYDFLYGPVGDTQSNVRMMLEDEISLGAEMYECARVAREEGFAEAAFFFE

SEQ ID NO: 104357 - protein, 258 aa, Unknown
  Obtained from environmental sample
  misc_feature (1)..(258): Xaa is any amino acid
ANEYIIEGDVHISFGGMDFNIVKVSDGLSVRLLGKDGSKADVLPERMIIQDNLISLTFANGTELVFTAQNTGGSPEMRINAVFSGDVSGIELPFKPQSRTGIRYTGSGQFVVIAGKTNYTFGNSPIDDERRVLLIEAGGRQVSYRAIPETQGLTPQDFILPQAETAEAYNEAIKWWRDQNYSLWNRSVSTQNNEDLVIALIGEAFVRGNYAAAVVAIPQNFLDGNARTYESSVYLGNLEQAYRSLNNSESEKLFGLAR

SEQ ID NO: 104358 - protein, 206 aa, Unknown
  Obtained from environmental sample
  misc_feature (1)..(206): Xaa is any amino acid
MDIFGNAVASPDVDDVTFIAGTGVVKMSSSSNPDILVSTCDGVLRCHPDGKIDVRPYKEIYGDIDKAAGRVSFTGDMKITGSIRSGVTIVVTGSLWVGGGIEGASVRCGGDLTAGASVRGVGGVAVVECGGGVEAAGIENVKLLAGGAVTVTGDIINSEVNARGRVKAAVIAGGKVAAVGGVTADRIGYDTNNIEQTVIDLGGIHR

SEQ ID NO: 104359 - protein, 173 aa, Unknown
  Obtained from environmental sample
  misc_feature (1)..(173): Xaa is any amino acid
MIEVPQSATQSTAAAKSDSVEVPAVSPEKYAPIEIRIDSMLSMMTVDTLTDAGQKLLKAIRAFTAGRYDDAIREFKSVLAENPSGPVAAQCLYNAGICYYRLRLYKDAENQFQLFLDRFANHKFAPRAVFFKACTYQERSDYAVSEKLFRKFIQDNRTHEWVGRAYERLATAT

SEQ ID NO: 104360 - protein, 183 aa, Unknown
  Obtained from environmental sample
  DOMAIN (1)...(182): Domain of unknown function (DUF323)
  misc_feature (1)..(183): Xaa is any amino acid
VEQVTWYDAVEFCNKLSVKEGLQPVYTINGRTPATGYPITGATVTADWSRNGYRLPTEAQWEYAAKGGNGSPGNYTYAGSNNIGNVAWYEENSNKMTHEVGKKAPNGLGIYDMSGNVWEWCWDWYGDYSSSAQTNPMGAVSGADRVIRGGNWIYPAGLARSANRYGIYPINWVSFIGFRLVRP

SEQ ID NO: 104361 - protein, 226 aa, Unknown
  Obtained from environmental sample
  DOMAIN (29)...(226): Beta-eliminating lyase
  misc_feature (1)..(226): Xaa is any amino acid
MKLLYFDNAATTQLHPDALAAMMPYLTGQFGNPSAVYSPARTARKAVEEARAQIAKAINAKSEEIFFTGSGTEADNWAIKGAVEAKGGGIGQHIITSAIEHHAVLHSCQYLEKQGYSVTYLPVDAEGVVAPEAVEKALRPDTVLVTIMLANNEMGAIQPLEAIGEITRRRGVWLHTDAVQAVGHIPIDVQAMKVDMLTMSAHKFYGPKGSGALYVRGGVNLKPFIH

SEQ ID NO: 104362 - protein, 90 aa, Unknown
  Obtained from environmental sample
  misc_feature (1)..(90): Xaa is any amino acid
GHFQRFMGRLCKIKTLKPINGQKSFKGWINNVSTSVVTLEEDGALKSVPLELIQKANLAPFDEEKAPKPKHTPPKVDEQAGAEKSAAKEA

SEQ ID NO: 104363 - protein, 261 aa, Unknown
  Obtained from environmental sample
  misc_feature (1)..(261): Xaa is any amino acid
FFLAQRFGTEINFTCAINEKSEISGLDIKAVVNLGAHAVNADEILELVNIGSTGVYKVKNVRFNGSAIKTNIPPQGPFAGLGLAQGFFALERHISYIADSIGQDPAQWRKQNFNAGPMAQSGPSIKGTSGKKTANKGSSLGNQLIDNVITISDYRRKWAAYELLKSIRKKPPAAAPEQGQAHKTPYVHLEAWKEKTEGMRGIGIALGYQGDSLFNADMYPCGVELTLNKEGTLDIKTGMVSYDSDHGSAWSDLASEILEIG

SEQ ID NO: 104364 - protein, 257 aa, Unknown
  Obtained from environmental sample
  misc_feature (1)..(257): Xaa is any amino acid
DESNAVIYIQHDLIISGNGTLNITGNFKHGIRSQDTLTVKSGVVNVKAVGDALRGRDAVIIEDGTFSLTADGDGVQSNNDTNAERGYIIINGGTFTINSGDDGIQAETAVTINNGSLTITAKDDGITTSGSVLITGGTINITDSYEGIEGLNVTIKGGDINIFSRDDGINAREHRVVTNTRGRFMMGRPTNENIYVHVTGGNIHVYALGDGIDSNNNVFLEGGTLRISGPSRGMEGAIDVDGSVFINGGQLITAGSV

SEQ ID NO: 104365 - protein, 56 aa, Unknown
  Obtained from environmental sample
  misc_feature (1)..(56): Xaa is any amino acid
ARFDFRWEDQFALSLDPELAEAYHNESASGNGKYCSMCGPNFCAMRISQGITDTCK

SEQ ID NO: 104366 - protein, 221 aa, Unknown
  Obtained from environmental sample
  DOMAIN (37)...(145): Alcohol dehydrogenase GroES-like domain
  misc_feature (1)..(221): Xaa is any amino acid
VFEKFGIFFFGMKTKAVRLHGVNDLRLDEFDLPEIQDDEILARVVSDSICMSSHKLALQGAAHKRVRHDLNVKQPIIGHEFGGIIEKVGIKWAGRFKAGDKFAVQPALNLPGDDGKPLLWAPGYSFEYMGGDATFIIIPNEVMEMDCLLAYNADNFYMASLAEPVSCVAGAFNAQYHTTRGSYCHSMGITENGSMALLAAAGPMGLCAIDYAVHHPQRRPS

SEQ ID NO: 104367 - protein, 227 aa, Unknown
  Obtained from environmental sample
  misc_feature (1)..(227): Xaa is any amino acid
TLFDQESFAQSSVSGIVRNSGGQPVMGARVRVLRDGVLVDELASTPQSGAYVFYLNAGTYTVAAEKPGFAMFSRGGVAVTGTTVQNITLREGAVVVSGSIIGKSWVASVNNYRAAPIASARVTFADAERPDTFNVTSDAVFGKFSVSLPKDRDYKVTVSAAGFAPYPYVRDFDTRRNVGEDLYKPYAENGSTDTLYALATIKGRVTGVVAEGAQVDVIVYDAADDRI

SEQ ID NO: 104368 - protein, 278 aa, Unknown
  Obtained from environmental sample
  DOMAIN (178)...(278): Response regulator receiver domain
  misc_feature (1)..(278): Xaa is any amino acid
MDLTPVHYDFIALVDNIGSMMRFLIKNKDVAFDIEMQRDIPRYLYGDNTRLRQILLNILGNAAKFTEKGFVRLSVSASGDNIRFTITDTGMGIKKEDLLNLFDAFIQADAVRNRDYKGTGLGLTITKALVEMMNGTIEVESVLGQGTIVYVTVPKIIGDETQVQRYTSTKKLLCSPDTNILAVDDNEINLNVICGLLRQCGVTVFAAASGEEAIEMLRKDQYDLVFMDHMMPEMDGIETTKKIREMGINTPVIALTANAITSAKEVLLTSGMDDYLSK

SEQ ID NO: 104369 - protein, 201 aa, Unknown
  Obtained from environmental sample
  misc_feature (1)..(201): Xaa is any amino acid
MKITTIRTRIAVFIGALALCAAVASAQQPAFQPAPQPLQLQQPVQAQQPPQPAAYQSAPPPIQQLQPVQAQAAPPPPPPPPPPPGVQPGSVAPEQGQAANQTGGAGTANPTANKPSVVDAESSMRLGVELSAEALAAAPYLYYDNGKSPGVGRVAPPKNCDVYQRFDRAVVKPMGKTLPFTVGDTVDVLKYIRRLRVGDER

SEQ ID NO: 104370 - protein, 130 aa, Unknown
  Obtained from environmental sample
  misc_feature (1)..(130): Xaa is any amino acid
MVFRRCRYMLRKSAYAPEDAAQDVFVNLLACKEKLDDMAKIKNVEGLLWTIATNVCLNKLKAKKWKPGEDLTVNEEELYSAAGDDYKRVDDNLLLEKILEEESEEVRSYVYMHYNDGMGYVEIAKTVGKS

SEQ ID NO: 104371 - protein, 87 aa, Unknown
  Obtained from environmental sample
  DOMAIN (14)...(72): Hemerythrin HHE cation binding domain
  misc_feature (1)..(87): Xaa is any amino acid
MSELISWSSTYSVGVIEIDNQHKGLFNLVNDMYSHVVGDEAEELAYFQDVIQFAIIYVKVHFATEEKFMLATKFRGYAEHKKAHDSF

SEQ ID NO: 104372 - protein, 241 aa, Unknown
  Obtained from environmental sample
  misc_feature (1)..(241): Xaa is any amino acid
FSAINNIFSLLGHSFEGIHWVRFIDSSGKRLYFSSYSPDIINNEYQSPAYNSYNEPDLPYELIAVENGGAPKHTFDNKSGSILFSFPLYDSFDIYCGTALFSLSIDAILEKLFSEGRIISSHEIILIQKPPGMVFGTMTADEWVMPGQISSVWETTGLKTARVLSNDSGVPYILVSTKTSQDLFIGSLIKEELYLFPWNMKLLLLVSFFITVYLTIFLLFSIKQEPVTIIHNRLKRLQVSL

SEQ ID NO: 104373 - protein, 159 aa, Unknown
  Obtained from environmental sample
  misc_feature (1)..(159): Xaa is any amino acid
MEEIPDCPVSRTWLESLSTAELIKLADSFGIDIPHGLERIFIIEELLEYSDTGVQEKADDLEINPAYIETTLLPKQYNISFIEVIIRDPLWVFVYWEIKGHDREIHEHANDFKGYCLRVVPLSEENTELNETSFTVPVNVDDSARYLGFAEHSSRSHGR

SEQ ID NO: 104374 - protein, 149 aa, Unknown
  Obtained from environmental sample
  DOMAIN (2)...(108): Cytidine and deoxycytidylate deaminase zinc-binding region
  misc_feature (1)..(149): Xaa is any amino acid
MKKAEEFFIRRTFALARRGAGHVSPNPLVGAVLVKNGKIIAEGYHPAYGQNHAEREAILKLAGKKPVKNCARGATLYVNLEPCAHHGKTPPCTDIIIEAGIKKVVFALRDPNPKVRKCNPVQLLKKAGIEVIYPVLEKEARELNKVSSK

SEQ ID NO: 104375 - protein, 126 aa, Unknown
  Obtained from environmental sample
  misc_feature (1)..(126): Xaa is any amino acid
SRGAIITVFGCGGDRDKGKRPKMGRLALRKSDICFVTSDNPRTENPHSIIQDILRGMTHYAPAYKYIVVEPDRAKAIPRAIALAKPGDFVVLAGKGHETYQVLGTKKHHFDDREEARKALKKWQKK

SEQ ID NO: 104376 - protein, 266 aa, Unknown
  Obtained from environmental sample
  DOMAIN (95)...(266): Pectate lyase
  misc_feature (1)..(266): Xaa is any amino acid
EGTEYGSEAVTASIEVLPHDRSGFAFSPASPNKTASGAYNDNGTLKAGAQILYLTAANAKTVELAVKESDKKTTTCVGIGDILAKRQKGYDSTPLAIRIIGLITSADMSGQLNSLSLLDVKGNKKGNIANITVEGVGSDAVCYGWGIHIRSYYNVEVRNLGFMMFPDDGVSLEVDNQNIWVHNNDFFYGKNGGGDKNKGDGSLDSKTSGYSTMSYNHFWDSGKANLLGNGVEPMEYLTYHHNWYDHSDSRHPRVRFHSVHVYNNYY

SEQ ID NO: 104377 - protein, 222 aa, Unknown
  Obtained from environmental sample
  misc_feature (1)..(222): Xaa is any amino acid
IVYALNVKIEPVLDVRLFKLSNFSSSSILLLVSGGIITGTLFILPLFFQQVQNSNAIIAGLFLAPQGIGMLCTRGLGGKITDKMGSRVVVIISIIITIIGTIPFVFANSATDKIFLTIALFIRGCGLGGVAIPVMVSIYDGLTKEQVAHGTTATRIFQQIGGSVGTAVLAIILQNHMPANADAEIIGKAFNTVFLWSIGFAIISIIPAIFLPMKKEETEANK

SEQ ID NO: 104378 - protein, 256 aa, Unknown
  Obtained from environmental sample
  DOMAIN (52)...(187): Pyridine nucleotide-disulphide oxidoreductase
  misc_feature (1)..(256): Xaa is any amino acid
TISPNGSIEHEGKTILVSTGSVPVLPPIPGAKDNPLLVDSTGLLAVESVPRRLTVIGGGVIGVEFAGLFSALGAEVTVIEMMDEIVPFMDKEQAPLLRRAMKGVDFKLGCKVEKIEGAAVHYTDKKGKAEIKEAELVLMAVGRKPVTDTWGAAAAGIDCSPKGVAVDDRMRTNIPGIWAAGDVTGKSLLAHSAYRMAEVAVADILAGNHADGKTNRMRYNAVPWAVYGLTEAAGVGITEQEAEAKGIAILKSVLPM

SEQ ID NO: 104379 - protein, 248 aa, Unknown
  Obtained from environmental sample
  misc_feature (1)..(248): Xaa is any amino acid
IYTITFDAAGGTVTPATGKTGAGGKLASLPTPANRPGYAFDGWYLSEDEGEKLTAGYAFDDDVTIYARWTPVYTITFNANSGSVTPATAKTGAGGKLASLPTPTKLGFASEGWYTDDTYGDKVTTATVFYADGTVYARWAIAHTVTFSSGVNGYLTAAVDGNPITSGAWVQEGKNVVFTAVPIEGYEIGAWTVNGAKVPGIGNSYTLSNLASTQTVTASFEKVSVASPDRTVPVGGSSGVEAVIAPVK

SEQ ID NO: 104380 - protein, 137 aa, Unknown
  Obtained from environmental sample
  misc_feature (1)..(137): Xaa is any amino acid
VIASQRALRADCHETVFHRGETVTECAHSNVHIIKNGRFITHPADNLILRGIARSHLLQACDRLDIPVDEREFTLSELFEADEVLASSCDTFGLSAETIDGKNVGGKAPELLKKIQDEVMKEFTEETGYAPAWSKKA

SEQ ID NO: 104381 - protein, 60 aa, Unknown
  Obtained from environmental sample
  misc_feature (1)..(60): Xaa is any amino acid
DRLAKGLEAMAVSDDGLVEAVYMPDRPFVWAVQWHPECAIKEEISKKICSSFVEGVEESL

SEQ ID NO: 104382 - protein, 91 aa, Unknown
  Obtained from environmental sample
  misc_feature (1)..(91): Xaa is any amino acid
MDGVPHNIDFAEVAKEIEKVDGVKSVHHLHIWALSTTQTALTAHIVLKNEISLGGIPKIKDEIRHEASHFGINHCTLETESEGDKCEHKED

SEQ ID NO: 104383 - protein, 82 aa, Unknown
  Obtained from environmental sample
  misc_feature (1)..(82): Xaa is any amino acid
MKTAISLSDTLFEKAEKTAHYMGIPRSRLFVIALEDYISKHNGEMITKKLNEVYEKVNPDEFARDLDVGLESLRNLTKNDTW

SEQ ID NO: 104384 - protein, 214 aa, Unknown
  Obtained from environmental sample
  misc_feature (1)..(214): Xaa is any amino acid
MGVRIDDPNRRVVLTLEQPDILETLRYYHSWYKDGIINPDANLLAEEPKGRPFFMAQAWPSVAAVYAQQDGIERYDPVRFFGPIYSTASIQGSMNAVSSNSKYKAEALKLLELVNTDTKLRDMLCYGIEGKHFNYVNNGAAVERIIVDWTLVNYQQGNYFIITPQNTVPPGYWDEVRHQNEIATPSVMMGFMMDIDPVLADLTNCRSTWDNILM

SEQ ID NO: 104385 - protein, 240 aa, Unknown
  Obtained from environmental sample
  DOMAIN (2)...(155): Glycosyl hydrolases family 38 N-terminal domain
  misc_feature (1)..(240): Xaa is any amino acid
HEYEADTLWLPDVFGYAAALPQIMAGCRIKYFVTSKINWNDTTRFPYETFIWRGIDGTGIKTHFLSTIGPGSGYNGRVVPEELAAVWNAVQHKEVQSACVKSIGEGDGGGGTLRADLEMARRLSDLEGTPRSAWKTASAALADIFDNGEFPEWRGELYLELHRGTYTTQARTKRNNRLLEFSLRRAELFCSLAALKGKGEYPHETLLDCWKQTLTNQFHDIIPGSSIGRVYEEAKRSPRK

SEQ ID NO: 104386 - protein, 227 aa, Unknown
  Obtained from environmental sample
  misc_feature (1)..(227): Xaa is any amino acid
TLIAAKAAYDGKYDWLIVQHHKSTASVADHLADRDIQYYVEAGFEKVMSDHNVDFVLAGHDHVYARSYPLEGKDGGKVSVPDKSANVEGKAPNTYNNPGKPIYLTFTTGSGLKYYAVSSDPTFNYNNTLYVKDNTVYPYLGEVTDAEGTSSTHYGSLSYLNDKLLPVSNAAYVQPYIPSYTIAEVNGKTIKFSTYPIATKSGTNPGVTESHSFDENTPYDWVEVTKN

SEQ ID NO: 104387 - protein, 99 aa, Unknown
  Obtained from environmental sample
  misc_feature (1)..(99): Xaa is any amino acid
GCVLGSRLAIWMLKEADLKVYLKADPNVRAQRIVKREGGNLEDVAAFTAERDKRDRERYLNIYYIDTDDYNFADLIIDTDTITPQEITDLIVNKAREIE

SEQ ID NO: 104388 - protein, 227 aa, Unknown
  Obtained from environmental sample
  misc_feature (1)..(227): Xaa is any amino acid
MPPETFRKMLEVTERLFEKGVYDNAHFRLSGGEPLLAFDNYKDIVAEYRRKYPKQIGFGLLTNFTRFDDEIADWMEMNDIGMQVSLDDLVCGKPLRSGESSSPAVLENIIKLMSRNINFSFNTVLDIDRAKDLTKLANFVSRFKNIEWGLNASYTENDPGKTEEVIGIFDDCIGQLVARGFDIYNFLRFYNTKIGQGGGGCSAGVNSWAIGTNLEVWPCSSDCSKGP

SEQ ID NO: 104389 - protein, 140 aa, Unknown
  Obtained from environmental sample
  misc_feature (1)..(140): Xaa is any amino acid
MLEEQDISRVIFRTLDLMNAQAVKEFRLPPDTYIGAGAISCIGEALAARGIRTVFIVIDSLVADLGLAEGMYRSLTQSGIRHREYFQPVGEPHSALVEEEVGRFVESGCEGMIALGGGSAIDAAKAIVALAAHPGLAVSD

SEQ ID NO: 104390 - protein, 80 aa, Unknown
  Obtained from environmental sample
  misc_feature (1)..(80): Xaa is any amino acid
RSGFIPDQVQDFYPTPGTLSTVMYRTGLDPRTGEPIYVPGEREKRLQRALLHFNRKENAPLVREALKEIGREDLLKVFRL

SEQ ID NO: 104391 - protein, 181 aa, Unknown
  Obtained from environmental sample
  misc_feature (1)..(181): Xaa is any amino acid
MAETKNSFPIASVSERAKNKLELLCIGNALVDVFARGEEDIDIRYGLNEKVQHIPMEQMREILSVLPEFSICSGGGASNAAKIAGLLGIGTAFLGALGAAPEVEHETPDSRIRAEKSIFDQFGRLFEKQLEEAGVKTKLIRKNSPTGVCLILQMNDGQVKIAASPSAALELSEGDLDEELI

SEQ ID NO: 104392 - protein, 61 aa, Unknown
  Obtained from environmental sample
  misc_feature (1)..(61): Xaa is any amino acid
KLNHTKLIATHDVTFAANVCDRVVILKKGQIAADGMRDLLYNKEIMTQCELEAIEERMIYE

SEQ ID NO: 104393 - protein, 218 aa, Unknown
  Obtained from environmental sample
  DOMAIN (40)...(218): ABC transporter
  misc_feature (1)..(218): Xaa is any amino acid
MPLLTVSGLQKRFNLEAGFFARFGRFVNAINDVSFTIEKNEAYGLVGESGCGKTTTARLLVRMYEPDSGHIYYHHGDERTDIGGLRKEPLRQYRQKARYVFQDPARSLNPRMSVYDVLVSGFRWGGTPDSKLEKKQLREKAAAALEEVGLNAEDLEKRPSEFSGGQRQRISIARGLLPQPELLICDEVVSALDVSIQCQILNLLLDIRERRIVNKLAM

SEQ ID NO: 104394 - protein, 267 aa, Unknown
  Obtained from environmental sample
  misc_feature (1)..(267): Xaa is any amino acid
SGRPVVNVNADDRKSLNFQNVNANDITDRMTIRIATVNGTAAEIAARNGVLQIRASTKNEFEANDRFRFSKGEIQGPASNKVANLIIPSTIWGDPVISISKEAFRNAGLTSITIPNSITSIGDEMFANNQLTSIIFPDSLTSIGANAFADNDIRQITIGANVNVADTAFNYYKPAFTDSNGNYYPAKYVNSYFAREYNTMGRMAYTYCYYSGYDSGYWYLNSWPSDFVGTWKRSDFANRLTITETTINSSSSNNGGRIRLTLSQHMY

SEQ ID NO: 104395 - protein, 200 aa, Unknown
  Obtained from environmental sample
  DOMAIN (77)...(196): Histidine kinase-, DNA gyrase B-, and HSP90-like ATPase
  misc_feature (1)..(200): Xaa is any amino acid
MAVKTKKTGKQSLHRVAATKGNIADKGIHAKGNAVKSNTASSLPGVYDESKVKTLSSLEHIRARTGMYIGRLGDGSNPDDGIYVLLKEIIDNGIDEFIMGNGKHIEVAIKDGAKPGAASVKVRDYGRGIPLGKLVECVSVINTGAKFNDDVFQFSVGLNGVGTKAVNALSVYFRVVSMRNGEFAEAIFERGKLKSDRKGQ

SEQ ID NO: 104396 - protein, 133 aa, Unknown
  Obtained from environmental sample
  DOMAIN (14)...(129): MGS-like domain
  misc_feature (1)..(133): Xaa is any amino acid
MKRRALISVYNKDGILDLAAFLVEAGWEILSTGGTSKYLKENKIPVADLSSVTGFPECLDGRVKTLHPAVHAGILARRDEASHMDTLKSLSIETIDLVCVNLYPFFEKVQDVRLSQDETIEFIDIGGPSMLRS

SEQ ID NO: 104397 - protein, 80 aa, Unknown
  Obtained from environmental sample
  misc_feature (1)..(80): Xaa is any amino acid
GDKKTAEHILESVKVIKYAESLGGVESLITYPMLQTHADLPENERKERGIDECLLRLSVGLEAAEDLIADLEQAMGDDNK

SEQ ID NO: 104398 - protein, 124 aa, Unknown
  Obtained from environmental sample
  DOMAIN (1)...(121): 1-deoxy-D-xylulose 5-phosphate reductoisomerase
  misc_feature (1)..(124): Xaa is any amino acid
VAVLGATGSIGKSALDVLRDQKDRLQPVLLTAHSDAKGLLELKKEFPGALTALANEAAAERAQLDFDFYGRDGLLNAIAAARADIAVNGISGAAGLEPSVAAINAGSDVALANKETIVMAAEII

SEQ ID NO: 104399 - protein, 181 aa, Unknown
  Obtained from environmental sample
  DOMAIN (53)...(178): Response regulator receiver domain
  misc_feature (1)..(181): Xaa is any amino acid
MMDGKIWIESEIDKGSTFAFTVKMKRGTGKCLDADGEKTEEARDDITGIFAGRRLLLAEDVEINREIVQSLLEPTKLKIDCAENGIAAVRKFYEAPNAYDLIFMDVQMPEMDGYEATRRIRTIEAALNKNAPDKPRRIPIIAMTANVFREDINKCLDAGMDNHVGKPLDFNEVIKRLREYW

SEQ ID NO: 104400 - protein, 87 aa, Unknown
  Obtained from environmental sample
  misc_feature (1)..(87): Xaa is any amino acid
MKVISVKDIIRKDVPIYYRLLYTGVAVIELANGSANYRIDFTIEIKPTGLKEISVTFLDNLEYPLLPVIKDLKVIINKMYDDELLPD

SEQ ID NO: 104401 - protein, 79 aa, Unknown
  Obtained from environmental sample
  misc_feature (1)..(79): Xaa is any amino acid
MKYLIMEDFSGQPAVFIFPRRVDHLDMREQLPYQKALSAGYVELKDGAPRCFGGHTELELHSRPQDADIIRDSLRQREN

SEQ ID NO: 104402 - protein, 248 aa, Unknown
  Obtained from environmental sample
  DOMAIN (4)...(247): tRNA synthetases class I (W and Y)
  misc_feature (1)..(248): Xaa is any amino acid
VAARKRIVSGMRPTGPLHLGHYFGVLKNWIDMQEQDECYYFVADWHALTSDYAAPERIRTHSTELVKDWLAAGLDPQKSVIFRQSDIKVHAELTLLLGMITPVSWLERNPTYKEQRQEISDKDLGNYGFLGYPVLQAADILLYLPDFVPVGQDQLPHLELTREIARRFNHLYGEFFPEPAARLTSAPKCPGLDGRKMSNSYGNAISLKDSDEEISPKIRGMFTDTNRLRKSDPGNPDICNLFPYHLLL

SEQ ID NO: 104403 - protein, 54 aa, Unknown
  Obtained from environmental sample
  misc_feature (1)..(54): Xaa is any amino acid
MDTKALEKVALSIRSLSMDAIEKANSGHPGVCMGAAELGAILYGELLRHDPSDS

SEQ ID NO: 104404 - protein, 61 aa, Unknown
  Obtained from environmental sample
  misc_feature (1)..(61): Xaa is any amino acid
VGMGGIASSQDALEFLLAGASAIQVGSATFAYPPTMNEIIAGITEYMKQKGFNTMGDLSIR

SEQ ID NO: 104405 - protein, 219 aa, Unknown
  Obtained from environmental sample
  misc_feature (1)..(219): Xaa is any amino acid
LKSVITITENAKIIKNKVNNSERIGGGIFSTEGELTISGNVIFSENYAYDAGGGLYMGKGKLTIGGNVLFQNNKAENRGGAIDAIETKFVLCESAIIRDNTARFGSGLFITNSDFIFDGGTVTGNKAAESGAVYIGGGGKAEFLNGIINDNNAICGGGVFLGTTTQLTMKAPVQIRGNKANYGGGVYINHQESKFIIEGGDVNGNTAKSGGGVYNKFAG

SEQ ID NO: 104406 - protein, 199 aa, Unknown
  Obtained from environmental sample
  misc_feature (1)..(199): Xaa is any amino acid
MKDKAVLRGNKAVRGAGLYVKGEETKFIFESGSIEDGEASRHGGGLYADGTSFSLGKGTIIQNNKSLGSGGGFYMMDNTITLESGALIRNNTAANNGGVVYVYQTGNLIVNEGVILSGNAADYGGGIHIDGEKGATLTMTGGVVENNKASKSGGGIYADRGATVKLSGKSIIRNNESSRYGGGLFLSKVTFTMSENVTV

SEQ ID NO: 104407 - protein, 242 aa, Unknown
  Obtained from environmental sample
  DOMAIN (42)...(113): HAMP domain
  misc_feature (1)..(242): Xaa is any amino acid
WGWLVSIYAPIKNSAGRVVGIAACDFDGAYLHKTIIANEKRQAVIGGVSLLLGLALVLFFLRQIFLPLDKINVILKEISMGEGDLTGRIETDNKNEIGELAGYFNMTLDKIRNLIVVIKGEASNLHDVGGNLAAHMRRTAGAIHQITANIGAVKEKVTGQSASVSQTNATMKQVTANIDKLGRNVETQTESVSRSSSAIEEMLVNIENVTKTLGRNAESVQELIRVSDDGRGSLQKVTQDIN

SEQ ID NO: 104408 - protein, 202 aa, Unknown
  Obtained from environmental sample
  DOMAIN (8)...(200): Formyl transferase
  misc_feature (1)..(202): Xaa is any amino acid
MLQSASVVKVLFAGTPAIAVPCLREISEMELEGAGVTLAGVLTKADRPRKHGQVEPSDVSAAASALDEVRKKNGLPPIPQLKPEKLDGTAREDVAALTPDLLVSFAYSRIFGPRYLALFPLGGINIHPSLLPKYRGASPIPAVILNREKETGVCIQKLAAEMDSGDILASLRIELSGRETTASLSETVGEKAALLLRELLLD

SEQ ID NO: 104409 - protein, 146 aa, Unknown
  Obtained from environmental sample
  misc_feature (1)..(146): Xaa is any amino acid
MINLGMTPSPEALKKVIDGINKKLGEAEVKAINDLAKSIQEGWTEDIKSAFDRPTKTTTSSVKLWPAKLSQEAKGHTIEATVLIRDKAPKGTAPATYLQSQALGGSRATKPFELLLVSQGRLPSGGFLQPAQSVPRDQFGNVPKGE

SEQ ID NO: 104410 - protein, 251 aa, Unknown
  Obtained from environmental sample
  misc_feature (1)..(251): Xaa is any amino acid
DIIWAAYSYSPNATWAHLVAEWLEAYGSPEKETTFINTVLGESKDHEGIQTEPKDLATRLCNTWKPYEVPPEVAILVQTADVQGNRLECQTVGFGAGERAWLVDHEVIPGQPTDPDTFVAFDEWRRAARVRQDTGATMPIDICLIDSNYATDSVIQYARPRYTQKVYACRGEEKLSDRALVRKGQTRKERALQYQVATWELKAELQRRLTIADDRPRRIYLPEWVNDSYIAQLTAERLIRQRNRKTGREKL

SEQ ID NO: 104411 - protein, 257 aa, Unknown
  Obtained from environmental sample
  DOMAIN (2)...(188): Pyridine nucleotide-disulphide oxidoreductase
  misc_feature (1)..(257): Xaa is any amino acid
AEVLVIGGGPAGLCAALAAASLGASVLVCERDETFGGQLVKQTHKFFGSRKQYAGDRGIAIGDFLLDEVKRDPKIELMPETMVIGIYEDGLVLAERSNEEIVKIGSQKIIVAAGAAEKFLPFPGNDLPGVYGAGAVQTLMNVEGVVPGRRVLMVGAGNIGLIVSYQLAQAGVETAAVIEAAPTIGGYLVHASKIRRIGIPIRTGYTVKEAYGDGKVEGAVICRVDSGWNMVSGTEEDIKCDTICLAVGLIPLSALCW

SEQ ID NO: 104412 - protein, 168 aa, Unknown
  Obtained from environmental sample
  misc_feature (1)..(168): Xaa is any amino acid
SHGDTSVLIAVLKWAAEELAESDLAVFLGDGLKELPLAQQYVSLPCELKKIRGNNDDAPTAPESEVFDFCGYRFYICHGHRFVLYNGFDKLIATARGKGAEVVLFGHIHVPYLEEAEGLLLVCPGSIARARSGAGDTFAVLDCTPGKPLAVQFWEIDNDSLEITQFLS

SEQ ID NO: 104413 - protein, 225 aa, Unknown
  Obtained from environmental sample
  misc_feature (1)..(225): Xaa is any amino acid
MIQAGTHQLQDGEKRINSPWNIAVEFKIDMSLNEKEIASMLREYENDHKTGMNIEAISKEIRAYTNGYPYLVSRICQCIEEDLDRDWTISGVQNAVKEILFEQSTLFDDIFKNIESYPDLKELLRELTVGNRAYFYNIDNQAIQFASIFGIVEKRGTLVAIHNRIFEVRITNYFASEKEMERNRIIPSSLINLVAGKEKFDMPLFLEKFANHYYEIYHNKDIDFW

SEQ ID NO: 104414 - protein, 246 aa, Unknown
  Obtained from environmental sample
  DOMAIN (2)...(246): D12 class N6 adenine-specific DNA methyltransferase
  misc_feature (1)..(246): Xaa is any amino acid
EWAGGKSQLLEQFENYYPNELRKKSIKNYVEPFLGGGALYFYLSRKYNIKNAFLSDLNKDLILTYIVIQQKSEILLDFLEQYQNLYNSTEQEKRNDLFLSVRKHFNEQRFEINYKKLSENWVSRAAQFIFLNKTCFNGLFRLNSKGEFNVPYGKYKTAAILDANNIATVSKILQNAEITHSEYSNCYSKINEKSFVYFDPPYRPLTKTANFTTYTGMIFNDDNQIELAKFFRKIDSEKGAKLVPLV

SEQ ID NO: 104415 - protein, 259 aa, Unknown
  Obtained from environmental sample
  DOMAIN (1)...(104): Formiminotransferase domain
  misc_feature (1)..(259): Xaa is any amino acid
GWYVDTYKRAQLSINLTDYKVTSMMDVLEATRRMAAERGLVVTGSEIVGLVPFRSLYDAGLHYLRQQGKSPFVPVEDVLENAVFSMGLADVGPFEIDKKVLGLPKSYPGGLMSMTVKDLVTEVSRDTPAPGGGSIAALAGALGASLASMVANLTKVKDEDHQGRLFRAAEDAHRVKDALVLAVDEDTGAFNAYMEARRLPQATKEEKAARDAAMLEGLKAAVAVPLKTAELSLEAMGAAAVVIEHGNPASVTDGLVGIQ

SEQ ID NO: 104416 - protein, 211 aa, Unknown
  Obtained from environmental sample
  DOMAIN (65)...(100): UvrB/uvrC motif
  misc_feature (1)..(211): Xaa is any amino acid
GIQKKLEEHHLVKYSDSAVTLAAKLAQRYIMGRFMPDKAIDILDEAGALRKLESRDEPPEITGLEAEIAKLCDEKSAFVSMQDYEHAAEVRDKVRELRVRLAQAQIAWESSSVNHRPEVTDEDVRRVVTEATGIPVMNAEEHESRRMLLIENELRKTIIGQDEAIKRVASAIRRSRAGVSSPRRPLGSFIFLGPTGVGKTYLGQKTRAVPF

SEQ ID NO: 104417 - protein, 236 aa, Unknown
  Obtained from environmental sample
  misc_feature (1)..(236): Xaa is any amino acid
TTSITVSKATPAALTWPTAAAITYGAALSTSTLSGGSNTGTFAWTAPATIPTVTNSGYSVTFTPTDTENYNWTGVTLTKTTSITVNKASGLANTVPVEIQISTSNTETHTYNLHALAFNKSDHGTLSYALGTLTDASSILASVPTLADGILSYKGAGKTSGTATQNITITSQNYADITAAIIFEATPKAEVAIVGLTAHNYVYDGTPKLGVTGTATSGAYTGALVYEYARTGIDGI

SEQ ID NO: 104418 - protein, 238 aa, Unknown
  Obtained from environmental sample
  misc_feature (1)..(238): Xaa is any amino acid
LISRSLGPEFGGAIALTIFLSQSLSIPFYLIGFAEATVLTFPYLDIYFDLIAYAIFAATAMLSLRGAAVVVKAQYLVLTILALSIAAFLIGAAIHFDPQTFADNANPLEGSKYNFWMLFAIYFPAVTGILSGVNMSGDLKNPARAIPRGTLIAIGVAFVVYAAEMILCGGAIKRSDLTDRPYESILHLWDPVTSFIVVPGVMAATLSSALGIILGAPRVLQSLAQDKILKPVNMFAQV

SEQ ID NO: 104419 - protein, 234 aa, Unknown
  Obtained from environmental sample
  DOMAIN (5)...(128): RNA polymerase Rpb1, domain 3
  misc_feature (1)..(234): Xaa is any amino acid
KETKHITPRYSSVEEVLMAVEAKALDWEALIKVKAPKYPIWEKVGVESKVGPGELIETTAGRLAFNEELPPEIPYINYELKDKELRALIEMIFNKKGSWITVKMLDAIKSTGYKYATVFGATIGVDDIVVPKEKSEMIERANKQVEGIQRQWRQGQITQEERYNRVVEVWTKTNEDLTNIMMKTLETDKEGFNSLYMMSNSGARGSRNQIRQLAGMRGLMAKPTGEIIELPIRS

SEQ ID NO: 104420 - protein, 147 aa, Unknown
  Obtained from environmental sample
  misc_feature (1)..(147): Xaa is any amino acid
MTPDFDVHVCMVSDQPAPNLLPVLDARFAPKSRRILMLVTPKMQENAAGLAGVFKEKHFEVDTLPIENPYDLDSIQEKLRAFLAVHEKEKVVLNVTGGTKIMALAAHAVFSMDGRPIFYVREDTNSLIIIRRNEKSDVFNYRASDAE

SEQ ID NO: 104421 - protein, 210 aa, Unknown
  Obtained from environmental sample
  misc_feature (1)..(210): Xaa is any amino acid
TQVFEQSLDIDFDILITDLCPIDLLLQRIGRLHRHNRSRPERMARAVCYVIDTGCDDFESGAERIYGKYLLMRTRETLPDSVLLPDDIPKLVAGVYSDDAENSISQSLLNVYDAIHDKWQLKEEKSKNKASVFQISKPLCQSDTLLDWLRHLLKDDSEKRAEAVVRDGIDSVEVVVLQHRDGNICFLPWIEGGRPIPRQCVDDKNAKKIA

SEQ ID NO: 104422 - protein, 193 aa, Unknown
  Obtained from environmental sample
  misc_feature (1)..(193): Xaa is any amino acid
MFKAADFAMANLETPVAPNTGKPGIPFCFNAPVELPRAIKETGVGLVFTANNHAYDQNIAGVVETLGHLSDSGLLAVGSGMDRAAALRPAIVNLRGMEVAVLSRTDLFNNCLNQRHDRPWVAELDVERDAAIIREIRPNVDAVIVAVHWGNEYHAKPSPRQREAAARLVEAGADAIVGHHPHVLQPFEWVEAG

SEQ ID NO: 104423 - protein, 189 aa, Unknown
  Obtained from environmental sample
  DOMAIN (1)...(145): RNA pseudouridylate synthase
  misc_feature (1)..(189): Xaa is any amino acid
NEGGLLHRLDFETQGLVLFAKNQQSLENLLNQQKQGKLIKEYSAICQKSEQQPDGFEIFTGPEVGVPPLVIESYFRPYGPGRKQVRPVIKEKLKGKEIAKDGNAYYKTEIIGIEKTDNTRQEESYHFTVRLKRGFRHQIRCHLAWIGFPVLNDPLYGKGEVNGFLALRATGLFFDDPKSGKPIQLIFEQ

SEQ ID NO: 104424 - protein, 161 aa, Unknown
  Obtained from environmental sample
  misc_feature (1)..(161): Xaa is any amino acid
KKYIVTLTENEKEILRGIIKKGKHSAEKYKRAQALLLAEENCTDDMIAGQTGLSRRGLEQLRQRFVEEGFEATLGGKPRGHRPKVLGGEDEARLIALVCSPKPDGRTRWSLRLLADTWKTLAYTDVKTVSHETIRRTLKKTKLSLGKARSGASRLRKRKSL

SEQ ID NO: 104425 - protein, 181 aa, Unknown
  Obtained from environmental sample
  misc_feature (1)..(181): Xaa is any amino acid
MAKTSQRKTFFRVTLAAFAVSCLLFLTSLDNKFFDLFLRFLPSLTEDEKVFVLTLDDDSINYAGGFPFRREVMADVVILLKELGVQTIAFDLSYLDESPHRLDPVYAAEVFNRTLNTNFAVIDEAAMTVIDAIRPATKQSERDMYKQDMKSIYKQVRGELEMSLTLLTRDVDEYFAQSLAF

SEQ ID NO: 104426 - protein, 172 aa, Unknown
  Obtained from environmental sample
  DOMAIN (75)...(167): Biotin and Thiamin Synthesis associated domain
  misc_feature (1)..(172): Xaa is any amino acid
DATVYNLNIDTSRAFYETIITTHTFEQRLHTIRALRAAGLEVCCGGIVGMGEKIDDRIHFLHELTLLDPPPESIPINQLHPVAGTPLEGIEPPPPLEFIRMIATARILFPNSRIRLSAGRVNMGIEMQALAFLAGANSLFTGEKLFVTPGPGGSQDHLMLEAMGMMVETGAQ

SEQ ID NO: 104427 - protein, 225 aa, Unknown
  Obtained from environmental sample
  DOMAIN (6)...(168): Poly A polymerase family
  misc_feature (1)..(225): Xaa is any amino acid
GANIEITTYRGDGDYLDGRRPTEVHFGVPLEEDLARRDFTINAMALPIEFIDSDEWKEHVIDPFGGKADLNARLIKAVGDPLLRFEEDGLRPYRACRFASQLGFSIEPSTGSAIPQRLDVASKVAVERVFVELTKLLTGMDAPAGLRALAEYGLLELCLPELCTSIGCGQNTHHAFDVWNHTLEVVRHANADPAMRWAALLHDVGKPAAKFIDQDGRAKFHGHET

SEQ ID NO: 104428 - protein, 126 aa, Unknown
  Obtained from environmental sample
  misc_feature (1)..(126): Xaa is any amino acid
YFFPDRKTDQDNHKILRTEKFNDKDCYVIESSAKDANYQYSKMIQWIDTKNFVIYKIELYDRRGNQVKLLEITEYREVQGRLAPYVTKMTTIADGTSTSINVVNLKYDDQIPEGVFTTRFLETGRP

SEQ ID NO: 104429 - protein, 108 aa, Unknown
  Obtained from environmental sample
  misc_feature (1)..(108): Xaa is any amino acid
MAHKVIDLHCDSVCSIMEGKDIRGAVKDVHVDLPRLREGNVALQVFAAYVSPETGNAFSCACERLDAIDAFAASDERLTLVETAAELREILAGQKTGVMAAVENGLAI

SEQ ID NO: 104430 - protein, 251 aa, Unknown
  Obtained from environmental sample
  misc_feature (1)..(251): Xaa is any amino acid
MDTGAFVRGENAYSIVKCAFTDNVEKPKTVMDVKLSINILDSELISPIFHYQVTQDYLIRDLLSKHIIETIDAELEKLKEDRVDHGLEELTDAEILFARIGKVENHTDDDKDNEKAKRYRIVSKSIIDKLNGLRAEIDPATFDQLNIRENLKKIIDIENIKNRGFNTAINSITSILDTSKMGYQYIENLKNARGVMIREYEDTVLAHLPDERYEIKMRYLDSSQVTEERKAYEVQLRSFETEFHHMWDLIY

SEQ ID NO: 104431 - protein, 162 aa, Unknown
  Obtained from environmental sample
  DOMAIN (48)...(117): HAMP domain
  misc_feature (1)..(162): Xaa is any amino acid
MIELLAAIKNSSDVVTNTMVEVSDLKVDNLKQSSGDCTNQSKNSATMMVIILVVSVVIAVIFGVYISTMISKPLGVTVNMINEMSKGHLDMRLHLDRQDEIGVMAKTMDSFADDLQNNVVGNMKKISEGDLEMKIDLKDSKDEVSAALKNTVEALHALYRRR

SEQ ID NO: 104432 - protein, 84 aa, Unknown
  Obtained from environmental sample
  misc_feature (1)..(84): Xaa is any amino acid
IRGGASYQYQRGPDNKSYAVGGEVGIDAAPERDNPGATITKMQTVRAAALAPNDPSAQDRAVAAAAARHESAARSDLAEENKTI

SEQ ID NO: 104433 - protein, 128 aa, Unknown
  Obtained from environmental sample
  misc_feature (1)..(128): Xaa is any amino acid
NSGGKSEYLNRFLDVFSKNPGHNDDGSYTLTIDLSPAEGGTVSRSNERSGYKAGTSVTVTATPMEGYTFLGWSGALNSTNAKVTITMNGDRWLSANFIKEGSGQTAYDVRFDAHGANGNAPSLARAVS

SEQ ID NO: 104434 - protein, 141 aa, Unknown
  Obtained from environmental sample
  misc_feature (1)..(141): Xaa is any amino acid
MIGPTGVGKTEIARRLARLCSAPFIKVEATKYTEVGYVGRDVESMIRDLMEIGVSLVREEENARVSQAAEKAADDRLLDLLLPAAPGAESRESTREKLRNLWRLGHLDDREVEFDVQEQSMQGIDLFAMPGMEQIGQQMRD

SEQ ID NO: 104435 - protein, 109 aa, Unknown
  Obtained from environmental sample
  misc_feature (1)..(109): Xaa is any amino acid
GLTAIEKFEKLSDTVGYGIILYSACDVGSKNEKGASLKPRARQNVIFEHGYLIGKLGRNKVAALYKDEVELPSDIDRVLYIPYDKANWKIDIARELKNVGYTVDMNLVV

SEQ ID NO: 104436 - protein, 63 aa, Unknown
  Obtained from environmental sample
  misc_feature (1)..(63): Xaa is any amino acid
MKMLRGAEKIIKQNKPKLAICAYHKVNDIFDFVEYLGGIVPEYKFRLRHHSYNSTETVLYCNV

SEQ ID NO: 104437 - protein, 58 aa, Unknown
  Obtained from environmental sample
  misc_feature (1)..(58): Xaa is any amino acid
VVKKKKIMIKKLLIIGANGQIGSELTVAFRKIYGNANVVATDLNPAFKAEIAEHGPID

SEQ ID NO: 104438 - protein, 82 aa, Unknown
  Obtained from environmental sample
  misc_feature (1)..(82): Xaa is any amino acid
MVTVISLGGSIVAPVGADAQFLKEFAELVRGLLEEDKERRFIFVVGGGGPARVWQNAYRTVCGDSVSNDEADWIGIMATRLN

SEQ ID NO: 104439 - protein, 133 aa, Unknown
  Obtained from environmental sample
  DOMAIN (5)...(127): PIN domain
  misc_feature (1)..(133): Xaa is any amino acid
MGARYILDTNIIIYYLKGQMPSNTAAFIEKKLFLENPNLSVITEIELLGWKKASEGQIEILKDFVKNSNVLELDENIKNKAIEIKRNYKIKLPDAVIAATALVYDLELITRNVKDFESIVELKTKNPWDLQEE

SEQ ID NO: 104440 - protein, 143 aa, Unknown
  Obtained from environmental sample
  DOMAIN (5)...(143): Nitroreductase family
  misc_feature (1)..(143): Xaa is any amino acid
MNAIIENRQSIRQFKKNPVTRQQLDQLLAAAMHAPSACNTRPWEFIAVTKRETLDEIVRVHPYAGMCVTAAAAIIVVAIPQADPNGPIGFFPQDCAAATQNILLEAVSMGLGCCWCGVYPREERIVSIRKLFNLKEPKIPLTS

SEQ ID NO: 104441 - protein, 64 aa, Unknown
  Obtained from environmental sample
  misc_feature (1)..(64): Xaa is any amino acid
GAGGAGGGGGGGSLGDGADGAAAAGIAGAHGTLGSGGAGATKGDGTQITSGKGGDGICILEWFA

SEQ ID NO: 104442 - protein, 197 aa, Unknown
  Obtained from environmental sample
  misc_feature (1)..(197): Xaa is any amino acid
EKDLLAESRNAPDASLKKLTLVDEMINLASNYMAVNGVSQAVLKVKNEASLDDARKSLYKAVMYLEEVVSNYIDAPFSDYEDKLAAIESFDQNYRYQLVRKMGLAVDMIEQAYGDNSKWRWTFVELVGRFATTTKNLLDLRNVIANSSPQSPFYDSTVYHLRLVKKLLTQAADRYREKYELSTGQMQDFKLGINFLG

SEQ ID NO: 104443 - protein, 165 aa, Unknown
  Obtained from environmental sample
  DOMAIN (46)...(74): The GLUG motif
  misc_feature (1)..(165): Xaa is any amino acid
IAGWNYGKFENSYNTGTVTGNTQMGGITGLNNGEIENNYNTGAVSGSQQIGGIAGTNSNTGKYIKNCYNTGDITATAAANTRAGGIAGDNLTSATVEYCYNTGNVSGANLAGGIVGYNDTGCNVRYCVSLSARVGSGSTTISRVVGTNSGNLTNNKARADMKVGV

SEQ ID NO: 104444 - protein, 239 aa, Unknown
  Obtained from environmental sample
  misc_feature (1)..(239): Xaa is any amino acid
EAAHSGYEHLTYRLDPMRDWMPDMNDVELKVKYNDSIAGILLINPDNPTGAVYPVDILLEFVQIARKYGLFIVCDETYANIVYGGAKTSSLSRIIADVPGIALRSISKEVPWPGARCGWVEVYNRKADPSFDAYIKSLLDAKRLEVCSTSLPQLCIPAILGDPRYARHLETRAAMFEKRSDEAEEAFMGIPGIHMKKPKGAFYATAVFEDTLNENADKRSLSVRDSGLRDYIRAETANQ

SEQ ID NO: 104445 - protein, 273 aa, Unknown
  Obtained from environmental sample
  DOMAIN (2)...(190): Type II/IV secretion system protein
  misc_feature (1)..(273): Xaa is any amino acid
FGSRYVAMRLLYDNPGEGIKTEQEFGEYEQRLLMRLRAFPTGLVVVAGPTSSGKSTTLVRNMSMMLKERNYEINLITVEDPAEQKIFGAHQMPVVNTYNEEQREEKFTEALAAALRSDPDTLMVGEIRTLSAAQLTVKGALSGHNVWTTLHANSAMAALTRLLDMGVEGFKLKDETMMRGLVSMRLFKKLCPHCRERLLNNPSHPAYNRVYDAFGEVGLRQVYIRGAGCDECKGAGTIGRIKAGEIIITDSEFLRLALGGDTNGAVRHWLESL

SEQ ID NO: 104446 - protein, 100 aa, Unknown
  Obtained from environmental sample
  misc_feature (1)..(100): Xaa is any amino acid
GKLKSEFPFRSLLLTGEKELFINGTIDLLFEDAETVYVIDFKTDSQELPWEHIAQMACYYKAASDLFAVPANKKCRIWLYYLRTGHAVDVTMKAKSFDFR

SEQ ID NO: 104447 - protein, 234 aa, Unknown
  Obtained from environmental sample
  misc_feature (1)..(234): Xaa is any amino acid
SQEYLAKVFGVNWQDEYYVWDCAAGTGNLLVGLINKYNIWASTLDNQDIGVMKDRIKNGANLLENHVFQFDFLNDEFDKLPEGLKQIIDDPEKRKKLIVYINPPYAEVSSKNITGKVGVNLSKMHEKYSLLLGTAGRELFAQFNMRIYSEIQGCKIGEFSTLKILTGPAFEDFRKNFCAKILKCFIMPAYTFDNVNGKFPTGFKIWDTDIKETFSKIKSDIYDKDNIYIGEKTS

SEQ ID NO: 104448 - protein, 171 aa, Unknown
  Obtained from environmental sample
  DOMAIN (1)...(164): Homoserine dehydrogenase
  misc_feature (1)..(171): Xaa is any amino acid
FDGSKPFFALVREAKAKGYTEPDPRDDLNAMDAARKALILAREIGLSMEFSDVKIESILPPSCFKAKDVEAFFKELEKSDEDFEKKRAQAASQGKALRYIAVVEDGKAKLSLRSEEEGSPFRSLTDSDNIVVITTERYSKLPMVIKGPGAGAQVTAGGIFADIVRTARTLV

SEQ ID NO: 104449 - protein, 139 aa, Unknown
  Obtained from environmental sample
  DOMAIN (3)...(139): Transaldolase
  misc_feature (1)..(139): Xaa is any amino acid
MIEFMLDTANINAISRLVDTYPIAGITSNPSILKSEGKIDFFPHMKEIRKIIGIERSLHIQVIASDFEGIVKDAETILRNIDDRVYVKNPFTSEGLKAMGHLKSRGIHITATSIYTQFQGLMAVVLGVDYPGALLQSHG

SEQ ID NO: 104450 - protein, 108 aa, Unknown
  Obtained from environmental sample
  misc_feature (1)..(108): Xaa is any amino acid
MFYRGGKELLIGGHILENIVFLELFRRGYKIWTGAIRGYEIDFVVKNKSGEIEYYQVAWEISNPATADREFKSLESIKDNFPKYLLTTESFPQSRNGIKHINVFEWLL

SEQ ID NO: 104451 - protein, 86 aa, Unknown
  Obtained from environmental sample
  misc_feature (1)..(86): Xaa is any amino acid
MANDQKQIRVVLRNCGVIDPESIDEYIARDGYVGLEKVLFDWTSEQIIEEMKVSGLRGRGGAGFPTWLKWDLARKAAGDEKYVICN

SEQ ID NO: 104452 - protein, 155 aa, Unknown
  Obtained from environmental sample
  DOMAIN (2)...(155): Semialdehyde dehydrogenase, dimerisation domain
  misc_feature (1)..(155): Xaa is any amino acid
VYEKLIDLDKIIVDGLSGTVGAGDDLDLALHHPEIDNNILPYNVVEHRHTYEIEQELSLLAKNKVTINFSSCYIPISRGILTINHCFPVKQLNRKNLLDLYKDFYKDEYFIKIIDIPKDKNASWNYLPYPWVATVSATNFCHIGLDIDEKRNFGL

SEQ ID NO: 104453 - protein, 55 aa, Unknown
  Obtained from environmental sample
  misc_feature (1)..(55): Xaa is any amino acid
ASPDSDYDVRFVYLRETNFYLKLENTRDVIEWQLDKTLDINGWDAKGPAPALFQF

SEQ ID NO: 104454 - protein, 124 aa, Unknown
  Obtained from environmental sample
  misc_feature (1)..(124): Xaa is any amino acid
ITKNEKHLKLAQYFIDQRGQKPLFFEEEERRNNNNFYWKDSFFRYQYYQAGKPVRDQHIAEGHAVRAAYLYSGMADIARLTGDAALMKACDDLWNNIVNRQMYITGSIGQSAYGESFFYDYDLP

SEQ ID NO: 104455 - protein, 102 aa, Unknown
  Obtained from environmental sample
  misc_feature (1)..(102): Xaa is any amino acid
VEDDQLSVAIGKRGQNVRLAAKLTGWNIDVRSDTEKRQLAVDSMGSALPEPEQASQEVYPAVSTLLEDFGGMEGLDEQIAADLANAGFLDAKSLYTVTVEQL

SEQ ID NO: 104456 - protein, 167 aa, Unknown
  Obtained from environmental sample
  DOMAIN (74)...(107): Tetratricopeptide repeat
  misc_feature (1)..(167): Xaa is any amino acid
LLLERSQLKDPEDETAKNIIAELQGIVFPSHLSGKTIIELREQNEIAADLAEQGKIDESIAKIQQILEVYPEHYSAFYTLGMISFGQGNIPEALERFKEAFEFNPFFTDAISRIFDCCVCLGNTCVIEELLNKALVLQPEDPELLETKQPFEKWHLSKAACRTHQSA

SEQ ID NO: 104457 - protein, 138 aa, Unknown
  Obtained from environmental sample
  DOMAIN (1)...(136): Sigma-54 interaction domain
  misc_feature (1)..(138): Xaa is any amino acid
DASRRKDGPFVAINCAALPDTLLESELFGYMEGAFTGTAKGGKIGLFELAHGGTLFLDEISEIPVSVQSKLLRALQEKEIRRIGGDKVIAVDVRVISATNSDLNERVARGLFRRDLLYRLNVFNLSLPPLRIRKEDMP

SEQ ID NO: 104458 - protein, 99 aa, Unknown
  Obtained from environmental sample
  misc_feature (1)..(99): Xaa is any amino acid
MNFNNLDKTSAYRQLAEKAAAGKEFNFKGLLTPDRVKQCEVPLAEGLVFNWAAKAVDEKILDALQALADEQELILKYRALLEGETMNTGQGRKVLHQLL

SEQ ID NO: 104459 - protein, 194 aa, Unknown
  Obtained from environmental sample
  DOMAIN (2)...(186): Polyprenyl synthetase
  misc_feature (1)..(194): Xaa is any amino acid
MVLSAECVAGESGGEAALSLTPLVEFPHNASLIHDDIEDNSDERRGKPAVHIAYGTDAAINTGAFMYFLPLACLSAWNGDPQIKEQIWAVWARHMRALHLGQAMDIAWHRDFTSMPSLDEYDRMCRLKTGCLARLAAVLGVIVAGLKAAGAASPKEIAILADAFGDAAEQLGVGFQILDNVKNFKHRESWAKNA

SEQ ID NO: 104460 - protein, 195 aa, Unknown
  Obtained from environmental sample
  misc_feature (1)..(195): Xaa is any amino acid
GVQDNAYIFWDLYPQFIRDNFTKVFTEGLKDRENGRLLEEDWIDVFRRLQETIFPCPYCGADIVYDIDLLKKKGLISCWKPKCQGYGQKLPIPPRLRIKTGNRERFVVLNADTKLYHYQMVKSEPDLVKGGAIAGEMAQNPNDPTKWGLRNKTSENWQFITDSGESRDVNPEKALSLTASIKEIDFKTAQAEIKI

SEQ ID NO: 104461 - protein, 124 aa, Unknown
  Obtained from environmental sample
  DOMAIN (1)...(95): ABC transporter
  misc_feature (1)..(124): Xaa is any amino acid
LISRYDIDGATGTNSAATLSGGNLQKLVLAREIDQFRDYFVFSEPTWSLDIIAGGFVWSEIAALREKGAAIILISTNLDEILALADRIIVMFRGGAIAEFDNFVDNDIKEKIGNCMQGLLPKSK

SEQ ID NO: 104462 - protein, 226 aa, Unknown
  Obtained from environmental sample
  DOMAIN (14)...(64): Clp amino terminal domain
  misc_feature (1)..(226): Xaa is any amino acid
MKISGPVRTIITQAYNIAKARNHEYLTPEHILYAALDSKEIQVILEACGAKIDQLRHDLEVYFKQKIHVIAGAEPIQTVHFQSVIERAVINSQAAQKETLEASDILVSLYEEEKNYCAYYLQQAGVKRYDLLSIISYGQETTGFDLGKNNRRHVVEGEDLKDVLSDEDTADPASKTRGNKKTALEKYAVELTSMAREKRLEPVIGRESELDRTIQVLCRRLKNNPV

SEQ ID NO: 104463 - protein, 71 aa, Unknown
  Obtained from environmental sample
  misc_feature (1)..(71): Xaa is any amino acid
AIEEALSETQECFVCGTAAGATPITSLTYNKKKVTFNKGKVGDFTAEIRDTIKGIQYGLIPDTKGWLKKVI

SEQ ID NO: 104464 - protein, 76 aa, Unknown
  Obtained from environmental sample
  misc_feature (1)..(76): Xaa is any amino acid
MRQAKLFKNGQSQVGRLPKEFRFNGERVGMKKIGPAVVLFPLDNPWESLIEALGRFSPDFLAERNQPPDQILENLQ

SEQ ID NO: 104465 - protein, 85 aa, Unknown
  Obtained from environmental sample
  DOMAIN (23)...(61): WD domain, G-beta repeat
  misc_feature (1)..(85): Xaa is any amino acid
MAKKFICVLVVLAVLLAEIVAQDFAVFPQLGHSEGVNSVAFSPDNKIVVSGSNDKTIKLWDTGTGREIRTLSGHSDSVNSITFSH

SEQ ID NO: 104466 - protein, 171 aa, Unknown
  Obtained from environmental sample
  DOMAIN (46)...(171): Glycosyl hydrolase family 3 C terminal domain
  misc_feature (1)..(171): Xaa is any amino acid
DESILNKTALRLVELILKSQENLKDNYQYDKAAHHALASKVALESAVLLKNDGDVLPVKQGQSLAVIGAFAKTPRYQGAGSSKIVSNKLDNAYDAFKAAGVSFDYAQGYVGVNPDAALIEEAVKVAKGKDKVVIFAGLPDEYESEGFDRASFDMPPSHNKLIEAVAAVNPN

SEQ ID NO: 104467 - protein, 252 aa, Unknown
  Obtained from environmental sample
  misc_feature (1)..(252): Xaa is any amino acid
SELDLTDYRNLHKSYFYRAVIIVIDATKAFAKRYADMAYTMAQTESDETRRAELEEMGRILNKVPYEKAESFYEAVQSLWLVHLCLQIESNGHSLSYGRMDQYLCPYYEKDLAAGIITEDAACELLVNLWLKTFTINKIRSWTHTEFSAGSPLYQNVTVGGQFLDAKGEPHDAVNPVTHVILRSVAQCRLPQPNLTVRYHRGLSDAFMAECVDLVRLGFGMPAFNSDEVIIPSFMEKGVKKEDAYDYSAIGC

SEQ ID NO: 104468 - protein, 78 aa, Unknown
  Obtained from environmental sample
  misc_feature (1)..(78): Xaa is any amino acid
SKEEDRQKLISLVRAFFNGLEGFHVQFNVVSRETLLDAQAHPEKHRDLIVRVAGYSAFFNVLSKETQDDIIGRTEQTL

SEQ ID NO: 104469 - protein, 108 aa, Unknown
  Obtained from environmental sample
  DOMAIN (1)...(104): Triosephosphate isomerase
  misc_feature (1)..(108): Xaa is any amino acid
EDKVEAVCKSQTEKGLSGVTAQELSRITIAYEPVWAIGTGKTATPDDAQKVHKFVRGVIEKLYGEQAAKQVVIQYGGSVKPENAAQLMAMPDIDGALVGGASLKTGNL

SEQ ID NO: 104470 - protein, 133 aa, Unknown
  Obtained from environmental sample
  DOMAIN (1)...(89): Sigma-54 interaction domain
  misc_feature (1)..(133): Xaa is any amino acid
DVRVIATTNRNLKAWAESGRFRSDLYYRLNVIPFFLPPLKERLDDLPLLADHFRRKYARLNNKQVTGLSPEALARLESYDWPGNIRELENTVARGVLLAAGPEVTPGDLFMDEAGFMAALERGQPAEPRVPAV

SEQ ID NO: 104471 - protein, 134 aa, Unknown
  Obtained from environmental sample
  DOMAIN (2)...(109): Thiamin pyrophosphokinase, catalytic domain
  misc_feature (1)..(134): Xaa is any amino acid
GNEPLIVAADSGLLLAERAGIVPDWIIGDMDSLGEEAENRLAAYQPEKIRAFPRDKDFTDTELAFSLLLEKDCERIWIIGGGGGRIDQLFGIRSLFERDTPPERWVTSREDIRYVEARPDGLSGLKAQSEGLVS

SEQ ID NO: 104472 - protein, 79 aa, Unknown
  Obtained from environmental sample
  DOMAIN (8)...(79): HEPN domain
  misc_feature (1)..(79): Xaa is any amino acid
MKDKIAVLKQWRHKAVLDLKAINILLKTKTAPRSIIAFHCQQALEKYLKAFLFFNKIIFSNTHDLDLLLGLCLQKDNAF

SEQ ID NO: 104473 - protein, 68 aa, Unknown
  Obtained from environmental sample
  misc_feature (1)..(68): Xaa is any amino acid
YSGEVYAKTEGENYKRLFYGNNKLNGYILIGGVERAGIYTSLIRESKPLDTIDFKQVCEKPELIAFVR

SEQ ID NO: 104474 - protein, 142 aa, Unknown
  Obtained from environmental sample
  misc_feature (1)..(142): Xaa is any amino acid
VLELAGGVSPAGWMGRVQVERFEENKHHTVLDADASESLPDFIIKDGDLVKVFPILSMDINTVYLSGNVLRPGKYGYKNGMRVRDIIIDHKDLLPETYFEYAVILRKTYPSYLNRIVPFNLGKALSDAASADNMRLEEQDEI

SEQ ID NO: 104475 - protein, 209 aa, Unknown
  Obtained from environmental sample
  DOMAIN (6)...(148): NAD binding domain of 6-phosphogluconate dehydrogenase
  misc_feature (1)..(209): Xaa is any amino acid
LLAIKDCTFGIVGLGLMGGAIAKALRNNCGVTQDKLFACNRSKETLEMARLAGLIDRGYDVSQAGEMLSSCDVVFLCLNPSAIIDFLKQWASAFKSGSIVTDIAGTKKRIAAIAEKFRGDVDFIPGHPMAGAEKSGFANSGLCDFRGKNYILTPISRNKSENLDFLKDIITRMGFARITQVTPEEHDRKIAFTSQLCHVIAAALIDCET

SEQ ID NO: 104476 - protein, 98 aa, Unknown
  Obtained from environmental sample
  misc_feature (1)..(98): Xaa is any amino acid
MTAFLDLFSGIGGFALAAYWAGLRFDKHYFLEIEPYAVELYKKRFPEAEYLGDIKNVDYSKLPRGEWLVTGGFPCQPHSVAERKEPPKTSAIYGLNVR

SEQ ID NO: 104477 - protein, 140 aa, Unknown
  Obtained from environmental sample
  misc_feature (1)..(140): Xaa is any amino acid
EAEARDIALDLESTGLPFMLFPCWGSVPYRELSRLSAVFGERVKALSELVQEGQGDPSPNVVIIPQRALVNPLPPPEYIKSLLIQVSVGGKIDTSGLAKTLVIYGYTRVPRVQSQGEFALRGEVLDIFMGADDYAYRILF

SEQ ID NO: 104478 - protein, 215 aa, Unknown
  Obtained from environmental sample
  DOMAIN (49)...(215): Peptidase family M28
  misc_feature (1)..(215): Xaa is any amino acid
VTILSLHIEKLGLNSVVIPIEGNSHFFVFPKGKNIKPSTGGSFPFRKQSPVILTAHYDRVPDSPGANDNSAAVFQLLKTALRLGGQNVDNWIIIFTDKEELQNGEGIQKQGSFSLAKKLRALGLSNARIFNFDACGTGDTFVLSSTVDYLLKKNKSSGFLRASQTINNLREKALNTARFLHFNKILLAPTPFSDDAGFLQGGIPVQTITMLPAVK

SEQ ID NO: 104479 - protein, 80 aa, Unknown
  Obtained from environmental sample
  misc_feature (1)..(80): Xaa is any amino acid
VAKKKKKELGGASSEWLTTYSDMVTLMLCFFVALFNPDDVDPTQLQALISNFTNLGLGAQSGGNTLSAGKSADLGNTINS

SEQ ID NO: 104480 - protein, 153 aa, Unknown
  Obtained from environmental sample
  misc_feature (1)..(153): Xaa is any amino acid
MGEVAWLYLPRMKNKPPYARILAGGLAVPKEPLSPKNDFVFKLLFGEPTRLNIQKAFLQAVLDLPAEEYAHLVIVDPHLHRESPDDKLGVLDVKIHTTTGQVIDVEIQVKPHRHIWERILFYAARLTTEQMKAGLSYKEIKKAVSIIIVDGDI

SEQ ID NO: 104481 - protein, 46 aa, Unknown
  Obtained from environmental sample
  misc_feature (1)..(46): Xaa is any amino acid
KKAGEKVHFGGLLGWSKIMPVADYEEAGAFIDLGGRIPGPIHSLKN

SEQ ID NO: 104482 - protein, 240 aa, Unknown
  Obtained from environmental sample
  misc_feature (1)..(240): Xaa is any amino acid
AADAYSRAMLFNLDDVIKGEDIGSGANTDSKEGLSVRCVQDTTASSSTTPPPEPPAQSSAPSDNPPAKLKPTNKSEPQESSPTASVSMNQPSSKKANASDISGSGDGGGVDDMLGGLMGGGGSGLENKKKDELKVSSPDFLKGGALTGGRSRASIQRVVMQNMAAVRYEYSKRLREKPGLTGKIMVKFAIDEFGRVTFANVVESTMSDSELEQKVLSRVRSWNFEKIDKPGDITEVTYPF

SEQ ID NO: 104483 - protein, 239 aa, Unknown
  Obtained from environmental sample
  DOMAIN (152)...(228): Helicase conserved C-terminal domain
  misc_feature (1)..(239): Xaa is any amino acid
MLHTGILPNHPKWEKLFSGLAVVVIDEMHSYRGVFGSHLANVLRRLKRIAAYYGARPVFILSSATIANPAELAEQLIGEDVTLITENGAPQAGREFILWNPPLVDQAQGIRRGVVLEAVRVTAALLRQNIQTIVFARSRIHVELIASYLKKRLPRLAGSIASYRGGYLPSERRRIERDIRSGDIRCVVATNALELGIDIGQLEAAVMAGYPGSVSSLLQRSGRAGRRDKASLAILIASS

SEQ ID NO: 104484 - protein, 188 aa, Unknown
  Obtained from environmental sample
  misc_feature (1)..(188): Xaa is any amino acid
GVPAELLEGLEGRLKNAEEELEEIENEKNKLRDESQAALYRLGSILLMGLAAEDIKSRLVSTSSVYILSGWIPADMINQTAADLSKATQGRTAIRIYVPDEIPEVQDGSEKVPVSMKHNKFVKGFEGVIFSYGAPLYGTIDPTPLVAIFFTLLFGIMFGDLGQGVVLLLLGIVAGKFRRLAGLKSYSI

SEQ ID NO: 104485 - protein, 236 aa, Unknown
  Obtained from environmental sample
  misc_feature (1)..(236): Xaa is any amino acid
VSVRVNDFSKRLGTGWAFFIEAQRFCLQDYPRDLRFSSTFDSLAPYLIEKEREKSFTAAGRHFDSCYYLTIVWKPPSDSAKKLTRMFVSGPSGGKGESTLQENVELFVAETDSVMGILLNGILIAPLNNEETVEYLHSSVSFHNHRIRFPNNLINLNRILCDSELQASETMKLGDHYIPIIGINDFPHETYPAIFEALNRTRIEYRWVTRYICLSKEEGKAETQKKEKSHRGSQDS

SEQ ID NO: 104486 - protein, 59 aa, Unknown
  Obtained from environmental sample
  misc_feature (1)..(59): Xaa is any amino acid
MDAGDIEGYNREAATHMAVAAAVQGGGADAGMGIASAAKALGLDFIPLGEEEYDFAVLP

SEQ ID NO: 104487 - protein, 220 aa, Unknown
  Obtained from environmental sample
  misc_feature (1)..(220): Xaa is any amino acid
TLLLYPDIAYNDAITIAAFSDIIEAGMTVRFEISRDSVISAFDRGLTAAAIIELLQRLSHNRINENLSFTLRDWEKRHGEVTLRRGVVLTLSPEQRHLAETKSLARFITETLAPGIYMLSESSEDRVVQALNKAGVAIIARRKENGDDMIHDGESSAGPLRSFFLPFHASLHAAKSVSPDGATPRGSPEKSLSSILIESFHSILGKVRPKGEERDEMAAR

SEQ ID NO: 104488 - protein, 197 aa, Unknown
  Obtained from environmental sample
  DOMAIN (7)...(197): FGGY family of carbohydrate kinases, N-terminal domain
  misc_feature (1)..(197): Xaa is any amino acid
MGEREPLILTFDLGTQSVRALLVNAKGAIIHKVQKMFEPPYYSKQPGWAEQKPEYYWESLCETSRELKKKAGPLWQDIIAVTSATIRDTCLCLDKNHNPLRDIILWLDDRKAENLPPLPSLTGMIFSLIGMNDGLALQRRISHCNWIVMNEPEIWEKTDKFVFVSTWLNYKFCGSLADSTASIIGHIPFDYKNRVLA

SEQ ID NO: 104489 - protein, 137 aa, Unknown
  Obtained from environmental sample
  DOMAIN (4)...(137): NAD dependent epimerase/dehydratase family
  misc_feature (1)..(137): Xaa is any amino acid
MKKALITGITGQDGAYLARLLLDKGYEVHGIKRRSSLFNTQRLDAIYQDIHAQDKHFFLHYGDLTDSTNLIGLVQQVQPDEIYNLGAQSHVRVSFDVPEYTADVDALGTLRVLEAVRLLGLAQKTRIYQASTSELFG

SEQ ID NO: 104490 - protein, 150 aa, Unknown
  Obtained from environmental sample
  misc_feature (1)..(150): Xaa is any amino acid
MAISTVEIEKFLVFKDKFSADFCNGVNIFIGANGSGKTTLMKVMNAACIQIKVYECDNQPLSKYFDSSEHISDVSINNGIIQIRFNNPSEKISDNHIRFIINNNEGIWAKEGIDTTASSTFKSPAIYIPPEDMLSHSKGFLALTNERKMP

SEQ ID NO: 104491 - protein, 204 aa, Unknown
  Obtained from environmental sample
  DOMAIN (27)...(141): Response regulator receiver domain
  misc_feature (1)..(204): Xaa is any amino acid
FIFKIQAKRGAEEKRGLLAPDINLKNVRILIVDDDPDILAYFLDITQRYGALCETAASGEEALKLIDKNGGYHIYFIDWKMPGMDGIELAHEIKARVSENSIVTMISAGEWSTISEDAKAAGVDKFLPKPLFPSAIAEIIDECLGDDKQQAEETQFTDIDGIFEGRRILLAEDVDINREIVQALLEPTKLDIDCAENGLECRPG

SEQ ID NO: 104492 - protein, 221 aa, Unknown
  Obtained from environmental sample
  misc_feature (1)..(221): Xaa is any amino acid
IKADTMEELLHPDVLQAVDNLSAYLMENVPDVGKVVGFTDIIKRINQVFNIGESPEGLRKTVSNNATDSFGFDDTDNFGFDSFGFNDFSTNDVKYTEISRQENNFSISKYNTEDILRFLDSAAVKSPRLSGSELVRELKRLTNYDGMAYYEIPSNPKRYGKETKVELQRLIANYLVLLAGDEDSGYSNDPLEPTAIRIMVQMRTTGSRDSKAVIDIVNNYI

SEQ ID NO: 104493 - protein, 62 aa, Unknown
  Obtained from environmental sample
  misc_feature (1)..(62): Xaa is any amino acid
MKTDLLNGNITKSLLVFAIPMLLSNIFQQLYNTVDMVIVGHYLGETALASVGACSVIFELLF

SEQ ID NO: 104494 - protein, 69 aa, Unknown
  Obtained from environmental sample
  misc_feature (1)..(69): Xaa is any amino acid
VKKTESKVKAKTVSKKVAVKTKAKSAVKKTEPKAKAKTAAKKAEPKAKEKTAAKKDKPKAKAKTGKKKR

SEQ ID NO: 104495 - protein, 153 aa, Unknown
  Obtained from environmental sample
  DOMAIN (27)...(126): Alpha amylase, C-terminal all-beta domain
  misc_feature (1)..(153): Xaa is any amino acid
GVQDLKVAVGRYPPLYELDFVQEGFQWVDCTDWEKSVIAFLRKGVAKGEYVLAVMNFTPVPRGHYRVGVPQGGYWTEILNSDSVVYGGSGVGNSGGMGAEPVPCHGQSWSLPLVLPPLAIVVFHSAHNSAQDSTQSVANSEKRDGGITYVTLR

SEQ ID NO: 104496 - protein, 135 aa, Unknown
  Obtained from environmental sample
  misc_feature (1)..(135): Xaa is any amino acid
MIVNNGKLSSFITRFSFLNGFKESGKDTVFIAIASFLTILVMLIPTGFEGSGVYANTARVKVRVVEVNNERLKIIGPVRQGEQQLEVEILSKPFKGQIHYTSNNMIGKMELDKIFVKDNIAFAVLNLTEDKKIAS

SEQ ID NO: 104497 - protein, 248 aa, Unknown
  Obtained from environmental sample
  misc_feature (1)..(248): Xaa is any amino acid
MNTNNYRAKFLDAAITQATYQGKIWGVPVNNVAVGTIFYNKEIFNKYRLAVPATISELETVCDTLKKNNIFPFALANKTQWTGSMYYMCLATRRGGIQPFIKAVDGSGTFLDPAFIYAGEKIQEWVKKGYFITGFNGLDWDAGQARATIYRGEAAMVLMGSWFNMQALNESPIFHAKMGFFKFPRDEQGSGNPDTAFGTIGDNFYHVSASSKNQAKAFELITCLIDDVAVKDAIDDGRIPPVKGVKLT

SEQ ID NO: 104498 - protein, 132 aa, Unknown
  Obtained from environmental sample
  misc_feature (1)..(132): Xaa is any amino acid
MTQQAFSLSRQKIKWEAFREMFDFTVTTFYKINEPLRWNGYRVSGVDGSKLALPDDESLLKYFGGFGTNKESPTAQGSMLYDLLNDVVMHALIDPVKTGEQARAHIQHLQGLENFQAGKELVILTAVTRQKS

SEQ ID NO: 104499 - protein, 124 aa, Unknown
  Obtained from environmental sample
  misc_feature (1)..(124): Xaa is any amino acid
MDKKIDYLMRVRTKFSKAADALGLGDHRIELEHGKKRIPVRVIKLALDSKETETLITSLTDAKYGVEDFKWLYFKRWPVETKYDVIKKKLEIENFSGKLADNIRQDFYATMTLANIAADFYREA

SEQ ID NO: 104500 - protein, 138 aa, Unknown
  Obtained from environmental sample
  DOMAIN (60)...(104): Bacterial regulatory helix-turn-helix proteins, AraC family
  misc_feature (1)..(138): Xaa is any amino acid
VNNRLFRQALTYVYDHIEEPFSIDDLAGALQVSRDTLEREFFRVADTTPSRLVRRLRGELALRTLQDRNQSVLQAALASGYADHAAFSRSFRRMFGFPPSAARTRRMIQRDLQHVELAEPDICELRALELQCVTQTGS

SEQ ID NO: 104501 - protein, 291 aa, Unknown
  Obtained from environmental sample
  misc_feature (1)..(291): Xaa is any amino acid
ETEDGEETRICALNPEHKQTRPIPAAGNTRDPGTEGLSFSIINGNAYSVSRGTAASSEVRIPACHLNNATGEYLPVTSIGDNAFRDYSSLTGITIPDCVTSIGGMAFQGCSSLTSITIPDSVTSIGGMAFQGCSSLADISLPAGIPSIGYGAFGNTAWLNNQPDGLVYINKVLYAYKGTMSANTVIDNIQEDTISIAIGAFYGFARLTGITIPEGVKFIGATAFADCSGLTVINLPAGVMSIGNGAFYGCARLPSITIPAGVTSIGDYAFSDCSGLTVINLPAGVMTIGRW

SEQ ID NO: 104502 - protein, 204 aa, Unknown
  Obtained from environmental sample
  DOMAIN (22)...(117): Histidine kinase-, DNA gyrase B-, and HSP90-like ATPase
  misc_feature (1)..(204): Xaa is any amino acid
MSSTPRIRILPDHVANQIAAGEVVERPASVLKELVENALDAGATSIDVAWEEGGRKLLEVADDGCGMARDDLYLALERHATSKIASADDLSSLASYGFRGEALPSIGSVARLDLHSSQSDGDGNVLRCEFGAIRDVRPMPRAKGTTVTVRDIFMQLPARKRFLKTADTEHAHLWATVTRLALAAPHVRWIIRSDRSGELILPKV

SEQ ID NO: 104503 - protein, 227 aa, Unknown
  Obtained from environmental sample
  misc_feature (1)..(227): Xaa is any amino acid
MARIAAEGTQLSTGQYKTVKMVCTARDRMSIVQGDAGTGKTFAMTTAKTILAAEGITVRGFAPTGKAAEELNAVGVKSMTIHSYLESPNAQAEAGTGEVWLVDEAGMIGSRRLDDFLKKAAEKQARVILIGDINQFQSVEQGHIFQSLQDMRVVRKTEIKEVKRQKTKYTQNIVKAIKDDDFDTAFRELDQQNALKEIAERDDRIEYIVHEYIEDAENKTKSVVLTA

SEQ ID NO: 104504 - protein, 70 aa, Unknown
  Obtained from environmental sample
  misc_feature (1)..(70): Xaa is any amino acid
MEPPKPFIKWAGGKSQLLTQFERYYPTDLKKGTINKYVEPFLGGGAIYFSISEKYKIKTACLSDLNRDLI

SEQ ID NO: 104505 - protein, 267 aa, Unknown
  Obtained from environmental sample
  DOMAIN (5)...(264): DNA polymerase III, delta subunit
  misc_feature (1)..(267): Xaa is any amino acid
FPNAYIFLGPELGKKQDEVDSIKQKLTDAETTVFYAGETPVSAIADTIQNESLFFDKRLIIIKNAEMLKKKDEIELLVSCMENIDHNTTVILLSDEKKLAAALDDAVPKNNRKIFYELFEREKNEWLRLFFKREGFNIDKDCIAVILEMVENNTEALRRECSRLVCFLPRSKEQGESQVKVEDVEKWLSHNREESAFTLFSRIAAGDLSKALESLSVMLAAKESAQSILAGLAWCFRKLGDYLSLLETGDANNSFELKKIGLSAPQT

SEQ ID NO: 104506 - protein, 271 aa, Unknown
  Obtained from environmental sample
  DOMAIN (75)...(265): Peptidase family M48
  misc_feature (1)..(271): Xaa is any amino acid
MNATEDSKNVLSNLKTDEYEHAGEKELQKSLNNNAVIQKLFALISEYGVERMSMLQSIASSIEVKPTNLPELDKIKTEICKILDVNIPPRMYIEQNPQINAFALGINNPMVVLNTGTLEKLTKEELYFIIGHEIGHIKSQHTRYGFLHMTLPVLRSLIPIAGTLISSGIELLLFRFDRIAEFTADRAGLLACQNLDTATHALMKISGYPTEYYSTMNKEDYIKQFEDFRDFNYTVVNKVVNLLAGLYSTHPWSVLRGKELYDWVNNKDYDN

SEQ ID NO: 104507 - protein, 227 aa, Unknown
  Obtained from environmental sample
  misc_feature (1)..(227): Xaa is any amino acid
LGLASDDEFIEALKRAIDIELVNDNAAAGAVLPEKTPAVAGQTETAPAQKAPPATGQTALSEKAASDGSYENEYLRESARLAELAEKAFDEGDYDASAKYAEEAALSAKQSDVYVAITTAKHYIEQAVSSGVSTRFSPEYREAENWYSQSLSARDKEEWDTAIASAKMVVELLEGLDASGPAIPQPQPGVLPATYTVREWAVSKDCFWNIAGFPWVYGDPHKWRVLY

SEQ ID NO: 104508 - protein, 64 aa, Unknown
  Obtained from environmental sample
  misc_feature (1)..(64): Xaa is any amino acid
MAFKTLNMKVFAAGDSFNDLAMIREAHEGCLFLAPEKIKLENPNIPSTETYEELLERIDRFLES

SEQ ID NO: 104509 - protein, 235 aa, Unknown
  Obtained from environmental sample
  misc_feature (1)..(235): Xaa is any amino acid
MDNMVFSIKGDITAHDTEISFDSAEMAASREGRGAFDSEGKKVSTITDINIRTGRRVEFFWPSVDFPIIQANADMGTEINVTSDTMAKRFTLNGDVKLRSGEIFYLERNFYIREGTLVFRENEVDFDPKISARAEIRDQANIGPVTISMIIDEAPLRSFTPRFVSTPPLSQLEIYSLLGQSQGDGDQRNLVASVAMDSLAQFTVINRLQRQVRNFLGLDMLSMRTQLLQNVVVQA

SEQ ID NO: 104510 - protein, 250 aa, Unknown
  Obtained from environmental sample
  DOMAIN (1)...(246): Glycosyl hydrolase family 9
  misc_feature (1)..(250): Xaa is any amino acid
LCHFADNDGGEKEGSRPIAKNPNDGVMASFAAATLAVMSKIYREYDAAYADTCLNHAKLAYAYASSKKNVSAGAANGGYYGAHKDPQTVFVLAASEMYMATGEGEATYKNAIDISQVKTHWHVLDYANSHDLVAYAAAKALPTNKDSLLKLAYEEFVKKYTDPNNIESEKVTKLGGGWGQLRYAGNTAFSVALYSLAKNTTEYDQFIYDQIDYILGKNNAKRSFITGFCEGCNGSPKLVHHRNVFLRDDN

SEQ ID NO: 104511 - protein, 98 aa, Unknown
  Obtained from environmental sample
  DOMAIN (24)...(81): Ribosomal protein L5
  misc_feature (1)..(98): Xaa is any amino acid
MLDLQELYKKEVVPALIKEFNYSNVMMVPKITKVVVNRGLGKIATENVKNVDIFVDELQQITGQKAVVNKSKKAISNFKLKENLAIGCKVTLRKNKMY

SEQ ID NO: 104512 - protein, 71 aa, Unknown
  Obtained from environmental sample
  DOMAIN (1)...(71): Ribosomal protein L14p/L23e
  misc_feature (1)..(71): Xaa is any amino acid
KKAEVQKAVVVRTKRPLRRPDGTYLRFDDNACVIIDPKTKEPKGTRIFGPVARELKDKGYAKIISRASEVL

SEQ ID NO: 104513 - protein, 288 aa, Unknown
  Obtained from environmental sample
  misc_feature (1)..(288): Xaa is any amino acid
MNYMNRDWEFVNPVDTLTTGLDVAITQKIFEGGKNFIQKSLASIATESVRKEALAEYFNVLDSADNAYYAALEAAATLEAEELSLRAALAGLAVAEIRQGSGMINRGDFLKAMADKEARENARDQARRALSLSRMKLKALTGIEAGVVLEQVDFDAYEGLIHALSGISDEDADALYDRFWRLLVQSNPSLARAALNSKRAEKNFSLAKRDFSPTISATLFSGGINYSIDGGFSSSSGGGLTIRGSIPIDFWVMSNKIEKSRIARDSSILDYKGVEINLETELQSALLN

SEQ ID NO: 104514 - protein, 98 aa, Unknown
  Obtained from environmental sample
  misc_feature (1)..(98): Xaa is any amino acid
MTNLRHMKNLGKIVESISPVVPITQQLPIPKIRDYGKADYQYEVIMKKIKEFEEELDENHEVAIQLASFGKDILLNVTEIGYSNPNTLIFYGYVNEQK

SEQ ID NO: 104515 - protein, 238 aa, Unknown
  Obtained from environmental sample
  misc_feature (1)..(238): Xaa is any amino acid
MAYVFNKGVMVGDEEYVGGAEGPKHAVKKLHGDWRTGKEVVFGLRERGGYTITTHVPDSKDETLLGEIQRRVPLGTRIYTDGLPAYKKLPTLGYPHDWVNHSFGQYVKDDVHTNDMESVWALHKRAFYGTYHKTPRKYLQLYLNEFDFRMNMGNLKNSTMYAIEKLAEACWLDGIPDREKPTYKLPFMSVAQDKPSAYEKLIEAPAPTVGNATPLLAPAVSPKRQQLVQQNPPQQQPP

SEQ ID NO: 104516 - protein, 202 aa, Unknown
  Obtained from environmental sample
  misc_feature (1)..(202): Xaa is any amino acid
MFDIMRHWLDLGIDGFRLDVINLLYKDSELRDNEIGFFKKSKIYNRNQPEVYDLLRDFRKLLDSYPEKTSVGEIYAPPPGNTDLAVSFLGSGTDMLHLVFDFSLVFTLWKASSYYKIITNYYEKLPATGWPSFFLSNHDIGRSVRRLLWERNKYAKAKLHAVLLLTLKGTPFIYYGEEIGMENAIIPKRHIRDLYGNFSIHF

SEQ ID NO: 104517 - protein, 194 aa, Unknown
  Obtained from environmental sample
  DOMAIN (1)...(66): Phosphoribosylglycinamide synthetase, ATP-grasp (A) domain
  misc_feature (1)..(194): Xaa is any amino acid
MGSVSPVPFATPEFMEKVRTRIVEPTVRGLQAEKIAYKGFIFFGLISVGGEPMVIEYNVRMGDPETESVMLRLDADLVDLLDGVAKGDLAERRCSIAPQAAASVVCVSGGYPNGYKKGIAINGLESVTDSIAFHAGTRSSGNALETAGGRVLVISSTADTLRCALAKSYAAVEKISYEGKYFRRDIGFEWKAER

SEQ ID NO: 104518 - protein, 58 aa, Unknown
  Obtained from environmental sample
  misc_feature (1)..(58): Xaa is any amino acid
SLADDELLDIWEETQRLEHLMRAEWDAALELAPEYERLIVLELQYRTGMRGTERNPLE

SEQ ID NO: 104519 - protein, 187 aa, Unknown
  Obtained from environmental sample
  misc_feature (1)..(187): Xaa is any amino acid
MTIGDLEIAIPIVQGGMGVGISLSGLASAVANVGGVGVIAGAMIGMREPDIATNPLEANLRALRTEITRARELTRGVLGVNLMVALTTFSEMTRTAIENRIDIIFSGAGLPLDMPRHLLALCEEKKEEFKTKLVPIVSSARAAGIISKKWLARFDRLPDAFVVEGPKAGGHLGFKPEDIDSPDHALE

SEQ ID NO: 104520 - protein, 257 aa, Unknown
  Obtained from environmental sample
  DOMAIN (1)...(97): Phosphoglucomutase/phosphomannomutase, alpha/beta/alpha domain I
  misc_feature (1)..(257): Xaa is any amino acid
MALIGCDTRPTGRAIVDVMIPVLEACGCRVCSAGVTAAPEIMAWARSVGSCGFVYVSASHNPIGHNGFKFGLADGGVLPAEETTKLTANFRSLMADPAGIARLEKIMADESAALPAALPAAMQEMFVAEPAVWPNYPSYKKDAINAYSRFSGEVAWNNNNGIAEALKRGIAERPLGVCCDFNGSARCVSIDREFFNGLGIQFAAINAEPGAIAHRIVPEGESLEPCRAFLEEQRRRDPAFVMGYVPDCDGDRGNLVI

SEQ ID NO: 104521 - protein, 82 aa, Unknown
  Obtained from environmental sample
  misc_feature (1)..(82): Xaa is any amino acid
VLRIADFASRQTREWDVSKASADLSGHGGGDIRMVKDFASAVAKRDPNLLATNLSESMESHLAGFLAEESRLAGGELKQIKL

SEQ ID NO: 104522 - protein, 255 aa, Unknown
  Obtained from environmental sample
  misc_feature (1)..(255): Xaa is any amino acid
GTAYNGTQNTFGGTVTTYPTVLKNGSAATLGTDYTDKAEDNVTVDGKITFKTAGTYTVTMTNAAITSNGTYPANVTVTLEVTTAPVYPPTITGGATSMILTEGYAATSTAAFTIGGTSPEVTFTSDNALITWNEGEKKIYIAPGLTAGVYTVELRASNTTATATHTFTLTVNEPPKAPIIAGPVALTLQTGYEATSTMPFTITGQETITVSKQSGDAKITWNDGTQKLDIAAGLPEGSYPVVLLASNGILPNATH

SEQ ID NO: 104523 - protein, 236 aa, Unknown
  Obtained from environmental sample
  DOMAIN (29)...(236): DNA polymerase family B, exonuclease domain
  misc_feature (1)..(236): Xaa is any amino acid
MPNPTIDCFLLTAHYRDAGNRFEITLWGAADSGERVRVSVDGFRPMFFCLRSTPAGETAAAAERRTLPMRSLDMRDIDCLYFDTHAAMQRTAGSLRAAGYPVYESDVNPLQRYLMERMVSGSMRIDGARERIGGFTGFKNPRIRGCEFIPDLRVMSIDIDTDGDGENERITEAACVEDGATYLSVIGGGTELPATKPVVERSRNAPPQIRNCKDEHQLITDLMKHIAARDPDVLTG

SEQ ID NO: 104524 - protein, 85 aa, Unknown
  Obtained from environmental sample
  misc_feature (1)..(85): Xaa is any amino acid
VRKELDAYTSNIPPHVQAAKLLDAPVPIVKYYITKNGPQPVEKLSAPIDYRHYMDSQLRPIADSILAWTGSDFDNVVSGQQELFS

SEQ ID NO: 104525 - protein, 54 aa, Unknown
  Obtained from environmental sample
  misc_feature (1)..(54): Xaa is any amino acid
EPDTLYGTSSAKNFAFPNSNTKEGYNSEKTIVAHNAVHYGAEFPSRIILPVEAQ

SEQ ID NO: 104526 - protein, 253 aa, Unknown
  Obtained from environmental sample
  DOMAIN (2)...(119): ATPase family associated with various cellular activities (AAA)
  misc_feature (1)..(253): Xaa is any amino acid
FAALIAGQDGNPLLFKRIQFTPDLLPYDITGVDVFDPETRSFRFMPGPVLANIVLADEINRTTPKVQSALLEVMAERQVTVGSAVHKPPEPFFVIATENPIESEGTFPLPAAQLDRFMMRLSLGYPDRESELSILDENPAAKALAELKPVMTEAEFLSARTAAAEVYCHQSLKEAVADIVRETRSHRSFALGASPRAALHFLGAVKALALVRGREYVIDEDLMVLAAPVLSHRVRLRDAKAQGGRLIMEICLA

SEQ ID NO: 104527 - protein, 252 aa, Unknown
  Obtained from environmental sample
  DOMAIN (3)...(99): UDP-3-O-[3-hydroxymyristoyl] glucosamine N-acyltransferase, LpxD
  misc_feature (1)..(252): Xaa is any amino acid
VVLRLSELADRLGLALRGEDREFTGLQTLELARENDVSFLANPKYTPLLAKSRACAVILAAEFAHLVHTALVSANPYLDFAKAAALFVRKPEPYAGISELAVIHPTAELSEGCSIYPYVHVGARTRIGPRCVLFPGVYVAEDCALGPDCVVHPNAVILAGVSMGASCVINPGAVIGTDGFGFTRMGGVMHKIPQIGAVVLADGVDVGANTCIDRSTLGVTSIGKDSKLDNLVQIGHNVSLGEQCLIISQVGI

SEQ ID NO: 104528 - protein, 233 aa, Unknown
  Obtained from environmental sample
  misc_feature (1)..(233): Xaa is any amino acid
ERLGRDFKFVGLSKSAPSCAHVVYDYYGGPEKLGQFAEMVHYVDKMDSADLTVDEIMHPSGWILLGFIADPRTGLGRIRNFTISNLELMKKLARAAFTKPIEEILALSDVKERIDVYFEQQAKFIDMVRKYAKVEGQAIYVDLRDVEIIHVGNRFLLYTIFPEQNISVWVVDGKKKVNTVITVGYSTINKSATADVGSLMLKYGGGGHKTVGTCQVAFEDADKIIGEIIATVK

SEQ ID NO: 104529 - protein, 189 aa, Unknown
  Obtained from environmental sample
  DOMAIN (11)...(64): HTH domain
  misc_feature (1)..(189): Xaa is any amino acid
MQDMERQSLVRISLIDRQLRNGAYTTLQQLMDATESSRRTVFRDLNTLMQMGAPIGIKKNCGYFYMPGHRWRMPEVNLTEGDLLAILLAEQAVVSVDQGYLEKRIKPCLAKLRLMFQDKIKIAPDKVFSFARLPQPVFTAEQAAHLEIILRAIGEHRTLTCEYKTPGHRQAVRLTVEPYHLHFRGKWYL

SEQ ID NO: 104530 - protein, 89 aa, Unknown
  Obtained from environmental sample
  misc_feature (1)..(89): Xaa is any amino acid
MELLLLFATLELLLISELELEASSELLDKTSSSDEDETSSDEDETSSDEDESSSDEDEISSDEDETSSDEDDISSDEYETSEDDEGSST

SEQ ID NO: 104531 - protein, 204 aa, Unknown
  Obtained from environmental sample
  DOMAIN (14)...(161): Late embryogenesis abundant protein
  misc_feature (1)..(204): Xaa is any amino acid
MKRKLLIIAAILICGLICATCSILSGLSKMVKPEVTLKSVDFSKIDFNGLTLLSTLNVKNDNAIDIPLPKIDWDLSIANNPFINGIIQSDGSLKSRGSTQVKFPVSFTYANLIKTITSLNDNNAKYKIKMIAHIPIPVLGDLSWPFEHEGKLPLLRLPDISVAAAPSASLTYGNGIIPTGGKIEFALNVKNSSNIAVMVKDLSY

SEQ ID NO: 104532 - protein, 280 aa, Unknown
  Obtained from environmental sample
  DOMAIN (123)...(156): Tetratricopeptide repeat
  misc_feature (1)..(280): Xaa is any amino acid
EKDYDKAIEYLNKAISLNSDKNLPYAYNNIGEVYFFKREYDKTIEYSKKAIGLDSAMQESYLYLGEAVIRKGDKAKGIEYKMKAVEMGYMLPEAKQTPVEELSEYLVAKYKMLAEVITTPKTANEFFLKGYVAEINKQQDAAIKYYNQAVQLKPDFAEAYKNMGDIFKNRKNYGEAAKNYKKAVEHNPNYALTYKYMEDGYFAKDFFVDSRNGKTYKYVKIDKQTWMAENMNYKTGNSWCFDDLKENCDKYGRLYDWNSAKNVCPAGWHLPSGEEWQKLI

SEQ ID NO: 104533 - protein, 254 aa, Unknown
  Obtained from environmental sample
  DOMAIN (13)...(228): Methyl-accepting chemotaxis protein (MCP) signaling domain
  misc_feature (1)..(254): Xaa is any amino acid
IEASIESLNKLIEDQSKSINTSSSAIEVMTANIHSVRNTLIENGKNVSELATASENGKTGLQTVAEKIREIARDSEGLLEINAAIDNIASQTNLLSMNAAIEAAHAGEAGKGFAVVADEIRKLAESSSEQSKTTATMLKKIKTSIDSITVSSNEVLSGFEVIDSGVKTVLHHEENIRGAMEEQEVGGKQIVESMDRLKEISVSVKKGAQDMLASGDKLNRQTSEFINISNESMAGMNRIVNGAMREIKAAVVTV

SEQ ID NO: 104534 - protein, 242 aa, Unknown
  Obtained from environmental sample
  misc_feature (1)..(242): Xaa is any amino acid
ETGPIPPVPVSNSTINGVTRPATGGTPVITITANTQYTGIVRWFPVVSGTFAAVTEYTAIIYLTAKPGYTFQGVRENFFTVAGAERVTNPADSGVVTAVFPPTLPVVINIAAIGGVTVPKTGGTPVTAVTENDQYTGTVSWPTLSGTFAAVTEYTAIIYLTANHGYTFEGVRANFFTVAGAEKVTNPANSGVVTAVFPKTDPAPVNIAAIQGVTRPETGGTPVTTITANDQYTGTVSWDKNH

SEQ ID NO: 104535 - protein, 273 aa, Unknown
  Obtained from environmental sample
  DOMAIN (6)...(254): Bacterial export proteins, family 1
  misc_feature (1)..(273): Xaa is any amino acid
APLLSSEAVPQVAKIALAGFATFAVLPNAGVFAVELSAAGAAGVRGVGAVNLPGAGALSDLRYEPFSFRFLLLLVGEGIIGIIIGFYLTLIFATFSTAGQFFSLQMGLGASETFDPLAQIENPLMGQYFNLVSMLVFLFVGGFRQLFLGGFWRSVQSLNIAMLVEGRDHVIGMMASGLARMFLDAMVISLPILGTLFLTSLATGLISKAAPQINILSEGFPIAILTAYLLLFATLPFLLETFSEVINAGFANIQRLYTMIGQQIGGRIIDIRN

SEQ ID NO: 104536 - protein, 254 aa, Unknown
  Obtained from environmental sample
  misc_feature (1)..(254): Xaa is any amino acid
ANAKLKAVGADGTQGETLETTVQHPARAQFDKTETVAQTVYSSDFLESVFGFGRPALEPDVQKTRTALAKPPTLGVSLKGASESEILEMAQALKKTGLLDKGYKYIILSDWQSSKRSIDNKLRFDRGLFGDGPALIRRLKNDYGVKVGLNTSISDLTSGGKPGSMYFEELDARTFAGWGIDYVRVDYSHVTDVHKDKNDIGEGAWPTLTPDLNYVGYNKLNGATALETRLPWKSFALNGGARISGNRLTGLSSN

SEQ ID NO: 104537 - protein, 176 aa, Unknown
  Obtained from environmental sample
  misc_feature (1)..(176): Xaa is any amino acid
MNGGEISGNTASNSGGGVYVSGGTFTMSGGEISGNTASNSGGGVYVSGGTFTMSGGEISGNTAIGNTGNVGFGGGVYVSSGGSTFAKAGGGTIYGYTDGDAKSNAVKDDSGVVQNNRGHAVYWEGLLTRDTMLGGNDDVNIANLDTGWAGAATLAADTWEDGNILSSSRSQWFKFT

SEQ ID NO: 104538 - protein, 71 aa, Unknown
  Obtained from environmental sample
  misc_feature (1)..(71): Xaa is any amino acid
VVEPGLFDYLTDGDKTALEHEPFARLAKDGQMNAYKHAGFWHPMDTMHDKNLLTEMWTGENAPWALWGKGR

SEQ ID NO: 104539 - protein, 185 aa, Unknown
  Obtained from environmental sample
  DOMAIN (10)...(185): NAD dependent epimerase/dehydratase family
  misc_feature (1)..(185): Xaa is any amino acid
MTDFYKGKRVLVTGSTGFKGAWLCRVLAKIGAETVGYALEPPTTPSLFEQIGIARGLYRSALCDIEDFDALSGVMIETKPQIVIHLAAQPLVRASYQNPRRTYATNVMGTVNVLEAVKNSDTVRSFVNVTTDKVYENKEWLWGYREDETLCGGDPYSNSKSCSELVTYSYRKSFFSGANDKRRAA

SEQ ID NO: 104540 - protein, 59 aa, Unknown
  Obtained from environmental sample
  misc_feature (1)..(59): Xaa is any amino acid
MVSTGRKITKGTGTMLSSADRETIDKFIDDIVLVMYQLTGEKELKWNGSPLWMPNIKLP

SEQ ID NO: 104541 - protein, 72 aa, Unknown
  Obtained from environmental sample
  misc_feature (1)..(72): Xaa is any amino acid
MSYKLIEIDRQNLTIMGIRFSDLDTLNSAANAIGSNMFEGFEPTPRLIEIYRDYREGKISGGGFIEILKGAV

SEQ ID NO: 104542 - protein, 176 aa, Unknown
  Obtained from environmental sample
  misc_feature (1)..(176): Xaa is any amino acid
MSDRRQSKLLFLSVPESLRGQIESVAHDDFSINPDIPLPVEIPENEENLNLEELSWEMIISGMLSVIAAGPEALVPVQGNTAQKSAWINYYRHFVLAVRPSIMSEFTDAAILKARNSDFDLALEILDSLRGLFPSSPVVTLNRALVMEERAAALQRRDSAETEDAFRAAEAPMLNP

SEQ ID NO: 104543 - protein, 271 aa, Unknown
  Obtained from environmental sample
  misc_feature (1)..(271): Xaa is any amino acid
MYSILKGEDMDESLEEVSPNEETVSGSPREVVYNEKYPPEFFDFIIIDECHRSIYNIWQQILDYFDAFLIGLTATPDKRTFGFFNENVVSEYSHEQAVVDNVNVGYDIYLIETEISKKGASIPKQLVERRERLSRKKRWEQLDEDVVYTKNQLDKDVVNLSQIRNVIKAFRDGLPAMFPVRQEVPKTIIFAKTDSHADDIIQIVREEFGEGNDFCRKITYSVDKADSVLSNFRNNYNPRIAVTVDMIATGTDVKPVECLLFMRDVRSRSYL

SEQ ID NO: 104544 - protein, 215 aa, Unknown
  Obtained from environmental sample
  misc_feature (1)..(215): Xaa is any amino acid
MDKDMVNSKLKSISPDGTLTFENLDAKYTPVKGDIICSDVSTVAPYGFLYKVKSVTKDGGITVIETEMATLEEAVEEAKVEQSFDLEYIDDDEEIEGVEVELMSVNAPRAALSTAPVKVNINMKVDTGDSELALKGSIEINANINCIVEIEKFKMQHFELSTGPRLKADLTASIGKGGKKEKKIPIKTLKFSPITFWAGPVPVVIKPEDPIEVVF

SEQ ID NO: 104545 - protein, 62 aa, Unknown
  Obtained from environmental sample
  misc_feature (1)..(62): Xaa is any amino acid
MAITKEVLDELLKECKGPDDFYGPEGLVKQLNKALIERMMQAELTEQIGYEKSEAGEKPSGN

SEQ ID NO: 104546 - protein, 186 aa, Unknown
  Obtained from environmental sample
  misc_feature (1)..(186): Xaa is any amino acid
GGTSPVPGTAPIPPETVHALRRNAFRAVEFFGSSEMGTVCCRENPDDPFCLLPHVERGRGEHEGALERLLPDGAVMRYPLVDSVAWIGDRALRPGGRLDEAVQVAGVNVHPRHVGSVLERHEGVSACVVRLMRPDEGYRLKAFVVPKPGWSTQALRASLELFARQRLSDAERPVRYAFGDDVPRGP

SEQ ID NO: 104547 - protein, 191 aa, Unknown
  Obtained from environmental sample
  DOMAIN (22)...(184): Type III restriction enzyme, res subunit
  misc_feature (1)..(191): Xaa is any amino acid
MKDFAGLGVLPELRGRLAKKSVIQPTAVQRLVIPKLMEKKSAVFRSATGTGKTLAYLLPGLQLLLSDIETPYQGPRLLVCAPTLELCSQIKDEIDFLLEEKSGVNVSLLIGSVNLNRQIDSIKKNRPHVVVGNPGRLLLLAKMGKLKLRSLDFLVLDEADRLTSSECREETSALTYLAAAELRRRASTGQA

SEQ ID NO: 104548 - protein, 166 aa, Unknown
  Obtained from environmental sample
  misc_feature (1)..(166): Xaa is any amino acid
MEPIQKKLTELTKNLWWTWNPEVRAIFRDIDPNLYNRSHRNPLRVVKSVDPAFLEARAAEADIVTRTDRALRQLKEYLNPATTWGLMHGGALNARPVAYFCAEFGIHECLPIYSGGLGILAGDHLKGASNLGIPLVAVGLLYHQGYTMQHLDNTHWQQDVREPFEM

SEQ ID NO: 104549 - protein, 253 aa, Unknown
  Obtained from environmental sample
  DOMAIN (84)...(168): Isoamylase N-terminal domain
  misc_feature (1)..(253): Xaa is any amino acid
MPGVDHVELLNAGSGVAVAELKRMDWQGVFELHLENSNKFPYRYRFTSGSHSWEMEDHYSFGPVLGELDRYLMGQGNHFEAYRKLGAHPCVKDGCAGVSFALWAPNARRVSVVGSFNDWDGRRHLMQQYAMNGIWELFVPRLTKGDFYKFEIMGLDGKLLPLKSDPFAFRSEQYPHFAGIVHGLSEYPWRDTGWMENRWKSNSHTAPISVFEVHMGSWRRKWDGSFLTYTELANELVPYVKDLGYTHIQLLPI

SEQ ID NO: 104550 - protein, 54 aa, Unknown
  Obtained from environmental sample
  misc_feature (1)..(54): Xaa is any amino acid
MGTAPIVLGIFFFGSVQLFFTGLLGEYILNINARSMKRPLVIEEKRIGFTDENE

SEQ ID NO: 104551 - protein, 140 aa, Unknown
  Obtained from environmental sample
  misc_feature (1)..(140): Xaa is any amino acid
MHGVKFFSGDAIPLEMHKVRMVQRLHLKPIEERVQNMQGAGFNTFLLRNRDVFLDMLSDSGVNAMSENQYAAMMQADDSYAGSETFYRLEKALQDVFQSKYFLPAHHGRACENIIAQTFVKSGSVALMNFHFTTAKAHIT

SEQ ID NO: 104552 - protein, 223 aa, Unknown
  Obtained from environmental sample
  misc_feature (1)..(223): Xaa is any amino acid
LEARVAAVADAYDAMTSDRPHRLALSHADAMAEIKRLSGSQFDPRIAGKFIQMVEEGGMDRDSLVAVPNNSMAPTPEFTLYEHRVYGWGPSGDGCAETDRLEDAMASDAFLESIFNNTPALYAIIDEDLKIIFASDSLAAVAGKSPEEMLSCKCFDIFGSGMGMRCFQHECGDAHCIVAKALATGERQQTPMETDACGQKLYFDSFAVPLELDGADGGKIKCC

SEQ ID NO: 104553 - protein, 165 aa, Unknown
  Obtained from environmental sample
  misc_feature (1)..(165): Xaa is any amino acid
MYADSGSGVTVPPQGDLSKNGHTFDGWNTRSNGTGTNYGVGQSYVATSNVTLYAKWTALSYTVTFNGNGATNAAPTAMSAIYGDSIMLPSMTRTGYTFGGWYENSGGTGTGYIGGSSYTVTKTTILYAKWTVIPYTVTFDGNGATSGVPAAKDTHYGDNITLPSM

SEQ ID NO: 104554 - protein, 128 aa, Unknown
  Obtained from environmental sample
  DOMAIN (1)...(114): Protein of unknown function (DUF1016)
  misc_feature (1)..(128): Xaa is any amino acid
FAFLARQKRITVDNRDYYIDLLFFHRRLKRLIAIDLKIGEFDAAYKGQMELYLNYLHKYECRRDENAPIGLILCTGKNTEHIELMQLEKSNIRVAEYFTVLPSKAKLKAKLHKAVLIAQKRLAVTEDD

SEQ ID NO: 104555 - protein, 270 aa, Unknown
  Obtained from environmental sample
  misc_feature (1)..(270): Xaa is any amino acid
GYNPEKQKDIFDGIYTETETRNPKYEQQHLQRYLSYSIVRYLENVSPLRNGGGWIDPFGLSDDISGWIEQAEFTLFAKAREMMLFNFFAIVNSGFLPPLTPRFDRLNSIIKQCGKPKGVRLYEPYNADGEDQVVNYLGMTGIPFEPSPDFGSADSAVFLPASAAKDEQIMQKLEEFVRSGNTAIITAGFLKECIDRGLKDMTSVRPTGRTVRGNEYWVEPYGERRLVSGSAEAIQIEALDYKTNASWCEIAMMTSYNSFPLLTLDFYGKG

SEQ ID NO: 104556 - protein, 59 aa, Unknown
  Obtained from environmental sample
  misc_feature (1)..(59): Xaa is any amino acid
MQDNSMLNIKNLTIHYVTDDGTVRAVNDMNLQLDKGETLGLVGETGAGKTTTALGLMRL

SEQ ID NO: 104557 - protein, 213 aa, Unknown
  Obtained from environmental sample
  DOMAIN (36)...(213): SRP54-type protein, GTPase domain
  misc_feature (1)..(213): Xaa is any amino acid
VDPGQQFVKIVHDKLVSFLGDEDPASRALKLRGPDVISKILMLGLQGSGKTTSAAKLALRLKKEGRKPLLVACDLIRPAAMEQLAVLGGQVGIPVYKEDGAKDSVKVYQNALSWANKNMIDTVIIDTTGRMQIDEPMMEELSRLKNVVIPDEMLLVADSMTGQAAADIAKTFDEKVGLTGVILSKFDSDTRGGAALSLKTVTGKPLKFTGTGE

SEQ ID NO: 104558 - protein, 183 aa, Unknown
  Obtained from environmental sample
  DOMAIN (1)...(160): Tubulin/FtsZ family, GTPase domain
  misc_feature (1)..(183): Xaa is any amino acid
DLQALNRSKAEIKLSIGSKLTSGLGAGGVPDVGEKAAMEDRDLIANTLKGADMVFVTAGMGGGTGTGAAPVIAQVARECGALTVGVVTKPFGFEGRYKMRLAEDGIAKMREAVDTLIVIQNQQLLSLVEKWTPIKEAFRMADDILRQGVQGISDLILETGEMNVDFADVKQTMYGQGDALMGV

SEQ ID NO: 104559 - protein, 143 aa, Unknown
  Obtained from environmental sample
  DOMAIN (10)...(143): SMF family
  misc_feature (1)..(143): Xaa is any amino acid
MRGIDREKLLGFCRIEKDSPLYPPLLREIYDPPAVLWCRGRLPNPEKPAVALVGTRHPSAAASIQALALGRSFAQAGITVVSGLALGIDALAHRGCLEGGGSTAAVLGSSIDEVFPASNRGLARRIVAAGGSLLSEYDLVPNR

SEQ ID NO: 104560 - protein, 284 aa, Unknown
  Obtained from environmental sample
  DOMAIN (139)...(164): The GLUG motif
  misc_feature (1)..(284): Xaa is any amino acid
SDAFMGSYDGGGYTISNLTINNSSTNYQGLFSFVTGTTAIVKNVGIVNCNITGQANVGGIAGVTNGTVQNCYVTGFVSGTGNNVGGVVGQIMSNGKVENCYTACTVSGTGSYVGGVVGDNGETVQNCYATGDVSGTGTSSQYIGGVVGQSSKLVQNCYATGSVSGSNYVGGVVGSMSGTNKVQNCVALNSNIICTGSSTGRIVGYVYGTLTNNYGRDDMVRSSLPAPSAWSTGTATGQHGANITNANWNSESWWTTESNWNNTALWDFSSVWKWGGSLPILSGM

SEQ ID NO: 104561 - protein, 266 aa, Unknown
  Obtained from environmental sample
  DOMAIN (97)...(247): Methyltransferase small domain
  misc_feature (1)..(266): Xaa is any amino acid
ELESFNLCEAGVSTLEELETENGSCASFKFYTDSKEERDRIVAEFAHLNFECGEEEAKDWDLWWRERQTPVNVSRSLWVKPPWVDFSPPDADCVVLALEAKTAFGTGEHSSTALAAQLMEGVDFKGKSVLDIGTGTGILSLFALKRGARFAVQTEIDHLTIPCLVENFEQNGEGSPNAVLGFLDSFNERARFDIIVCNMLRTEVLPLRADIERLLAKNGKFILSGQLECEKHFILDWFKEAGFSVEKEIVNEEWWSVISIFISEVK

SEQ ID NO: 104562 - protein, 288 aa, Unknown
  Obtained from environmental sample
  misc_feature (1)..(288): Xaa is any amino acid
IMAIVIATATVILVQRATKIAKDLTTDKVAYLARQRAQYWAGRIDGYMQVLRTISNNMNYYENVNVNLRREQYEATLISVFEDNPDFIRIFTIWKPNALDGMDSQYIGRVGSTPTGQFAFALGKETGTIVPQLSSQVQSVMELLNGPDANKEVVTHPTTAQLLGKDINQVRITIPIMNGNRTQVVGVVGAQLDVSMIQPRIETTIKDFDEISAMSVYSSNGFVMASYRTERIGKMMPDVEVQFGTHITEAFEAVKSGKEYSCYSYAPTMNTNLQISVIPVPLGNAETT

SEQ ID NO: 104563 - protein, 56 aa, Unknown
  Obtained from environmental sample
  misc_feature (1)..(56): Xaa is any amino acid
MSANYDYDLLVIGSGPGGYVAAIRAAQLGQRVAVVERGSVGGVCLNIGCIPTKAII

SEQ ID NO: 104564 - protein, 166 aa, Unknown
  Obtained from environmental sample
  misc_feature (1)..(166): Xaa is any amino acid
MAENLNYKTTVGSWCYGDKDSGCVKYGRLYEWYAAMTSCPAGWHLPSREDWDNLGKAAGGEKRDIEETGTVDWTGVGIKLKAKRDWNGGIGTDIYGFSALPGGFRDKDDRYNDAGVYAYWWTSAEYRRTNAYIRFIFYSGNEFDTYLVENALFRHNGLSVRCVANK

SEQ ID NO: 104565 - protein, 251 aa, Unknown
  Obtained from environmental sample
  DOMAIN (100)...(251): Glycosyl hydrolase family 3 N terminal domain
  misc_feature (1)..(251): Xaa is any amino acid
MKKYFSSLIILLLLVTQITCTGVSGKNKQKSVEWNTLEELLSQMTLAEKVGQMTQAERVHLQKGDIEKYFIGSVLSGGGSTPWDNTPWGWLNMVNGFVEESLKTRLGIPVVYGIDAVHGHNNVKGAVILPHNIALGAIAAGNPQLGAQAAYNAGKITAQEMLATGLRWTFAPVLGIAQDARWGRTYESYSENEGLVTIMGANFIKGLQDNGAAACMKHYLGEGQATDGRNQGNAILDRAGIEKILPPYRAA

SEQ ID NO: 104566 - protein, 295 aa, Unknown
  Obtained from environmental sample
  DOMAIN (114)...(180): Elongation factor Tu domain 2
  misc_feature (1)..(295): Xaa is any amino acid
GKHREELLDALSIFSDELAEKYLNGEAISEDIMHTAIRAGTLSEQLVPVMIGSAYKFKGIQPLLDAVNRYLPNPTEVKNYALDLDNNEQQKELSADDKSPTVALGFKLEDGQYGQLTYVRIYQGMLKKGEELQNTRARKKFKVGRLVRMHADNMEDINEGYPGDIVALFGIDCASGDTFCGGSLNYAMTSMYVPEPVISLAITPKDKKSADQMGKALNRFTKEDPTFQTYVDPESNQTIIKGMGELHLEVYIERMRREYKCDVETGMPHVAYREAITQRADFNYTHKKQTGGAGQ

SEQ ID NO: 104567 - protein, 279 aa, Unknown
  Obtained from environmental sample
  DOMAIN (93)...(119): The GLUG motif
  misc_feature (1)..(279): Xaa is any amino acid
GCCGSVRGRYAVGALAGSNNGRITDCFGTGVVIAVREESNAGGLVGVNSGEVIGSYSAAEVYGVENVGGLVGLLRIFGAGEVRRSFALGGVHGVSNVGGLVGQVFGGRVSESFSAGRVSAGGGKGAAGGLIGRDFAGTPVWSDRGVVEAVDGEEYYVEAVSVSGSFWDAEASGQASSAGGAGRRGAEMRSRKTFSGWDFDGVWGIEEGVGYPQLLRMPIHTRRLDYVVDGKECGRLRVADGDGVAEVYEYGAEVALGAKGFEVDAEAWPGCRFAGWSAR

SEQ ID NO: 104568 - protein, 96 aa, Unknown
  Obtained from environmental sample
  misc_feature (1)..(96): Xaa is any amino acid
VAGQWFDLVFDIPADQAFTYRVDEKGAAAVGKRALAPFGKRGRDSLGYIIAEREAPPQGLDESTIKPIRRVADAEPVFDGRDIELARWIAAYYLCG

SEQ ID NO: 104569 - protein, 219 aa, Unknown
  Obtained from environmental sample
  DOMAIN (29)...(217): RNA polymerase Rpb3/Rpb11 dimerisation domain
  misc_feature (1)..(219): Xaa is any amino acid
MLFKQGNRLINSRNWVKLVRPEQIVRDSDPNDPMYGKFEYEPLERGYGVTIGNALRRVLLASLQGAAFVSVKIVGVQHEFTTIPGVLEDVTDIVLNLKQVRLALQTDEPQRLTLSANKRGAVTAGDIQTNQAVVVLNPEQHIATLTEDMPLAMELEARMGKGYVEAAMHEDLDDEIGLIRLDSSFSPVRKVAYTVEQARVGQMTNYDKLILEVWTDRSI

SEQ ID NO: 104570 - protein, 293 aa, Unknown
  Obtained from environmental sample
  misc_feature (1)..(293): Xaa is any amino acid
MFLSARNSQVDVVQSVGRVMRKSSGKKYGYIIIPVLIPSNVEPDKALDENERYKVIWSVLNALRAHDDRFNAIINKIELNKNRPENIIIGGAPPFDDNNGNRPAHTTADDITEQMELNLKFQELQNVIFARLVQKVGDRRYWEEWAKSVAQIAERQIAAITKTVSEDEETKTVFNRFLKEMQTSIDANITPSRAIEMLAQHAITAPVFDALFENYAFAKENAVSCAMSLMFEELNKKGGLNEDAEELKGFYESVHRRAEGIDNAEGRQKVIIELYNTFFEKAFPKMADMLGIV

SEQ ID NO: 104571 - protein, 271 aa, Unknown
  Obtained from environmental sample
  misc_feature (1)..(271): Xaa is any amino acid
SCVKYSGLLGFPKSSESPHDVFNTGHASTSISAALGLLAAERILGGKGYATAVIGDGALTGGLAYEALSHAGHLKLPLIVILNDNKMSISRNVGGLSKYLSRLSMKEKYQTFRRHFDAMVKKIPFVGESFFDLVVRLKRAVKAVFYIDNFFVDLGFEYVGPIGGHNIRALTSVLEDVKRINRPVVIHVITQKGKGYGYAEDEPDNYHGVGSFSVDDGIYSGKQEQSGAEGKKQCGKRSFTEAFSKIILEAAGKDSRIAAVTAAMQTGTGLT

SEQ ID NO: 104572 - protein, 87 aa, Unknown
  Obtained from environmental sample
  misc_feature (1)..(87): Xaa is any amino acid
DVKAEEIVETALRCNAALIGLSALMTTTMVRMEDTVRLLKERGLPIRVMVGGAVLTPGYAKSIGADGYAVDAVEAVRLANALVGEKV

SEQ ID NO: 104573 - protein, 83 aa, Unknown
  Obtained from environmental sample
  misc_feature (1)..(83): Xaa is any amino acid
VVANAESADSAASPSLGTIRQKNLVEAAITALEEALNLVEKKEPLDLVSPMLREAVNSLGEITGEVSTADILEEMFSKFCVGK

SEQ ID NO: 104574 - protein, 84 aa, Unknown
  Obtained from environmental sample
  misc_feature (1)..(84): Xaa is any amino acid
MGSLTDWQDRKYAETFEDELRGLERRRAADPNCTIADLEGTLKHLYIMDGSDWLGRGGVQDAVMAATIAAYEHFIASWKAENKS

SEQ ID NO: 104575 - protein, 269 aa, Unknown
  Obtained from environmental sample
  misc_feature (1)..(269): Xaa is any amino acid
MNGDVYALPFRSDFWLVFYNKDIFDKAGVPYPSNDMTLDQYDALARRVTSGSGANKIYGAHYHTWRSAVQLFGILDGKNTIVDGKYDFLAPYYERVLKEQDDGIVMSYATLKTSGTHYSGVFFNSQAAMLNMGTWFIATQIARVAAGEATSKNWGLVKYPHPDGVTAGTTLGTITSIGVNRNSKNKDAALDFMKFVSGPEGASVLAKTGTIPAIMSQDVINSIASMPGFPTDANSKAALSVYKTYLEMPLHEKAGEIETALNEAHDAIM

SEQ ID NO: 104576 - protein, 259 aa, Unknown
  Obtained from environmental sample
  DOMAIN (2)...(215): Methyl-accepting chemotaxis protein (MCP) signaling domain
  misc_feature (1)..(259): Xaa is any amino acid
MSQASSAIEQMMANISSVTNTLVNNAKNVKILRDASEVGRAGLQEMAGNIQDIAHESEGLMEINAVMENIASQTNLLSMNAAIEAAHAGEAGKGFAVVAAEIRKLAENSSQQSKTISTVLKKIKESIDKIMHSTENVLNKFEAIDTSVKTVADQEESIRNSMEEQTTGSKQVLEGVSEVNEITQQVKSASNEMLEGAKEVIQESKNLEKATQEITGGMNEMAIGADHINIAVNHVNGVSGKNREAIDDLMREVSRFKVA

SEQ ID NO: 104577 - protein, 256 aa, Unknown
  Obtained from environmental sample
  misc_feature (1)..(256): Xaa is any amino acid
VNLKASITLFIILLIFSGSPVKIQAQNAFPRIEPDAKALDYYRLGAQSGYSWTELAEISLWASGDASLSGMDKIKATVKAVNEAIGSDLSEKEKADFILNYMHKNILKNYSLYQTRLDTLLSNGRYNCVSSAVFYTILCKSAGINTSGVMTKDHAFAMVHINGQNFDVETTNPYGFDPGNRKEFHDSSGKTTGFAYVPPQNYRDRQTITQIELVSLILNNRVGELERTNNFSASVPIAVDRAALLLGNSYNNTADV

SEQ ID NO: 104578 - protein, 65 aa, Unknown
  Obtained from environmental sample
  misc_feature (1)..(65): Xaa is any amino acid
MIFPIRELIEYNKNTYEITAAASRRAYQLSMLMDKDAKEEYDGKMVALAARQVFTEEVEFRLEAE

SEQ ID NO: 104579 - protein, 129 aa, Unknown
  Obtained from environmental sample
  misc_feature (1)..(129): Xaa is any amino acid
MGNTKLPPLLEYFTNIEDPRRETKNKKYPLIEVIVIAFLAVMSGADGWESIERYGVMRKKWLCKFLDLTEGIPKHDVYRRVFGAIKSELLESCFMNWVRDIKQDIKREVIAIDGKTVRGMATKVVSSGD

SEQ ID NO: 104580 - protein, 149 aa, Unknown
  Obtained from environmental sample
  misc_feature (1)..(149): Xaa is any amino acid
MPLFLYGTYKKDNMPNFGLFGWFSFYWDVKIGVMACIGNNKLTKDRIEATKVFSANLVTEELLPVADYFGNKEGYSKDKMNVNVEIEKGQVLDVPVLSKSPWIFELEVNKTITLKNSGIFLCDIRNVLADEYLCNETLTIEECVKTIRP

SEQ ID NO: 104581 - protein, 70 aa, Unknown
  Obtained from environmental sample
  misc_feature (1)..(70): Xaa is any amino acid
MKRYCIKTRTGKIEYFDIISENEFDYTIRLYKVSDGNEKIFEEPMSRHLFDMCIKTGYIYELEKPDAVVA

SEQ ID NO: 104582 - protein, 158 aa, Unknown
  Obtained from environmental sample
  misc_feature (1)..(158): Xaa is any amino acid
MVFVAKRLVITLLTLFLVSVITFAAFRFIPGDAALVSLGIEAGEGQIEALRAEMGLDKSFTEQYFSWLVRFLTGNLGNSSRFRGVSISQMLSERLPVTFALSGLSFLFIILIAIPASLIGVKKENSLFNHIITSLTALNISLPGFFLGVLFIWIFGIL

SEQ ID NO: 104583 - protein, 278 aa, Unknown
  Obtained from environmental sample
  misc_feature (1)..(278): Xaa is any amino acid
SNIISLLIDGAEHFDFFRQPNFVKESSLKGSYAVYKKQTLIGEGTGKLCHIHRPLIIDALGRRVWGELAVVGNELRITIPEMWLAEAKYPVIVDPVVGTTTVGAHYNFYNEEYDDWDNFLISEGIIVNRYTIPDNMSGNVTAYIYLFRSYTYKGKLYSNSAYIRPCIFSENNNKPYERLSANEQQLGVEYIEIDHDGWFPATFSTNRTINGGSNIWLGVRSGDFHPRFDYGAKCYMSYIDFDEDTDYGVPNIFPLNTPYYHTESGIDDNIIISIYLNY

SEQ ID NO: 104584 - protein, 184 aa, Unknown
  Obtained from environmental sample
  DOMAIN (79)...(184): DHH family
  misc_feature (1)..(184): Xaa is any amino acid
MTFPSPREQITLRVVDPSAVAELAAELNVPAAAATILVGRGLTSFDQCKAYFRPNADDGFLDPFLFGDMDKAVKRILAAIASGEKILIYGDYDVDGVTATALLTRVLKRLNANCGYYLPNRLTEGYGISETGIRHAAEGGAALIISVDCGVTACDEAELAASLGMDMIITDHHEPKDALPSALA

SEQ ID NO: 104585 - protein, 266 aa, Unknown
  Obtained from environmental sample
  misc_feature (1)..(266): Xaa is any amino acid
LDAFASGLLGADSEGVVARQMNEWIDHLSQKSGFVEQQTKQWSDAINSKRQPMSDSNYTYLRKYSRTWLILKDIMEGAYLHATIFDYFENIFNQSASTEPLKVQLDEILTTLVTGFDEEELPLRKQEKFEQFVIDFEGDEKRARSNMAIEETAFETHKDFTQLLTDAAMKPESSHASASTQKFAIALSRDWISNAYNDVVAKNRMKIPNEIEINLESFNEKTTDGQNERELLDKFDRLIDSEKEDALANVKLTGFEHFCLWGGIIV

SEQ ID NO: 104586 - protein, 70 aa, Unknown
  Obtained from environmental sample
  misc_feature (1)..(70): Xaa is any amino acid
MIITNNGKPVALLTPLSDKTLEETLSAVRRAKAINATKLLQQQSLRNGTDKITMEEINAEIKRARKERKN

SEQ ID NO: 104587 - protein, 184 aa, Unknown
  Obtained from environmental sample
  DOMAIN (57)...(159): ParB-like nuclease domain
  misc_feature (1)..(184): Xaa is any amino acid
MAKKQQTRKAAPSKKVVKAIKKAAAKTQPKASAKKQKQKNNQLSALAAVKRDAPATLLSDICTDPRNPRRRAITPENDAGLQELADSIAKFGDVLEPLIVRQRTKEEIDKYPTEEPYMLISGHRRKAAAELAGIDRLHCIVYENISPAEAFEMQLVENLHRADLLPTEEASAYQRMSEELGYTQ

SEQ ID NO: 104588 - protein, 196 aa, Unknown
  Obtained from environmental sample
  misc_feature (1)..(196): Xaa is any amino acid
GSVTNYFNSGWADGQIRTSPVRVGAGADWVAVSAGCYQTVALKKDGSLWAWGAGKSGTPVRVGADSDWAAVSTAGMLRGAGIVSGGRTALLKKDGSLWMWGGDTEKVPVRVGADSDWSAVSAGQARIMALKTDGSLWALRGAPTRVGTESDWAAVSAGGNHTYTVALKTDGSLWVWGGTDKNAPVQVGTDYSVPSK

SEQ ID NO: 104589 - protein, 99 aa, Unknown
  Obtained from environmental sample
  DOMAIN (46)...(81): Sel1 repeat
  misc_feature (1)..(99): Xaa is any amino acid
YSKAAEQGNVGAQEMLGRMYDKGLGVAQNYAEAAKWYRKAAEQGNAEAQHLLGTMYFFGVGVAQNYFEAEKWLRKAAEQGHADAQNLLGRVANRVSPTS

SEQ ID NO: 104590 - protein, 294 aa, Unknown
  Obtained from environmental sample
  misc_feature (1)..(294): Xaa is any amino acid
YVGGRFWENYAHCVSTVNAPLAAAFSKTGFPDTREKLKHYKTIIRDYIVMEKRILVIDDFHCIEDPAVLRVMEEGFFRNMLPGTSVFLISRSISRINTADLLSRDQIFNITENDFRFTENELSQYFRGIGVSFQPDSLREIMQDTEGWAFAINLIARSCQRAPGYGGYVRNAMKQNIFRLLETEIWDGLSENLQNFFVRLSLIEHLSVDLIARLTGGDEELIAGLEKQSAYVRRDTYINAYLIHPLLLEFLKTKQTLLTEEQKRETYDVAGDWCANNGFTIDALFYHEKTGNYQ

SEQ ID NO: 104591 - protein, 239 aa, Unknown
  Obtained from environmental sample
  misc_feature (1)..(239): Xaa is any amino acid
MKLLVGFGIMVALILTVSLLSISNLLGIDNAYSVVIQNHAMPLNPAINVVGDIQAMRSEARNCVIFTGNKESIREAKVALDRLTREFEDSAASFAKTIVNPEVKAKYDEAMKSFTDTFKPSVYKMVAEAEKGAPIAEMVGHLTGLKASADLITDNMIYATDIKAGQLATESEKSTEHSRSIVALMVVVLIISIVIAVFFGVYISAMISKPLTTTVNMINEMAGGNLDTRLRLTREDEIG

SEQ ID NO: 104592 - protein, 165 aa, Unknown
  Obtained from environmental sample
  misc_feature (1)..(165): Xaa is any amino acid
MGILDTLKTAAANGFKKAATATSKAVADSSTKAMESVIAKTTAMVGSKVTDAVLKDLGGTPSPNKTSSPNTASPQNPEASAKAAALVGSKAAPNEQSASNILSPAEVEAIIDARVRAKGVQSNWRYSIVDLMTALDMNSSLSSRVALAAKLNYYGYDADGSAEKN

SEQ ID NO: 104593 - protein, 276 aa, Unknown
  Obtained from environmental sample
  misc_feature (1)..(276): Xaa is any amino acid
LNLKPAISPVAIDEAYLLAYLGKLDLTAGLRKLSWGKADMLGALDVINPVNYSNLSNLGDIASLKIARPLVHASLFLGQFSKLEGVFVFSFEPDYFAESGRWCPPQFASLSQLPPGNIIRPDTSTIDYAQAGVRFTTTLRNVADVGIQYYYGCLTTPAVTRTLSAATPLPVLTFAYNPYHQIGLDYAQVLSGFNIRAEAAANITDDLGGDDSTVYNPSLAWSLGFDRDLFWGIKLTAQCNEQIKLFTGKISNPIDIEYDTDVTSTLLIARASKTFL

SEQ ID NO: 104594 - protein, 264 aa, Unknown
  Obtained from environmental sample
  misc_feature (1)..(264): Xaa is any amino acid
NIAIDKKPYKETLVVKTVTETVGGAQGLLDISFALQSCFEETLNDQQKTFLQMLRCIESNLPLLYRPYAGTGRRPYQYLPFLRSQWAKNYFQIATTTMLIERLKADPNLRLLCGFGKVPGQASFSRAYSYLAAADIQPGTLERFAKEAFKDKVVYHVNRDSTAINARETVKKGRGKSGRKQPKKRGRPPKSEGKREKQPSEMELQIESDPRDSLKKLDTACSFGCKKNSQGNISFWKGYKLHLDVSDSGFPITACVTAANVHDS

SEQ ID NO: 104595 - protein, 166 aa, Unknown
  Obtained from environmental sample
  DOMAIN (32)...(166): YjeF-related protein N-terminus
  misc_feature (1)..(166): Xaa is any amino acid
LRVLNDFSSVRSYSLLSAEDSRTLDKEAQYEWGFNVFSLIETAGRFSAEIFVRHFGELLKNNSKISVFSGTGNNGADAMVMLRSWILSGLVEASNCTLVVSRLPKSGETSPWTEMLKSLEKMKVPVFAWNGETGKKLIRNSDIIIDGVAGTGISGPLRDAAVEMVN

SEQ ID NO: 104596 - protein, 108 aa, Unknown
  Obtained from environmental sample
  DOMAIN (1)...(59): Oligopeptide/dipeptide transporter, C-terminal region
  misc_feature (1)..(108): Xaa is any amino acid
TSETLLNPVHPYTIALLSSMPDLQTKEKLLNIPGTPPNMIFPPPGDAFSVRNKNAMKIDFEMEPPMWKISDTHYAATWQLHPKAKKTELPLVLKTRIERMKRSGIPNG

SEQ ID NO: 104597 - protein, 188 aa, Unknown
  Obtained from environmental sample
  DOMAIN (1)...(94): CBS domain pair
  misc_feature (1)..(188): Xaa is any amino acid
VFAATGFSRLPVYRENIDNIIGVILLKDFHHEVIKKGRPPAEIIKPVVFVTKTMKISSLLRTLQKKQSHLAVLVDEFGGTLGIATIEDILEELVGEIWDEHDKVVEPFRRNADGSLSVLGSVKFQDMLEFINEDSQEEGDIPNTTVGSWVLENSGSLPRAGDRFVWRNVRITVSRMLRNRVMEVMVIK

SEQ ID NO: 104598 - protein, 272 aa, Unknown
  Obtained from environmental sample
  DOMAIN (97)...(262): ABC transporter
  misc_feature (1)..(272): Xaa is any amino acid
MESLLKRYAEQQEEIAKSQALIQRFRYKASKAAMVQERIKKLEKMERIVIPESFKKISISFPPAPHSGRIALNLERIGKCYGVRQVLSGMDLTVEAGERLIVAGKNGAGKTTLLRILAGADKSHEGTVNYGTGIAVGYYSQELAEELNSGETILSYMENSAPTALIPKLRDMLGAFLFRGDDVYKALSVLSGGEKSRLALLKLLLKPVNLLVLDEPTNHLDIHSKDVLLNALRAFSGTIIFVSHDRAFMEALSTKTLELRQPSDGSAGGPSW

SEQ ID NO: 104599 - protein, 262 aa, Unknown
  Obtained from environmental sample
  DOMAIN (1)...(262): Permease family
  misc_feature (1)..(262): Xaa is any amino acid
MVIGLYLAPTAMKMAMLIDTNDPDTYSIVYLSIAAVTLGVTITANILLKGFFSTIPILIGLIAGYLFTLVMGGFFPESGYAIISFQAVKDAPWFGLPKFQIPAFSFVPILTFVIVSLATICEHLGDTLVTSKVVGQDFYKNPGLHRTLTGDGLATAWAAFWGGPPNTTYGENIGVMAITRVYSVWVIGGAAVIAVLLSFFRKFGALIQTIPTPVLGGISMLLFGIIASSGLRTIVESGVDFKDKRNLTISSVIFVIGIGGGK

SEQ ID NO: 104600 - protein, 249 aa, Unknown
  Obtained from environmental sample
  DOMAIN (63)...(248): Cellulase (glycosyl hydrolase family 5)
  misc_feature (1)..(249): Xaa is any amino acid
MAKKIIATAIIAIFGIIINFSACDNETDQGGNDPRPASPEPMSSKTAMQYFTDEGIAAGWNLGNTLDAVNNWSYKSPVSEEDCWGNPPANQAIFKGVKDRGFNIVRIPCTWTGHIGPAPDYKVSQDRLRRVAVVAGYAKEAGLKAIINLHHDDGDDLGGWLLLGDAAANQNNLDQITDKFEKVWKQIAEYFKDYGDWLIFEGMNEVHNEGWGWGQSFQNNPKLFIDIVNKWNQSFTDAVRSTGGITPNA

SEQ ID NO: 104601 - protein, 291 aa, Unknown
  Obtained from environmental sample
  DOMAIN (162)...(291): Methyl-accepting chemotaxis protein (MCP) signaling domain
  misc_feature (1)..(291): Xaa is any amino acid
GVAVLTAVPALEWYAVAIRPVTKEDYDTSMTTFFIIVLAVIAAIFVVFNVIIARMINPLRNMTKVLHQTSIDWDLTRRLDVGKSDEIGVVANSVNEFFENTRLVIEKMRASSDTIADSSEELLRVSGQLTDGSERTVDQSRAIVDAVDKVVSNISAMASGAEHASKSVNEVAGAAESMRENMNTIDGAIKDMGVRMGKIADNTNEVHEIAADAQGMASGATEVMNKLNTASKEIGKYTNVIKDIANMTNLLALNATVEAARAGEAGKGFSVVAGEIKQLAEQSASSANDIT

SEQ ID NO: 104602 - protein, 191 aa, Unknown
  Obtained from environmental sample
  misc_feature (1)..(191): Xaa is any amino acid
MEDKISISLLQRILVENQEAVQKIELSERELVLEAKGNYIFIGPRQAGKTFCLFQIIKQYIKKYSAKKILYINFEDDRLLTFNASHFQLLLDAYKSLFKETPILFLDEIQNIDGWEKFSRRLADSKEYKIFITGSNAKMLSKEMATTLGGRYLIKNIYPFSFSEYLVANKVKLTEHWQFSNKRYEIRRTFN

SEQ ID NO: 104603 - protein, 260 aa, Unknown
  Obtained from environmental sample
  DOMAIN (113)...(259): Histidine kinase-, DNA gyrase B-, and HSP90-like ATPase
  misc_feature (1)..(260): Xaa is any amino acid
AATNIARDTEAINTETKQFSKLMSAELPWNSSLIHEFRSLELLISKLGSYVKNYAIDAGNDIRGAYDSIISLRMLPLSTVLESYPRQVFSIASDLGKKVKIKIEGAENEIDKNLIESLSEVFLHMIRNSIDHGIESPQERLAAGKNETGLLTINCVRESGNMKVTISDDGKGIDIEGIRNKIVEKGIVSKENAVDLEEGELINYIFQSGFSTAEKLSSVSGRGVGMDAVRSNIERMKGSIAIQTKVGEGTTFTISVPLSL

SEQ ID NO: 104604 - protein, 273 aa, Unknown
  Obtained from environmental sample
  DOMAIN (112)...(273): Glycosyl hydrolase family 3 C terminal domain
  misc_feature (1)..(273): Xaa is any amino acid
ASCDYGSTCTGPSLTSDAVRKAINAGIDLAMEPGDGNNQTTNFVSYLTTLASNGQVSDDRINDAVRRILRAKFRAGRMDNPAGISNTVKNTYGDIGSTAHRAIAREAVRKSLVLLKNDNSALPISKTAKVFVTGSHATNTGYQCGGWTGNGCETSGYNQTCYGWTNTRDNVQGATSIKDGFNKVVSNSVANSAGEASVIVYVTGEKPYAEWHGDLQSLTFQDNLSNPNLASLKNQNSGKKIITVFISGRVMETSSLISNSDAFVAAWLPGRKA

SEQ ID NO: 104605 - protein, 50 aa, Unknown
  Obtained from environmental sample
  misc_feature (1)..(50): Xaa is any amino acid
DESRDKLRKLSRKRIQAGKDVKTELLFIDLVRQIEKLGDYCYSISGALSY

SEQ ID NO: 104606 - protein, 224 aa, Unknown
  Obtained from environmental sample
  misc_feature (1)..(224): Xaa is any amino acid
MNAIVYSERMEKIKEGMARAGIDAFFVSPSSNLFYLSGCALGPDERLFLLVLPVKGEPFLLANLLYKEQVKIIQVNDQVYWKDGEDPFSLLKAEIEKRNIALNKIALEPQIPALFSLPLGKTFPSACFELGSSLIDPLRQCKDETELDLIRKACKESDRALGVLTEKGDYWIGKTESIFLSELSAEISRNGVYDFDASVQAGANAAIPHYATGNAVIERGNACS

SEQ ID NO: 104607 - protein, 77 aa, Unknown
  Obtained from environmental sample
  misc_feature (1)..(77): Xaa is any amino acid
MQKVDLKISSMSLANLRAKPVRTVCLFVVVAILAFTLFGGSILALNLRQGLNTMTKRFGADLMVVPEGSSDKAQALL

SEQ ID NO: 104608 - protein, 208 aa, Unknown
  Obtained from environmental sample
  DOMAIN (1)...(208): Protein of unknown function DUF48
  misc_feature (1)..(208): Xaa is any amino acid
VIERGKQRVMQIPIHTIGGIVCFGNVLCSPFLLGLCAERDVAVSFLSEHGRFLASVRGPVSGNVLLRRQQYRMADDEEATRKIAANLISGKLANCRIVINRTIRDHAAKVDAVALKEASENIGNIIERIPRMLQTDEVRGLEGQAAAEYFRVFDHLIVDQKEDFVFAERSRRPPLDEVNALLSFVYTLLAHDVRSALETVGLDPAVGF

SEQ ID NO: 104609 - protein, 280 aa, Unknown
  Obtained from environmental sample
  DOMAIN (45)...(209): Radical SAM superfamily
  misc_feature (1)..(280): Xaa is any amino acid
LTDLDYLTLLSPAASAPETLELMARHARDITKNRFGNVILLFTPLYVSNICDNRCLYCSFAHQNKIKRRHLSVDEVRSEAAGIAATGLRHILMLTGESRRAAPVDYLAECVSALREHFSSISIEVYPLDEVEYSELVGAGADGLTVYQETYDMAVYASLHDGGPKANFEYRLLAPERGCAAGMRSATVGALLGLANPLRDAFFSGLHARYIAERYPSVEVSASFPRIRPQAGEFEPEFCVDDKTFVRYMTAFRLFMPAAGITVSTRESAALRDAVLPLGP

SEQ ID NO: 104610 - protein, 233 aa, Unknown
  Obtained from environmental sample
  DOMAIN (66)...(227): DHH family
  misc_feature (1)..(233): Xaa is any amino acid
MCGMKRWVFREGTYAPTAPLVERILAVRGFADAQAQKEYLEPDFGALYSPLLFKQMSLAVTRVLRAREQAERVAIIGDYDADGITASALLFRLFRALDMPAPLIYLPHRLYDGYGLTPNLVTRAIQDGAKLIITVDTGITGVEAAVLARDKGIDLIITDHHQVIGEIPPCLALIDPWLPGETYPFKELSGVGVAYKLAAAVLAQVFPVMEAERFLKWSFDLAALGTIADLFRL

SEQ ID NO: 104611 - protein, 201 aa, Unknown
  Obtained from environmental sample
  misc_feature (1)..(201): Xaa is any amino acid
MTDRKLTVKQKLGFGIFDLGGNMLFTLMSFWALKYLTDTVGIAAVWAGSAVMIGKAWDAVTDPMMGFISDRTLSRWGRRRVYLLFGCVPMCLTMLFFFTAPTYLPQYLHIFWAILALMMLNTASTIINVPYSSLTPELTTDYHEQSSLNGYRFGCAVFGTIAGAGAVEPLVNIFARPDAPNPLKDQRGFSMMGFILGAVMM

SEQ ID NO: 104612 - protein, 184 aa, Unknown
  Obtained from environmental sample
  DOMAIN (1)...(62): RuvA N terminal domain
  misc_feature (1)..(184): Xaa is any amino acid
MFNSIQGIITEKFADSVYILSGGVEWDIAVPATDILRLPEPGEQGRIFTWLYHREDQMKLYGFCAQERRTTFLELLKVEGIGPKGALKIMGGIGQEELERALETEDLARLEAVPGLGKKTAQKMILALKGKLAMAKTVAETPYGDLVEALAEMGYDKRAAAEALSRAEGELPPGVSGGEKEKLL

SEQ ID NO: 104613 - protein, 135 aa, Unknown
  Obtained from environmental sample
  DOMAIN (55)...(132): Transcriptional regulatory protein, C terminal
  misc_feature (1)..(135): Xaa is any amino acid
YITKPFAPAELAARVKSHIARYTRLTKKSAVSKTFDELDFGRLRINNSTHQVFVDEAEITLTRKEFELLYFLAVNREIVFSKEQLYDKIWGEDMYGDIKTVSVHIKRLRGKIEKNPSEPVHLQTVWGSGYKFIGL

SEQ ID NO: 104614 - protein, 124 aa, Unknown
  Obtained from environmental sample
  misc_feature (1)..(124): Xaa is any amino acid
MSGILILADDLTGANDTAIQFVKRGFTTLVVINADSANAGLFGSYNVVSVNSGSRGLNADEAYSVVHRIAKHFEAASFVYKKVDSVLRGNPGQELAAVMDALEINLALAAPSFPANRSVIDNGV

SEQ ID NO: 104615 - protein, 191 aa, Unknown
  Obtained from environmental sample
  misc_feature (1)..(191): Xaa is any amino acid
GINESGVSRNVPADLKQLPMMFLQAGLQLIANGQWPLGLGFIAAAGSSAIISGYVDGASKHAQGGVFDEYGRAARMFAAGGAFTNQIVSSPTYFAHGGGLGLMGEAGPEAIMPLTRMPNGDLGVQTAGSGSNVVINIINNSGAEVRQEETETPGGGRQIDITIGDMINRHIASGKADRAMGVRFGVRAQGV

SEQ ID NO: 104616 - protein, 131 aa, Unknown
  Obtained from environmental sample
  DOMAIN (5)...(131): Bacitracin resistance protein BacA
  misc_feature (1)..(131): Xaa is any amino acid
VGIIEGILLGAIQGITEFLPISSSGHLVLFGELILPGSGAMNPFTEVVFHLGTLGAVLIVFAREVFSVFLSPFAVIPQIRENGRTALRAYAPLRLLGLVLLATLPIAIAGLLFHNEAEALTERPGAVALLL

SEQ ID NO: 104617 - protein, 149 aa, Unknown
  Obtained from environmental sample
  misc_feature (1)..(149): Xaa is any amino acid
MFERFQALPIESGAARDVWGALALGIFPVNDEVSSSFSESGVLHLLVVSGLQITMIMATAEAFFRRILKRGSGLGAIVCGLAFAALVGFSAPIWRGLLMGVAWVFGRAQGWRVPPALSLHLALLFWMATHPASGCAPGFLIGWWAMLGL

SEQ ID NO: 104618 - protein, 218 aa, Unknown
  Obtained from environmental sample
  misc_feature (1)..(218): Xaa is any amino acid
ERLDEVIAKIISTPTGLNEIVILEAGKCVPIAAQREYHGLSSQIIGKIKKVRVPFNIDIGIGDVIIPKPEKRVIQTQLGGYDTPEILTYSLESTIAEKFDAIIQRFELTGRMKDFYDIFYLAQTFDFDGQKLTYALKETLRNRKTEYNKESFRQILELVDSHDIQVRWRYFQKTINQAGLPLSEVMRLFDSFLHPVFESLVSGENLTGKWNAGYRKWL

SEQ ID NO: 104619 - protein, 75 aa, Unknown
  Obtained from environmental sample
  DOMAIN (48)...(71): 4Fe-4S binding domain
  misc_feature (1)..(75): Xaa is any amino acid
MGHTVVNAPEKCVGCRSCEMICSLNNKGLCSAEKSNIRVFFDMFTAKVEIQISNCIGCKQCLSYCPEGVLRFVEG

SEQ ID NO: 104620 - protein, 73 aa, Unknown
  Obtained from environmental sample
  misc_feature (1)..(73): Xaa is any amino acid
MSEKIYGWKGVILRIDLTTGKISRESSLPIVKDFIGGLGLGAQLMWDEIPPEIGPFDPENRLIFATGPLTGTL

SEQ ID NO: 104621 - protein, 185 aa, Unknown
  Obtained from environmental sample
  misc_feature (1)..(185): Xaa is any amino acid
AKEAYGTEETADAFTYTDKARAAVIVQHMSRLKNSLVLCDWSAFPINSSPNTPEYRGDPDIERRLFCAAVGLDLSREEWAKFGERIFNTERAIMARDGRRRRDDTVEDYYFRVAETEVAAWEREREEKPIAKPVEFEKMLDEYYALRGADPVTGIPTAEKLEELGLSFIRKELEERGILQPGIPA

SEQ ID NO: 104622 - protein, 305 aa, Unknown
  Obtained from environmental sample
  DOMAIN (218)...(300): Helicase conserved C-terminal domain
  misc_feature (1)..(305): Xaa is any amino acid
ATDKYRKACDLVKRLVRDEDYTVEEKHKNVQLTEKGVNHIESIMGIKGLYGEHADWVHYILQAVKAQCIFTKDVDYIVRDGEIVIVDENTGRLMEGRRYSEGIHQSIEAKENVQIRKENQTLATITFQNLFRMYKKLSGMTGTAETEATEFLKIYNMPTWVIPTHKPCVRNDMQDQIYKTADAKWKAIIADIKDRHTKGQPILVGTISVEKSEKLAKMLRIEGIPHDVLNAKNHGREAEIIQFAGHKGKVTVATNMAGRGTDIALGPGVVELGGLHVLGTERHESRRIDNQLRGRSGRQGDPGLR

SEQ ID NO: 104623 - protein, 246 aa, Unknown
  Obtained from environmental sample
  DOMAIN (118)...(246): E1-E2 ATPase
  misc_feature (1)..(246): Xaa is any amino acid
MLSGILTQVSRPEIHSKNFQHGNVIARLQLAAGSPTDALPESLATALDGLNADAVEASRELHGDNTVTHGKKTPLIRRLGKAFINPFTVILLCLAAVSSVTDIALAEPGEADFKAVIIIMTMVMISGLLRFVQETRSGYAAENLLKMIKTTTCVQRRETGKREIPLADVVVGDIVHLAAGDMIPADMRILHAKDLFISQSALTGESTPVEKVASVVDGKDYDSLLEYPNLAFMGSNVISGSATGVV

SEQ ID NO: 104624 - protein, 257 aa, Unknown
  Obtained from environmental sample
  misc_feature (1)..(257): Xaa is any amino acid
MNIGISDDGAQNNANPYFALLQSWNAMKDPPLDKSVYGYAEPITVYDANGRKQELMLYMDRAPDPASGKAVEYILTRPPANPAAAVPGEGLLMAGTLTFSGNGQLVDMSAFTPTAVSMNLADWVPAALTNGLPQFSLNGQSIGLDLGIRASGGWQHPPTSALDVGTNRGALPGMGQITARAGATTAYAGASSLSGMRQDGYPQGMLMDVDITAKGVVVGIYSNGQKFDLYQIPLCRFTSEDGLRHEGNNLYLASPDK

SEQ ID NO: 104625 - protein, 117 aa, Unknown
  Obtained from environmental sample
  misc_feature (1)..(117): Xaa is any amino acid
MPITASQPLNKVKEAFRSFQERGGGRVTLEAVLLGGINTRSEDARSIANFAQGLDAAVNLIPWNPVEGLEFEGKALRPPSNAELETFMRELEKLGLNVTRRFRRGRGIMGACGQLGK

SEQ ID NO: 104626 - protein, 80 aa, Unknown
  Obtained from environmental sample
  misc_feature (1)..(80): Xaa is any amino acid
GIVNGVATVLLAIMVDPTSAHITDQAVHGKRSLNDVWSMVFFMQTGRLLATLVLAQLILWPAAQYIMAVTGWITTLAGTG

SEQ ID NO: 104627 - protein, 101 aa, Unknown
  Obtained from environmental sample
  DOMAIN (4)...(101): Ribosomal L18p/L5e family
  misc_feature (1)..(101): Xaa is any amino acid
MPVTKQYRRQRIKMRLRKKIKGTEATPRLSVFRSNRDIYVQIVNDAEGKTLVAASSREKGFSAKGTNTEVAKEVGKAIAAKALAAGVTTVVYDRNGYLYHG

SEQ ID NO: 104628 - protein, 117 aa, Unknown
  Obtained from environmental sample
  DOMAIN (4)...(117): Porphobilinogen deaminase, dipyromethane cofactor binding domain
  misc_feature (1)..(117): Xaa is any amino acid
MKRIIRIGSRDSALAIKQAQIVIDAVKKNDSSIEFELVKIKTTGDKLLDKSPDTVGGKGLFIKELEKALADLCIDIAVHSYKDMPCEEADNLPIIALSERESPFDALVLPRGSDGTD

SEQ ID NO: 104629 - protein, 243 aa, Unknown
  Obtained from environmental sample
  misc_feature (1)..(243): Xaa is any amino acid
MTEKQKKILLISGGALLVLLITGLILFLALRKNGAVDADITKTGADARRNNILKLVNTYAQSGEYDRALNLLDGLLIDNPDDEEALALQRAILSMDRGGGGGNDSDRTNALLEAQRRFLEEQQRQNAVLASSLQRAGSEASSKSAAEAEAAAERKAAAEAEQARKKAQDEELAKASREMQEIMRKVNNLVADGKAKLTANDLQGGTQLFNEAKKLIPPSETRFDAQKLSEMADAYYDFSTRNN

SEQ ID NO: 104630 - protein, 193 aa, Unknown
  Obtained from environmental sample
  misc_feature (1)..(193): Xaa is any amino acid
MTRTEKLKQFFEQIRGKGNPTAQDIRNAAAATGNIAEILPEILSYAGGMGISAASELADLTDAREESRQAELLRQKAESLAKKSGDLAAEADPEKRRELIKEIRKDVVSLEPSAGGGFQFVRIDSLKVGAPFWLVKGLIEIDSFGCVYGDTASGKTFFVIELSSCIVTGMSFYGLPVKQGPVIYICGEGQAGL

SEQ ID NO: 104631 - protein, 85 aa, Unknown
  Obtained from environmental sample
  misc_feature (1)..(85): Xaa is any amino acid
MKITETAVALCAVGAEKVVSNELKKLADKDKTPCIKVEDSLYGRVRFQADKKGLYKSLIGLRAADRVLLEIASFKATDFDALFEG

SEQ ID NO: 104632 - protein, 88 aa, Unknown
  Obtained from environmental sample
  misc_feature (1)..(88): Xaa is any amino acid
MGVLPLQFKPGESAATLGLDGTETFTIKGVTEFNEGRTPVEVAVTASKPDGNQVSFSAIVRVDTPGEADYYRNGGILPYMLRNLAKAA

SEQ ID NO: 104633 - protein, 139 aa, Unknown
  Obtained from environmental sample
  DOMAIN (67)...(129): Putative carbohydrate binding domain
  misc_feature (1)..(139): Xaa is any amino acid
MATKKQSKVAKKQTKATAKKQTKAAAKKQTKAAVKKQTKAAAKKQPKAVVKKQVKVAKTETSQTVGGQYGYFDDANKEYVLRNPATPIKWCNYVGTLAFGGIVDTTGGTVLCKGDPALHRITKYISQMPCSDFKGSTTY

SEQ ID NO: 104634 - protein, 254 aa, Unknown
  Obtained from environmental sample
  misc_feature (1)..(254): Xaa is any amino acid
PFLYALFGLWLGQAAAAPIISGAAADLYPNPETALSSQFPGPAPETFWAALARAKELLEAGKLDEAEAAYQALRRNNSGELKFEPTFQLAQIRLRQGRFRQAISLFLEILNRRPDLPRVRLDLALAYFLDKNYEDAALQFELVKGGDLPPEVLAKVEGFLEAIRRQKNWTVDFSLGLAPDSNINQASGGKEECLDLEGDFKGLTLCRPLPKKASGVGANLNATFNYFWRFSQDWGLKATLGGYGLAYEQNDNEL

SEQ ID NO: 104635 - protein, 278 aa, Unknown
  Obtained from environmental sample
  misc_feature (1)..(278): Xaa is any amino acid
WVFNEEIIDKLQEVTNKIKPNNPKYIYRNLFSNNDHFYFYKDDNWEKYLKEIEKARTKALHEIYNNNGVNGILEFAFSVEDKYKIGFSLWAIKDKNIEKSILPEYLISTDVSKKQLVKGFINGCFSNEKEKWINTFDFTTWEKTQICSLLLNISYHEKIWNLAESLLGDNINEFWEKIFESPYALYGNLIIAIENLIKYKRPLFAAELIYIHYYRNKEFLKDEALSALISGISSDEKIDTLDVNCIAELITLLQNEKEIDQDKLFQIEWAYLDFLDID

SEQ ID NO: 104636 - protein, 263 aa, Unknown
  Obtained from environmental sample
  DOMAIN (137)...(263): Methyl-accepting chemotaxis protein (MCP) signaling domain
  misc_feature (1)..(263): Xaa is any amino acid
ALGDLMKIDAEILSAARKYQGKPEASAEIDAVCDTLGRDTEVAKTIQCLEEMDAWIDKRIEAIIDDTYDEAQFILRTAIIAAIIVLIAALSMSILFPRSISKMARSISEEIRINAEGVKLHTGELATGSQALAMGANQQAASAEEIAASLEEVSSMVKNNSDTAHEVDRLVSATKTAVEVSQESMRRSLAANEDIARASGETAKIVKTIDEIAFQTNLLSLNAAVEAANAGDAGAGFAVVADEVRGLSIRSAEASKRTADLID

SEQ ID NO: 104637 - protein, 202 aa, Unknown
  Obtained from environmental sample
  misc_feature (1)..(202): Xaa is any amino acid
MGSVGLSAVALALKISTGPVITGGIDFAFSMDASHARSTPRRRDFENRQTRFRSLIDTDTGLRDGTCTAVSKTGVQTRTNPAMRKYRDLFEQEFGGNPRLFDISGPGLPLGVKTVSAKEAFAVLNGPGGLPATHKSAPTDKKELMADESKSKIVAFAKREADTLEEIKKMLSGAVAAEPDKLEALLNTADYLWAHFPECAGT

SEQ ID NO: 104638 - protein, 180 aa, Unknown
  Obtained from environmental sample
  misc_feature (1)..(180): Xaa is any amino acid
MAKGELSDLIMNNSGWTIYRVNETAHQADLNDASEKSKVRNYLVGFMRGVSEDWVISSAEKFCSQVKESGFDAAIAAAGLTKQSFGPLPLNFGNFILLGSIRSSGIPELEDAGNNQFFWKAAFSTPLKSPSTPLVIGDNVIVLYPLEEIPEEEDEMEFIEAYFPYWLESAADNNFRMNFL

SEQ ID NO: 104639 - protein, 246 aa, Unknown
  Obtained from environmental sample
  misc_feature (1)..(246): Xaa is any amino acid
MCHAAVQQNGQALQFVREALRTPEMCLVALQQNRLALRHMPEVLRTPEVCLAVVQQNGQALQFVPEALRTPEICLAALQQNRLALRYVPEALRTLEMCLAAVQQNGQALRFVPEALRTPEMYLAAVQQDGQALRFVPEALRTPEMCLAAVLQDGYALEYVPEALRSADFNNTPSACLEMIRKKCSNIQFVPESILTEEFCIDAIEANAEVIQYLPVALRTEKVCHAVIDADWILRLKQSPPQIDSW

SEQ ID NO: 104640 - protein, 265 aa, Unknown
  Obtained from environmental sample
  DOMAIN (1)...(265): Borrelia P83/100 protein
  misc_feature (1)..(265): Xaa is any amino acid
GVGLGQSVRARQARAGTNNRYFVIHSVTAPDSDKLDSDIFGLGSSAGVDHIRNLRTIIQGYLQEAYGYSASDAALIAEYITIYNAVYRGNWNYFSGRFKKPVVDNLNRDSAGLAVRYQEWPGRTLMLIPLNSSGLSSINTSAISDSRVVERMRTEDDKGIPQRQGMVDLKEREAAQARQDAANKQEAARAEAGAIAKDRQSLDEEQRQIERDRQRLEQEKASGKVTDEEAARREAELARRDADADKKSDALTQRESDLAAQRQDA

SEQ ID NO: 104641 - protein, 284 aa, Unknown
  Obtained from environmental sample
  misc_feature (1)..(284): Xaa is any amino acid
WLDKVANSTFGENYSIDAIAFGNGKFVAGGSGPSSSYVTKMAYSSDGVTWTAVSNTTFDTYSIHAITFGNGKFVACGNGPSSSDVPKMAYSSDGVTWTAITQNVFSNGINSIAFGNGVFVAAGSGRIATSTDGVTWTSISNSTVDTVYPRAIAYGDGKFVAGNGYSFNEIAYSSDNGVTWTRVDLDDITGSLASSFKAIAYGNGRFVVAGAGYMVTSTDCVTWTAIPETGYFSDSTNAIVYANNKFVAVGDRGIIVTSTDGVTWTMASTNTFHYNYIYNGNTYT

SEQ ID NO: 104642 - protein, 272 aa, Unknown
  Obtained from environmental sample
  misc_feature (1)..(272): Xaa is any amino acid
MIAQYRDSGGILNLAPFVDGLLPDMKKLLGEDPAISGKDFIYRDIMPDGKMYSIPSYRVALAQRNTFIRKDWLDKLGLPLPKTTQEFYNALVAFRDKDPGNVGRSNVIPYGQDDDTRWGLSNIIRSFVDPNMSDRDRYVYIAAERYFAFPGYKEGVRLINQWYNEGLIYHDFAQMKRTTSDFANLLKTGRVGAFGGNWDYPYRTDYKILEDLHRNVPGSDFVAVDCFQSSDGIAHKDLMDKQGLRIFVPSNSKNPEAALRYLNWLCIRENYH

SEQ ID NO: 104643 - protein, 123 aa, Unknown
  Obtained from environmental sample
  DOMAIN (4)...(120): Porphobilinogen deaminase, dipyromethane cofactor binding domain
  misc_feature (1)..(123): Xaa is any amino acid
MKRIIRVGSRDSVLAIKQAQIVMDAVKKNDFSIEFELVKIKTTGDKLLDKSLDSVGGKGLFIKELEKALADLCIDIAVHSYKDMPCEEADDLPIVALSDRESPFDTLVLPQGNDSIDTLKPVG

SEQ ID NO: 104644 - protein, 268 aa, Unknown
  Obtained from environmental sample
  misc_feature (1)..(268): Xaa is any amino acid
VTQRLYRKLDENGYVTEKAGEQLFCEQCGRFLADRYVRGICPQCGYGEARGDQCESCGKLLDPTELKESRCATCGKEPRPKATSHLYIDLPRIKGRLEEWIKEASARGEWANNAVQMTSAWIRDGLHERAITRDLKWGIPVPRPGYENKVFYVWFDACIGYLSITGSLAEDAGKDWKAYLDYWWKSPEETELFQFIGKDNIPFHTVIFPSTLLGSGEQWTMLHHMSSSEYLNYESGKFSKTRGVGVFGTDVMETGIPVDVWRFYIFYN

SEQ ID NO: 104645 - protein, 92 aa, Unknown
  Obtained from environmental sample
  misc_feature (1)..(92): Xaa is any amino acid
MSKFICTSAIDGAVAFVAQAVNKLEEAVKQKGLDCPVGFPDTNYFLPVIYSFTGKKMKTLADLKNILEEAKALLPARPAENVWLPYLGSALD

SEQ ID NO: 104646 - protein, 222 aa, Unknown
  Obtained from environmental sample
  DOMAIN (59)...(213): Domain of Unknown Function (DUF748)
  misc_feature (1)..(222): Xaa is any amino acid
VLTAKTLAARGILADLSARNLSVNTLSGTGVSAWPIRDKDGNLVLPLPAGNDAAPSADWHTTIGNVQISSANITLTDHGPRETAVLPFSELRLSASGLSTRPGAQWTAEVSARPGRQGLVQVAAQGAFSPPAISFRIKVDKADIVFLAPYLQQFAAPALSEGFLHAEISGRIASGRRGGIHMDAAGDAGLHGVSLTERGKEVLGWGRLRAEKVRYRKTPRDA

SEQ ID NO: 104647 - protein, 255 aa, Unknown
  Obtained from environmental sample
  DOMAIN (1)...(255): BPG-independent PGAM N-terminus (iPGM_N)
  misc_feature (1)..(255): Xaa is any amino acid
MGCGRVFNQGAALVSKSIETGAMFEGTAWKEVIANLKNGKPVSGREPTLHFLGLFSDGNVHSHMDHLKAMIAHAKKEGVKRVRVHVLFDGRDVGETSALEYVDPFEAFLKDLNKDGFDAKIGSGGGRMWITMDRYGADWEMVHRGWQTHVFGNARQFATTREAVETYRKEIPGVIDQDLKEFVIAENGKPIGTIEDGDSLIYFNFRGDRALEITAAFEDDNFTHFDRGRRPKICYSGMMEYDGDLHVPQRYLVSP

SEQ ID NO: 104648 - protein, 252 aa, Unknown
  Obtained from environmental sample
  misc_feature (1)..(252): Xaa is any amino acid
MPTNFDFLKTEPQFASFADMAEQAELVLSISPALSATGCRTTLEFAVKWLYSVDKSLTMPYEKTLVALMNSEDFRDFLPSGMFPKLSYIRKIGNNAAHHPGSITTDQAVLALENLHSFMSFVGYCYGSDYVETPFDKTLLTTAKPAPVAAVPIPQPEFDFETLLNENFSKREKLTARRAAQLKQGYTVKPMDFTEAQTRKAYIDVMLEDAGWQRGTNWVDEYRIDEMPNKSGTGVADYVLFGDDSLPLAVIE

SEQ ID NO: 104649 - protein, 271 aa, Unknown
  Obtained from environmental sample
  misc_feature (1)..(271): Xaa is any amino acid
ELKSYRAELVNDLVTKIKSLNRDNFAAKQHLRIIDKYQREDDFKTLTYENTLQIAEHIAPLIPPDGDDISAVRFDMLLYQIELAMLAGKPCKRAKNDLLKKAGELLRYGATIPAVAAHKEIIEQILHNGYLERAGIKDYDEIRVKLRDIIKFIPNEERSRYDTNFTDDILSVEWNESQLDNDDLANYKKKVSYYINQHKDDIPAISKLKGNIPLTPSDIKSLEHILWNELGTKEQYDLQYKNTPLGELVRSIVGLSLQVANEAFSSFLNDA

SEQ ID NO: 104650 - protein, 274 aa, Unknown
  Obtained from environmental sample
  misc_feature (1)..(274): Xaa is any amino acid
SKAPNELGIYDMSGNVWELVGDRYGDYDKTPQTDPSGPPYGSSRVMRGGGWSSGARACRVSHRMSLSQSFISNDVGFRLAIGRKKAIPEPQPMSQLAMLKPTYVKTRRSEAVFAAPVADTAPSKAFHIKTRSLRSTDKLDKGVSIGLGGFYSADYGGGIAWANKEEVAMPYGGGGAYIFIDAVYAEAFMGYSGGGGKWESQDAKSKNDLPKMSRSYFNTGVMLKYPMNMGVGLSSVFPLVGIDYETAMSGKLTYANGNVYEFDKEDGAGRGRLN

SEQ ID NO: 104651 - protein, 219 aa, Unknown
  Obtained from environmental sample
  DOMAIN (8)...(219): Uncharacterized protein family UPF0007
  misc_feature (1)..(219): Xaa is any amino acid
MQTAETSIATIICAAGSSRRMGGGKKEYLRLPCISRESSFLPSPLTVLGAAVSAFASLPQIKLIVITVPPGEENKARSCLPKELQSETERVYFVSGGKTRRASVHNALLFLAGHKPSHVLIHDGARPWIDRGLIEKIIEATILYEAAIPALPLVETPKELDSSAVEVKLIKRHLRRENLCAVQTPQGFAFPEILAAHGKAAKKEEQESFEYTDDAEVWG

SEQ ID NO: 104652 - protein, 234 aa, Unknown
  Obtained from environmental sample
  DOMAIN (12)...(161): RNA pseudouridylate synthase
  misc_feature (1)..(234): Xaa is any amino acid
IPFYSTVFINDDIVVVNKASGISIGGDRWDESKERLDRLLEKELEIPKIYTVHRIDRDTSGLVIFARTREVHRSLSILFERRKIEKRYIAIVHGRPSWKETVCDLPLVPNGNKKHMTIIDKYHGKESLTHFSLISGAGNYSVLEVKPETGRIHQIRVHAAALGHPVVCDNLYGKEKPVMLSSIKRGWRGDPLKERPILARLGLHALEIKLPDGQIFSAPLARDMSALLKQMEKL

SEQ ID NO: 104653 - protein, 240 aa, Unknown
  Obtained from environmental sample
  misc_feature (1)..(240): Xaa is any amino acid
LVGSPLWDWQTDVAAKDPPTDPINNLAFVCHFYAAEHGINAPFWEAPSKTFRDIVQGALDANKPVFVSEWGTNDASEDGKSDFAETDKWHAFLDANNISSCAWGVTASDYNVLDYWTRVGSPLNYDINDLNNWTNPGMMTAHGRYIYRWLTGKDTSYSSTIPVLPEFKGSKIPIALSSNIYSYSNDSSKTTLNVESGIVSLAYTLNDKDYEWDPYAAFAFDIDWLSDCEYGIGYAYKGSA

SEQ ID NO: 104654 - protein, 282 aa, Unknown
  Obtained from environmental sample
  DOMAIN (49)...(210): Type III restriction enzyme, res subunit
  misc_feature (1)..(282): Xaa is any amino acid
ITAAYNENPADFLYFFTLYNIFSEFLADISEDILPNETTGFKESKIWNKLYAFQRDAALAVISKLEQYNGCILADSVGLGKTFTALAVIKYYENRNRNVLVLCPKKLSDNWRTFRENYKNNPIAADRLRYDVLFHTDLSRKHGMSGNIDLEKLNWENYDLVVIDESHTFRNGGEVHGEDERDNRYNILLKKVIQAGVKTKVLMLSATPVNNRFTDLRNQLALAYEGKPALIHDKLNTARPIDEIFRLSQKAFNLWSKLPLEQRTTSSLLRMLDFDFFEVLDS

SEQ ID NO: 104655 - protein, 258 aa, Unknown
  Obtained from environmental sample
  DOMAIN (10)...(224): IMP dehydrogenase / GMP reductase domain
  misc_feature (1)..(258): Xaa is any amino acid
MAKIIDEVSRTFSEYLLIPRLSCVDHQPGSVSLRTPVTRFKRRGAEEEGGGVERDPRFKWWADKARFSLNLPFVSASMQSVSGPEMAIALARLGGLAFIYCSQTIEAQAAMVGKVKAHKAGFVPSDSNLRPDATLADAVALSKRTGHSTIPITDNGSGNGLFLGILTDKDYWEFDDDLSLPVRDFMTKAENVKLAYVGISLHEANKRLREYKKECLPILDSKEHGHLHSLVFKMDYVDHINNPSELLDKQKRFAVGAA

SEQ ID NO: 104656 - protein, 257 aa, Unknown
  Obtained from environmental sample
  DOMAIN (1)...(255): Phosphomannose isomerase type I
  misc_feature (1)..(257): Xaa is any amino acid
LREKLNKNTPAGRPIGESWEISGWGDSQTVVSAGEYMGLTLGELFALSPTDLIGTDTAKGQNNSFPLLFKFIDARENLSIQVHPNSEQAQVRGWGERGKTEAWYVVDASPGAQIALGFNRGDVTREEAAEAAESGRFESLLNFVPARRGDALFIPAGTVHAILGGVLIYEVQEESNTTLRLYDWNRRCPAGHLRELHIADALDIINFNEDRALKPKPIAVDKNETFIYDTLCANKKFLLSRYSFSKPGEIGMETING

SEQ ID NO: 104657 - protein, 276 aa, Unknown
  Obtained from environmental sample
  misc_feature (1)..(276): Xaa is any amino acid
MVCSCTLAGGSEIAGSKLKSKTGWKAYDFSEKNPKAPKCKWTGSDERGRPVEYNKCATDEYGCSALPGSGICKGCLSTGEAGYWWTSNGGGIVKQLGGYYILQMFYHQEKTFMGATNMFSGDIFTGYFHYYENDLFSVRCVQKDPEVVAKQAADAETARVAAEAEAARIAAEAEAARKVAEAEAKAAELKKQQEEAALIKNGLTDPRDNKKYKVAKIGSQVWLAENMNYDVKGVGSACYDYKLDNCKKYGKLYNWERAMEACPSGWHLPSDKEWDI

SEQ ID NO: 104658 - protein, 52 aa, Unknown
  Obtained from environmental sample
  misc_feature (1)..(52): Xaa is any amino acid
MSGVGFTMVEILSPCPTNWTMDPIQAVEWLEKNMVSVFPLGEVKNVLSGGAK

SEQ ID NO: 104659 - protein, 200 aa, Unknown
  Obtained from environmental sample
  DOMAIN (1)...(101): FAD synthetase
  misc_feature (1)..(200): Xaa is any amino acid
GHTGDILTIRQKLAIFESLGVSLTIVIDFSESFSRMKGADFLQILYEHGKMSFMAVGSNFRCGYQLSTDALMIQELNARRDIPTCIVQPLTEGGHPISSSKIRAAVVQGKLEAAGAMLGRPFTVDLSRSSVPSPVKAAGGFAYDIAGSGGILPPPGKYPVFLLDKNSNKINGNPVEILVEDGSIIIAGDLEGLSPEYIEF

SEQ ID NO: 104660 - protein, 84 aa, Unknown
  Obtained from environmental sample
  misc_feature (1)..(84): Xaa is any amino acid
LHWKVPGWADAWAWPCFGRSAGRNGVAATEEEYIAKAVALAEDVDLRRALRVPQREQMRASPLCDYDGVARALEDAFRHMCGGA

SEQ ID NO: 104661 - protein, 87 aa, Unknown
  Obtained from environmental sample
  DOMAIN (18)...(71): Ribosomal protein S18
  misc_feature (1)..(87): Xaa is any amino acid
MAFKKKFAPRRKFCRFCSNKDLPLDYKRPDILRDFITERGKIIARRITGVCAQHQRHLTREIKRARQMALLIYTATHASDVKKKSTM

SEQ ID NO: 104662 - protein, 286 aa, Unknown
  Obtained from environmental sample
  misc_feature (1)..(286): Xaa is any amino acid
TQAAPPAPAEQVNDAYYPDFTVADPSMRDAFVMSGGAAAGASGNDAEFLAWLMAMTMEARDARDARESRDAREARELREAREDRAVREARESRASRETREAREIREAREAREAREARERAEIAAAAKKQTPPPPPRPAPPPQPTAQAVRPQNQNNPVPINNQLQTDRPLINLPPTDKQNSDNNWALNINDFEPVSAAPQNRDLRVSSNQSQAVNRASPPVQGLEPVKPENLKIVPGLPDRHTGQVYKLQIGAFSSIDTANKTAATLKSAGFYAEIEPVGGVYRVYA

SEQ ID NO: 104663 - protein, 232 aa, Unknown
  Obtained from environmental sample
  DOMAIN (103)...(195): Helicase associated domain (HA2)
  misc_feature (1)..(232): Xaa is any amino acid
VVIDSGLSKLNYYNPRTFTSSLVEAPISKASANQRKGRAGRTREGTCYRLYGRKDFENRQLFTTEEIYRTDLSEVVLRMADLGITSFEEFDFISPPSKEGLIAAIETLDLLDALESDHSLSNTGRLMTEFPLPPRHSRIIVEAILKYPYVIKETIIAAAFLSTQSPYLLPPGEETDARQAHHRFRDEDGDFVSYLKLYAAYMESSSKQKFCEKNYLDERAMAEIANVQISWK

SEQ ID NO: 104664 - protein, 52 aa, Unknown
  Obtained from environmental sample
  misc_feature (1)..(52): Xaa is any amino acid
VIAVGPERGWSDRERELFEKAGFMRLSMGSRALRTETACVAATALAMEKIME

SEQ ID NO: 104665 - protein, 213 aa, Unknown
  Obtained from environmental sample
  misc_feature (1)..(213): Xaa is any amino acid
MKIFGTVKAATVAAAICLAFADVSAATATVNLSSEKQVIRGFGGMNHPIWIGDLTAAQRETVFGNGDNQLGFSVLRIFVNHVRNDWQKELPTAKYAYDRGITVFASPWNPPDGMTETFVHATDTTSPRRLKKSSYAAYAKHLDDFVKFMKDNGVDLYAISVQNEPDFGDDWTWWTPAEIVDFLKNNASVINCRVMAPEAFPYTKIRIDPILND

SEQ ID NO: 104666 - protein, 280 aa, Unknown
  Obtained from environmental sample
  misc_feature (1)..(280): Xaa is any amino acid
RVISRDPVAVSLPLEGTVSITRVGNPRVNDVLYADTTSLEGSGVIMYEWKAGGTTMKTSTGTDNTYTVQEIDRNSTITVTVTRANNSGPITSSATKTVLSPIDIDQPGPGGGKVYYYSADGFVMDDSGLRCHYLEAAASNQASGVSWGSSETFTRTPTGITTFIATSDPLASKIGNGRKDTKTIVDWIAFLKANGSPSISCVASYCYNYRGPNNLDNWFLPSAGELYKMYEYKRDYGASLSTNYWSSSRSVEPGRMWNQDFSSGSQAPWVTSTAGTAVRA

SEQ ID NO: 104667 - protein, 127 aa, Unknown
  Obtained from environmental sample
  misc_feature (1)..(127): Xaa is any amino acid
MAQLAIHNAKVYLERGSFAQAVLVRGDRIAAAGTNEEMLSIAPGAERIDAGGGLLLPGFNDSHLHLYAFGRNKHRIQANGVASIDELVMRGRDLIDRIKPPKGSVVSGTGWNQDMFTGEKRPPNRHD

SEQ ID NO: 104668 - protein, 232 aa, Unknown
  Obtained from environmental sample
  DOMAIN (62)...(208): ATPase family associated with various cellular activities (AAA)
  misc_feature (1)..(232): Xaa is any amino acid
MAATKSGGVVDMVDPDGVVDANGKVGTESLFGADENHHYFGSSQSIESVKSDVGAVAATDCAVLILGETGTGKSVLARRIHDHSARSGKAFIDINCSALRGELLKSEVLGHARGSFTGAVNDRVGLVEAANGGTLFLDEIGDMPPEVQSLLLKIVEEKTFRRVGENKERKSDFRLICATNRNLRVAVTAGKFREDLFYRINTFHITLPSLRNRREDIPGLVEYLLKKMGYAE

SEQ ID NO: 104669 - protein, 82 aa, Unknown
  Obtained from environmental sample
  misc_feature (1)..(82): Xaa is any amino acid
MLYPKILDVEVLDNYKIKLKYETGETKIFNVLPYISGTWYEELYNDSYFKTVHLISGGKGIEWEHGQDIAPHELYDMSIIVN

SEQ ID NO: 104670 - protein, 152 aa, Unknown
  Obtained from environmental sample
  misc_feature (1)..(152): Xaa is any amino acid
MQRRVTVIAGYGKGSGKTTLFNAALIEAQKHWPVGAFTIGFEGVKASPSLTRVRPGDVVITTVALARAAEARLEIIETLGGRSAIGPLCVARVMRGGTASLVGPEHFSQLAYAIEFVQSKGLVESILIDGAAGRLTQAGAIPNAQLVYCARA

SEQ ID NO: 104671 - protein, 259 aa, Unknown
  Obtained from environmental sample
  DOMAIN (6)...(246): PHP domain
  misc_feature (1)..(259): Xaa is any amino acid
KNQRFSSLHNHTIFCDGKDDIETMCRAAFEKKLCALGFSAHAPITKKTGIESHWNLKDDKFEEYVEQVLAAKKRWRGKLEVLLGFEVDYIKGLRSALDKDITEVNPDYLIGSVHYLIPANGAKPFTVDGPQEELTQGINEGFNGDAQAFMNSYYDAQLEMIALGGFDILGHADLIKKNCFGKNLWPGEIEICRQKEIARAVSDAAGDAIGDAVGDAIGDAVGDTASDAAGKAGIIVETNTGGINRKRINEVFPSETFLR

SEQ ID NO: 104672 - protein, 288 aa, Unknown
  Obtained from environmental sample
  DOMAIN (133)...(209): HipA-like C-terminal domain
  misc_feature (1)..(288): Xaa is any amino acid
RSSALSLSDHYWIEEENKNNKWEDVNFYENSFDKEIGGLFFAKISNVYGRNTPDLSSGGNLRKRWEINTEGERFLIKAGREPYMQEPVNEEIATKLCKKLNIKHVAYITKTENDEIVCQCNNMTNKNIELIEASRVYDIKTPLFFDINNKYNHYIKTLNYLKVPDGIAMLDRMMVLDYILLNHDRHFRNFGVLRNSKNLNNYEAAPIYDSGSSLFHEDSVGKIKLPEYHKLRTECFDTLENQLNLVKDWSWLDLNKIKFFGNDCKDLLLKYESVEKSRAEAIGKCINE

SEQ ID NO: 104673 - protein, 178 aa, Unknown
  Obtained from environmental sample
  misc_feature (1)..(178): Xaa is any amino acid
MRPGFARFLAKPNGKFGLLLVGFFFLIAILAPIIANDAPIYLRVHGKSYFPIFSSSRGLPPDIANGIEWRTWIERKEYDAIIMSPVPFHPTKVWLDEALLPPGEKGHILGTDNLGYDILARIIHGTQVALSVGIVAMGIAAVIGIALGSIAGYFGGRADMVISRLIEIVICFPLLFLI

SEQ ID NO: 104674 - protein, 251 aa, Unknown
  Obtained from environmental sample
  DOMAIN (51)...(251): Glycosyl hydrolases family 18
  misc_feature (1)..(251): Xaa is any amino acid
VPPLTPSVPADAPAPAAENEISEAEEEEEEEEEFYVELPPPNSTLPVSVFPEIWTYVVADRESALRPGLPISDVGYFGAEIDSYGNLVDVPNRTRLRNFSGRVHLVVGCNGRALTHFVLKPGSDERKKLIADLINATRNYDGLQIDFENVGARDGEPYLSFLKELRAGIGNKMLTVALAARTRKIADDVYDYEKILPVVDRILVMAYDEHWSTSAPGPIASLAWCGRIAEYSLRVIGKEKLIMAIPFYGRG

SEQ ID NO: 104675 - protein, 208 aa, Unknown
  Obtained from environmental sample
  misc_feature (1)..(208): Xaa is any amino acid
LCLLFPCILPAQEALKSVEEEYCDFLALQGYTKRPALNYRTLSDSKWNIDETTEHPWKGQNLGVYHSLFGDFRLRAYGPELFMSGNTAAPYGQNDGVLWQGRGFNALLKTGVRFEGYGVELTLLPHFAFSQNAEFEFMPSVYESKYGYFWGYGVDAPQRFGDKPFFDWDFGDSEIRYTWKTLTIGFGTQAIWLGPAYLNPILHSNNAP

SEQ ID NO: 104676 - protein, 271 aa, Unknown
  Obtained from environmental sample
  misc_feature (1)..(271): Xaa is any amino acid
YYYTFSDGEKCEKEEVEKLAEEMKKLVSQNLPITFKYLAYGEAVEMFKKNRQADTALLLEQRSTSRIKVNECLGYMDIYIQPLLEFTGQLVSFELMPYQDGFLLRFPGIGKGKEIAPFVDEPDLFQVYSDYKKWGRMVGVRVVGELNSKVADRTFLDYIRISEAHQARKLSQTAEKIYSKHDKIKMILIAGPSSSGKTTSAKRLSIELMVLGLKPIAVSLDDYYRGTAATPKDENGEPDYECLEALDVPYLNEQLQALYRGEEITLPVYDF

SEQ ID NO: 104677 - protein, 257 aa, Unknown
  Obtained from environmental sample
  DOMAIN (1)...(31): SecA preprotein cross-linking domain
  misc_feature (1)..(257): Xaa is any amino acid
VKDGEVFIIDEFNGRIMEGRRYSDGLHQALEAKEHVEIKKESQTLASITYQNYFRLYPKLAGMTGTALTEAEEFEEIYKLKCLDVPTNLPVKRVDFEDEIYLDEKSKFDAIVALIKDCHARQQPVLVGTVSIEKSEKLAEYLRKAGIKDFNVLNAKYHEKEAHIVAEAGVPGTITIATNMAGRGTDIQLGGNFDMRFAYETSGISDAALVEEKAEEIKHDIARKKKIALEARGLFVIGTERHESRRIDHQLRGRTGR

SEQ ID NO: 104678 - protein, 98 aa, Unknown
  Obtained from environmental sample
  misc_feature (1)..(98): Xaa is any amino acid
TLIRSYPFYTQYPVPAASYKGQNAAVKTVAVKATFIVSSKLSENTVYNLTKALFESKAQIEAAHVKGSELSFAYAVGGISVPFHPGAERYLKEVGALK

SEQ ID NO: 104679 - protein, 89 aa, Unknown
  Obtained from environmental sample
  misc_feature (1)..(89): Xaa is any amino acid
MVPSEVAQSLIDINPKLDRALIEKTVAFVMEAHEGQLRKSGEPYIKHPIEVAKILANLRMDSVVVASGLLHDVVEDTVHSIKDIQENFG

SEQ ID NO: 104680 - protein, 279 aa, Unknown
  Obtained from environmental sample
  misc_feature (1)..(279): Xaa is any amino acid
GKNAIDKILSGHYTPEEINEIVKSYAPSNPKIDDNILDTLLENLKKSISIDKHEIQKTIVTRCFRQEFSGNINHINKPDTQGIVSLEIKKNIVEVKIKSNECVFIDDKVGILHDAIYIDTPFIMDDVNIFFSDGYTTFYNMLKHRDDLLDRLINSESDSTILEEIIIKQKITNLLHKINSVVNGNFKEVDNNLMYAEQGLNKPIPLENVSAGIKMFLIIKRLLELDEINERDILIFDEPEIHLHPDWQIKFAEILILLQKEFNLTILLATHSPYFLHAM

SEQ ID NO: 104681 - protein, 113 aa, Unknown
  Obtained from environmental sample
  misc_feature (1)..(113): Xaa is any amino acid
MPIKPELLEELNNRRKEAKLGGGADKIEKRHAKGQLSARERVETLFDKNSFQERGLHVDQAKPINKRLPGDGVITGIGNVEGRPVSVFSQDFTISGGSLSQMHAQKISDLQDQ

SEQ ID NO: 104682 - protein, 252 aa, Unknown
  Obtained from environmental sample
  DOMAIN (11)...(134): Glycosyl hydrolase family 20, domain 2
  misc_feature (1)..(252): Xaa is any amino acid
MARYAIIPEPAFIQYHNGNFQYRGLPLPTLPENNKSIQNEVQVFCSQVINIWGRKACPKNSGKMKLIITEGCSGNTREVDTESYQLEILPDDIRLSAASGTGIFRGLQTLRQLFLSGYNEGSLSIPCGIIKDKPRFPWRGFMLDCSRYFYSIEFIKKIMDALSLHHISIFHWHLTDDQGWRLPVRQYPLLTEIGSKRRDHRLHDKFVGGFYTEAEIKDIVAYAACRHIEVVPEIDLPGHTSAVLAAYPGLGC

SEQ ID NO: 104683 - protein, 223 aa, Unknown
  Obtained from environmental sample
  misc_feature (1)..(223): Xaa is any amino acid
MREGSFITGNAGGSSGGGVYMYGGTFNMNGGEISGNNAGYGGGVYMSEGTFTMNSGKISNNTANTFHGGGVYVSGGTFTINGGEISGNRCHSNGGRGGGVYVSSSETFTINGGKISGNSARYGGGVSISGTFTMNGGEISGNDCSGDSPSGGGVSISGTFTMNGGEISGNTCRGSNNSGGGVSIFSGFSTMKGGKIYGNNASLGGGMIVHGTFTMIGGKIFDN

SEQ ID NO: 104684 - protein, 285 aa, Unknown
  Obtained from environmental sample
  DOMAIN (171)...(188): Bacterial transferase hexapeptide (three repeats)
  misc_feature (1)..(285): Xaa is any amino acid
AYAHISQYLNSQVPFGAGKYPRRREKCGTLAFASTNDVSFCIDEAAYGAARTTKAAAVFVPENFAGWAGEAKVLARVKNPYEAIIKCAEILNKKEFTSSEIHSSAQISPNVLVPPGVKIGENCVLHSGVNLYPNVEIGSGTILHSGVVVGSRGFGFYECNGEQATVPHFGGVVIGSNCEIGPNSVVAAGFLEPTRLGDFCKLDSFVQIGHNCIVGSNAMFCSQSGLAGSVIVEDNVTLAGGAQVAGHLTLGKGCVVAAKAGVTKSVKPGARVAGFPAIPIEEWRR

SEQ ID NO: 104685 - protein, 137 aa, Unknown
  Obtained from environmental sample
  DOMAIN (2)...(116): Response regulator receiver domain
  misc_feature (1)..(137): Xaa is any amino acid
MKQILMLIDSHQFRDYLRLKLQKNGVEVSVASFSHDCAAKMRRIVPDLMILDYQEDNVSFMELFRQKKADPNTVNIPVIVLAQKLGQKQLLEMVPYNVKRVFTKPIKIDALFGTLTELLGIPFSIDESPGILEVNVN

SEQ ID NO: 104686 - protein, 224 aa, Unknown
  Obtained from environmental sample
  misc_feature (1)..(224): Xaa is any amino acid
MSVNIFERVKDTLHQRLDSVIPELLPGGKIVGREYVCGSLQGGPGSSCKTNLDTGKGSDFSIGESWGDVIGLWAKVRSIRQGEAARELADKYGIRLEGAPQTPKAVPFPAVSSVFTPIVPVPDNAPEPPRVHPQHGKASALWRYTDGQGRTLAYTVRFDLPDGYKEILPLCYGSSGNGQRWHWKALPEPRPLYSLEKLAAMPESPVLLVEGEKVADASQGYFRI

SEQ ID NO: 104687 - protein, 292 aa, Unknown
  Obtained from environmental sample
  DOMAIN (19)...(124): CARDB
  misc_feature (1)..(292): Xaa is any amino acid
TSGLYQQHQFGGKTAKPSLAGITLSATGTHTFAAATVGYAAAPTALSVNVTNTGNEATGALTAALSGANAVSFTLSTTSITSIAAGATTTGAFTVRPNTSLAVGTYAATVTVSGGNGITANFSVSFTVNPAAFTSAPVLTLAAGSRELTYTWTASNPAADTYDVYWKAGNNLSAADVKTGTKISGAASGGKITGLTNGTAYGVLVTANKANYASIDSAVQTATPILSSFTAAPSLTLVAGNTELTYTWTASNPVADTYDVYYKAGNSLTAADVKTGTKITGATSSGKISALT

SEQ ID NO: 104688 - protein, 273 aa, Unknown
  Obtained from environmental sample
  DOMAIN (3)...(273): Peptidase family M20/M25/M40
  misc_feature (1)..(273): Xaa is any amino acid
ERPDRQRRHDHFGADDKAGITAILELLRICKEKKVLFHKLKIILTVEEEIGLHGAKALKFQDVRADYCFVLDSDGDVGMVINKAPAQELLDFRIRGRSAHAGLAPEAGINAVKIAAAAISKIKSGRIDRETTANIGIIQGGAATNIVPEEALVKTEARSHDERKLQKQARAMINAFQNAAQKFGGTVEIIRRREYETVDVPADAPIIKISRLASQKLKLPHKVLTTGGGSDASIIFGYGIPTIGLCIGMEKAHTRAEYITLRNLTLLPVYLLE

SEQ ID NO: 104689 - protein, 244 aa, Unknown
  Obtained from environmental sample
  DOMAIN (30)...(117): Divergent AAA domain
  misc_feature (1)..(244): Xaa is any amino acid
MPASSPSTESQTLEWKSAWRDDHLKWVCGFANANGGTLVIGKDNSGKVAGLPNARALLEELPNKLRDLLGIVATVHVREAGGKEYLEIAIPAYPNPISYRGRYYQRSGSTLQELKGAALDRFLLRRYGRTWDSSPLPGVTMADLSQAALTRFRKLAEHSGRLETGALSEPDAALLDKLKLTEGRFLKRAAALLFHPDPLTFAAGAFVKIGYFYSEAELAYQDEVNGGLFTQAEKTLDLLFTKYL

SEQ ID NO: 104690 - protein, 56 aa, Unknown
  Obtained from environmental sample
  misc_feature (1)..(56): Xaa is any amino acid
SIVSLLRDQPTLTATAVAETLGKSRSAILRAIGKLRKEGRLRRIGPQKGGHWEIMK

SEQ ID NO: 104691 - protein, 71 aa, Unknown
  Obtained from environmental sample
  misc_feature (1)..(71): Xaa is any amino acid
YVIIKTLLTGDPVAGFPTLICAICFIGGAQLFCIGILGQYLAKTYLEVKKRPVYIVKESKLGDKKDIYEPH

SEQ ID NO: 104692 - protein, 274 aa, Unknown
  Obtained from environmental sample
  misc_feature (1)..(274): Xaa is any amino acid
VRGGTFAPWSWTLGAGSDYISMIAYYMASPLNLLAVLAPHAYLREALTVILILKIGLAGLFMGMFVRYTFMQSGRESDRLLALPVFASLYALCGFTLGYYWNIMWFDSFALLPLVIQGLIAIMRESKYRLYTVTLALAVMLNYYIGFYICVFVVITFLNQCVILNLKGRDILRKLAMVAACSVLAIGLTAACTFPAFISLQNTAAVANKFPSAITWFNNYAKVLGNLVAFIKPTTKEGLPNLYCGMVSVLFIGAFIHSPKIPLREKIVNAATVI

SEQ ID NO: 104693 - protein, 215 aa, Unknown
  Obtained from environmental sample
  misc_feature (1)..(215): Xaa is any amino acid
SNSYQDKETTGKMDFYEERNKSTAEMKTQSTYDGWDFKDTWIIVSNLNNGYPILQWQLQNIKSPIVSYLPPQTYTGSAIEPTFTVTFNKNKLTEGSDYTFSYSDNINAGTAKITINCIGNYAHLGSIEAYFVIATTTPIFSNRENPKIGRIGVLTTTNAILLSNLPPNAKVEVYNLQGKRLYSAHPENPKILRIEVQTGMYIVKINSQTIRTVVR

SEQ ID NO: 104694 - protein, 273 aa, Unknown
  Obtained from environmental sample
  misc_feature (1)..(273): Xaa is any amino acid
VNGTSETFTVTPNATSDGFYNATITVKNNYIIKAFAVSYTKGTPVAHSIELVEGSKTLTSSTTLEFIDTTAKTVTVSNTGTGTTGVLTIAKSGTNAASFTVSKSSTADIAKGGSDTFTVKPNDGLAVGTYTATITVSNTGNNITATFSVSYTRLANSIALKTGDETLTGSTTLEFDDTTAKTITVENTGGEATGVLNIGKSGTNASSFTVSKTETANIAVGGSETFTVKPNDGLADGEYTATITVSNTANSLSASFNVSYTKRGSQPPGPLST

SEQ ID NO: 104695 - protein, 86 aa, Unknown
  Obtained from environmental sample
  misc_feature (1)..(86): Xaa is any amino acid
MFATISLITNRKTGIPVIPRVSIINTYGSWIVFIADNNNVAHRREVKLGLDNEELVEILDGISMGDLVITAGQNFLSDNDPVRIVD

SEQ ID NO: 104696 - protein, 195 aa, Unknown
  Obtained from environmental sample
  misc_feature (1)..(195): Xaa is any amino acid
MPTPKLTAALACTLLCTALFAQQIGTFTDTRDGKVYKTTKIGEQVWMAENLNYDAKESKWSKCYNDSISYCEKYGRLYDWETAMKVCPKKWHLPSNEEWKVLVALVGGENIGGKYLKATNGWNWNDVKKKSGNGIDAYGFSALPGGIGSWANNSFGFVGEGGSWWSASDNYGEHAYGNNIRYEYDDVISGYNMKG

SEQ ID NO: 104697 - protein, 77 aa, Unknown
  Obtained from environmental sample
  misc_feature (1)..(77): Xaa is any amino acid
AALGYDTMMLVIDGMKAAGSFEPAAVKDAIAKINGPYVTGNIRYDSDRNPIKGAAILEIVKQDGKLVNAYKTTVNPK

SEQ ID NO: 104698 - protein, 175 aa, Unknown
  Obtained from environmental sample
  DOMAIN (50)...(152): Pyridine nucleotide-disulphide oxidoreductase
  misc_feature (1)..(175): Xaa is any amino acid
GGAYTCDALIIATGAQAKWLGISKDEELSRNGGGVSACATCDGFFYRGKVVAVVGGGDTALEEAIYLTNHAEKVYLIHRRDALRGSKAMQDRAKANPKIEFAWNKVISQIITDTKDLRGGGKVERISSLELKDTMDGSLSNLKVDGLFVAIGHQPNTALFAGQLPLDENGYLVVK

SEQ ID NO: 104699 - protein, 129 aa, Unknown
  Obtained from environmental sample
  DOMAIN (1)...(127): HpcH/HpaI aldolase/citrate lyase family
  misc_feature (1)..(129): Xaa is any amino acid
MIRDAGIYGADCLMFDLEDSVSINEKDGARFLVFQALTTLDYPGKELVVRINDPRTQPGRDDLEAIVGTRKAVIRLPKTECSDDVTYCAGLIEAVERKTGAEPGSTRMMAAVESAAGGLNAKEIAFASN

SEQ ID NO: 104700 - protein, 97 aa, Unknown
  Obtained from environmental sample
  DOMAIN (1)...(95): Citrate lyase, gamma subunit
  misc_feature (1)..(97): Xaa is any amino acid
MEIRKTSVARTMESGDIMITLESGSGGIEIGLQSMVEKQFGRQIRSVIANTLGELQVTNAKVTAVDKGVPDCTIKARVKTAVHRASGETSYEWKVPK

SEQ ID NO: 104701 - protein, 175 aa, Unknown
  Obtained from environmental sample
  DOMAIN (157)...(175): SEC-C motif
  misc_feature (1)..(175): Xaa is any amino acid
MNDKEALIGPDYLNALIRDCYLQSIDNRWLDHLENMEALREAVYLRHYAQKNPLTEYKVEGFQIFDAMVDAIRQEIASRLHLVRINVAPSGDGSPHRGAGRPSRTITAQSASHSSMASFGSGAGAQGHSPMGSGAPYNGAGRPDGATVVRGQPKVGRNDPCPCGSGRKYKHCHGK

SEQ ID NO: 104702 - protein, 234 aa, Unknown
  Obtained from environmental sample
  misc_feature (1)..(234): Xaa is any amino acid
GEEVAKARLSKIYRQGESSDIAENAHRILAGKLPNLQNGSHFHYMPYQNSEEALSILNRLSKNGELQVLTPMHKGTLGTQNLNAFMQKILNFNAYGFDYRNIHWQIGDPVMQLKNNYEKDIFNGDLGRITRVMPTAKKIEADFEGKTITIEGDEFEHLTLAYACTVHKSQGSEYKSVAVVLDYTHSIMLQRNLLYTAVTRAKENIWILASQGSLETAVRNNRERHRWTALSEFI

SEQ ID NO: 104703 - protein, 137 aa, Unknown
  Obtained from environmental sample
  misc_feature (1)..(137): Xaa is any amino acid
MLEKSRTLGGYSAFVGKVREYEQTFTLEDAMKKAIKYCMDNDILKTFLETHGSEVFNMLLTEWDTEEAKVVWREEGREEGREEGREEGREEGREEGREERDMEIIRNALAKGFPIETVQELTGIDIKFIQSIQAEHI

SEQ ID NO: 104704 - protein, 251 aa, Unknown
  Obtained from environmental sample
  misc_feature (1)..(251): Xaa is any amino acid
LLDHPKGRLQHWVPPCLRVRLEPSWEQSIIEKERQRIEAGIERLRRGGVICADYGDRFSESDGSMATLHLTEWQSEASLPLQAQPVREFSGRLGELGEYLQHSALTGNRIFLAGSTAGMRDRFKEIIRDYELPLSSGADAGCRALALNLSGGIHLVGQKLIVLTEREVFGRRAVPPPKPQKSRISAFLSDLRDLKPGDRIVHLDHGIGEFIGFGEITIGGEEQDVIQIRYADGGRVNVSLERADWCRGTSA

SEQ ID NO: 104705 - protein, 242 aa, Unknown
  Obtained from environmental sample
  DOMAIN (2)...(214): Orotidine 5'-phosphate decarboxylase / HUMPS family
  misc_feature (1)..(242): Xaa is any amino acid
FHKAVIDATAAYAAAYKPNLAFYEAQGAAGWVQLEKTVRYIRQRYPEQFIIADAKRGDIGNTSKCYAEAFFERMDFDAVTLSPYMGRDTVQPFLEYRGKWAVLLALTSNASAADFETVATAGGDKVYETVLKTSQQWGTTDNIMYVVGATQAAMLESIRKIVPNHFLLVPGVGAQGGSLEEVVKYGMNDRCGLLINSSREIIFADSGKDFAAAAGAKAKELQGQMLKIQKFNDLIIQLKIKN

SEQ ID NO: 104706 - protein, 262 aa, Unknown
  Obtained from environmental sample
  misc_feature (1)..(262): Xaa is any amino acid
IKVANAWWGAGQMMFNKIMVVVDGDVPLTNYAELLRYVAQHYHPATDTYFGNGPLDVLDHAASAPACGGKICIDATNKELEAEGLPVTTDNRQALFSFVHKGDKLPLAKIAVQFDREVNLDDFATCVWLLGNNIDAGRDCRVKNGQLIIDAAAKPEAIAPRHWPNIVCMDNHTITTVNNKWAAYGFEQFIPSPSLKYRPLVKNDGAFMNTTTHSDMSNPQLEIHNVHYYNSPVGWLKIEATAAGICSVLYCNEKPEETTTTN

SEQ ID NO: 104707 - protein, 79 aa, Unknown
  Obtained from environmental sample
  misc_feature (1)..(79): Xaa is any amino acid
MSRRGLPTLDEALEKMGVLSLMAERARVRGLEQGMEKGLEQGMEKGLETAARNAMTKGLPIDVIHDITGLDIEMIKQLA

SEQ ID NO: 104708 - protein, 271 aa, Unknown
  Obtained from environmental sample
  misc_feature (1)..(271): Xaa is any amino acid
LEDTGKECFIFFPESLTDFSEYKELLAASSHVKTVQVDNGSFATGSESKDSAPFREGDVFFYTNARSEITEAALYIIALHENQNVPWDAISVSIPDTGNYGPYVFREFDNRNIPYIRQSGKPLASYPAGQFFAAVAGCSSESFSFASITALLLNRHLPWKDNEKIQALIQFGIDNNCICSWIEEAPPEEGAPSKKGDGKEKKINVWEDAFENHAKEDASPSSEGASSNSAWLYTFFKKLTFMINAMRYADSFSAIRKHYFAFRGFFFDMEN

SEQ ID NO: 104709 - protein, 239 aa, Unknown
  Obtained from environmental sample
  misc_feature (1)..(239): Xaa is any amino acid
LGEVQEGLKPEGPFGDHLGYYSEMHPFPYLKVHKVFARKDAVFPFTVVGRPPQEDTIFGNIIHRITAPLIPRVLPGVHEVNAVDAAGVHPLLLALGSERYLPYKKREPLELLVQSNAILGFGQLSLAKYLFIAAKEDNQNLSVRNIPAFFEHILCRLNLERDVHIQNSTSIDTLDYSGTSLNRGSKAVFAAAGEPCRELGEASPIKGILVVQGNKLETQENAGQFPIAVLCDDANFTAK

SEQ ID NO: 104710 - protein, 81 aa, Unknown
  Obtained from environmental sample
  misc_feature (1)..(81): Xaa is any amino acid
MSNVITHNDPHSPYVEMRHISQAFGTVLANDRVSLNAGKGEILALLGENGSGKSTLVNMLAGIYIPDSGSIHIDGVQRNFW

SEQ ID NO: 104711 - protein, 62 aa, Unknown
  Obtained from environmental sample
  misc_feature (1)..(62): Xaa is any amino acid
EKKKGVAVLYIGEDLDVLMELCDRLMVIHAGKIMGIADPKTVSKEDIGLMMLGEKAEAAWQA

SEQ ID NO: 104712 - protein, 145 aa, Unknown
  Obtained from environmental sample
  DOMAIN (22)...(140): Response regulator receiver domain
  misc_feature (1)..(145): Xaa is any amino acid
FCGHRIYTEENASDINGIFAGHCILLVEDVEINREIVLTLFEPTLLKIECAENGVEAIRKFSETPHAYDLIFMDIQMPEMDGYEATQRIRALDIPEAQTIPIIAMTANVFREDVEKCLEAGMNDHVGKPLNFDEVLGKLYFYFGL

SEQ ID NO: 104713 - protein, 263 aa, Unknown
  Obtained from environmental sample
  DOMAIN (59)...(157): Methyltransferase domain
  misc_feature (1)..(263): Xaa is any amino acid
YFFESYKKQYGKTYLEDFPNLVAMAKRRLRHISKIFHTKSTKEQRSQRKEENEGAPLLLDIGCAYGPFLVAAKEEGFSPFGIDPAGDAVRYVQETLNIPAVHGFFPNCQFPAPQGGNAAPPLYDVITLWYVIEHFHDCAIVLAEIKKLLKPGGILAFSTPSFSGVSGRKSLHKFLKNSPADHFTVWSPKMCKKALALAGFKVKKIVITGRHPERFPLLGKFAKSKKSPLYWPLMAFSKIFGLGDTFGVYSQKNSTTNHTNITN

SEQ ID NO: 104714 - protein, 240 aa, Unknown
  Obtained from environmental sample
  misc_feature (1)..(240): Xaa is any amino acid
KKLYAATGAVPRELENVPDPEMEKQWGGHAGTGQAALAACNPGKFLAEIVGRHHGRLTRHARISTDEALGGPAWQKRRLEFLDVLKARFRDPWPRIASQAEADVLAGLTTVADWIGSGPLFDDPQADWRELVGRAVPDAGFMKADVLPGLSFADIFGYSPYPAQERFYTACAGPGVYLLEAPMGHGKTEAALYAAYRMLCANAATGMYFALPTRLTSNKIHQRVEPFLQKILARTSPQKT

SEQ ID NO: 104715 - protein, 155 aa, Unknown
  Obtained from environmental sample
  DOMAIN (3)...(152): N-(5'phosphoribosyl)anthranilate (PRA) isomerase
  misc_feature (1)..(155): Xaa is any amino acid
MKIKICGLFREQDIDYVNEARPDYAGFVFAESKRKVSQEFAAQLRRRLSDDIVPVGVFVNAPLADIAALYRENVIVIAQLHGAENDEYITRLRAASAEGGKTPVKVIKTVKSAELEQNTPVAAGADYYLIDSGAGSGKPFNWELLSSFKIKKPLF

SEQ ID NO: 104716 - protein, 74 aa, Unknown
  Obtained from environmental sample
  misc_feature (1)..(74): Xaa is any amino acid
MDVQMPEMDGYEATRRIRALDILQAKTIPIIAMTANVFREDVEKCLEAGMNDHVGKPIDFREVLDKLHFYWIKP

SEQ ID NO: 104717 - protein, 148 aa, Unknown
  Obtained from environmental sample
  DOMAIN (1)...(148): Tryptophan synthase alpha chain
  misc_feature (1)..(148): Xaa is any amino acid
FKRCGGCGLDGIIVPDLPFEEQAEARQAAAQYGVDLISLIAPTSEARIKEIAATATGFVYLVSSMGVTGIRSEITADLGSMVAAVRSVSSTPVAIGFGIHTPAQAAQMARIADGVIVGSAIVKIAAEYGDAAGPHIYRYVKEMKEAAG

SEQ ID NO: 104718 - protein, 158 aa, Unknown
  Obtained from environmental sample
  DOMAIN (116)...(158): Iron hydrogenase small subunit
  misc_feature (1)..(158): Xaa is any amino acid
ADSPLGTYTGAGTIFGATGGVMEAAVRSAYYLVTKKELLDVNLKAARGLEGVKEGEVDFGNGLKIRIAVAHQMGNIEAVLNKIREARKEGKEMPYHFIEVMACRGGCVAGGGQPYGATDKLRKQRIEGLYHDDEKSQYRCSHMNPYISEVYMDFLGEP

SEQ ID NO: 104719 - protein, 222 aa, Unknown
  Obtained from environmental sample
  misc_feature (1)..(222): Xaa is any amino acid
TGGNGLGRNHAAYLHKIGANVLTTGECCFFKKDLTENMEKMPYVLRPDNLNPQAPGTGSRIYKAGGQKVAVAVLLGQSGFGRLHSTSPFIRVPVLLERLRQETPYVIIDFHAQATAEKKTLFFTADGRCSAVIGSHTRVQTADEEILPKGTAVISDAGRTGSSESVGGCDTASRIQEYLSGIPEWTKDAWEKPELQGVYIDITPDGRAKSIERVRIQVKSEE

SEQ ID NO: 104720 - protein, 177 aa, Unknown
  Obtained from environmental sample
  DOMAIN (2)...(160): short chain dehydrogenase
  misc_feature (1)..(177): Xaa is any amino acid
MKKILVTGSNGQIGGELVQYLREIYGCDNVTATDIKKTTRPASEEGPFELLDVTDGNAVAAVLDSKKIDAIIHLAGVLSARGEGNPQMAWETNINGLYTVLEAARLRGCALLFPSSIAAFGPGTPAKNTPQDTIQRPNTIYGVTKVAGELLCDYYHKKFGMDTRGLRFPGLFLRSPA

SEQ ID NO: 104721 - protein, 231 aa, Unknown
  Obtained from environmental sample
  DOMAIN (38)...(135): Divergent AAA domain
  misc_feature (1)..(231): Xaa is any amino acid
MNKAELLNRLSDIEWDDFEVKEARSELPKSIWETVSAFANSSGGWIVLGVSQTGKSFKICGVEKPEKVEQSFTTVLRSRNKFNVLINPECKKYDIDGKIVLAFFISSSEQKPVYFNSLVNTFVRTASGDHRATDSEINALFREQSFGIRSDLIVEGFKFNDLNTGSLNTYRNRVKNQNPQLLYNDFSHMEFCEKLRITKKGMPTYGGLLVLGKADSIRQKFNDFWGDYLEI

SEQ ID NO: 104722 - protein, 129 aa, Unknown
  Obtained from environmental sample
  misc_feature (1)..(129): Xaa is any amino acid
VNGGLASRILHCDAACVVVNKIAGEAVEGAGKNMADLPRLLAAELSAPRYPPALPAKDALSLPHAVHRLDVPVSGCAVFARAGAALGFLNNEFKAGNIKKYYWAVVEQSGSHNPLDENGGSPEYAELVH

SEQ ID NO: 104723 - protein, 217 aa, Unknown
  Obtained from environmental sample
  misc_feature (1)..(217): Xaa is any amino acid
MNVIYGDNIFESRDTLFDGQKIKEILTSIKKPEDNFEVTVKNEIIWVKDRRGFYSSAGYYNRSKKEITLYLPHIKNNKELIRIAIHEYAHHFLHSSIKHKTEFWECYFELLEIAGSKGLYSCNIDNCEKLKKITSIINEYNMIETRKLLKKESRGIFFILSALCTENDIDFEHYCVKYLKMEWYKRKNAEAALGRFFRLNRINSEVRRDDFLQNIFN

SEQ ID NO: 104724 - protein, 138 aa, Unknown
  Obtained from environmental sample
  DOMAIN (16)...(98): MazG nucleotide pyrophosphohydrolase domain
  misc_feature (1)..(138): Xaa is any amino acid
MDRLRAPNGCPWDKEQTHQSLAEALREEASEVLDAIAALNPDGSNEPFLYRHLCEELGDLWLQVAFHACLADEVGCFDMHDVEKMIVEKLVRRHPHIFGDLVAEDSSQVLASWQAIKEEEKIERGESAQKGLWKKYQP

SEQ ID NO: 104725 - protein, 253 aa, Unknown
  Obtained from environmental sample
  misc_feature (1)..(253): Xaa is any amino acid
MFQYASKTPKAKAKKIRALLEKIAALEKTLAETPKPLVQNAPSIVWICAAGDLMLGRGAGDILIDEGARGVFGKTADYFKRSDINMLNLEGVISGSGTSVIKGYNFRFDPLTVPPLKAAGINAVLLANNHAFDFGEPAFLDTLEHLEENRIAVIGAGRNIKAAAAPFIYKKEQLEIRVFGLASYPTESGGRNSASISASAEKAGMLFGQAGADRLKEHFVHKDGVLNVVFFHGGEEWTWKPDANTRSLYSELA

SEQ ID NO: 104726 - protein, 60 aa, Unknown
  Obtained from environmental sample
  misc_feature (1)..(60): Xaa is any amino acid
VRDFLLERTKEDKKEIGSDIFTVQKKFPLGLPLVEKLDTNLWEVRSRITENSIERDENSK

SEQ ID NO: 104727 - protein, 277 aa, Unknown
  Obtained from environmental sample
  DOMAIN (1)...(230): Nucleotidyl transferase
  misc_feature (1)..(277): Xaa is any amino acid
SGFRKIAILTQYNSHRLLQHIQSAWTFLPGKMGEFVHVYPAQQNETSEAWYIGTADAVYQNLDNVQAVDPTMVLVLAGDHIYRMNYSLFMQDHLDAKADLTIACLEVHKSSAHHFGIAQVDGDGRIVSFIEKPHDPPTIPGKPDTCLASMGIYFFGADFLYKQLADDAADPNSSHDFGKDIIPKAVREYRVFAHSFRKSTIQELNKPEPYWRDVGTLDSYWEANLDLTYIEPALNLYDKYWPIFTFNEQLPPAKFVHSDPRRQGMAIASLIAGGSII

SEQ ID NO: 104728 - protein, 71 aa, Unknown
  Obtained from environmental sample
  DOMAIN (12)...(45): KOW motif
  misc_feature (1)..(71): Xaa is any amino acid
SRPFGWHFQVTFDENSRIAVISGPLSGLEGRIVKVDKRKKRAKIKLDLYGDSFCIDLAFEVLVKSKSDDNI

SEQ ID NO: 104729 - protein, 90 aa, Unknown
  Obtained from environmental sample
  DOMAIN (2)...(76): [2Fe-2S] binding domain
  misc_feature (1)..(90): Xaa is any amino acid
ITIEGFSQTDEYQDIMDGFAEAKLESCGYCSTSKILNAGALLDKIKRPSRQEILHAFSGIKCRCTDPEKLVEGIERTVELRQRRLYGRSA

SEQ ID NO: 104730 - protein, 203 aa, Unknown
  Obtained from environmental sample
  DOMAIN (79)...(197): Response regulator receiver domain
  misc_feature (1)..(203): Xaa is any amino acid
FVQVDSSISRKFGGTGLGLAISKKITEMMHGDIRIESELGKGATFIVTIKAETKKQVAVLAQSNSDTESAVSTEGLKGKQILLVEDVEINREIVIALLEDFEMEITEAGDGQQAFDIFAAAPEKFDLIFMDIHMPGMDGYESTKLIRALDNPRAKTVPIIAMTANVFKEDVEHCLAAGMNDHLGKPLDLNDMINILNKYLGKS

SEQ ID NO: 104731 - protein, 231 aa, Unknown
  Obtained from environmental sample
  DOMAIN (58)...(74): KWG Leptospira
  misc_feature (1)..(231): Xaa is any amino acid
NKFTHLGDFDPGGLAPAQKEPDGLFGLVNRKGVWAVPPRFERVFGFNGGLAPAQEDGLFGFINRSGQWVIKPAFGNVDDFETRLGRAPAEQSGAWGLIDSGGNWVVGPEHLLLLNAGNGAPGPIQVFAGNGRWGLMDENGRWLMEPILTASPYFAANGFSEARVGSLYGFIDRFGHWMVEPAFQQVGPYRRVPMVPPALSPSEERPEPSAPAEERTTTFSIDSGPVEKVSA

SEQ ID NO: 104732 - protein, 83 aa, Unknown
  Obtained from environmental sample
  misc_feature (1)..(83): Xaa is any amino acid
RGEQPLLGKTIVSGLLKFIPGVGSIIGGAISGTTAATLTTLLGKAYISVLESLCADCGDVPPTPEEIAKEFKKQMGLTKFEQK

SEQ ID NO: 104733 - protein, 253 aa, Unknown
  Obtained from environmental sample
  DOMAIN (23)...(56): Tetratricopeptide repeat
  misc_feature (1)..(253): Xaa is any amino acid
DQDDFEGAIAECTKAIELDPDFAGAYCLRGLASECLEDYDGSVEDCTKAIELDPNSDEAYCYRGNAYLKLGNFAKAISDYSEAIKLDPDFAMAYFGRGNAYRNLDDIDRAIADFDEAIRLDPDYIEDCTKAIEFDNNFAKAYALRGQAHAGPGDIDCAIGDAKEAVRIDPSLAPKVHIYGSANASESTRFQSIKLAVLVYFKEGGRYITWGWILAALLLILIAAKYGVLSWQGLLISWSSGRFNLGGGHYDET

SEQ ID NO: 104734 - protein, 221 aa, Unknown
  Obtained from environmental sample
  DOMAIN (123)...(202): OB-fold nucleic acid binding domain
  misc_feature (1)..(221): Xaa is any amino acid
VDIKAVGKKVIELLIQTGAFDNFGMSRETLAGNLERAVEYAQKKKEDKDIGQSSLFEDTAESGFPDFEYKEFPAMGRAERLNLEKQLIGFYFSGHPMDEYREIWQKAVKADLGHPESLKIGNCILVGIIKNVKTITTGKGNKMTFATLADYNGEIEMTFFARAWEKCQSRVEAGKVAMLRGKIEYQQDRERRGFIVDDWVSAQEVDAVIKETEEQERKWTR

SEQ ID NO: 104735 - protein, 166 aa, Unknown
  Obtained from environmental sample
  DOMAIN (19)...(166): tRNA synthetase class II core domain (G, H, P, S and T)
  misc_feature (1)..(166): Xaa is any amino acid
MDWQAPKGTRDFYPEETRIRDYIFDSWKKSCIKYGFEPYDAPVFEHLEVYTQKSGDEIEGQLYAFEDKAGRKLALRPEMTPSLARMVAAKGQELKKPIKWYSVPKLFRYEKMQKGRLREFFQLNMDILGVEDVSADAELIAAAIDMLCDLGLSSNDFHVHISSRTL

SEQ ID NO: 104736 - protein, 263 aa, Unknown
  Obtained from environmental sample
  DOMAIN (1)...(263): tRNA synthetases class II (D, K and N)
  misc_feature (1)..(263): Xaa is any amino acid
NPVPAHSSRTLFKRCIVGGFEKVFEFTKNFRNEGMDKNHSPEFSSLEFYEAFSDYNDMMLHFESICERACIAANGTTKIEYQGKEIDFKTPWQRLTLYEAIQKYAGVSVESLSDEQLKAELEKRHIELKGSWSKGRAILALFEETCEHELIQPTIIKDMPKESAPLCKAHRSNPDLIEQFEPYINGWEIGNAYSELNDPVLQRQLLEEQVERGRGGQDETHPMDENFLHSIECGMPPTGGVGIGIDRLVMLFTNHATIRDVQL

SEQ ID NO: 104737 - protein, 255 aa, Unknown
  Obtained from environmental sample
  DOMAIN (115)...(255): tRNA synthetases class II (D, K and N)
  misc_feature (1)..(255): Xaa is any amino acid
MNQYRTKTCGELREEHTGLTVTLSGWVDTIRDHGGVTFLDLRDQYGVTQIVLHNEFKCSKESVITVTGAVKKRDVETVNPKIETGTVEVHAETLVIQSRAVHTLPFDISESKSTREEVRLCYRFLDLRNPEVKKNIFLRSKVISFLRAKMEELGFTEFQTPILTSSSPEGARDYLVPSRKHHGKFYALPQAPQIFKQLLMVSGFDRYFQIAPCFRDEDARADRSPGEFYQLDFEMAFAGQEDVFHVAENAMYGRF

SEQ ID NO: 104738 - protein, 70 aa, Unknown
  Obtained from environmental sample
  misc_feature (1)..(70): Xaa is any amino acid
MNIDKFVVKKYENLTLKEVAASPVDAIAGISEGDAKLLKEAFNVKTVADLAKLKYVKWAQAICTLAEGEL

SEQ ID NO: 104739 - protein, 218 aa, Unknown
  Obtained from environmental sample
  misc_feature (1)..(218): Xaa is any amino acid
CSTAEFPSYYLPDGTYTATITATDLSGKTSVPATYAFVKDTEAPEVIWGINNTTPLGVGASITGSFNDKLSKLGFEPAAGIDGLGVAQHYFDYYISASSAAPAEGQWKQKGLGVETLVSASWSIPLTGANDLMDGDYYIYVRIADRAGNSKMYGPQAFIVERSPPVITLINPAAGVDLNYGPTVTYINANGNVVDGNLDTTKVFFQVNSAAEVPITVG

SEQ ID NO: 104740 - protein, 78 aa, Unknown
  Obtained from environmental sample
  misc_feature (1)..(78): Xaa is any amino acid
MGGMETFLQWWGGIGYLLSKIFIVRSEILKDGRNSRLIGWFAYLAGMPAWIILLLSRQNWIASAVEIAGIPSIILGIV

SEQ ID NO: 104741 - protein, 147 aa, Unknown
  Obtained from environmental sample
  misc_feature (1)..(147): Xaa is any amino acid
MLKHTTKKTAKKTPKLKQKKSVRKAAAKKTPKNAVKKAPTKAAKKSVKKTVKKAVKKAPKTAAKKRVTKTVKKAPNAVPTLTPKNALTDYIAKNARTGIDTGTAAYLANLSLVAAVAPKVAAAAVKELAEQRANLKLIASENYCSLS

SEQ ID NO: 104742 - protein, 270 aa, Unknown
  Obtained from environmental sample
  misc_feature (1)..(270): Xaa is any amino acid
GSPPTKIETYSDNNIKLPPKGDMERTGYKFGGWNTNSSGTGTNYSVNLSYTVNGNVTLYAKWTAITYTVTVSSIGTNHSGTGDYAAGAEVNIKAGTPLDGQQFKNWTSSSYGVTFADANSAATTFTMPTNVVTVTAIFEATKNMFTDARDGKKYMYVKIGRQRWMAENLNYQTSSGSWCYDNDNSNCGKYGRLYDWTTAKTVCPTGWHLPSREEWTTLVDYAGSYSDPGKKLKSKTDWYSYPGITATDDYGFSALPGGYRRTDDSFYMAG

SEQ ID NO: 104743 - protein, 173 aa, Unknown
  Obtained from environmental sample
  misc_feature (1)..(173): Xaa is any amino acid
MAHISNASLVCMGISAVIAIGVPVSVFLVFRKKFNAKAVPMLVGVAGFVVFALVLEHSIHSVVLGKFQLKENPAAYIIYGILMAGVFEETARLIGFTILKKKYGGIGTALSYGIGHGGVESVLLAGVSMLSALTVGILVNSGSMELITGKLQGDVLEIANNQIKQLADTAPYM

SEQ ID NO: 104744 - protein, 85 aa, Unknown
  Obtained from environmental sample
  misc_feature (1)..(85): Xaa is any amino acid
GGFGNSGLGRTHGELGFKEMVKAKVVVDDTLPGVRQDIFWQPYSDKVYKGLRALADILTGTVGKRIASIPRVLGIFFRYWKKERK

SEQ ID NO: 104745 - protein, 249 aa, Unknown
  Obtained from environmental sample
  misc_feature (1)..(249): Xaa is any amino acid
QQAGASADGGFFPEGEVQVFYFTENDIAKIIDVSKKPQKAYGIAVDIGTTTVALWLVDMEDRKVIAVHNAYNDQIECGLDVISRINYAKKFLPELKMRIIKTINELLIAACKDAGIETNRVVCVSAAGNTTMIHLLLGVIPEYIRLSPYTPAVFLPQCYTAGQVGIGACESAPILFAPSVGSYVGGDITAGLLCTALASPKKYSGVILFIDIGTNGEIVLGNNDFIFACACSAGPAFEGGGIKHGMRAC

SEQ ID NO: 104746 - protein, 249 aa, Unknown
  Obtained from environmental sample
  DOMAIN (2)...(249): Bacterial extracellular solute-binding proteins, family 5 Middle
  misc_feature (1)..(249): Xaa is any amino acid
ISKAYYQKHENDFGTATGGIVATGPFVYEKWTSGQEIILKKNKNYWNKEKLAANIIDTLVFKIIPEDTSRVIALQTGNADFCANLPQDMLDKLSADQNLNFTSVDSFSLTYVALNTQRAPMNDINVRKAISRAMDIPEFQKRIIKNAGKAGTILPFGQALYGDNAAKWQQYLSNTQGYTYDLAVAKQHLARSAYPNGFNCDLIVSENSLANQRALYIQESLKALNINVNIKRMSGDEQDTYQMGGVLDA

SEQ ID NO: 104747 - protein, 161 aa, Unknown
  Obtained from environmental sample
  DOMAIN (1)...(145): Glycosyl transferase family 4
  misc_feature (1)..(161): Xaa is any amino acid
GIPAKAKFAGQIGVACIVFAFGVRINFMTNFFAPGGDYTFYSGVSAFILTIVWITGITNTINLIDGLDGLAAGVSAIASLSISYVAFNLNYYPAALAMLAVAGGALGFLPFNAHPAKIFMGDSGSLFLGYMLAVLSIEGATKSAAVVATIAPVLVLGVPIF

SEQ ID NO: 104748 - protein, 84 aa, Unknown
  Obtained from environmental sample
  misc_feature (1)..(84): Xaa is any amino acid
MQEEAPSLGKPVLVARRETERPEAIEAGTVKLAGVDCETIYAMAEKLLTDRAEYQKMAKSVNPYGDGFASERIVEILKRNLQSQ

SEQ ID NO: 104749 - protein, 248 aa, Unknown
  Obtained from environmental sample
  misc_feature (1)..(248): Xaa is any amino acid
AGREPLFDAGYMDMIRRLALRQSITPGRILGHALPRGLRDATARLRHFSEGKARIVSLRSLASLPPEGLAALGAAWMRGEMDILPARSDAALGEYCRLATDPPWPVRPAAHRQIALLEYLLEHGPTSRRALLKALGSAGAPALASLIRQNIIHIGPLEELADVEQREEQLLPPPPLPFELSTEQQNALTTLRDTLRSRQSGSRLLFGVTGSGKTAVYLELARECLAQGTSALLLAPEVALALKLLRDA

SEQ ID NO: 104750 - protein, 142 aa, Unknown
  Obtained from environmental sample
  DOMAIN (14)...(135): Ferric uptake regulator family
  misc_feature (1)..(142): Xaa is any amino acid
MQDSLGVFQKYLLQKGYKNTQQRVHILRAFLDFAGHCAAEELLAAARRRDPSVSQTTVYRTLKLLCEAGLARELHFGDGMARFERRLDAEEHHDHLICEGCGRTIEFFSAGIEQLQEELARRHNFAPTRHRLYLYGLCPACR

SEQ ID NO: 104751 - protein, 91 aa, Unknown
  Obtained from environmental sample
  misc_feature (1)..(91): Xaa is any amino acid
MGKKSMGLGRGMGEILRDHSADIENFASEKPSEQTTKVPLDLVDANPFQPRKFFNEESLQELAESIKLHGILEPVLLRKKEDRYQIVSGER

SEQ ID NO: 104752 - protein, 265 aa, Unknown
  Obtained from environmental sample
  misc_feature (1)..(265): Xaa is any amino acid
EPEEIAEVVDTIEIDEEVSPDSDIDAEDDVSEALEDESEELSEETLLEAELIAEPEEQIQEEEQEVPIQVVEDVPLPEPPPVEPQVVQPPPPAPPPVQPPVTQVQPPPAAPPPAPPAASSPVQQNQVPERTTPRDPPLPPPFLGPAEPERTPPAPQETFTPVIPELPSLPRNESPEAQIVFSRVVRMTVGQLLEIPFRGTGWVYQGELGNRRGLSYESTRTDIERGVSIGQSIIFRAEAAGTYILRFYRRDYVQDYIINDYVQVM

SEQ ID NO: 104753 - protein, 196 aa, Unknown
  Obtained from environmental sample
  misc_feature (1)..(196): Xaa is any amino acid
MTVREAMAEGKRALKSSCSKALITTPDLDASLLLAETLRLSKEELIIHGETILTADEYKKFQELLERRMSAECVAYILGKKEFRGLDFFVNPSVLVPRPDTEILVEAVLKKWSNVTETGKETIRILDLCTGSGAIAVSLKNEMSCIEVWAADISAEALETAKANAEQHQISICFCQGHLFEALPAGLTFHVIVSNP

SEQ ID NO: 104754 - protein, 204 aa, Unknown
  Obtained from environmental sample
  DOMAIN (3)...(160): D-isomer specific 2-hydroxyacid dehydrogenase, NAD binding domain
  misc_feature (1)..(204): Xaa is any amino acid
EQALSRWKERGKVKSIRNAVVLVIGLGDIGSAYARCMKALGAYVIGIRRTAHVKPDYMDELLLPSQLEEALPRADVIAMAVPATKETAGLIGRSQLAKMKKGVVIINAGRGSCIDTDALCDALESGNLGGVGLDVTDPEPLPADHRLWKLENAVITPHVAGARFMKETGEYMMKINLENARRFILNEPLENLVDYKTGYRMTKE

SEQ ID NO: 104755 - protein, 285 aa, Unknown
  Obtained from environmental sample
  DOMAIN (166)...(242): Helicase conserved C-terminal domain
  misc_feature (1)..(285): Xaa is any amino acid
AAYLNSSLNGREYFQTIDEINSGNVKLLYIAPERLQRGDIFAEGDSDAIPPLVVIDEAHCISQWGHDFRTSYLEIAGFIKSIKPRPITAAFTATATPKVRDDIEALLRLKKPLSINTGFDRPNLYFGVQKPGDKKAALLECLAKRKKTSGIVYCATRKAVDELYEILPRYGFSVTRYHAGLEDDERRRNQDDFLYDRKTIMIATNAFGMGIDKSNVRFVIHFNMPKNIESYYQEAGRAGRDGDPADCILLYSGQDVRINEYLITHNDEDAEPNPELQAHNRGTAQ

SEQ ID NO: 104756 - protein, 147 aa, Unknown
  Obtained from environmental sample
  misc_feature (1)..(147): Xaa is any amino acid
LDKSIQIFGIYRSDANFALQQNHVPIVRQLTIKNCSDSELKDLEVRIATDPDMADEWVAKIDSLMPGQEHILTGINLCLSASKLFELTERIDGSLVVTVSDDSGALAQEKRDLAFLSHNEWSGKNIFPEILAAFVTPNHPYITEIIK

SEQ ID NO: 104757 - protein, 204 aa, Unknown
  Obtained from environmental sample
  DOMAIN (1)...(204): Iron-containing alcohol dehydrogenase
  misc_feature (1)..(204): Xaa is any amino acid
MLVTSPGRVKSGTTSKITDALEKAGVPYAIYSEVEANPSVRTVEKIFELYCRESCDSFIALGGGSPIDAAKAAAARTVRKRKSVNQLGGLLKVLKKLPLFIAVPTTAGTGSETTIAAIITDTETSHKYAIMDLCLIPKFAILDPELCIGLPPDITAVTGMDALTHAVEAYLCWTYGTRESIAFALDAVKTIFEYLPRAYKNGTD

SEQ ID NO: 104758 - protein, 253 aa, Unknown
  Obtained from environmental sample
  misc_feature (1)..(253): Xaa is any amino acid
ASLCYSKGTDKPESYSIPVRVIGGWIFGLAIIILGFAFWLPDNMINLKNFRVLEIAKEQKTMQLMANKLEKQIYEANSQIKNSRNLREKINQLAGIPVDTIDPEKKPAPKTHKGKKILADLERIKKSQETFKTLRDVLSADEAYAQSLPLLHPIKQHQNITGRFGRLQDPITKRELSHRGLDFAITEGDTVIATGDGTVEAIVNQRFGFGTTLEIQHSPRIKTGVFPLAKRFGSKRKACEKRAASSFSWQKRQ

SEQ ID NO: 104759 - protein, 76 aa, Unknown
  Obtained from environmental sample
  misc_feature (1)..(76): Xaa is any amino acid
TSEALDKILSKTTFIGALGLGIIALVPNFATYVTNIHTLQGIGATSLIIMVGVALDLINQVKTHLLARNYESFLKE

SEQ ID NO: 104760 - protein, 144 aa, Unknown
  Obtained from environmental sample
  DOMAIN (2)...(113): Response regulator receiver domain
  misc_feature (1)..(144): Xaa is any amino acid
MTKLLVVDDEALVRALAAEAAGALGLEVISAGTLAEGLALGREGVDLVLLDVMLPDGNGLERIKDFSRLPSRPEILIISGHGDGTAVETALRSGVWEFLTKPLNIQELTQAISQLTAYRLGKPRHQETTPLARMGIIGNSPALM

SEQ ID NO: 104761 - protein, 238 aa, Unknown
  Obtained from environmental sample
  misc_feature (1)..(238): Xaa is any amino acid
GAAITDSYSTATVNGKGNNVGGLVGYLNRGRIETSYATGDVFGKDSVGGLLGAGVLDTVRGGYATGTVTGSGNYVGGLTGKSSAAANSVGYTINSYATGDVIGGYYVGGLVGSSAGNIVNSYAGRSMGVDQNAGPMTSLVSGDTYVGGLVGAKTGGAMKNSYAIGQVSGKSSAGAIAGSVDGSATTIYCYYDKNVKSPQNGFGIPNDDMTSEEFISLLNVAACALKNNQYKEGTNEWF

SEQ ID NO: 104762 - protein, 255 aa, Unknown
  Obtained from environmental sample
  DOMAIN (44)...(221): Protein of unknown function (DUF752)
  misc_feature (1)..(255): Xaa is any amino acid
KSFFAKVLPCKNIHIDAIDTDKVLAQLSPFISCHRGNDNLYASIASTNKLRYPRSLFETKTAQQVRGDMTVVNIILYHLLEYDEDILRVLKEYAPFMDKYMVNLHKNTFLHNIYYRHISKSYKKALKHLKNGNITFRLHAEDARKAVAHLNELYDYIFLDAFTPSKCPCLWTLEFFKLLYERLAPDGKLLTYSQAAPVRNAMLQAGFQAYKTQSGTIAYKNKPALLSSLISHLSEYDLGLLNTRAGVVYRDENLT

SEQ ID NO: 104763 - protein, 218 aa, Unknown
  Obtained from environmental sample
  DOMAIN (18)...(218): tRNA synthetases class I (I, L, M and V)
  misc_feature (1)..(218): Xaa is any amino acid
MKSIELEKSYDPKTFEDRIYALWKESGAFEPQPSLTTCKWSGLEPKDDKGEGTFVVVIPPPNVTGVLHLGHGLNNSLQDIIVRFHRMRGASTLWVPGTDHAGIATQNVVERKLKERGTSRRELGREKFLEETWKVKNEHHAIITKQLEKIGASVDWKRERFTMDEGLSQAVREVFVTLYERNLLYKGNYLVNWCTSCGTALADDEVEHEDTQGKMYHI

SEQ ID NO: 104764 - protein, 56 aa, Unknown
  Obtained from environmental sample
  misc_feature (1)..(56): Xaa is any amino acid
MTTEQILHLSGIHLVPYIQVATMLIGKSREGGGNMFRHQLDTMAILIDYGYIDSVL

SEQ ID NO: 104765 - protein, 109 aa, Unknown
  Obtained from environmental sample
  misc_feature (1)..(109): Xaa is any amino acid
MAGGGFHGKSTLLRALEEAVYPHILGDGREYVVIDESATPIKTEEGRVVNGTDISPLVRELPLKGSTKNFCTKNASGATSQAANLLEALELGASTILIDEDASAVNFLI

SEQ ID NO: 104766 - protein, 254 aa, Unknown
  Obtained from environmental sample
  misc_feature (1)..(254): Xaa is any amino acid
AIIQLISTKDGFTYRGLPEDFFTVRSATSVKLDDKTGKVTVRFDISGGDDTNPREVFHKKLDFSAPIASATPETEYKDQQYVGSISWDPTPSDNAFELGEIYTAYISLTTNRGWVFIGDGSDFTMPDALSVSASMVSSTRLNLEVKFDKTPGGTITHLELAVTPPKTGHYPVTTGITDSQYTATVTWGGNKLDKDGKFASKTRYTAAVAVKPIPPFSLSGVEKDSFFMYLDSAKTVKLQGTTDFNSGAVMFDFD

SEQ ID NO: 104767 - protein, 196 aa, Unknown
  Obtained from environmental sample
  DOMAIN (3)...(196): GMC oxidoreductase
  misc_feature (1)..(196): Xaa is any amino acid
LQFDYIIIGAGSAGNVLATRLTEDPNTSVLLLEAGGPDYRFDFRTQMPAALAFPLQGKRYNWAYETEPEPFMNNRRMECGRGKGLGGSSLINGMCYIRGNALDLDNWAQEPGLENWSYLDCLPYYRKAETRDMGENDYHGGDGPVSVTTSKPGVNPLFEAMIEAGVQAGYPRTDDLNGYQQEGFGPMDRTVTPQGR

SEQ ID NO: 104768 - protein, 152 aa, Unknown
  Obtained from environmental sample
  misc_feature (1)..(152): Xaa is any amino acid
GIISHYFRDKNGLLEATMRDITSQLRDAVLNRLHALPQGSAEQRLQAIVGGNFDETQVSSAAMKAWLAFWASSMHQPMLYRLQQVSSRRLLSNLVSEFRRELPREQAQEAGYGLAALIDGLWLRAALSGKPLDKTRANSLTRHFITQHLPTD

SEQ ID NO: 104769 - protein, 148 aa, Unknown
  Obtained from environmental sample
  DOMAIN (1)...(87): Peptidase family M23
  misc_feature (1)..(148): Xaa is any amino acid
AKGDTVRSAFDGVVRVIQYDRRGYGNVVVVRHHNGLETVYGHLFKVLVKPNQHVKFSETVGLGGNTGRSTGAHLHFEIRYYGEPFDPRHLIDYETHTLWSDTLVLTKDDFEYLTELRKTVYHTVRRGEGLGSIARRYRTTVNSLCKLN

SEQ ID NO: 104770 - protein, 256 aa, Unknown
  Obtained from environmental sample
  DOMAIN (213)...(256): Bacterial flagellin C-terminus
  misc_feature (1)..(256): Xaa is any amino acid
NMINDGVSTNAIRIMVSGNELTMSFDSVNGVLKIGNEIVAPGRSITLDDGTVLTHASNLDSRNVANGVIFVDTGRITLAEDITAIDGNVEGFSVAKDSTLAAKTKIEDGMTLMAGTVITTSDKFYPGSVTMAHEGRSLQFSANAGVALEARYYETAVSESITFIFSRYEPASSNLKDSVMAQIGANSGQTAFISMGDMRAAALNVANIDISSKWGAATAIETVNNALQRVSHQRALLGAMQNRLEHTIKNLDASTE

SEQ ID NO: 104771 - protein, 224 aa, Unknown
  Obtained from environmental sample
  DOMAIN (8)...(224): Prephenate dehydrogenase
  misc_feature (1)..(224): Xaa is any amino acid
MNVARITLVGFGLLAGSIAIAIKSASQHIAVRAVSSKGTLQKAKDLSMADDFFEYEDVQNWLPGSDLILLCGPIKHILSTIEVLKNNAKLLGGKKAVVSDIGSTKELICEKGFALPEPFVFVGSHPMAGSEKSGIENSDVSIFENTYWLYCLPDKIKELPELLKELLSFLGSQPVQISPQEHDVAMAWLSHAPQLISTSMAAGLCLDVIEKRLHLAGRGFRDMT

SEQ ID NO: 104772 - protein, 236 aa, Unknown
  Obtained from environmental sample
  misc_feature (1)..(236): Xaa is any amino acid
MLNRVYPEGSLAAQIIGFTNIKNSDSEELTGLIKSTSRDGIAGIESAFNDVLSPSLLPSLPGTRKYQNGSQVYLTLDINVQLILENIASKVYRENKAEAVMFIAADPRNGDILGSVSLPGFDPNYLNNPTDISLMDRPAIWSYEPGSVFKIFSLAALMDEGAITGNTVFNCTGQYERVTNRGEKIVIGCLSAHGRVTARDIIVYSCNAGAAYAADRMGASTFADILHDFGVGARPG

SEQ ID NO: 104773 - protein, 278 aa, Unknown
  Obtained from environmental sample
  DOMAIN (45)...(211): Protein of unknown function DUF115
  misc_feature (1)..(278): Xaa is any amino acid
IRNRALMSLDEEWYCKVEQGIQTWSSRNDINRATLKRFGRRWVRNLSHNLTTIRDLPGITRLANMLRPANIPVFLAAAGPTLDKTACIMKEIARRCVVIAVDTSLRFVLAQGMEPDFVVSLDPQYWNFRHLDRTAALNACLVAESAVYPPCLRHPFRAAYLCGSLFPLGRFIEERVDPKGDVGAGGSVATAAWDFARTLGTSVIWIAGLDLSFPDLKTHFKGALFEDRSLSQSSRLVPAETLSVRALRDGGPFNAKNSLGGQVLTDRRLSLYAAWFEN

SEQ ID NO: 104774 - protein, 234 aa, Unknown
  Obtained from environmental sample
  misc_feature (1)..(234): Xaa is any amino acid
LSDYYLEKYDNLIETIKRQPDNPEYTEIVNEMLKAQIKIEDDDSISLVSSDGRKVPLTNASSGQQEITYILMQLSKLNNYSSYYGKVRSLFIEEPEAQLYPYEQMKIINFIVRIYNDQKKRGIPVRFFITTHSPYVLNSLNNILNKGSLLNNCQTPEQEEKIKKEVSDNELPSLLVGDVSAFHISIDKENKSISNTMVEDDLIYPKKISDISSVINNYDNILSRLKNELFGEKE

SEQ ID NO: 104775 - protein, 69 aa, Unknown
  Obtained from environmental sample
  misc_feature (1)..(69): Xaa is any amino acid
MYEYIDRPANLSNSTGTFQWDAKGNTIILDVKNAPPYYKVGENVLIQMDMKGNQIKGVLADHYILKKEL

SEQ ID NO: 104776 - protein, 283 aa, Unknown
  Obtained from environmental sample
  misc_feature (1)..(283): Xaa is any amino acid
MADIIKIYIDELDRDYRTGKATEHSHRRALKRLLESMLDGVQAINEPKHIDCGAPDYIITRKDIPVGYIEAKDIGKDLNHKDFKGQFDRYKQSLDNLIITDYLDFRRYMKGELIDSVRIAEAKGNKITPIKASLGHFEQFIKDFGLAHPQGITSPTEIAQMMAGKARLMAEIIKEALKREDSDNALLEQMNAFKEVLIHDIKPEQFADVYAQTITYGLFAARLHDKTPDTFSRQNAASLIPKTNPFLRQLFDNIAGLNLDDRIAWIVDDLADTFRAANMTELN

SEQ ID NO: 104777 - protein, 102 aa, Unknown
  Obtained from environmental sample
  misc_feature (1)..(102): Xaa is any amino acid
MNTNPTTLLRYTQNRELSWLKFNERVLEEAQDANVPILERLKFVSIFTNNLDEFFMVRVGSLCDLAMEHSSAIDNKSGLTPGETLDVVYNAVRPLYAKRDEV

SEQ ID NO: 104778 - protein, 164 aa, Unknown
  Obtained from environmental sample
  misc_feature (1)..(164): Xaa is any amino acid
MVDPVREAQRLASTIPDDTGFVALLGLGGGFTAQAVLNQTQAQVLVIDFNNEGIKELLSVKDYSNLLNNERFCLLSNPSRDEIKNFILENYKPSLCGGIKTIPLRTRTEADVVLFETAAETIQEAIEIISSDYSVQVHFGKRWFSNIIRNIKNAQDEAENSTTK

SEQ ID NO: 104779 - protein, 84 aa, Unknown
  Obtained from environmental sample
  misc_feature (1)..(84): Xaa is any amino acid
MGTKVEEGDTVLLDGKPVLQETQKHYIALNKPPGYICSSGDPQGRPLALSLLPVQKERLYNVGRLDFLSCGLIFFTNEAVLLPP

SEQ ID NO: 104780 - protein, 269 aa, Unknown
  Obtained from environmental sample
  misc_feature (1)..(269): Xaa is any amino acid
ARVFAVEFLPGQCDQRADSCAQCISLANGKERPLIHSSRIYALYGNITDDEFNKIKSWLINPVESREASLEKPQTLIQKYNKPGDVQIIKEFISLSDGALDELRVTMNLAMDTQDILFCRDYFRDKEKRDPSVTEIRVLDTYWSDHCRHTTFLTELDEVEIEDETLRGSYANYLETRAFTGRDSKPITLMDIATIGARALKKRGLLPDLDESEEINACSVKIKADVNGAEKDWLLMFKNETHNHPTEIEPFGGAATCLGGAIRDPLSGR

SEQ ID NO: 104781 - protein, 273 aa, Unknown
  Obtained from environmental sample
  misc_feature (1)..(273): Xaa is any amino acid
FSCSDENKVPDDRIIKRKEKVSGVSQKGPFVNGAKVIIYELNKNMEKMGEPYLGTTDGDGNFVVEVDGVIVSPYIILEVDGNYVSEVSGKQTTAPITLNAVADVSKKKVVNINVFTHLEYDRVLKLAKSGEMFEDAKKKAQKEVLKALGMDESVAKNKNSEELSLFGRSKGDSLLLVASVLLQATPDVSNLLTAIGSEIEKDGVLSEETKAEVKSGVDYVYANMDKVMGNIRKLDSSARFPSRNEIRDIEKRIDSTATSPNLPSSSSGSSSSI

SEQ ID NO: 104782 - protein, 234 aa, Unknown
  Obtained from environmental sample
  DOMAIN (72)...(191): Fic protein family
  misc_feature (1)..(234): Xaa is any amino acid
LREIFFAEIPESVYNSNAIENSTLSLENTEKILLQNFVPKELNIREVYEAKNLAKVMEMLLEKKQKLSINLILHLHKILLSGIDDSIAGRFRKGKEWVRVGNHIGANPNFIHNLVNKLVNEYNKENDIYFLDKIAHFHAEFETIHPFCDGNGRIGRVLINQQLMALNLPPIIVPNKSKEMDYYPLFNKYISTFKYDDFTKNFALLLLESLHKRIAILTSEHIIPLNIWAKIHSV

SEQ ID NO: 104783 - protein, 230 aa, Unknown
  Obtained from environmental sample
  DOMAIN (1)...(160): Elongation factor Tu GTP binding domain
  misc_feature (1)..(230): Xaa is any amino acid
MRRYNVPRIAFVNKCDRAGADPLRVAAQLREKLNHVPCVMQLPIGLEDKLKGVVDLIKMKGFLFEGQSGQDIKEIEIPEDMKAQAAEYRSKMIETLADFNDHIMEAALEGKDISEEVLKETVRKATIDLKITPVFLGSAYKNTGIQKLLDGVTDYLPNPTEVKNIALNIDKNEEPTELESKDDKPLVCYAFKLTDDRYGQLTYIRIYQGSIKKGLAIVNMTTGKKDECRP

SEQ ID NO: 104784 - protein, 81 aa, Unknown
  Obtained from environmental sample
  DOMAIN (14)...(47): Tetratricopeptide repeat
  misc_feature (1)..(81): Xaa is any amino acid
LYYTQAITLIPNFVKAYNNRADAYSNRGDYDKAIADCDKATTLDPNYATAYFTRYEVYKKMGDTAKADAALAKAWELGYRP

SEQ ID NO: 104785 - protein, 268 aa, Unknown
  Obtained from environmental sample
  misc_feature (1)..(268): Xaa is any amino acid
TSANGTLASLPIPARSGYTFDGWYTSRESGVRITTRYGFTTDATIYAHWTLIAGSASVSFSVGSSGGKLLVTVDGVPINPGASVELGKDIVFMAIPDEGYRVSSWTINGEVFADTLLTYVLAGLSSASTVTVRFERRASGAPPSRDVSVGAAARRKSVAEQPARAVVTFRSGIHGTLAAAVDGVRINSGDSVAVGKTVVFTAVPSSPDYADVRWLVNGAALAVPSTMYTMRTGVMNAAPLNVEVAFEYYVPPPDTLGKSNKWFDALPA

SEQ ID NO: 104786 - protein, 268 aa, Unknown
  Obtained from environmental sample
  misc_feature (1)..(268): Xaa is any amino acid
DNDVTLTTTSGMAALGTITGNGKSLIITGNGTLSGGSGINTLSVSGTATINTDITTTGTQTYTGAVTLGGNLTLQGSTVTLGTITGGSHALTITGNGVLNGGSSIGALSVNGDFRLASGTLGAASVSVTGTSTIAGNITTAGLQTYTGAVTFGVNLTLQGSTVTLGNITGISHTLTITGNGVLNGRSEIYALSVSGTTTINADITTTENQTYTGAVTLNGSPRIINSQDGNIEFISTLKSNGIIELIATGTSGQITINGDTEAYRLIA

SEQ ID NO: 104787 - protein, 270 aa, Unknown
  Obtained from environmental sample
  DOMAIN (102)...(182): Cache domain
  misc_feature (1)..(270): Xaa is any amino acid
NPAHREMLFGYYADVLKVHSQFKTLYFADTMGNMVMLNRMRDGSFSKRGVFNTGKEIHTQWDHTNPAYYGSYFNTSEPAAIGYDPRKRPWYPAAVNERNAIWTPVYIFATDHLPGFTCAVPVFDSSGKLIGVSSIDLAVDELSRFLGGIRPTPGTMIFIQDKQENLVALQADEEKDLERLFVQIVDDSGNTTYNVSSISAFKDDAIRYLLQKALESGSQFELIKYKNQNYMSSLIPITIGDGLELFISIFIPEDDIVGGVRRNMRNVTVF

SEQ ID NO: 104788 - protein, 272 aa, Unknown
  Obtained from environmental sample
  DOMAIN (1)...(103): GTP1/OBG
  misc_feature (1)..(272): Xaa is any amino acid
TFKAENGHDGEGSGRYGRNGADMVIPLPPGSIIREAETGKVVRDFSAEPKVRETKEQDDFVYLKGGNGGWGNIHFKSSVNQAPRKALPGKPGQTVQLKVELQIMADIGLVGFPNAGKSSLLDRFTNARPKIAAYPFTTKIPNLGVLTVGNSADEGGRDIILADIPGLIEGASQGAGLGIRFLKHISRTAALVFLIDLSDDNYLTAFDVLQRELAAFSPELVQKKRLLVGTKTDLPETEGRLAQLAAKYPDEKPRGISVFSGEGIKELAEDLL

SEQ ID NO: 104789 - protein, 180 aa, Unknown
  Obtained from environmental sample
  DOMAIN (27)...(180): Glycosyl hydrolase family 3 N terminal domain
  misc_feature (1)..(180): Xaa is any amino acid
MDREARIKDLISKMTLEEKVSQLSHESAAVDRLGIPEYNWWNECLHGVARAGVATVFPQAIALAATFDDELVKQVMDAVSDEARAKNNEAIKQGNRGQYWGLTFWTPNINIFRDPRWGRGQETYGEDPYLTARMGTAVVRGLQGPDLENLKLAACAKHYAVHSRPEKDRHTFNAIVSKKD

SEQ ID NO: 104790 - protein, 132 aa, Unknown
  Obtained from environmental sample
  misc_feature (1)..(132): Xaa is any amino acid
MATYNGEKYIAEQVKSIIAQLRQEDELVVSDDGSTDKTLEILEKFNDKRIKIFNHNRLDVKIPFYLRSRLTNKFYYITRNFENAMKNAKGDYIFLSDQDDIWQPGKIETMFQFLDKDELVICDAWVVNDDME

SEQ ID NO: 104791 - protein, 283 aa, Unknown
  Obtained from environmental sample
  DOMAIN (1)...(283): Sugar (and other) transporter
  misc_feature (1)..(283): Xaa is any amino acid
CSFLAVLGAAGGAFFAGALADKFGRRKVMITSSVLFLISAIGSGNPYFFTTAGSAANMIEFIVWRVIGGVGVGAASIIVPAYIAEISPAPLRGRLATMQQFAIVIGIFAALLSNYFLGEIAGGGAVVMDHATRLASDVTRIGAFETWQWMFWVECIPAALYGLLVLFIPESPRYLVARKQPQKAGEILGKILSPSIVAQKIEDIKKSLHSEVAPKFSDLLEKVAGKTRLAPIVWVGIGVAALQQFVGINVIFYYGNVLWESVGFTQQDAMKQAFSPRCNIAST

SEQ ID NO: 104792 - protein, 277 aa, Unknown
  Obtained from environmental sample
  misc_feature (1)..(277): Xaa is any amino acid
ERAKGFFEQDFDIARIVKAIEIETGEKIDKKETLLIFDEIQECPKALTSLKYFYENAPEYHIVCAGSLLGVATSSSEGSGFPVGKVDFLTLYPMTFLEFLEVLGKNDFVHIIKNLEFKQLVIFHEKILEFLKQYFFIGGMPMAVKIFAESGDFAEARNTQNIIMQSYYADFAKHIPSHDIAKVRQIWNSIPKQLSKENKRFLYADLKIGARGRDYETALQWLIDSGLVRKINKVNSPSLPLIAYEESSIFKLYFGDVGLLCAMANLDIKTILEPKDE

SEQ ID NO: 104793 - protein, 242 aa, Unknown
  Obtained from environmental sample
  misc_feature (1)..(242): Xaa is any amino acid
DPSSGGYIEACNSEWCGIDDYRLSEKDLNCPKSMNTNLHVLEAYTNLVRACGDKRAHKALESLLHITLEKIINRDFHFELFFDMDWNSLTKNISYGHDIEGSWLLYEAALAVGDESLISKVKQTALAIAEVTYNAAIDRKNGGLISGCNSEGHNAKKEWWTQAEAVVGFYNAYELSGEQKYFDAADNIWGYIQKYFVDHTNGEWHNELFIDNSPDVSMPKAGFWKCPYHNARACLEVVRRMG

SEQ ID NO: 104794 - protein, 249 aa, Unknown
  Obtained from environmental sample
  misc_feature (1)..(249): Xaa is any amino acid
GRLIGTLPDVTREHYTLEGWYTASTKVEANVTEFTGDATVTARWTPVKYTISYTLGAADAVPPVSANPADYTIETPTFTLNNPTREGYTFAGWTTAGVTTPQPTVTIAQGSFGDKSYTANWTVIVTYTITFDSKGGTSVAARPTYADGKVTPSWWPVVEKGDSAFAGWYLSSTYSGQKLPTEHTFTGNTTVYARWAAPPTIFTIKFNANNGGTLVGDDSYRTGSDSTLASWPENPIPNEGKVFIGWYSA

SEQ ID NO: 104795 - protein, 248 aa, Unknown
  Obtained from environmental sample
  DOMAIN (9)...(248): Bacillus/Clostridium GerA spore germination protein
  misc_feature (1)..(248): Xaa is any amino acid
MENEVLLENLKQKLSPDLKSAVVNIRALLNNTSDLAVKYAKAAGCDICVITCDGMVDTDTIAALIYRPLAELRHAEFTPDQLMGSLQNDLLAAVQLNQVETYEELILAFMSGFAVILADGAECGVAIGVQGFKTRSVEKSSSHNNLRSSYESFTEVIRTNISLVRRRLKSPTFVSKIYKIGDRSNTDAAICYIADKADPETVKAIEEKINTIPLNTILEGGYIETFLQEESNTLFTQIGVTDRPDKLA

SEQ ID NO: 104796 - protein, 274 aa, Unknown
  Obtained from environmental sample
  DOMAIN (1)...(181): CTP synthase N-terminus
  misc_feature (1)..(274): Xaa is any amino acid
VIARERHGDYLGATVQVFPHITNEIKERMVRAAQHNNSDVVIVEVGGTVGDIESLPYIEAIRQFKNELPRGNTLNIHCTLVPFIEVSNEHKTKPTQHSVKELRSIGIHPDVIVCRSAAKLSRELKTKISLFCDVRPEAVFGLHNVDSIYEVPLLLEQEKMSTVVLDLLGLPSKQKPDLEDWQAYVDKLKSCKQTVTIAVAGKYVALEDAYISIAEAIKHAAAQQGFKAKLKWINTEILETDDHWQKQMENVNGLIVPGGFGNRGIEGKIKVVQY

SEQ ID NO: 104797 - protein, 270 aa, Unknown
  Obtained from environmental sample
  DOMAIN (2)...(270): Lyase
  misc_feature (1)..(270): Xaa is any amino acid
DGNFPHFISGLAMTKWGAAEANYKMKLITKEQRDAIVYACKQLLDGKYYEHFPVDMIQGGAGTSANMNANEVIANLALEHMGKKRGQYEFCSPNDVVNCSQSTNDAYPTAIHFALYLYHQDLQLAINYLIEALDKKAKAYKHIIKMGRTQLQDAVPMTLGQTFQGFADLLKSELRKQEFVSKDFLECNMGATAIGTGICSEPGYSELCIKELKKITGWDVHLAKNLVEVTSDTSCMVGYSGILKRLAIKLGKICNDLRLMSSGPRCGLHE

SEQ ID NO: 104798 - protein, 257 aa, Unknown
  Obtained from environmental sample
  DOMAIN (1)...(257): Amidase
  misc_feature (1)..(257): Xaa is any amino acid
LKAAAATDERRRNGKSLSVLDGIPIAIKDNMCIEGIKTTCASRILENFVSPYTATAVAKLEAAGAIVIGKTNMDEFAMGSSNETSYFGKVINPLAKERVPGGSSGGSAVAVASNTVALALGSDTGGSIRQPAACTGTVGIKPTYGRVSRYGLIAYASSLDQIGAFSSSVKDLAPVLNFMCGQDANDNTTSAHSASHFDKHIGKDIKGKVIGLPREYYAEGLDPKCREAIESALEKLRKEGAVLKEVSLPSIRYAMKA

SEQ ID NO: 104799 - protein, 278 aa, Unknown
  Obtained from environmental sample
  DOMAIN (1)...(277): Peptidase C10 family
  misc_feature (1)..(278): Xaa is any amino acid
VLGYSDEGGYDENDLPPNFVAWMDFLQDEIAYAQEQNIPQNEEIQQEWDAFLSGNLPLRKTTAAVAPLIQTKWNQGDDTYPYNNMCPMDGKKRSITGCVATAMAQIMKYYNHPARGIGQSKAYITDKRKISVPSVNLEVNYDWNNMLNKYTRTCEWWQYLTLCLVQTNNWNTQQANAVATLMYHAGVSVKMDYSSGSSGAPSSLVDDALRDNFGYDKSVQLKYRNDKVFSWDAMLKEQIDAGMPVYYDGYNSSDGHAFICDGYDNSGKFHFNCGWGGS

SEQ ID NO: 104800 - protein, 254 aa, Unknown
  Obtained from environmental sample
  misc_feature (1)..(254): Xaa is any amino acid
NVALPASWSWDETGTVGDAGIQIHKATFTPIDTDNYKIATGIDVPVTVAKAAPAYTAPTNLTAVYGDVLSSVTLPSGWSWNVTGTVGNAGIQTHKATFTPIDTSNYNTATAIDVAVTVAKIAPVYTVPTGMTAAYGDALSSVALPAGWSWEEIGTVGSAGTQTHKATFTPIDTRNYNVITGVDLTVTIVKAAPVYIVPTDITATYGDIISDIVLPTGWSWEEIGTVGNAGTRIHKATYTPVNTDNYNVATGIDV

SEQ ID NO: 104801 - protein, 262 aa, Unknown
  Obtained from environmental sample
  DOMAIN (150)...(227): OB-fold nucleic acid binding domain
  misc_feature (1)..(262): Xaa is any amino acid
GARAVIDERERGGDFASLNDFSRRVKLNRDDIIALCPAGVFDGIAEGLPRHLQARRLLANNKEQIINKKGNRNLDLFALEVSTTFDITQENVIAPQIKRTVKSDNDLWEEYNALGFLRNTHPLALWKDDVLAVKRRVKALHIGEYVGRNVKMVGWPVTQKDVWTKDGLTMCFLSLEDETALYETVVFPQVYERYNRLLFDQQPLLVFGLVTNDEGAVSLEIKKIEVLGKQATVEISNHTSDTVALSAKYAQNPPPHACISDK

SEQ ID NO: 104802 - protein, 197 aa, Unknown
  Obtained from environmental sample
  DOMAIN (1)...(185): Mechanosensitive ion channel
  misc_feature (1)..(197): Xaa is any amino acid
ILNIFGVSTASLIAILGAAGVTVALALKDTLGNIASGIVLIFLGTFRKGEYVEFGLFSGTVKEINLFTTILETPDGIYISAPNSSIWGSPLKNYSRNGKRRMELSVGIAYSDSVDIAFQVMQGIINAESRFLKDPAPQVFLQSFEDSSVKITILAWAANQDYWNIYWKINKIIKTKIEEAGLHIPFPQRDIHIIPNN

SEQ ID NO: 104803 - protein, 237 aa, Unknown
  Obtained from environmental sample
  misc_feature (1)..(237): Xaa is any amino acid
LVALIVLGVVFFVKGKKNPGGAGTAITSQSDTKRDNTLKLVERYLEQGEYDRALDLLDRLLIDNPDDNEANELQRRILQADRHKDSDALTEIQRQLLEEQRRQNENFAASLQRAASNDLAASAAEAAAERKAAAEAEAARKKAQEDELAKVSRQLQEQMRKVNDLVADAKAKLNAGDLPAAERIFSDARKAMPENEPRFESQKLADMADAYYEYNSKNPNTANGKTAARKAEELATK

SEQ ID NO: 104804 - protein, 280 aa, Unknown
  Obtained from environmental sample
  misc_feature (1)..(280): Xaa is any amino acid
SAHTWNSEFYINEFEETKVPISLYLTIQYNDVARIAPLIRLFITLFSRKFTGGETSAENRKFKVPVLFVLDEFDKLGRMDELEMNMGIHNGFGIHYFLIFQSLNQLNKIYTKDHSFLAHARNTIIYAPGTGETESAELVSKICGKESISRTNISYSGGKAQVGYSNKNISAQDQERNLINADEVMKLPLDQLILLCQGLPPYIGKKNVYYEDPVFKARMFPPAFITREEALKAAASTIKKLDKRRWFDREGTYRSTEISDDDIADIFERVGSLFDEPDEM

SEQ ID NO: 104805 - protein, 218 aa, Unknown
  Obtained from environmental sample
  DOMAIN (1)...(55): DNA primase catalytic core, N-terminal domain
  misc_feature (1)..(218): Xaa is any amino acid
MFPITDRQGKIVAFGGRALPGTVQSDGNEPPKYINSPETEIYKKGQTLFAIDHAKPQMRQTKTVYLAEGYMDVIALHQAEIVNSVAPLGTAFTDEQAAWLRRWVDNVVLIFDTDEAGQKAAYKAIITCRKNGISCSLVNFKEGLESEIDGKEVQKIKDPADILQKFSPQILKKVIKFTINDFEYLISRGRLQYSAADGDINRAIEFMFPFLEGVRFRN

SEQ ID NO: 104806 - protein, 290 aa, Unknown
  Obtained from environmental sample
  misc_feature (1)..(290): Xaa is any amino acid
RSLLERIAELQTGFDCVYFAFADCPFLDPALAGALSQRHIRERADYSYADGFPYGLAPEILSPGTAGILAKILGDNDGPVERDILFSVIQKDINAFDIEAEISAVDLRCHRINLCADSKRNLLLLKNFIAASGNIPAAADIEKIVQERPEILRTLPAFFPIQVYGGCPQACKICPYPLFTDAAGRTDFMDTARFASLLDKIVSFCGDAVIDLSLWGELSLHPEKIKLIEEVISRNALSLIIETSGIGWKEQEMENCARLCSDLSQKAGRKNTMPPLSWIVSLDSTDPQRY

SEQ ID NO: 104807 - protein, 196 aa, Unknown
  Obtained from environmental sample
  misc_feature (1)..(196): Xaa is any amino acid
MFNSGLLRDHIGQMISSGRRHIAIDISPLDYIYSDGINALVTLNKRMQEAGAGGTLALLSPQAKVIGILQTAGIQSAMRVLSGEAELMGLSSEISAAAAAAGSAAQSEFESLRSEIGSAFGDDAPLGVRTPAASAPPPPPVYAPPPPPPPPPLAMEPLSAPAPSFEPMSPPPAPLELQPMSPPTPTAPAFPPPAAD

SEQ ID NO: 104808 - protein, 174 aa, Unknown
  Obtained from environmental sample
  misc_feature (1)..(174): Xaa is any amino acid
MSKTLTDDQIKAAAEIAGLEPAALKAIDEVESRGAGFLPDGQPVILFEGHIFWKLLSSRAGINPATVAQGNEDILYSKWDKSKYKGGAAEHRRLQKAAAIDREAALCSASWGRFQVMGFNWQVCGFNSLQDFINAMYEDEACHLAACLCYIKGTGLLPALKSLDWPAVAFGYNG

SEQ ID NO: 104809 - protein, 283 aa, Unknown
  Obtained from environmental sample
  DOMAIN (1)...(95): Thiamine pyrophosphate enzyme, central domain
  misc_feature (1)..(283): Xaa is any amino acid
MHGAKCANRALQECDLIISVGVRFDDRVTGFVARFAPNASVIHIDVDPASVSKIVQVDVPVVGDAKNILTTLNGIVKPRESDVWNETVKEWRGKKLFTYQDSDKEIKPQAVIEKLYDVTCGDAIVCTEVGQHQMWTAHYYKFDKPRTLISSGGLGTMGFGLPAAMGAALARPDKTVVNIAGDGSIQMNIQELATIAVNKIPVKVAILNNSYLGMVRQWQDLFYGKRYSSTCLRKGRDCPGCFDPQACGKSYVPDFVKLAESYGIAGFRATKPSEVEEVLRGGL

SEQ ID NO: 104810 - protein, 232 aa, Unknown
  Obtained from environmental sample
  DOMAIN (27)...(196): Acetohydroxy acid isomeroreductase, catalytic domain
  misc_feature (1)..(232): Xaa is any amino acid
MAVIDFGGKKEKVVTRKEFSVAKARAALKGEVIAVIGYGVQGPAQALNLRDNGFKNVIIGQSKKYKKDWDRAVKDGWVPGKTLFEVEEAAERGTIIKMLVADAAARIIWPSIKKHLTKGKALYFSHGFSIVYKDQTKVIPPKDIDVIMVAPKGSGTSVRRNFINGVGINSSYAVFQNATRRAEERCLALGIGIGSGYLFPTTFEKEVFSDLTGERGTLMGALAGIMEAQYEV

SEQ ID NO: 104811 - protein, 237 aa, Unknown
  Obtained from environmental sample
  DOMAIN (22)...(174): GTPase of unknown function
  misc_feature (1)..(237): Xaa is any amino acid
MISTLQNELRRGDRIKALDDGIVVAIVGPTNAGKSSLFNEILGYDRSIVHNCPGTTRDIVSERLKFDGETMKLIDSAGIRETEDTVERLGIDRTRSAVAEAHAVLWVTSAAEAFGDGEREGILKAAGIIGESNGNANKDSHEIQHIDIHDNYGNVQEDGCRKKDRAVVIINKIDMEESFAEDTVKTDDRNRPVVVNIDTNKISTASYAGNSGSETIRSLPVKPYLMEKRRFCEEHGL

SEQ ID NO: 104812 - protein, 291 aa, Unknown
  Obtained from environmental sample
  misc_feature (1)..(291): Xaa is any amino acid
NGGISYILMGAIFVVEFIVRKMVQKKMPKSVPLSMFKNNSRPRSTVLCYEGAWSDSAYKTWGDFVEGTAELRRIINTAGGEKWLLYSEDCWYFFLAFTALLQCKKEILLSANASPAYIAEIRGITPGSGAPGGAALFLTDLVFSEEECPPNTFHIPSLLKAVQKTDRLEEEAPAINADETSIIMYTSGSTGKPKAIQQRLTELEADNRFAISQWGSEYLKRKTCSTVSHHHIYSLVWAMLLPFTLGIPFRRRRIEFPYEMEKLSDTEYIIITAPAFLKRAVEMESSSGFIL

SEQ ID NO: 104813 - protein, 152 aa, Unknown
  Obtained from environmental sample
  misc_feature (1)..(152): Xaa is any amino acid
GIDVVGTDHCPFFFETQKVMGKDDFTKCPSGAPGIEERIPLMYGAVASGKLTLRRFTDLCCTSPAKIFGLYPQKGVLAVGSDADIVIIDPQLNRTISHNNMHGNVDYSAYEGINVQGWPVCTVSRGEVIARDGEFCGRQGRGKFLKRKGSGE

SEQ ID NO: 104814 - protein, 104 aa, Unknown
  Obtained from environmental sample
  misc_feature (1)..(104): Xaa is any amino acid
MKVLGIETSCDECSAAVVEDGEKILSNVIATQIPFHAPWSGVVPEIASRKHTEWIYAVTKEALDKAGLTHTDIEAVSVTSRPGLLGSLLVGLSFAKAFAWARNI

SEQ ID NO: 104815 - protein, 259 aa, Unknown
  Obtained from environmental sample
  misc_feature (1)..(259): Xaa is any amino acid
MAEHSLRYERLAQKLVPAGIEVWAADQRGHGNTADLNINKPGTGGKLGHCADKDGFKRVVKDVHNLNMEIKKNLPDAPLYKLGHSWGSFITIDYIESFSGDLLIDGCILSGTMGPGGVTLNAGLPVLTALAALCNERNGSPIAKAMADGSYNNAFKPNRTPYDWISRDEKEVDLYVESPLCGFLCSTGFYRDLVRALIRIHKRQAIEKINPNLPIYIFSGSQDPVGNMGAGPTALVDAFRSQGFKDLEFVLYPSARHET

SEQ ID NO: 104816 - protein, 268 aa, Unknown
  Obtained from environmental sample
  misc_feature (1)..(268): Xaa is any amino acid
SNAATVTVTGNVVLEGIQITSQEDMAKIGVAGTHPLNGTYVLMNNITLEDWKPIIGSDGEEPFSGVFNGNNKTITLKSFDNNFVGAYAYNNGTKYTNVFLGIFGAVKGASDSQKAEIKDLKINSSVNIASANQIADSGVGVGLLAGYAEMAVIDNITLSGSFGYKYGGNNGSAYLGGIAGFIIGKGTTIKNCTSTMAMDIKPGYGKAQIVPGNANAFSFVGGFVGFFKDGGAIQNCHNSGAVSAQSDVSSSQVMVGGILGGSHYSFAS

SEQ ID NO: 104817 - protein, 272 aa, Unknown
  Obtained from environmental sample
  misc_feature (1)..(272): Xaa is any amino acid
VYVLGTKGTGAESDEGEATVPALWKNGVEVPLGLGSDAAAQSIFVSGKDVYLVGYVRLPSENEDGTFLPTLWKNGVAQRLGDTGEVESIFVSGGDVYVAGSENDDKGARIVTLWKNGVAQCLGGTGSSESIFVSGGDVYMAGQSFGKTDGEPYVATLWKNGKAQRLGNGKDNSRASSVFVSGNDVYVAGYESVKVKEEGKVVATLWVNGEVRRLGDGKMASEALYVSVSGKDVYVAGREDNEAGDSTAILWKNGVPQRYVGVPSPRRGLSGC

SEQ ID NO: 104818 - protein, 280 aa, Unknown
  Obtained from environmental sample
  DOMAIN (9)...(153): GAF domain
  misc_feature (1)..(280): Xaa is any amino acid
MFLSRSEKSFEDTMTSGVKEIADAFNLDRFSLLRNLKATDDLIHGGQIYRWDRKSGGTTAPIKGLENFSPDKYVPSWGKIFSSGGTINGPVRLLPDAAVLQSFGLVSICVTPVIINNVFWGIAFFEDLHTERFFEKDSIEIMRLAAFLCANTVIRADMEREIAEANEFNISILAASPVCLTIFDENARPIDCNAIIVKTMGTSKNYYLEHFHDFSPEYQSDGRISKDKAIEVIKRALGGENIVFEWTHRTSMGELIPFEVTMSRVMNKGEHVALGYQYDL

SEQ ID NO: 104819 - protein, 135 aa, Unknown
  Obtained from environmental sample
  DOMAIN (8)...(55): DeoR-like helix-turn-helix domain
  misc_feature (1)..(135): Xaa is any amino acid
MTSKQEERQKEILKIVSQVNRIEVAILAEKIGVSKVTLRSDLARLVEKGIIVHEKGEVFPGSSDDINNRLSYHYDTKQKIARAARDFVKDGETVMIESGSCCTILAEELAINRHGVRIITNSAFIAAYIRRLPQA

SEQ ID NO: 104820 - protein, 262 aa, Unknown
  Obtained from environmental sample
  DOMAIN (10)...(79): RNA polymerase Rpb2, domain 3
  misc_feature (1)..(262): Xaa is any amino acid
EFFGTSQLSQFMDQYNPLAELEHKRRVSATGPGGLNRDRAGIDVRDVHPTHYGRLCPINSPEGANIGLITHMATYARVNQFGFIETPYYKVHKGRITEEIIYITADEELGYKIAQGNSSITEHGALRDEFVTARENGEFTMLPRDEIELIDVAPRQIISVATGLIPFVENDDGQRALMGSNMQRQAVPLMRVDSPIVGTGIEREVARDSRTIKIAKNAGEVVSVDANRIVINKMNSRNVVSGVDIYNLEKFHRSNHDTILHQ

SEQ ID NO: 104821 - protein, 275 aa, Unknown
  Obtained from environmental sample
  DOMAIN (219)...(275): FKBP-type peptidyl-prolyl cis-trans isomerase
  misc_feature (1)..(275): Xaa is any amino acid
AAPNDASYGNGWFARINTDKGDIVVQLEFQKTPLTVCNFVALAEGKMNVSGGKRFYDGLVFHRVIDDFMIQGGDPQGNGRGGPGYEFPDEIVPSLKHDGPGVLSMANAGPGTNGSQFFITHVATPWLDGKHTVFGRVVEGQDVVNAIRQGDKIRSITIIRNGPLANQFKADQAAFDALLQKTAGSGNAKRDADIALITTKYPSAVQSPSGVKYIIQKKGTGNKPAPGKTVQVNYRGYFLSGQVFDTSETRGKPLEFPAGVGAVIKGWDGNGYGYA

SEQ ID NO: 104822 - protein, 232 aa, Unknown
  Obtained from environmental sample
  DOMAIN (41)...(232): BPG-independent PGAM N-terminus (iPGM_N)
  misc_feature (1)..(232): Xaa is any amino acid
MMFNNIAHYPCSKYYILQTRFQVSITKNQNQTQKQKDKAMQKRPVCLIIRDGWGRGNPETSNAIYSARTPFTDAYESGYPTTLVEASGLSVGLPRGYQGNSEVGHLNIGAGRTVYQSLTRIDKSVEDGDFFTNAAFLKAINFAKNSGGNLHLMGLIQEEGVHAVTRHCVALLKLCRDSGLKNVLIHAITDGRDTPPKSALEHLALLQKGIDEMGVGQVATVIGRYYAMDRDN

SEQ ID NO: 104823 - protein, 124 aa, Unknown
  Obtained from environmental sample
  DOMAIN (1)...(103): Metalloenzyme superfamily
  misc_feature (1)..(124): Xaa is any amino acid
IKSNKYDAVICNFANCDMVGHTGVYDAIIKAVEAVDECVHDTVEAVLALGGAAIITADHGNAEQTKLPDGSPMTSHTTNPVPLTVIGAGDVKLRDGGTLADIAPTFLKLMGQEQPAEMTGKSLI

SEQ ID NO: 104824 - protein, 254 aa, Unknown
  Obtained from environmental sample
  DOMAIN (24)...(142): Response regulator receiver domain
  misc_feature (1)..(254): Xaa is any amino acid
SRAFRHSHYGAKADSFTRFIAPDARILVVDDANTNLRVAEGLLSPYKMRVDICRSGPDAIEAVQAERYDIVFMDHMMPGMDGLEATKRIRAIRGGGDYYRKLPIIALTANAVAGAREMFLSEGLNDFISKPIDVAKLKAVLDKWIPQELRKSPTEVIASGSENGEDDIIDVRKIKIDGVDVEKGLAISGGKGTHYIRTITMFYEDGFEKIKEIRNCMEIGDMQLYATHVHGLKSASASIGAAAVSEEARALEAA

SEQ ID NO: 104825 - protein, 171 aa, Unknown
  Obtained from environmental sample
  DOMAIN (48)...(170): 2-oxoacid dehydrogenases acyltransferase (catalytic domain)
  misc_feature (1)..(171): Xaa is any amino acid
LTAAAKAAGAIEPKVVAVPSIGTGIGGRVTTSDIAFPLHAPHSPIPSEGAITETPIKGIRKVISDRMLKSLSESAQFTINASAQAAKLQEFRMGLKSQGSLAEELGVSKITINDLVLFAVARTLPRFPYMNAHKTGEIITTFERVHLGFAVDTPRGLMVPVIRNANLLSLS

SEQ ID NO: 104826 - protein, 256 aa, Unknown
  Obtained from environmental sample
  DOMAIN (2)...(72): Pyridine nucleotide-disulphide oxidoreductase
  misc_feature (1)..(256): Xaa is any amino acid
ALGAEGTAIEMMDEIIPFMDKEQAPLFRRALKGVDFKLGCKVEKIEGAAVHYTDKKGKAEIKEADLVLMAVGRKPVTDTWGADAAGVDYSPKGVAVDDRMRTNIPGIWAAGDATGKSLLAHSAYRMAEVAVADILAGSHSAGNSNQMRYNAVPWAVYGLTEAAGVGITEQEAESKGIAVLKASLPMRVSGRFVAENTLMGQGAVKAIADANDRRILGVHAVGAYASEFIWGGAALIEQEFRIDEVKQLIFPHPTVC

SEQ ID NO: 104827 - protein, 88 aa, Unknown
  Obtained from environmental sample
  misc_feature (1)..(88): Xaa is any amino acid
MSDCQQNNPAIEVIHLSKSVPDPGGVLHILTAVHFTVQAGESLAIMGASGSGKSTLLGLLAGLDTPTEGTVKLKGIDIFSLDEDKRAY

SEQ ID NO: 104828 - protein, 65 aa, Unknown
  Obtained from environmental sample
  DOMAIN (1)...(65): Thiamine pyrophosphate enzyme, N-terminal TPP binding domain
  misc_feature (1)..(65): Xaa is any amino acid
MTGSEILVRCLAKEGVKHVFGYPGGAVLYIYDAIYKQNDFQHILVRHEQAAIHAADAYSRSTGKV

SEQ ID NO: 104829 - protein, 215 aa, Unknown
  Obtained from environmental sample
  DOMAIN (2)...(123): ABC transporter
  misc_feature (1)..(215): Xaa is any amino acid
KAGIQISEKLKIKNGRKADNKVKVLEILEDLGFHEPEKIYNAYPHQLSGGMCQRVMAAIAAIGCPRLLIADEPSSALDTESEEKILSLLAKMNREYKMSVLIISHDLSIIRRFCSRYIVMYAGRIVEEGASSDFSSALHPYTNALVNAIPSKEKRGGKLKNIPGKVPSIEDDLPGCPFAPRCKKAQKRCHDAFPPLAEINGRRAYCHFPETGETL

SEQ ID NO: 104830 - protein, 269 aa, Unknown
  Obtained from environmental sample
  DOMAIN (72)...(109): Sigma-70 factor, region 1.2
  misc_feature (1)..(269): Xaa is any amino acid
ALRLRKLAALQGFVTEAQMEDVVGTVDDIERIREMLERERITINTFVRERQAPPHAERKPERHPQHPQAHYTDPTLAYLSTVGRVPLLSRGQETEYAMRMEAAQGKLFEMAFRSQYAIESLKRLGQQLENGEVKCGDVLSIEEGEIGDPETVDIDEKRNEFLRTLSIVKKKYAAITELERAGASDEEKKLNDLWDEAIAICRGMKLNTKQVENILDKYKEALASENRYADIERFAQLEEVRNQAKCAVIEANVRLVVSIAKKYMLLRGL

SEQ ID NO: 104831 - protein, 240 aa, Unknown
  Obtained from environmental sample
  DOMAIN (30)...(239): Aminotransferase class I and II
  misc_feature (1)..(240): Xaa is any amino acid
MQLAQRLDRFRPSATLAVNAAALELKAKGAAITSLAVGEPDFAPPSHVREAAKQAIDAGHFRYTDVAGIAPLRRAAAGYYKRLYGVEAAENQILIGNGGKQVLYNLFLALLNPGDEALIPAPYWLSYPDMVLLADGVPVSVFAGPEQGFKITPAQLEAARTQRTRALVFNSPSNPTGAVYTKAETDAIMAWAVDCGIFVIADEIYDQLVYPPAEPCSVSPWWRRFPDRFAVVNGLSKTFA

SEQ ID NO: 104832 - protein, 73 aa, Unknown
  Obtained from environmental sample
  misc_feature (1)..(73): Xaa is any amino acid
MAELFLEAKNITKTFEGVKALENVDLSIGKGEIHCLVGENGSGKSTLIKIIGGVCRPDSGTIIINGTELKNIT

SEQ ID NO: 104833 - protein, 240 aa, Unknown
  Obtained from environmental sample
  DOMAIN (1)...(211): AICARFT/IMPCHase bienzyme
  misc_feature (1)..(240): Xaa is any amino acid
KAVARFGFDADGTLPAGKNDVSQFIPTVNDTVKACCAAIKHNTPCGIALGDTLIEAYDKTFACDPVSIFGGIIACNTVVDSKVAEKLGELFLEIVAAPGFDDDALEILKKKKNLRILKLKNAPKETHEYVAVDGGFLAQQSDRRLFEKWEVVTKAAPDACDIPDMIFGMRAVTFAKSNAIMIVKDQAATGIGCGQVNRIWPTVQSLERSAAVLKAENSPWKNSEPARVLASDAFFPKTDI

SEQ ID NO: 104834 - protein, 267 aa, Unknown
  Obtained from environmental sample
  DOMAIN (205)...(262): KH domain
  misc_feature (1)..(267): Xaa is any amino acid
MVVATLGTEQDEQIMDALGGEYRERFMLHYNFPSFSVGEVKRAGSPGRREIGHGKLAWRAIHPMLPSKEDFPYTIRIVSDIMESNGSSSMATVCGSSMSLMDAGVPMARPVAGIAMGLIKEGSEFAVLTDILGDEDHLGDMDFKVAGTNKGVTALQMDIKITSITTEIMDIALKQALQGRLHILGEMGKSIAVSRSGISANAPRITTIQIHKDKIREVIGSGGKVIREIVEKTGAKIDISDDGLVKIAAVDESVTQKAMDWILGIVA

SEQ ID NO: 104835 - protein, 252 aa, Unknown
  Obtained from environmental sample
  DOMAIN (1)...(238): Methylmalonyl-CoA mutase
  misc_feature (1)..(252): Xaa is any amino acid
MALRTHSQTSGWSLTEQDPFNNVARTCIEAMAAGLGHTQSLHTNALDEAIALPTDFSARIARNTQLYIQEETGITKSVDPWAGSYYVEYLTRELANRTWRLIQEVEAEGGMASAIEKGIPKTRIEEAAARKQARIDGGTDAIIGVNKYRLAQEDALDILEVDNTAVRNSQVARLEEVRKNRNQADVDSAVTAITNCFEEWKNGKKSQANLLDLAVKAARVRATLGEISNAVEKVVGRYNAVIHRINGVYSAE

SEQ ID NO: 104836 - protein, 166 aa, Unknown
  Obtained from environmental sample
  DOMAIN (40)...(166): ABC transporter
  misc_feature (1)..(166): Xaa is any amino acid
MPILRISHLYKRFNLEAGFFARYGRFVNAVNDISFYIDKNESYGLVGESGCGKTTTARMLVRMYEADSGEILHYNGDKPDAIADLKKETLMQYREKVRYVFQDPARSLNPRMSVYEVLVSGCRRPLKKRGVGEKELREKAAAILEEVGLQAADLEKRPSEFSGGQR

SEQ ID NO: 104837 - protein, 95 aa, Unknown
  Obtained from environmental sample
  DOMAIN (6)...(95): SecA DEAD-like domain
  misc_feature (1)..(95): Xaa is any amino acid
MFDKFIKALFGSQNERDLKALMPILQKVNEKDSWAKALSAEDFPRQTALFRERYKNGETLDSLLLEAFALAREAGARTLGERAYDTQILGSIVLH

SEQ ID NO: 104838 - protein, 247 aa, Unknown
  Obtained from environmental sample
  DOMAIN (77)...(165): Glycosyltransferase 36 associated family
  misc_feature (1)..(247): Xaa is any amino acid
MKRGGLVSEIRAFVPVQGEMELWTVTVTNHSGAAKTLSLFSAIPFENSGPMGGECRYLKDDKFLYKYSFPYHVLYEDKKKVENNRAYYYMFSDIDVASFDGSAQRFFGCEDATELPAAVENGGCSNIDGEGEAEFIGAFEHRFELEAGGSFSVNLVIGAARSLDEIRAVRRELGTAAAVEREFGKVQKLWDERCASYHIETPDADFDSMVNYWIKKPGSFSDAAEPDIGLLPRPQSTAGRAGLFNGE

SEQ ID NO: 104839 - protein, 273 aa, Unknown
  Obtained from environmental sample
  DOMAIN (1)...(157): ATPase family associated with various cellular activities (AAA)
  misc_feature (1)..(273): Xaa is any amino acid
IGKFYGESEERLRNIFEEAQSHAPSIIFIDEIDAIAPKREDMGGEKQVERRVVAQLLALMDGLESRGQIVVIGATNIPNSLDPALRRPGRFDREISIPIPDRKGRYEILQIHTRGMPLAAAPSADAVDLKRVADLSHGFVGADLEALAKEAAMACVRDILPYINLQTQEIPYEKVSGLTVKMGHFLSALMEIEPSAIREVFVEIPDVTWDDVGGLDAIKEELVNAVQWPLQRPEVFERYSIQPPKGILLYGPSGTGKTLLAKALAKESGINFI

SEQ ID NO: 104840 - protein, 192 aa, Unknown
  Obtained from environmental sample
  DOMAIN (11)...(192): Membrane dipeptidase (Peptidase family M19)
  misc_feature (1)..(192): Xaa is any amino acid
LSILGGYKMRLMVDAHYDLLLDVYRLRKEGKRKVIENFYLNDVRAAGINVLICSLFVLDSYLPEQALRHVLDQIGMLHYEMEESPGLFALCRNASEVKKTVEAGQVALLLSFEGAEPLGNDLLLLRPFYELGVRFVGLTWSRRNAVADGCHFRSVSEGVSGGLTPFGVQLLKEAERLGMIIDVSHLNDTGFA

SEQ ID NO: 104841 - protein, 200 aa, Unknown
  Obtained from environmental sample
  DOMAIN (11)...(171): TolB amino-terminal domain
  misc_feature (1)..(200): Xaa is any amino acid
MRFFVLMAVCAFVLCQRAVAQEPPRTEIELSATVRKITVASPPADVTNLIADQVQREYSETLRKDLEGMQGLALLRDGLPSKTSADSFQEWLNIGCEWLIVSKVSQTTRDGVSVEAVVYDVKSGKRVASTSQAGNTSSYRRLAHMVADAVEEFLTGTPGVSNSRVIFCKEESPGVKEIYQADRDGSNMVKLTNHKTLTMS

SEQ ID NO: 104842 - protein, 267 aa, Unknown
  Obtained from environmental sample
  DOMAIN (6)...(248): NAD dependent epimerase/dehydratase family
  misc_feature (1)..(267): Xaa is any amino acid
MIQNWALITGCSSGIGRALVDVCRANGWGAIATARNLDSLASIDDGVDVRKIRLDVTDQKSILSAVRNVEGLPLRVLVNNAGYGQMGPLEALTADELRAQLETNVVGLHAVTNAFLPLIRRCRAGEGRIVHLASVLGRLSIPMAGAYNASKHAVVALAETLRLEIGRDVPVILVEPGAIQSEFRATLKKVWGDLPRRVEGTPYQLAVTRYADRREEYAGKHGLSAAECAKKIFRAMNSRRPPRRVVVGTDSFWAQVAHRIVPAPIWE

SEQ ID NO: 104843 - protein, 97 aa, Unknown
  Obtained from environmental sample
  misc_feature (1)..(97): Xaa is any amino acid
MAKTKQSPGTLLLELIEKYNLNCNRVSKDIKCSQTALRLISLDKSRITTSIAVRLAKYFGTKPEFWLLAQMDYDLKKAANNKTLIKALKGISKAGKK

SEQ ID NO: 104844 - protein, 85 aa, Unknown
  Obtained from environmental sample
  misc_feature (1)..(85): Xaa is any amino acid
MTRLMLFPAGRRGKYSVPESLEYIGFYGFAECEGLKTITPPMSLQYIGERAFEDCTNLETITLSRKTRIGHKAFEGFKRRLIYMD

SEQ ID NO: 104845 - protein, 111 aa, Unknown
  Obtained from environmental sample
  DOMAIN (2)...(111): Uncharacterized ACR, COG1576
  misc_feature (1)..(111): Xaa is any amino acid
VYPIRLVVVGKVKSESILSLERHYKKLLGAYTRLELVEVKEGSGHGERRQLFEAARVRDALSGFRWRVLLSADGEQRTSEEFASWLGARTDLGESLAFAIGPSDGFHPSLK

SEQ ID NO: 104846 - protein, 183 aa, Unknown
  Obtained from environmental sample
  DOMAIN (51)...(155): ATP synthase alpha/beta chain, C terminal domain
  misc_feature (1)..(183): Xaa is any amino acid
ISAYIPTNVISITDGQIFLEADLFNAGIRPAVNAGISVSRVGGSAQKKAMRQVSGTLRIDLAQFREKEAFSMFSSDLDEETKLQLAKGRLMVELLKQNKAGPMELADQVLILYAGTHGLIMDIPLNRIAEFESGLLAAFEKKYNSIRSEIAEKGALDIELEGKIRAFVDEYKKEFLNVAPSRN

SEQ ID NO: 104847 - protein, 102 aa, Unknown
  Obtained from environmental sample
  misc_feature (1)..(102): Xaa is any amino acid
MSRLLEIKRRIRSIKSLAKVTHAMELVTHTKIGRARKGAMTSRAYHDSFAGLIGAVRSSYAWDSADIEDASVKTHDTQDTDLVIFLSQKGFCGAFNDRLLQY

SEQ ID NO: 104848 - protein, 275 aa, Unknown
  Obtained from environmental sample
  misc_feature (1)..(275): Xaa is any amino acid
DKDKQGNVLFCGITDQNGVSESFTLPTPPPGLSAAPNPYGPRPYSVYDIWLGKPGFATVNIIGAQVFPNQASIQPVDMTPLPDGDETEETYVIPPPLAALPTPPQLQVGTDQTLGSIGEAQQAEGVNYVQDFGNSDGEFAPQVLTGVVIPDYVTVHLGVPANSAAPNVRVRFIDYIKNVVSSEIYPDWPEAAIIANTHAIVSFVLNRIYTEWYRARGYDFDITNSTTVDQYFVPNRTIFQRISQIVDGIFNVYARRAGFRNPYFTEFCNGTTATL

SEQ ID NO: 104849 - protein, 55 aa, Unknown
  Obtained from environmental sample
  misc_feature (1)..(55): Xaa is any amino acid
EVGAENLQASESRIRDADMANETVSYTKNMILNQAGTAMLAQANQKGQSVLQLLQ

SEQ ID NO: 104850 - protein, 171 aa, Unknown
  Obtained from environmental sample
  DOMAIN (22)...(171): ABC transporter
  misc_feature (1)..(171): Xaa is any amino acid
MEVIGLSINGLLNNISFSLRKGEILGFAGLVGSGRTELAEAVMGLRHVNAGTINLSGHGKVHIQRPSQAVHYGLGYISEDRQGKGIVQGFNLPQNITLISLREYIEGLFINKKAEIAKSESYTKTFHIAAASHKMSLRYLSGGNQQKVYLSRWLDTNPSILILDEPTRGID

SEQ ID NO: 104851 - protein, 64 aa, Unknown
  Obtained from environmental sample
  misc_feature (1)..(64): Xaa is any amino acid
MANLKGTKTEKNLQEAFAGESQARNKYTYFASKAKKEGYEQIGAIFEETCGQRKRTCENLVQTA

SEQ ID NO: 104852 - protein, 61 aa, Unknown
  Obtained from environmental sample
  misc_feature (1)..(61): Xaa is any amino acid
VPLGNFHSHPATPARLSEEDIRLAYDSKASYLILTLADEPPVIKAFGVVGGEVSLQELEVV

SEQ ID NO: 104853 - protein, 158 aa, Unknown
  Obtained from environmental sample
  misc_feature (1)..(158): Xaa is any amino acid
VRAVRKVGAKISAPVRVARQGLSDAATRADKGVATAQKQADTAFKSRFVKPATATASPVAPAPINKTPTPLDVAAYEPPSHREHNRAPVGEEAPLPPAAPRPRPVSTQRYTPPVVERHRTYQSYQAARRPMNRQSARLTTAAARPRPRSTDIPQKRSA

SEQ ID NO: 104854 - protein, 263 aa, Unknown
  Obtained from environmental sample
  misc_feature (1)..(263): Xaa is any amino acid
MSALERTWRIESKDGRKPSEPFAIAIRAWMDGLERGLSFYESVSRWVPSSESLMLSVGDVAKLSLALDNLTMVSAGIRKIRKSLFDGLSYPLFLLAMTAAIVIMVGLYLVPPLTTAAGADIVWRGTAASLVTVAEYSEKYWPHAAITLAVAMLFIWWSLARLTGSIRTLLDRFPPWNMYKVSISVSWLMSLAAMVKSGTNLPDALKMLSDSGNRYLRSNLDPAERLIENGYNLGRALNVAGGHFPNDEIIGDLEIYADMNEFD

SEQ ID NO: 104855 - protein, 164 aa, Unknown
  Obtained from environmental sample
  misc_feature (1)..(164): Xaa is any amino acid
MNYFQKSERLYNSAVLNDGAGISESEMREVAEWPLDQAVSLFAAADQARRDFFGGAVDPCAIMSVKSGGCGEDCAFCSQSAHNRADVALHGLCSSEEIVSRCREAWSKGLPFCAVSSGRRLNAAEFQTLCEALSECGDGGEKHASLGILDDSEFAALRDAGVVC

SEQ ID NO: 104856 - protein, 236 aa, Unknown
  Obtained from environmental sample
  DOMAIN (4)...(223): Glycosyl transferase family, a/b domain
  misc_feature (1)..(236): Xaa is any amino acid
AESPVAKHGNRAASSRSGAADVLNSLGVKLDISPEHSLKILQNINLCFLFAQNYHLSMKYVAPVRKELGIRTIFNILGPLVNPAGASMQLLGVYEKELLEPMAQVLLNLGVKSGMVVFGQDGLDEISMSAPTSVCEFRNGQLKNYEITPEQFGFKRCKKEELVGGTPEENAKITTDILSGVRGPKFDTVLLNSAAAIHIARPNLSIEDALKVAAQNIDSGKALDQLKNFVKLSNEN

SEQ ID NO: 104857 - protein, 266 aa, Unknown
  Obtained from environmental sample
  misc_feature (1)..(266): Xaa is any amino acid
VVFTVDRDKPTITLEKTPADTYTPYVFGTQAANFDMFTLKGTAKDINYNRVEMKLSGSKITGTPTANIVFRAANDGAQTIEQPSQIKVQDYTQTFNSNTFIPAVAADTTVTPNIPASAAVTFNSLPEGTYTITATAYDTSGKNESESYTFIKDTTQPTVRFLGETASFAVTDFSINGVASDNIGVYSIWTKIEEPDGAGWKLVPDDTNATKSGSGQDVYTLLKQSADPSGYGPTETWEKKIVAAENGVNGAVGDSLGLVQGTYRIT

SEQ ID NO: 104858 - protein, 276 aa, Unknown
  Obtained from environmental sample
  DOMAIN (92)...(132): Putative Ig domain
  misc_feature (1)..(276): Xaa is any amino acid
LPAGIVISATGVISGTPTTAAAAGTATVTVSDATPTTPKTGTYSLAYGAISELSIVEKSGAVRIPASVVNVAISNIDLAAGLTVTGGTGPYTYASSNLPAGIVISAAGVISGTPTTIGNAGTATVTVSDATPTTPKTGTYSLAYGAVTSRQSYPGSIAGKISGSDQGTGTLPAAATVTLYKDGVAYSPSITATPAQGSNGNYTLSDVPAGIYTVKVEMSGYVDFISGNITVGATAVMDRNFVLDKAYTITYSVNGGSSNGTITANQSDGKVVGSGS

SEQ ID NO: 104859 - protein, 264 aa, Unknown
  Obtained from environmental sample
  DOMAIN (65)...(144): Bacterial Ig-like domain (group 2)
  misc_feature (1)..(264): Xaa is any amino acid
YQLYPCPFSKNNRLVFSGTKTAIEQVDAEKAETPLIGIREYIISEEDAQGKAITINATFTHSDKQIDTIAFGDGENVTKTYGDDQFTKAITNTGAGTGAISYTSSDETVATVNSSTGAVTILKVGTTTITATKAADETYEEATASYTLTVTKAAGSAVAAAPTEASVTENSITINAVTPQPNNGQTVEYAIFTAENPVPSTGWQDGLTFNNLNNDTNYYVFARSKENENYNAGVAKVSAVIRTETVFTIIINMNEEGMVTDDNV

SEQ ID NO: 104860 - protein, 110 aa, Unknown
  Obtained from environmental sample
  misc_feature (1)..(110): Xaa is any amino acid
GQAFFIYPIIGPYCQGMAVTVSYFPDMFSGIKSFDELREFLANHYKGCEYVSVVPASENPSILDPTICNNTNNAKIFVFGRDEHGQITVVLDNLGKGASGAAIQNMGYFL

SEQ ID NO: 104861 - protein, 271 aa, Unknown
  Obtained from environmental sample
  DOMAIN (1)...(243): UvrD/REP helicase
  misc_feature (1)..(271): Xaa is any amino acid
VVGDDDQSIYRFRGAEVKNILEFPDRFSGTDIIRLEQNYRSTSNILKTASSVVNYNRGRLGKTLRAEKGDGPLPVLAYLPDQNAEASFCADKITASVKKKETNWSDWAILYRTNAQSAGFETFFLRKNIPYRVVGSLKFYEREEIKDSIALLAFLVNPRDEVAFRRIVNKPTRGVGAVTVDKITETSSEYNGNLLESSRALDCSAKARKGINEFIKVMEDSKKLLVSQSPTIENEDVKKQNGLISGDKLSVLVTKIINDSGLAEYHRSQDD

SEQ ID NO: 104862 - protein, 227 aa, Unknown
  Obtained from environmental sample
  misc_feature (1)..(227): Xaa is any amino acid
MDIGVDFLDIYSSPKTINKGVIDKSNGESVPYIIEVGLSKSSILECNGWKDFITNIIIQFVTKNPDLYDYKKVLQKDIMLEDYHWNWSKKAFHYNTSEYDWFFLKTDDGIQGVCLTFHPRESVFQKVDIFYIQYLSSAPWNRKSSLHERQYKGIGNEILKHVQYYFLKKHHYSYGFSLHSLPQSRAFYEHLGMKNFPEYNDANGLFFYEMSKENAISFLGDKNCLIW

SEQ ID NO: 104863 - protein, 147 aa, Unknown
  Obtained from environmental sample
  misc_feature (1)..(147): Xaa is any amino acid
VIRTYGNVAAKPINEETSAVYNLVQELKSENYRTAVTLIGLMPWVNKLGTLNTDFESLIQERDRENEAKSHISMKTARRNIDDTYKNIVKTINSLIYLNQLTEYETFVDTYNIVVKRFNTLLKQQQSISRHHGKGGGTGGTDDGNEE

SEQ ID NO: 104864 - protein, 75 aa, Unknown
  Obtained from environmental sample
  misc_feature (1)..(75): Xaa is any amino acid
MVKKLIQHGNSAALVIDKPIMEILKITNETVFELSTDGKNLILSPQIENNQEDTVIHSLEKINKRYGTVLKRLGE

SEQ ID NO: 104865 - protein, 128 aa, Unknown
  Obtained from environmental sample
  DOMAIN (3)...(121): Prophage maintenance system killer protein
  misc_feature (1)..(128): Xaa is any amino acid
MIKFLTLSEVLIILDDQIKNYGGIYGIRDIKLLSSAIYMPESSFGGQYLHETIPAMAAAYAFHICQNHPFLDGNKRVALASSLVFLDINGYELNCKDEKLYNKIMDMAKGEIKKEDLIKFFEKHSSKK

SEQ ID NO: 104866 - protein, 213 aa, Unknown
  Obtained from environmental sample
  misc_feature (1)..(213): Xaa is any amino acid
MTDLATFTMPSSAVTIKAGFETAPPGTPVLSLSDVVFDVAVPGYARPAAKIVTIHNSGNTEANVSGITLGGADPSSFTLSGTLKPTIAAQASATFTVRPSASLAAGTYTATITATYSGGIVSGAAATAEVSFTVASNLGSGTKLDPFIVYDEATLRRVGRETGDGNWNLSAHYKQIADITLPAVPAGSSNWTRIGNMVNSFTGSYNGGGLHKQ

SEQ ID NO: 104867 - protein, 139 aa, Unknown
  Obtained from environmental sample
  DOMAIN (3)...(109): Histidine kinase-, DNA gyrase B-, and HSP90-like ATPase
  misc_feature (1)..(139): Xaa is any amino acid
VHFTLADLVTDIAQNGCESGATLVELEIAEDAVKKKFRFLVRDNGKGMTKEQLAEAIDPFVTDGVKHPHRKVGLGLPFLIQTAEQSGGGWDVKSEKGKGTTATAWFDMGNFDTPPVGDLPGMFRTVLMFNGPDEIIIRR

SEQ ID NO: 104868 - protein, 256 aa, Unknown
  Obtained from environmental sample
  misc_feature (1)..(256): Xaa is any amino acid
IATNNATNPSIKKLTTDAICSIIKESLLTRFNELTPDMRQKLATILQTLDSKIINDLSKDLFSGDNERRLSALQMLGILKRHPHVKDILAKLLQDKDTKIRATATTLLGKMMGPNDQHMVLTLLNDDDKRVRANTVEALESMGNPEMIPILAQYRKDPNNRIRGNVLKALYNLGYTDIEEDLAEMLTSNEPLQKASALWVVTQLKYGRSRKVVDAAGSCLLCDNKMVHRNAEAALTAIGTPRCMGYINYLGRIFRY

SEQ ID NO: 104869 - protein, 139 aa, Unknown
  Obtained from environmental sample
  misc_feature (1)..(139): Xaa is any amino acid
IPLFIAESKKYPPPGICIGVRDMRPRSMPLARIISNRLTSFILSVLTGRRIADSQCGYRIYSAEFVKSIQIEYNRFQAESELIQKAAAKHFPIRFTGVRTLYLKGGSSHISHLLDTLRWVAAVARIWFKLTFTDGKRGL

SEQ ID NO: 104870 - protein, 100 aa, Unknown
  Obtained from environmental sample
  misc_feature (1)..(100): Xaa is any amino acid
FQTENGKAVLDLREPALNIHIGAFYLGYLMERFENTLLALLAYNGGMNRIRRWRAASTLPVDLFLETIEFSETREYGRRVMAAAAVYKELYTTLEPAPEN

SEQ ID NO: 104871 - protein, 244 aa, Unknown
  Obtained from environmental sample
  DOMAIN (16)...(244): tRNA synthetases class I (I, L, M and V)
  misc_feature (1)..(244): Xaa is any amino acid
MREMDKAFDFRTAQARWYERWESAKVFEAKPSSGKRPWSIVIPPPNITGSLHMGHALVYTLHDILTRFKRASGFDALWVPGIDHAGIATQMVVERRLKAEEGKTRHDYTREQFLEKIWDWKNQRQGDIESQLRRMGASVDWSRKRFTMDPDLNRAVRKVFVESYRQGRIYKGPRMIQWDPAGQTALSDLEVKYVEQKGKLWHIRYPMADGTGHVVVATTRPETMLGDTGVAVHPDDERYRHLLG

SEQ ID NO: 104872 - protein, 212 aa, Unknown
  Obtained from environmental sample
  DOMAIN (7)...(123): Response regulator receiver domain
  misc_feature (1)..(212): Xaa is any amino acid
MIEMQNLNICLVEPSSVQANIIAEHLNEVGIPRIDRVVTGADALAALERSYVPDVVMSALYLSDMTGTDLLFAIRQQSSQTQTPFILISSETDPRNLEGVRQAGSIAILPKPFTKNQLVRSIRNTLDFLNAEEEREETAAQLKLAGLKVLIVDDSKLSRKYVTSVLERIGFDNFTEASDGREAIPLLEETMFDLVVTDYNMPNIDGLGLVDF

SEQ ID NO: 104873 - protein, 263 aa, Unknown
  Obtained from environmental sample
  DOMAIN (124)...(263): Methyl-accepting chemotaxis protein (MCP) signaling domain
  misc_feature (1)..(263): Xaa is any amino acid
MIGEFALKIKTGDIEIASSVHSTIPVHTADEVGALARTLETSYAQLRGYVGEIRDRMRDLQDGDLVADSAFDFHGDFILIKDSIDSITHSLNKTISEIGDSTSSIRLEAKRLAEGAQTLSSGSTEQAASIAELSDAVGGIAEIIHTNEQMAGKAAEFSETIKKNAEEGMRHMDNMIEAVKEINDASHSINKVIKVIDDIAFQTNILALNAAVEAARAGQHGKGFAVVAEEVRNLAAQSAEAAKETEELIANSADKAALGSRIA

SEQ ID NO: 104874 - protein, 95 aa, Unknown
  Obtained from environmental sample
  misc_feature (1)..(95): Xaa is any amino acid
GLRDYAGLDQRSAFCSKRKVADAFKYVIANADFKYIFLSYNNEGLMSIDAIKEIMSRYGKYERFTQNYRRFRSDKEESRNHKADSTTEYLHVLVK

SEQ ID NO: 104875 - protein, 264 aa, Unknown
  Obtained from environmental sample
  DOMAIN (72)...(178): TonB-dependent Receptor Plug Domain
  misc_feature (1)..(264): Xaa is any amino acid
AWDGRQYACGRDGKAKVIVPEERQVVIQAAYPGYENGRLVITTGNSSYKISLRLSGVMEGRELVIEAERPGTGETRTGRSVAVSGREITQTAEIGVVEDVMNSIKLLPGVGYSGFFDAQPSIRGGFPGDMNASLDGYYIMNPYHWGGGFSIFDPRMVESAQLSHGVFSTRYGHTISGLLEITSKKPSPADIEFELGVNSSAANFNLSFPFSSTGNKGGILIMGRVTYYDPVIWLMQALGDSFRDIGLFTQEQEDLLNAIREAPY

SEQ ID NO: 104876 - protein, 98 aa, Unknown
  Obtained from environmental sample
  misc_feature (1)..(98): Xaa is any amino acid
VVGVLGVLGVLGVLGVLGVLGVLGVLGVLGVLGVLGVLGVLGVLGVLGVLGVLGVLLPPELLPLPDPLLLPEPLPLPEPPLPEPPPPEPPGPMTLGPP

SEQ ID NO: 104877 - protein, 241 aa, Unknown
  Obtained from environmental sample
  misc_feature (1)..(241): Xaa is any amino acid
MADNNQMREILEKLDEGVKSLFESDKYAEYLSVMSRFHNYSLRNTILIFSQKPDAHRIAGYNSWKNNFNRQVKKGERSIKILAPIPYNETKEFEKLDPDTKQPVLDENGNPVMETLTRMGARFKTVSVFDISQTIGDPLPELAETLTGDVERYELFMDALRAVSPLPIVFEDLPPDTDGICYFGDRIAIREGMSQVQTVAAVIHELGHSKVHDRNSITGEYVEQTKREAEVTAESIAFGPQ

SEQ ID NO: 104878 - protein, 73 aa, Unknown
  Obtained from environmental sample
  misc_feature (1)..(73): Xaa is any amino acid
MKPYGISALDDIFPQVSPITYILSFLFFGGIIWAISREKIRTIYSISKRTMILTISIVTLIVAFGVIISFVWL

SEQ ID NO: 104879 - protein, 293 aa, Unknown
  Obtained from environmental sample
  misc_feature (1)..(293): Xaa is any amino acid
RTYGKQDSVTSQAAGSAANPDLSTQLLLRIAEELSSIRTELSNLKKDFAGLKAETPPPAEKPESKTEHDHAFFDEEEDEKIALTGDELNNILITADFTEETGTDATGEEIVLHDEDASSVSAGEDDSETFSINDLDGGLDLNMELVEENPDNETSLPEDIAEPPKAEEVEDTVELPEPIEMDMDIADESPDAGELEELPASDIPDLPDDASIPDFDKEADEELIKLRENGARPMTAAPEPEEASYLVEDPMANENFDNVLEEEIETLNEDDASLDLSDAVIDEPDLSTEIHDN

SEQ ID NO: 104880 - protein, 92 aa, Unknown
  Obtained from environmental sample
  misc_feature (1)..(92): Xaa is any amino acid
MLNFKKHLQYAKERGADEAEIFYINGREESAEVRDQKIEKVESAGDRGLSVRIIARKRAGFAYTSSLDEADILKSIDMAITNARYAEADKHT

SEQ ID NO: 104881 - protein, 72 aa, Unknown
  Obtained from environmental sample
  misc_feature (1)..(72): Xaa is any amino acid
MIRVLDTTLRDGLQGEEVSLSVNDKLCVVRLLDELGVDFIEAGNPSSNPKDAQFFEEVKKIKLKNAKIAAFG

SEQ ID NO: 104882 - protein, 260 aa, Unknown
  Obtained from environmental sample
  misc_feature (1)..(260): Xaa is any amino acid
KPNTPWRDSVNSITQLIIEEGATSIGSGAFSGFTGLTSVVIPNGVTSIGDYAFLGCIGLTSVTIPNSVSLTGKDVFYGCEDLKSITISGTGSIQSYDSRSETPWKSVRPAIREFIIGDGIDNMGEHAFLGCGNLMSITSLNLVPPNAYSYRNNAFYGVDMSSVCLYVPQGGIDAYASAVVWKDFRCINPIPTVVVTFDLRNGGIAGSQTAIRDGKALKPADPRRDGYIFGGWYTDAACAGDKWDFDNDVVTADTTLYARW

SEQ ID NO: 104883 - protein, 263 aa, Unknown
  Obtained from environmental sample
  DOMAIN (1)...(144): Peptidase family S41
  misc_feature (1)..(263): Xaa is any amino acid
LEDVINKLKKRGMKKMVLDVRSNPGGLLNQAIEVSELFLKSGNRIVSTKGRVVNSENNATKNGMVGDDMQIAVLVNQGTASAAEIVSGALQDWDRAIVVGKTTFGKGSVQTVFPLDYDGRALKLTTAFYYLPFGRCINKPEYGIRGRGTRAAAVSEDPEESKDVKDTAVRDTQVYYTSNGRKMYGGGGITPDVEIEQRPIPWIAQVQERQALYFRFAVKYRSQLGEAASKIDSSWQPPDTMFNAFKAFYMADTNFTKVKSPAR

SEQ ID NO: 104884 - protein, 136 aa, Unknown
  Obtained from environmental sample
  misc_feature (1)..(136): Xaa is any amino acid
VLEAASLLSGTSGFRRAESADLARFGANGYAVAAELESGGEISVYWDEGMKRRKAKINGEAAALGDLAKHISIVWLTPDTDLLFVGAPSQRRTFFDNLTAGTNDSHLGRTQHLNKLLSERAFALKNGRNDAWLSLL

SEQ ID NO: 104885 - protein, 87 aa, Unknown
  Obtained from environmental sample
  misc_feature (1)..(87): Xaa is any amino acid
MEAIANKKIIEMESEAARDALLRFETIWNWVECGIVIIDAGTRQIIDINPVAARMYGGERTDIIGKGCYEIFYSANRDSCPLIDFNQ

SEQ ID NO: 104886 - protein, 74 aa, Unknown
  Obtained from environmental sample
  misc_feature (1)..(74): Xaa is any amino acid
EDYKVHIEFNDGTAGVIDFYDKLRNDHRQIIRELLDLEKFRTVKTGLDTICWDNGVDFAPEYLYEQLKIQQKVA

SEQ ID NO: 104887 - protein, 273 aa, Unknown
  Obtained from environmental sample
  misc_feature (1)..(273): Xaa is any amino acid
FDIIGSDSAASDFEILLLIRSTLAALRADAHIHLNHRGLFNRFLARINMGEHSTGILRIVDKLAKVGRDETEKSLAELGGAQNAAKILEYIGAGSASNTGFEDTLKRITELSGGPSPESQRLDLLRRFMTDSCVQDAFTLDPSITRGLDYYTGVVFETFLTDLPDIGSICSGGRYDNLAGLYSKAAISGVGSSIGLDRMIAALETLGKLPGATTYSVAISCLKQEHSGLYQALAGRFREKGIPCEVFLDESGGDKLVKQFILAEKKGIRWLVI

SEQ ID NO: 104888 - protein, 155 aa, Unknown
  Obtained from environmental sample
  misc_feature (1)..(155): Xaa is any amino acid
MSLPVVWLCVGIFALVVLALLCGFSPREQLTDLKPAAFYAALMYGLSVFSLLLEWLATTGEAPRLAALLIPRPGFLRISLRLALIVQISALLFRSTSSLELRDSVGAVERFLRRQLSRLPFVGKRISPRPRFAYSLALFLSFIPQIFETWKQINL

SEQ ID NO: 104889 - protein, 281 aa, Unknown
  Obtained from environmental sample
  misc_feature (1)..(281): Xaa is any amino acid
AFQSDGTIKVSGGTVSATSGQAFDGANGGKIIVSGNAKITSGAGYSSGTTTISTNGTIEITGGTVENTGAGTAIRNASGGKVIVSGGTVSSESGNAISNRDNTGIVIISGGTVTTKSGSAILNSTETGSTFTGYVTVSGGQISATTTGDAIYILNGNSVGASTINITGGTISAVSGRAINNTSSAATVTISGGTVEATSSNQTIYNSGRGTIAITGGTVSSATPADYAVYNNNADGVIILDNDPAITGIIRYYAGKLSVADPRTFTPPPAAQYKLALNTYT

SEQ ID NO: 104890 - protein, 281 aa, Unknown
  Obtained from environmental sample
  misc_feature (1)..(281): Xaa is any amino acid
YHNSTGTVTISGGIISTINGDAVYNYSTGTVTISGGTVKATEAGTSGGYAVNNHDNGTINITDGTISATIGRAVSNNSTGAVTIAGGIISAINGDAVYNVSTGTVTISGGTVKATETGTSGGYAVNNNGAGTIIISNGTIEATIGRAVSNYNTGTVTISGGTISATTGRAIHNNYTGTITVSGGRVSTVGDYAIYNVHLDGATINIFGGTIENTASGGYAVYAAYGNVVLGGNPDITGVIRYNVGNLSVNGSTPFNPDPAAKVYTLALSDYNLNAVAVVGG

SEQ ID NO: 104891 - protein, 111 aa, Unknown
  Obtained from environmental sample
  misc_feature (1)..(111): Xaa is any amino acid
MTNGRFGIHGGQYIPETLMNEIQNLEKAYLHYKEDKDFNAELTDLLNNYAGRPSLLYYAEKMSKDLGGAKVYLKREDLNHTGSHKINNVLGQVLLAKKMGKTPRYCRDQVL

SEQ ID NO: 104892 - protein, 276 aa, Unknown
  Obtained from environmental sample
  DOMAIN (7)...(276): Pyridoxal-phosphate dependent enzyme
  misc_feature (1)..(276): Xaa is any amino acid
IKAAGKLTDLIGNTPLLKASNFLEGAQAKADIYFKLEYFNPLGSVKDRIAYAMINEAEKEGRLKPGDTIIEPTSGNTGIGIAFVAAVKGYRTILTLPETMSVERRTLLKALGATIVLTPGADGMKGAVRRAEEISAQTGGVILQQFENPANPVIHQKTTAGEIWNDTEGAVDIFIAGVGTGGTVTGVGTYLKEKKPGIQVIAVEPFESPVLSGGAPGPHKIQGIGAGFIPKVFKREVVDEVYTVKGTEAIETSRELGRTEGLLVGISSGAAAFAAL

SEQ ID NO: 104893 - protein, 283 aa, Unknown
  Obtained from environmental sample
  misc_feature (1)..(283): Xaa is any amino acid
MDTVSGTPEKTHYFVGGTPENKINSSSSLNLNTGYYQVMFSLSNGQHNTGREEYLHIYKNMDSRFEYTFTQDHFTVYSVTNGADSGPGSLRHAIENAASNSTIMIENDVKTILLKGRIDIRKNLTIAGNGVTITRDPSWTTIDGDSQLLYIRSSMSAITVTISRVHFKDGRASTNVAGVFLWDGSVVLESCIFSGNQSTSGAIFNRGTILSVKGCTFYENSASDAGGAISNLGNITLTGHLFYGNTAARLLPVIDSTYGTVSSAGYNVVDVPLGTASNQSGWA

SEQ ID NO: 104894 - protein, 287 aa, Unknown
  Obtained from environmental sample
  DOMAIN (169)...(202): Tetratricopeptide repeat
  misc_feature (1)..(287): Xaa is any amino acid
NWRRLVVCYENGKDKEKLAAADAQVVALDPKDVKSRQRYADYALSKGDAQTALKLCKELALLTPNDPKPFKTLYEASLKDGNKKDGVMYLRNFVLLDSSDAAAIKQLADLLYESKDADGALNEYRKALRRDPNIKGIYKNYVAILIDKKQDEEALKAVQKAIALKEVNAMIYGAAGDMYKKRGENANAIKMYQAALTLDKQNVELLAKLADAQTASGEIRNAIVSYEQLVVLNPNVSNEYKVLGDLVTKSGKAKEGMDNYKKYLAKVPSDNEVSVRSASTSTGHSST

SEQ ID NO: 104895 - protein, 61 aa, Unknown
  Obtained from environmental sample
  misc_feature (1)..(61): Xaa is any amino acid
KKDISWGNQIRSYVFQPYTMVKDYRTKAEAGNIQAVMDGDIDQFIEEYLRYTWHQRAENRE

SEQ ID NO: 104896 - protein, 266 aa, Unknown
  Obtained from environmental sample
  DOMAIN (160)...(241): Mur ligase family, glutamate ligase domain
  misc_feature (1)..(266): Xaa is any amino acid
MAVETGMGGRLDATNIIDPLVSVITLIELEHTEYLGNTIAAIAAEKAGIIKQGRPLVLAEQSVEAAQAVLALEVFREHAEHRASPLFYFPDCGEIKNTRIEKSGTTFDLVLKGETIPGLFVPIPGEVQAKNAGLAALAVKTAFPDFQNQCLYNGLGAFSLPARFEKISSTPLFIVDGAHTKTSVKTCLETFISLYGEDGILLFGCAEGKDVIAMAELCVPRFSRIIITKPGTFRKSNVEEIHAAFVHAAETLNVHPEIIFLPDTEE

SEQ ID NO: 104897 - protein, 269 aa, Unknown
  Obtained from environmental sample
  DOMAIN (47)...(91): WD40-like Beta Propeller Repeat
  misc_feature (1)..(269): Xaa is any amino acid
DTSTLYFSRSGKSGTVQKKKVGRETVRSFTENLEIYSIQQNSSGKWEFITPFEHNNAKHYSVMHPCFSPDGKAMYFVSDMPGGLGSYDIWMCERQDGGSWGEPVNLGAPINTPDNEMFPTMGADGTLYFSSNGHAGMGGLDIFSTKKEDGKWQSPCNMKPPFNSSADDFFLLMTGDSVGYFSSNRVGGKGGDDIYMFTPKPQEEAAEVEPETEPKTETEAEVEEKPEPERTIEIAQPEQTVASVENILINGLLIDQETKQSLAGVKVCA

SEQ ID NO: 104898 - protein, 242 aa, Unknown
  Obtained from environmental sample
  misc_feature (1)..(242): Xaa is any amino acid
TNSSGGSGSFTMNSGSKITNNTATGNGGGVYVGSNTFTMNDGEISGNTANGSAANNGGGGVYVSGGAFTMNDGEISGNKAAGNGGGVYNNATFTVGKTAKVKDNTKADGAARSNVYVPGTTYITLGTGANAPASGMEIWAQTARKDNIVVAKGATDEIKPYFNSDDVGKSVSVLAGALLIGDPSGNPLEQPELSDFYKEVEKYGTATDDMTITVNDNLTLPIPVNIPAPGAPGITLTIKGNP

SEQ ID NO: 104899 - protein, 158 aa, Unknown
  Obtained from environmental sample
  misc_feature (1)..(158): Xaa is any amino acid
MAVKKSELYSSLWASCDSLRGGMDSSQYKDYILTLLFVKYVSDKFKGVAYGAIDVPKGGGFDDMLALIGDKNIGEKMDIVIAKLAEANNLRGVIDNAHFNDEGKLGKGQEMVDKLGELLAIFRDQIPDLSRNRADGDDIIGDAYEYLMRNFATESGKS

SEQ ID NO: 104900 - protein, 254 aa, Unknown
  Obtained from environmental sample
  DOMAIN (4)...(248): Glucose inhibited division protein A
  misc_feature (1)..(254): Xaa is any amino acid
MDYDCIVIGGGHAGIEASLAVSRLGFSCLVITQNPDSIGAMSCNPAVGGISKGNLVREVDALGGEMGKLIDRTMIQYRVLNRSRGPAVQAPRAQADKRQYQEAARKALESQKGITIMMDTVIDLMVSESPSRGGPQVEGIVTARGHRISGRTVILAAGTFTEGRIFIGEYDAPQGRLGEAAALGLGTNLRRRGFPLGRLKTGTPARIAGNSVDFSKMEKQDGDTPEPFSFNIDPARSGAGSKWAAALPQVPCWI

SEQ ID NO: 104901 - protein, 281 aa, Unknown
  Obtained from environmental sample
  DOMAIN (152)...(185): Tetratricopeptide repeat
  misc_feature (1)..(281): Xaa is any amino acid
IVRIATGSLLSPTDAAKNHYDNAEIFRNRSDWDLAILEYTEAIRFEPNNAMAFFGRGLSYQNKSDYDRAIADYTQAIRLNPNYAVAYNNRGVSYDYKGDYDRAIADYTQAIRLNPNFAVAYRNRGFSYNAKGDYDRAIADYTQAIRLNPNFAVAYRNRGFLYNAKGDYDRAIADYTQAIGLDPNYAVAYNDRGVSYHNKRDYDRAIADYTQAIGLDPNYALAYRNRGFSYNAKGDYDRAIADYTQAIGLDPNYAVAYNDRGVSYHNKRDYDRAIADYTQAI

SEQ ID NO: 104902 - protein, 93 aa, Unknown
  Obtained from environmental sample
  misc_feature (1)..(93): Xaa is any amino acid
ALLGGIGLDNRHTFELTRRYADQVELVSEDEIAAGMFHAFDKLRLVVEGSGAVGLAAVLAGRIKGPGPVVILVSGGNAAPETLAAIAAARYGL

SEQ ID NO: 104903 - protein, 272 aa, Unknown
  Obtained from environmental sample
  misc_feature (1)..(272): Xaa is any amino acid
VKGLAANGSLQITVSATNPATSAPVTHTFTVSVSGESAAQGHGFPPTVWVDTITTAAGTSTINAVVFANGRFVAGTQSGANAGRIILSTDDGITWSAATGNGSMRPVISVAFDGARFVAGDNNGNISWSSNANGTTFTAGTSVFSGPVYSLGYFNGMLVGGSNNGELRYTANANAAWTQAAIGGDFGPVKGIAFGNGRYVAVGDGGKTAYSTDLATWTSVPIAGETANFSQVAFGSNIFAAVGANGTVYTSPNGGTWTKANGSGFTADINDV

SEQ ID NO: 104904 - protein, 276 aa, Unknown
  Obtained from environmental sample
  misc_feature (1)..(276): Xaa is any amino acid
NSETAGNKTLTVTYSGKTATFIITVVNADIIVSNTAEWTAAQNTIRNGGNNKSYTVYVSGDVGVAGSTSNSFGAATGITVTLKGNGKLYLNSQGNMVRVAVNQTLIIDSADLTLQGLRNGQNNATQNNNTSVLYVNAATVDTATAQLELRNGTISGNTASAGNGGGVYVGAGTFTMSGGAISSNTASSSSSGSGNGGGVYVASNGSFTMSGGTINSNTASSSSSSSDGGGGVNVASNGSFTMNGGTISDNYASILGGGVRVSGGTFTMNNGEISNN

SEQ ID NO: 104905 - protein, 256 aa, Unknown
  Obtained from environmental sample
  DOMAIN (53)...(199): Thiamine pyrophosphate enzyme, C-terminal TPP binding domain
  misc_feature (1)..(256): Xaa is any amino acid
LKHDPEDPLWPNRDRFILSPGHGSALLYAWLHLAGYGLSLEDLKAFRQWGSRTPGHPEYGRTAGVEATTGPLGHGFAMGVGLAIAERMLAQRFNRPKFTLFDHHVYALVSDGDLMEGVSAEAASLAGTLGLGRLIYVYDDNQMTIEGPTDLAFTEDVRARFSAYGWQVIVVTQGEDLGSIQQALENARAEQDRPSLVMVRTKLGAGSPKENTPQAHGEPLGPEAIRATRRFYGCPEDQSFTVDQRVYDHLKKLGQA

SEQ ID NO: 104906 - protein, 80 aa, Unknown
  Obtained from environmental sample
  misc_feature (1)..(80): Xaa is any amino acid
MPSWEIFEEQPREYREAVLPPRLTRRLAVEAGLSLGWSRYVGPAGRILSIENYGLSAPAERLFTELGFTPEHVAELVEGL

SEQ ID NO: 104907 - protein, 81 aa, Unknown
  Obtained from environmental sample
  misc_feature (1)..(81): Xaa is any amino acid
MEKNKVQVLEGIVSVIVNTVLFALKFWAGMVTGSIALVADAWHTLSDSLSSVFIIFAVRLSSRKADREHPFGHGRWEHISS

SEQ ID NO: 104908 - protein, 228 aa, Unknown
  Obtained from environmental sample
  DOMAIN (1)...(228): Bacterial lipid A biosynthesis acyltransferase
  misc_feature (1)..(228): Xaa is any amino acid
MAKKFRKLRHDIGYIVFSAMVFIVKITPRFLGVHLFGFFGFFFGFILKEIRKTTQKNLKKAFGDYSKKQINRITNGVFVNAGKSFFDGIKLPLYSPRKFLKIVRLGNENLTKEFFSNPNGAIILSAHLSAFELQTQIVAMLGYSVMSVGSKPFDQRIGNAYAALRRRNGVKYYDRDGGMKHVLKNLKKGEFFGVLIDQDATEEGVFVNFFGEEAFTPYMPVKIAIKYK

SEQ ID NO: 104909 - protein, 223 aa, Unknown
  Obtained from environmental sample
  misc_feature (1)..(223): Xaa is any amino acid
MPSRFRPGLPRDVAELSQLFTFGRKERGASYLGKPALLSAYLRYFLPWNVFRLTRLFGSLPLELKPNDAVNDIGAGPLTLAIALWISRPELRELPLEFRCIDRTAAVLEAGKKLFAVLTGAKSLWAVKTIRGELSHNGRLSVEIRGKPAALSAAANVYNELFWDFSPMDLEGSGRFAEKQARLLSSLTESSGSILVVEPGIPRSGEFISRLRSFLMSEGRNPC

SEQ ID NO: 104910 - protein, 266 aa, Unknown
  Obtained from environmental sample
  DOMAIN (1)...(101): GTPase of unknown function
  misc_feature (1)..(266): Xaa is any amino acid
RRAITDRTPGVTRDPVAADTIILGKPLTLVDTGGFKLDRDSDSPEGELEKVVVERTMAILEKADLILLLFEAGELSLEDEEFIELLRPYQEKLLAVVNKTEGGRREAEAWNLLSYGFEKVYMISAEHGDNVQELEKAIASRFDGYASLSTTEQAGEPGTDEPYTRLPYETAAKAPIRVAILGKPNTGKSTLSNRLTSSSASIVSEIPGTTRDVIEGAFTWKNRDFQVLDTAGIRRKSRVNEKIEYYSVNRAIKTIDEADLVFLVID

SEQ ID NO: 104911 - protein, 273 aa, Unknown
  Obtained from environmental sample
  misc_feature (1)..(273): Xaa is any amino acid
VVTHAAFLGIVFSGKYLGIDPSIKTSLFLAALSFGMLVGTFVYVAGDGLVSKTLLAHNFTRYPLDCREKRQEAKSWIVPIAAILVTLCFTYSVTMLGIHKAGGTLDAMRGSAMSSICIPLVVFFISITALALTLKKNTGALYNSVVAQLENLSSEQKDLTKRISICSVDELGTIAGMVNDFCEYLGDGIKNIKNEANILSGIGNDLATNMNDTAAAVNEITANVQNIKMRITNQSASVSETHATMEQLVVNINKLNDHVENQGDDISRVSASI

SEQ ID NO: 104912 - protein, 282 aa, Unknown
  Obtained from environmental sample
  misc_feature (1)..(282): Xaa is any amino acid
KAGYELEQLMDLERAKLESSVNTEIAIALKMATSPLIRRHFLNPSDGDLRKSAFEEIEEYRRAFKSNSVFWSSSIDKEFYFSEENHYTVDAENPDNYWYNMTLYETEKYNFNINYNAELQQTLLFINVPVFDAQRKPIGLVGTGIDLTEFVNNIYRSYKGSAALYLFNAQGEITGSRDVNQIKNKTTLDTALGDTGKRILERARSGESRFFNVSGGIATVTDVPSLDWHLTAILPITIADTLKSGMTLVFLLIMAAIAGILIISYIIYINYQPSQANEEHGA

SEQ ID NO: 104913 - protein, 263 aa, Unknown
  Obtained from environmental sample
  DOMAIN (123)...(248): Thiolase, C-terminal domain
  misc_feature (1)..(263): Xaa is any amino acid
MTFPALFAEYAKGYKAKYGIADGDMERFLATVAALCYANGLDNPLAHFGKGGPSDKLGLTTADAILNLPPEKNPVIAEPLKLHDCSLVTDGAAALVLMRTADAGAMPKRVQVAGIGHANERIAISARPNMFELLAGKEAVRRAFQEAGVGAQDIDLAEVHDCFTINQLLTTEALGLSKDGRAGHDYAEGRFTRGDKCPVNLSGGLKAKGHPVGATGVSMHALAYKQLVGEPIGAAPAKQPETAVTFNVRGSSVTNCVTVLRRG

SEQ ID NO: 104914 - protein, 256 aa, Unknown
  Obtained from environmental sample
  DOMAIN (149)...(241): Bacterial Ig-like domain (group 2)
  misc_feature (1)..(256): Xaa is any amino acid
GCKAPNHPKPEPEPEPSGDAGLSSFVIGAVEASLPAAITEAVWNGAAGLNGLEEKYTVKITFDRDVNLAGIAVKPEASEKASVEYAVTTDASSIPGEFKSIDEPATLSSGDYLYIKVTAEDGTINYYRFLIEQEAIIEPPVPPEPPAKPITGFSLKKTSTTLTLYSSEQLEWTITPSDASIQKITWTSSAPAVVSVDANGKVTAASVTASLTAQYTVTPATGTATITGTTADGGYKASITVNTTVKPQTATVDSVP

SEQ ID NO: 104915 - protein, 192 aa, Unknown
  Obtained from environmental sample
  misc_feature (1)..(192): Xaa is any amino acid
LSLLGAGFTSWSAWGNAIDLCFTAGCTIYQDTTIAGVSVWWIGTAGFGLLALLAIVGRPALTLAVAGAALCLDCLLLLLLALTSPCVACLIAGIFFALVYAASRNAMHIKRPIPRSGLLLFWSFLLVANLLSVVRSEMGTWAIHEAAVPNMKFYFSPACSACQEGIRAFSGRNDVSFYAVAKTEQEVLLIAA

SEQ ID NO: 104916 - protein, 236 aa, Unknown
  Obtained from environmental sample
  DOMAIN (20)...(133): Response regulator receiver domain
  misc_feature (1)..(236): Xaa is any amino acid
MANDGLKAQGLGGAEAKDKPLILVVDDDPVICCVLAGALNRAGFDAEIFQDAAQALESLNELEPDVAVVDWVMPDFDGLNLVDILKARVRNLMTILITSHVAHEAVEEARRSGRVDAVLPKPFNLADFLNMVSSCVNSRQWASAPPVAPEGVGGGVLTGWLALDGREAYFEHVLDSLIDAVMMVDRVGRIIYYNNGARRMFCFREQSAGSLSLKELCPDDNPLSDLFAHFFGLHPP

SEQ ID NO: 104917 - protein, 87 aa, Unknown
  Obtained from environmental sample
  DOMAIN (33)...(86): Helix-turn-helix
  misc_feature (1)..(87): Xaa is any amino acid
MNYKEHLAEEMINPEFKKAFEEEKRLIELSYAIIEAREKCGLTQKQLAERSHVTQQQLSKIENGVNCNMLTFIKVTNALGLDLTISA

SEQ ID NO: 104918 - protein, 274 aa, Unknown
  Obtained from environmental sample
  misc_feature (1)..(274): Xaa is any amino acid
VFADEYIFLPDFCREIIKSAYQNPDKHAGIPFLSAAKMNLKIPDGYAKTIGLLSDMESFFKHSDLVYNSDSNPAPPDSDAIINLQFPQDYGSTLMLASMLPHRLMELALIKIQFFLSDGHNMAHIVNALNMQIKDKEKALKECINKIMYRPFECINAMERFDDFVYLFWVHFCALVKKDIKARNEIRETDLAVLQSIYVIEVCSSLYRSAVVKRREIEAAYTRLEELMDQPPYRYTIGDIAKFTTDKGVPLLKYISKQNMESYIRRQITESKDG

SEQ ID NO: 104919 - protein, 196 aa, Unknown
  Obtained from environmental sample
  DOMAIN (20)...(181): Cyclophilin type peptidyl-prolyl cis-trans isomerase/CLD
  misc_feature (1)..(196): Xaa is any amino acid
FCLASLALFGQTPGTEPKPRVQFTTNLGSFTVELEPQAAPKTVENFLDYAKSGFYNGTTFHRVISTFMVQGGGYTTTGEEKATGGPIVNEAKRTFEMGLKNDRGTIAMARTPIPDSATCQFFINVVNNAFLNFPGQDGAGYCVFGRVVDGMETIDKIKDVKTIIPSDRPISPVVITDTKVTAPKAPATPKNSTPKK

SEQ ID NO: 104920 - protein, 145 aa, Unknown
  Obtained from environmental sample
  DOMAIN (9)...(139): Thymidylate synthase complementing protein
  misc_feature (1)..(145): Xaa is any amino acid
MPGANVNVLDRGFVGLMDYMGSDLTVVNAARVSFGRRKETFDEKDVELISYLAAHEHTAPFRHAYLTFHVKAPIFVFRQWMKHRIASDFNEISGRYVEFNGDEFYVPETFRLQSKDNKQGSHGKISDALKRTAEASYLDACRNSV

SEQ ID NO: 104921 - protein, 93 aa, Unknown
  Obtained from environmental sample
  misc_feature (1)..(93): Xaa is any amino acid
MNILVTGGAGFIGSHFVDRFLSEGHVVWALDNLRNGTVVNLNQDAGFIQKDLNDPALGDELARVRCEVVFHLAAQIDVRASCREPIFDAMENV

SEQ ID NO: 104922 - protein, 89 aa, Unknown
  Obtained from environmental sample
  DOMAIN (14)...(75): Exonuclease VII small subunit
  misc_feature (1)..(89): Xaa is any amino acid
MAKKTTPAKEGGKKSFEERLERLETLGEKIRKTDIPLDEALKAFEEGIRLARGLEGDLEKIENRIEILMNSADAPLSESPELELFDDGE

SEQ ID NO: 104923 - protein, 288 aa, Unknown
  Obtained from environmental sample
  DOMAIN (1)...(58): Flavoprotein
  misc_feature (1)..(288): Xaa is any amino acid
KSAHYDMDHIRLSEWADLLLICPATANTIAKMAGGIADNLLTTLTLSIPEAKIIVVPAMNCVMWANNATQANVGALASRGVTVLPVGEGELACGVRGPGRMAGTEEIVKRVMDRFNASDKPANTALKGKNVLISSGPTEEPIDPVRVITNRSSGKMGAALAKTALSMGARVTVVSGPASEPPPSGANVIRVRTAAEMAAEMKGRFAEADICVMAAAVSDYRPVVSSNIKIHRSEKENITLELTPNPDILAALGAVKTSKQVLVGFSLESRGRALTAPRRRCGRRGATL

SEQ ID NO: 104924 - protein, 119 aa, Unknown
  Obtained from environmental sample
  misc_feature (1)..(119): Xaa is any amino acid
MKYNLDLHHRHSIRLQNYDYANTGAYFVTMCCQNRVNYFGEIENEKMILNEYGDIAHNEWKKLSERYLETKFDIFQIMPDHIHGIIEINVGATLAVAQSRNPDAQSRNPDAQSRNPDAQ

SEQ ID NO: 104925 - protein, 85 aa, Unknown
  Obtained from environmental sample
  misc_feature (1)..(85): Xaa is any amino acid
GKIAVLSGSGKDYLCEDTYGFSALPGGYGYSNGYFGNVGNYGLWWSASEYSSYNAYHRGMLYLYEGVYYNYGDKGLLFSVRCLQD

SEQ ID NO: 104926 - protein, 281 aa, Unknown
  Obtained from environmental sample
  DOMAIN (166)...(237): HAMP domain
  misc_feature (1)..(281): Xaa is any amino acid
NGPNAKVVNMSDPVPIKNMGKDTYAVTIYVPIINKRLNEVVGVVIGRLDIGMIQPLVEATIKNLEEVTSAVIYTSNGFILGNYLPEFVGRKIDEETQYGKQLEDVKTAIKNAKEWEGIEFDPELKTNMVMAIANIPIGSSPITWSVMIGSTETYILRDVNELRNFVIILAGIALVVAVVIIYLVLGNTTAPIVKVSDTLKDISEGEGDLTRTIAVSSNDEVGDLALYFNKTIKKIKDLVLVIKKQAATLSDIGNDLSANMTETAAAINEITSNIQSIKTRV

SEQ ID NO: 104927 - protein, 204 aa, Unknown
  Obtained from environmental sample
  misc_feature (1)..(204): Xaa is any amino acid
MTPNQEDALFNFLENVTEPFTLADITEFVLMLDPTRAENVPAEVAALIEFHNVAFRLDSRQWVSRRGCFEEVPFVINPTKLELLNGILIPGHRCIPFANPGALPHEYQFFWQGKKIPWTTTEGPPEEFYPYYYIFGEEYAPQYVARDNPENESAFNYDPYEDPPEVSIHTLDMRNIFREASFVPGDRFVVRTKDWKEGHLIWRK

SEQ ID NO: 104928 - protein, 92 aa, Unknown
  Obtained from environmental sample
  misc_feature (1)..(92): Xaa is any amino acid
MDFLDYDRLIELRDAAIEKRKQLPDIVWEKFEKAFIIEYTHHSTAIEGNTLSLAEVKLVLEDGISVGGKPLRETYEVTNHEKAYEFVKSIDF

SEQ ID NO: 104929 - protein, 140 aa, Unknown
  Obtained from environmental sample
  misc_feature (1)..(140): Xaa is any amino acid
MALPEKRWIQRLDNYSKVLRYLEDFVAIRNERTLSLLEEYAILKAFEMTFECGWKSMRDFLQSKGNIGIDSPKDAIRQAFSKGIIENGQVWMDMIESRKEIPYCYDETRAVKVAKAVSDSYANEFKNFLATMKRYENEKE

SEQ ID NO: 104930 - protein, 200 aa, Unknown
  Obtained from environmental sample
  misc_feature (1)..(200): Xaa is any amino acid
MKKKQPIIYIPDKEYTNFKEIKIGNIAAGVLYRSSSPVKGGDEKKAKETLAVNAGIKCVINLDDAISTIEKLSEPVPWYHNLVMQKNVICLPMGFTIPGVAFNEKKLKIALQFMIAHEGPYLIHCFAGVDRTGFVAALLEALMGASLKEICRDYLSAFPSDHGVSSRMENYRKLKNFLTQIKKMSHGKNITSINIQTGCR

SEQ ID NO: 104931 - protein, 96 aa, Unknown
  Obtained from environmental sample
  DOMAIN (6)...(96): Response regulator receiver domain
  misc_feature (1)..(96): Xaa is any amino acid
MDNERKKIIAVDDNLENLTALKNTLKNIYDVYPCPSAQKMFGILERIKPDLILLDVEMPEMNGYEAAEKLRSGANSGEIPIIFLTSMDDEESKRKA

SEQ ID NO: 104932 - protein, 170 aa, Unknown
  Obtained from environmental sample
  DOMAIN (12)...(170): Domain of unknown function (DUF323)
  misc_feature (1)..(170): Xaa is any amino acid
NTWTTRNDSGEEVRNQLVVTISRPFYLGTHEVTQEQWRTLMGGNPSGFKGRGHPVDQVSWEDVQAFIGKLNRKEGSQGYRLPTEAEWEHAARAGSDTAWFFGDDPAALEGYAWFAENSKGATQPVGKKKPNPWGLYDIYGNVAEWVDDWYEKYHAGEVTDPTGPDSGSSR

SEQ ID NO: 104933 - protein, 149 aa, Unknown
  Obtained from environmental sample
  misc_feature (1)..(149): Xaa is any amino acid
SCFFGQNGFGRIHANSPFTALPITLERLRKQTPYIIVDFHAQASAEKKTFFYAADGLCSAVIGSHIRVQTADETIMPKGTACISDAGRTGSLQSVGGCEITSRINEYLTGIPHWTKEAWDAPQLQGVYLDIDKDGKTRAIERVRIDTTE

SEQ ID NO: 104934 - protein, 252 aa, Unknown
  Obtained from environmental sample
  DOMAIN (11)...(238): Methyl-accepting chemotaxis protein (MCP) signaling domain
  misc_feature (1)..(252): Xaa is any amino acid
EHIENLNNLVAEQTDRVNTSSSAVEQMTANINSVTKTLIENSKNVSDLAQASEIGKTGLQTVAQEIEGIARDSEGLLEINSVMDNIASQTNLLSMNAAIEAAHAGEAGKGFAVVADEIRKLAESSSEQSKTTAGMLKKIKSSIDSITASSNEVLARFEAIDSGVKTVSEHEEVIRNAMEEQEAGGKQILDAVGRLKDITVEVHKGAEEMARSGDEMIKRTHNFINVSKQVVDGMNRMADVDVKEIKNRDSPC

SEQ ID NO: 104935 - protein, 125 aa, Unknown
  Obtained from environmental sample
  misc_feature (1)..(125): Xaa is any amino acid
MLGRGDAVTAMPASGVSVFGIFRILLTLAVVAAAIYGLVYFLKFRRASRDKAEQDPFLKVLASAPLAVNRGVHVVSVGQQAWLVGSAENGVTLISEIGDKDTINAMLLEDSKRAAAPPTSGGTAM

SEQ ID NO: 104936 - protein, 120 aa, Unknown
  Obtained from environmental sample
  misc_feature (1)..(120): Xaa is any amino acid
MHPSAQIKSKLFSSINKGIKYDLDRMFNASSLRGDPHNSYSSIHVAGTNGKGSTCAYIESVLRRAGYKTGLYTSPHITNFEERFRIDGVEISEDVWFDVYKDQEKVINDLGLTFFEAATL

SEQ ID NO: 104937 - protein, 186 aa, Unknown
  Obtained from environmental sample
  misc_feature (1)..(186): Xaa is any amino acid
MGVGLLKAHLEAFDAIGAGITDLRREGYDKQYEYADAIKGAYGVFFFQHPSMLEYQERLKKKKERSNAETILRVDKIPSNNQITRLLDGIRSEAFTPVFEQGLETAQRHKGLDQYLVLGGRYRLITLDGVWFYQSENIKCGHCLRQQLKGGGTLYYHSMIAAALVKRNYSTPPAILANFAFLRLLG

SEQ ID NO: 104938 - protein, 185 aa, Unknown
  Obtained from environmental sample
  misc_feature (1)..(185): Xaa is any amino acid
VGVSPLYRGLTLLFAVAMAGTVYAAGGAGSTGTFTDERDAKTYKTVVIGGKTWMAENLNYQTDSSWCYGNKADNCAKYGRLYDWSAAMAACPAGWHLPTNMEWNALIKAVGGSSVAGRKLKTKSGWRYDNKNGEDGNGTDDYGFSALPGDHRRSDGAFKDIGYLGYWWTASEIVSKDAYYRIMDY

SEQ ID NO: 104939 - protein, 130 aa, Unknown
  Obtained from environmental sample
  misc_feature (1)..(130): Xaa is any amino acid
VLGVIIAVWGLMQLAGLKYLITIGGAIDMGIGLYVLYKFAETRQSLTRTIAQPACLIVLVAAAAFSKLDPVLASSGVFRYGTISNAKRVVEHIDGRTASITLFKSGDNLVLSTNGKPDASVGFKDEYSSD

SEQ ID NO: 104940 - protein, 254 aa, Unknown
  Obtained from environmental sample
  misc_feature (1)..(254): Xaa is any amino acid
MHAAKGLNFPVVFLMNRDSPKNVKCPDTLLWTDADKNRHITPCLSVEHLREGKGKNKTDLEPLERYQTSQGREHRRLLYVAMTRPQAMLFVPMRSGENKGKVDNDISPRLTELFERNADVVEIFNDTAWDKDINKIGGININETSSIPLDDIPTLSLQKFISLETSYSQISRELKAASHDDDLPALITNDDGDDVLRNDEHHVENIKDQLLPGGRTTGDALHRAIDKLMSYDDINTVKTTTTRLTNSWGQYRKA

SEQ ID NO: 104941 - protein, 90 aa, Unknown
  Obtained from environmental sample
  misc_feature (1)..(90): Xaa is any amino acid
MSGRDTGMLARAFHTSLACGFADMALAAARRTGIWRIGLSGGVLQNATLAALLPSLLEARGLTPLTHRDLPAHDGGIAPGQAAWGRRLCK

SEQ ID NO: 104942 - protein, 249 aa, Unknown
  Obtained from environmental sample
  DOMAIN (4)...(249): Homocysteine S-methyltransferase
  misc_feature (1)..(249): Xaa is any amino acid
RSGGIAKAGLAESDFGGYAGCNEYLNVTRPDIVEGIHASYLAAGAHVIETNTFGGSRVKLGEFGLGERAYEINKAAAAAARRAIEKFAGVNSDNSGDRFVCGSIGPTGFLPSSSDKELSKIQFDELVDVFTEQAKGLIDGGADVLLIETSQDLLEVRAVAIAIRRLRAATNKYVPIQAQITMDASGRMLLGSDISAFLGAAHGLGVDVIGMNCSSGPDEMGPYIDKLLELSTIPVSMLPNAGLPVNVDG

SEQ ID NO: 104943 - protein, 250 aa, Unknown
  Obtained from environmental sample
  misc_feature (1)..(250): Xaa is any amino acid
VAGATVSYNAGTITATFPKTEIKVIDLKAIPGITVPYAGGTPASGVGYNVQYNGTVTWSGSMDNNGRFIEGTDYTATITLTPKAGYTLTGVAQNFFTVEGGTARNPFSSGIVTAVFPKTPKPIDIKAIPGVTIPATGGTPGRNITATEQYTGTVTWKDAAGNVPSSFVGGQIYTATITLTQKTGFTLTGVAMNFFTVDGATSVSNLNNSGIVTATFPQTDSPVTIKDIQGVTVPSVGGQPVDKITPTFQY

SEQ ID NO: 104944 - protein, 240 aa, Unknown
  Obtained from environmental sample
  misc_feature (1)..(240): Xaa is any amino acid
GIISVKFPKTELSPDRTIHLTAPVVGEAPVRTIQYIDQSTQALQYTGTVTWLPGVSDKFAAGTSYNAIITLTAKDGYTLVGVPANYFDVPGAAPVTNPANSGGITATFPATDANIAKTITGITAPVAGAEAVNVIATDQYNGEITWSPTLKDNIFDAKQTPYTAYIVLTPKSGYTLIGITATNYFTVTGASSTNYISTTKTIVAQFPKTAQTISTSLSFTIALPKVGDTPSRIPINSSNP

SEQ ID NO: 104945 - protein, 130 aa, Unknown
  Obtained from environmental sample
  misc_feature (1)..(130): Xaa is any amino acid
GDGEAVLPRLADLLIEARERGWPRGRFLEESRHIPGVYVPSFFTERDGIPTPLHADYPKAVRRIVPDLDDALYPSAQVVPIGAVHNRLALEIARGCTRGCRFCQAGMTCRPVRERSLAALDKLVDACLAQ

SEQ ID NO: 104946 - protein, 184 aa, Unknown
  Obtained from environmental sample
  misc_feature (1)..(184): Xaa is any amino acid
MTIGDLEVAIPIVQGGMGVGISLSGLASAVANVGGVGVIAGAMIGMREPDIATNPLEANLRALRSEIARARELTRGVLGVNLMVALTTFSEMTRTAIENRIDVIFSGAGLPLDMPRHLIALCEEKKEEFKTKLVPIVSSARAAGVISKKWLSRFDRLPDAFVVEGPKAGGHLGFKPAEIDSPEH

SEQ ID NO: 104947 - protein, 251 aa, Unknown
  Obtained from environmental sample
  misc_feature (1)..(251): Xaa is any amino acid
FEAVAIINEKGTTITSYSSGAAPPPEDSVFKKFRDMALDGKRVITSTYRDAEGKLVFYVFVPMDVFGYSSGSEAPAILGATVSGLYFNTLVAKLMMWDTGRITIVDEKGKVIADEHNTWVEGQVNFLELAENDRRYAEFAGVIDRMVSKGDNNIGTARYSLKGMEGGNLDNVIAFMPIASPERWAISVSTAIGDSAYYTVMGMIGVSGLIFLVLGMVAAAVASGYIAQPFELLKEAAKAKTAFIANMSHDL

SEQ ID NO: 104948 - protein, 96 aa, Unknown
  Obtained from environmental sample
  misc_feature (1)..(96): Xaa is any amino acid
MTGGLFELPKKLSFNNYVTVLRGGFYKFFINSILVLGICLTLLLFFSAFAAYPLSRMKFRLNKPIYSIIVAMMSIPMHITLIPVFVMTINFGIYDS

SEQ ID NO: 104949 - protein, 81 aa, Unknown
  Obtained from environmental sample
  misc_feature (1)..(81): Xaa is any amino acid
MPDNNACENATTAFCDGRKNWLFCQSPECAESSCGMYTRIETATQNGLNPFDYLMAVFEKAPFISSPGGWEKLLPWNIFTA

SEQ ID NO: 104950 - protein, 89 aa, Unknown
  Obtained from environmental sample
  misc_feature (1)..(89): Xaa is any amino acid
EWLKTRKPGNERWGLLVVDPPREGLSKPLRQYLAGSEAKILAYVSCDPVTLSRDSKDLIAAEFCLKELYLYDFYPQTSHIESLAVFSLK

SEQ ID NO: 104951 - protein, 92 aa, Unknown
  Obtained from environmental sample
  misc_feature (1)..(92): Xaa is any amino acid
MRIIWDSDKNRKLLVDRKLSFESFASLILEKKYHAILKNPSRKEQRIFIIPYQNYTYVVPFVIDNSQNIVLKTIFPSWKYHKIYGGKNENDS

SEQ ID NO: 104952 - protein, 95 aa, Unknown
  Obtained from environmental sample
  misc_feature (1)..(95): Xaa is any amino acid
MTLDSFEQSIEDNAEQFIPLSDTEKNEVETIINAANKTKNINIRISAYDIEKVKQLSTEEGIPYQTLISSVIHKYITGKLVDEKAILKSMELLRQ

SEQ ID NO: 104953 - protein, 241 aa, Unknown
  Obtained from environmental sample
  misc_feature (1)..(241): Xaa is any amino acid
MQKKETATETFLDFYKFNFDFLKFLRNYLKEEESRVKYEDKQNIARIFMKSLLNFTKYFNIDQKIFFDNTDETTIKYSYICFNYTSVFNKCLDILIKSNIFQLEKRTTTGIFRNIIFAHNDLGNVLHIHGTLDNNMILGVNDLRQILNTEFHNIERINTYIKPNVNDLLKNNRNTDAMKLIENADIYCIYGMSIGKTDRKWWIELSKQLFTNPNKQLIIYAYDENLDESFPVNTLEMQDFI

SEQ ID NO: 104954 - protein, 114 aa, Unknown
  Obtained from environmental sample
  misc_feature (1)..(114): Xaa is any amino acid
MKTITTIGIDLAKNSFSIYGVNAKGKPVMQRTLTRAGVVRFFAHLPACLVGMEACASSEYWARTLESLGHEVRRIHPRYVKAYLLGAKNDVNDAAAICEAVQRPNMRFVSHKSP

SEQ ID NO: 104955 - protein, 200 aa, Unknown
  Obtained from environmental sample
  misc_feature (1)..(200): Xaa is any amino acid
MVAVDFREAQILHSAGLPVSHLGHLCQVPSGGWDAALDMKPEVITLYSQEKAEELSRAAGKRGVIQNVLLRVRDKDDIFYQGQEGGFPLETLEGTLDQFKNFKGIRVAGVTSFPCFLFGEGKPSPTHNAQTVARAAAVLKERGLDCSQINMPSCNSPATIPMAAQLGATHVEPGHSLTGTNPDNLYESEPLWPSLLYISE

SEQ ID NO: 104956 - protein, 80 aa, Unknown
  Obtained from environmental sample
  DOMAIN (1)...(79): PTS HPr component phosphorylation site
  misc_feature (1)..(80): Xaa is any amino acid
MVQKEFHITNASGLHTRPGNDFVKMAKEFACKITLTKGEKTIDGKSLLQLMKANVVQGDVISIACAGEDETQAIAALGDY

SEQ ID NO: 104957 - protein, 245 aa, Unknown
  Obtained from environmental sample
  DOMAIN (49)...(84): Sel1 repeat
  misc_feature (1)..(245): Xaa is any amino acid
VEQFRQAAEQGDVEAQLNLGFAYCFGDGVEEDMAEAVKWFRLAAEQGDSEAQFYLGEACCWGYGIENDKAEAVKWFRLAAEQGDWEAQFRLGCAYSWGEGVKKDKIEAVKWLRLAAEQGHARARFELGNAYDLGESVEKDRAEALRWYRLAAEQGDSRAQFHLGFAYMLGLGFEEDKVEAAKWFRLAAEQGEADAQFELGQAYYYGDGVEEDKAEAVKWYHLAAEQGEMFAQFQLGWVYYYGDGL

SEQ ID NO: 104958 - protein, 275 aa, Unknown
  Obtained from environmental sample
  DOMAIN (198)...(275): Acetohydroxy acid isomeroreductase, catalytic domain
  misc_feature (1)..(275): Xaa is any amino acid
FGGKKEKVVTRKEFTVAKARAALKGEVIAIIGYGVQGPAQALNLRDNGFKNVIIGQSKKYKKDWDRAVKDGWVPGKTLFEVEEAAERGTIIKMLVADAAQRVIWPSIKKHLTKGKALYFSHGFSIVYKDQTKVIPPKDIDVIMVAPKGSGTSVRRNFINGVGINSSYAVFQNATRRAEERCLALGIGIGSGYLFPTTFEKEVFSDLTGERGTLMGALAGIMEAQYEVLRKNGHTPSEAFNETVEELTQSLIRLVDENGMDWMYSNCSSTAQRGAL

SEQ ID NO: 104959 - protein, 269 aa, Unknown
  Obtained from environmental sample
  DOMAIN (1)...(114): HMGL-like
  misc_feature (1)..(269): Xaa is any amino acid
VNIPDTVGYTPPGQFGSIIEMLFNRVPNIDKAVISVHCHNDLGMATANSLTAVANGARQVECTINGIGERAGNASLEEIVMAIKLRPDFFGARTDIKTQEITRTSRLVSEICSMPVQPNKAIVGSNAFAHSSGIHQDGVLKSRKTYEIMTPQSVGLKDNRMNLTGRSGSHMVKARLAELGYAESSYDMQAVYEKFKALADKKGTVYDDDLVTLMESGSGHEVADMYTLDYLNIACGRGVVPMAMAKITFDGVTKQAAAYGDGPVHAATN

SEQ ID NO: 104960 - protein, 282 aa, Unknown
  Obtained from environmental sample
  DOMAIN (120)...(189): HAMP domain
  misc_feature (1)..(282): Xaa is any amino acid
VYDGDKIIGVIMAGVLIYEINRRYVVPIKLLGGYGYAMIVNSAGTIIGHRNDDLLGKKIPENLYERIKTLDSGRVAFQETVDGVPSMLFIDRDNSTDWFPIIIASLSDFSISANFVTRTITLLAAGVLLLLTVIVFITVNGVTRALSVTISYAETVSGGDLEARLYVRREDEVGVLARSLNDMVASLKHMISVATQKTREAQEVTDTLVQGINYASKIQRDLLPRNHSFDKAFREYSIIWKPRDIVGGDIFWLKNFDQGTVLCVCDCTGHGTSGAMLTMLVV

SEQ ID NO: 104961 - protein, 101 aa, Unknown
  Obtained from environmental sample
  misc_feature (1)..(101): Xaa is any amino acid
MKLNILEYGKMLAEHNISIIYNGPLWSEGIDDLAEFLQKRLDMDDMPLSESQAVFSVFVEQMNNMLMYSAKKEKHEHPGTTTSGIFVLGSVDKSYYVQTGN

SEQ ID NO: 104962 - protein, 201 aa, Unknown
  Obtained from environmental sample
  misc_feature (1)..(201): Xaa is any amino acid
MYWQLTREYPTFPKLPEAFFQMSQNYLVAGHLDTTRLILEQLTQRFPNSPRVSAAQFRLGELAFMDNNFNKAYEHFKKVKQNEVDIVSWEMNHYRLAECAYNIGDFDKAVEYFNGYVEACDANKYTKKEFREMALEYMAISFSDMPNGVEEAIKFFKKNSGKPYEAQVIYMVGAKNRDHGQWDAAIQALEGALKKYPMYKE

SEQ ID NO: 104963 - protein, 203 aa, Unknown
  Obtained from environmental sample
  misc_feature (1)..(203): Xaa is any amino acid
MGLDWKALVSFSGSDQISGAVDKARKNTEKAGKGMGDSLKETGKHADSLRDKIGGIGDIAKGVAIGNLITKGVTMAAGAVKNLVLSVDEFAQRADNARMSAMKIGLSAEGFQKLSYAATSAGVSADKLQAGFNSLNKNLGSGGLVKFLADTDKALLSQVKSAKNNTEVFNIMADAISKENDIAKRAALGASAFGKSWAELYPL

SEQ ID NO: 104964 - protein, 229 aa, Unknown
  Obtained from environmental sample
  misc_feature (1)..(229): Xaa is any amino acid
MEIFPSISANASVGYKNNLFGEVVPSGSGLNYSVGLGINLGLNVGLPYIFKNIKLAHQGNILKYEDARNQLSIQITKLFYSLVAEKNNILLLEEIFNLAQRQYARSEVSFRNGLVGELSLIQSRLFMENARYNLSTAETTHRNNMSDFLATLGLTDDDMVLLGEINIIKITADAEPLINEYLPKRPDILRANQEIERLTLAQKQTLLQAKAPSLNLSVEWGSTNFDPFS

SEQ ID NO: 104965 - protein, 156 aa, Unknown
  Obtained from environmental sample
  misc_feature (1)..(156): Xaa is any amino acid
MLTLKLTIALACTLLCTTIFAQQKGTFTDTRDGKIYKTTKIGEQVWMAENLNYKVKGSKCYGEGRIIYKFIESDEIELSDAEIQANCEKYGSLYDFEIAKKVCPKGWNLPSPDEWDILFRYADTTSYTDDDAHNNYDNKIVGKFLKTTSGWDDYKD

SEQ ID NO: 104966 - protein, 207 aa, Unknown
  Obtained from environmental sample
  DOMAIN (56)...(139): Cache domain
  misc_feature (1)..(207): Xaa is any amino acid
MLRQITVVDRGIATTTIAGESGYVIAMDAYPWPWTDYDPKLFHWYQGAKDTGDLYWTDLYEDHRGRGPVLTCAVPFYDHSKGNRILKGVARSTVLLSDFSRIIESTEAGKSGRLFILNREGIKIYSSEGAAIEMGEGGAVTGENFLESQNSRLRSLGRSMILGASGMTELEMDGLPVYVAYAPIQTLGWSLGVAVSVQEVSAMAMLI

SEQ ID NO: 104967 - protein, 185 aa, Unknown
  Obtained from environmental sample
  DOMAIN (1)...(185): Glucuronate isomerase
  misc_feature (1)..(185): Xaa is any amino acid
MKQFMDDNFLLSNRTAERLYHEAAAGEPVFDYHCHLIPKEIAENRRFPDLASVWLGGDHYKWRMMRANGIGEELVTGNADPYDKFLAWADTVPKLIGNPLYHWTHLELRRYFDIKENLNPKSAPAIWKQANEKLANDPSLSVFGIFRKFNVYAVGTTDDPADSLEWHEKVKSASPVGATRLKPWC

SEQ ID NO: 104968 - protein, 250 aa, Unknown
  Obtained from environmental sample
  misc_feature (1)..(250): Xaa is any amino acid
MSQQPSCPASSEQEIQTTLKDQQSLAVTIYNSDLALIKDQREVGLPKGMCQLAFQEVSARIMPQTAILRNNTSPKDFWIAEQNFDFDLLTPQKLLEKYVGEKVEVIRTVPKPDGEGETEIREDATVLATNSGVVLQFADRIETAAPGRIVYPRVPGNLRARPTLVMSINSGAASAQKLELSYLTSGLGWEADYVASLSVDEKTLDLSGWVTLTNQSGASYPNATLQLVAGDVNVAEKKRGVLEMMACEFD

SEQ ID NO: 104969 - protein, 200 aa, Unknown
  Obtained from environmental sample
  DOMAIN (34)...(180): ATPase family associated with various cellular activities (AAA)
  misc_feature (1)..(200): Xaa is any amino acid
MTGAQALGVGFVILAQTMQNVLAKAKAAAATKATVLLTGESGTGKEIVSKAIHRMSAEADGPFVAVHCGAIPENLIESELFGYAKGAFTDARKDTPGKFREAHEGTIFLDEVATMPMAAQVRLLRVLQEREVQPLGGGGPIKIDVRVIVATNQDLWKKVQEGSFREDLFYRLDVVPISLPPLRERREEIPYWRSFLIEKL

SEQ ID NO: 104970 - protein, 246 aa, Unknown
  Obtained from environmental sample
  DOMAIN (177)...(246): Peptidase family M23
  misc_feature (1)..(246): Xaa is any amino acid
MQYASTGVPSLLAVTDTKPEVTDTKPEVTDTEQELITFKWQQYKVQKGDSVSVIAKRFGVSIGAVISSNNIRNARGLKEGTTLRIPNIDGIPYSIKSGDSLSKISVSFNVPLDVILDINDLKSDKIKAGDTIFIPGARMNDLDLRMSLGELFVYPVHSKHLTSGFGMRKDPISGELNFHTGIDLRANTGATVMASMEGVVSVIGENWLYGKHIILSHPNGYKTLYAHLNSASVKQGDKVLQGRKIG

SEQ ID NO: 104971 - protein, 254 aa, Unknown
  Obtained from environmental sample
  misc_feature (1)..(254): Xaa is any amino acid
LVQNRFGAARIPITGGIPSQFSGCPSFASGNVPLKGKALEYAVSNDGKWILYAEPVSPAFGNLILVNTERGTRHVISEKIELPNNGFPACWNPDSRLFVYAKGGKLYFFTILQDLTVIADERFRYIGPGEISSVTWGQQGDFYYFTGNTLYRVLNPELFTRTIYGDFLSIGSVTAVFPFDFEPGFDKYWISPNSNSVLINKKGKSLFLFLLGENQYGNSALPHIILPQGAGGIEVFWPLSGPLTVVSSLKKELT

SEQ ID NO: 104972 - protein, 71 aa, Unknown
  Obtained from environmental sample
  misc_feature (1)..(71): Xaa is any amino acid
MGKGRVDGEKLALFLVQNSPYAQPDYAQVLAGLYIEEAANEGIDHDIAFAQMCLETGFLGFGGLFSLREQF

SEQ ID NO: 104973 - protein, 165 aa, Unknown
  Obtained from environmental sample
  misc_feature (1)..(165): Xaa is any amino acid
MQDTQGYWDNVYTKQQRIAQAAEKYSGESLTNVAQYIDVEWMYCAYEWTRKDGAAGIDGVTTAEYEVGLWERLGNLVELLKSGEYRAPPVKRVYIPKAGSESEKRPIGIPTFEDKILQRAIVMALEPILEKEFYDFSYGFRPGKSAHHALERIWKESMGMNGGYV

SEQ ID NO: 104974 - protein, 243 aa, Unknown
  Obtained from environmental sample
  misc_feature (1)..(243): Xaa is any amino acid
SQIEQQRVREILSGKSKFEEFIHDLWYHVGPTGAVDKSQYLYFDPENREIILYGEDTQQVFSWQHSNSTRYGLYITSQNIAVTTLRRFIDIELESIDSIRMKVFEDVRLKIGISASWDGSYRRAGKAYDSDPPPRPYIEASYDSSMGRLRFYPNGEYELNSSDGAVKGRYAFFRVNDKELLELRPDRNGIRSPAQNNEDRVIYRIARNGDPRIADNLSLFRVRLVPAGIQELQESQIFLTKVR

SEQ ID NO: 104975 - protein, 283 aa, Unknown
  Obtained from environmental sample
  misc_feature (1)..(283): Xaa is any amino acid
FHITVGEGRTTRQISAENSVKEVLIKIIDNRLKPDSADMNGLMRPMIKALFHEGREQFFSLFEKSLISFFNSGREPEHFLLLIDEAAALELPENIINILPYVYRSVIRIYERFTVHARYEKESRNTVLNSLKCDLLGTRDRSSLVQNLARYLPKIGIQRAAIVLYGDEKTSIFIGGFSDEGICTIKEQRFPSRLLVPVSIKSQYADGIFMVQPLFIENQSLGYFVHNVPINDGVIFEELRSTVSYALKGIFLLEETVKAKQVAERAEQAKTEFLQTLENGLYD

SEQ ID NO: 104976 - protein, 115 aa, Unknown
  Obtained from environmental sample
  misc_feature (1)..(115): Xaa is any amino acid
TGNHPEKIVFAGGASKSALWSQILTDVLGIPVEVPVVKEATALGAAIMAGKGIGLYTDIKETARKLAKTEKVFSPNKENREIYEKAFEKWKAAYAPQLRLSDEKITKYMWLAPGM

SEQ ID NO: 104977 - protein, 124 aa, Unknown
  Obtained from environmental sample
  DOMAIN (30)...(100): Cupin domain
  misc_feature (1)..(124): Xaa is any amino acid
MFIVNEKDKEYRFGDSGPKYLMQGPRSNFALVQFMPGQDFRAHYHEVMEENFFILEGTVTIVVDGTAHTLNPGQLIHIEPKEVHYVINKSSSVVRMVSTLAPYHKLIRLRWIILLFKGGNCNLI

SEQ ID NO: 104978 - protein, 111 aa, Unknown
  Obtained from environmental sample
  misc_feature (1)..(111): Xaa is any amino acid
MNKKRLFDWWRRGSAFVWLSGSTLALSLLMVAGLVLLLAVKGLGFFWPSDICELQLNDGAIVLGQQEAHEKAAHSHPDRVQVKVANRDFFGQDYRWINESDIQSRTRPKDV

SEQ ID NO: 104979 - protein, 66 aa, Unknown
  Obtained from environmental sample
  misc_feature (1)..(66): Xaa is any amino acid
MNRSHLDTELRLLKDGLLAMAGVAEEMIKLTMKAYSEKSDQLAEQVVAMDEELDDMEIRLDQTCID

SEQ ID NO: 104980 - protein, 199 aa, Unknown
  Obtained from environmental sample
  DOMAIN (1)...(170): ABC transporter
  misc_feature (1)..(199): Xaa is any amino acid
MNDLIDNVRIEGKVMLGDDNLYEHGVDVISLRKRMGMVFQKSNPFPKSIFENVAYGLRIQGVKDRSTISDAVERSLLAAGLWDEVKDRLNESGLGLSGGQQQRLCIARALAIQPEVVLMDEPCSALDPIATAKIEELVFELKKKFTIIIVTHNMQQAARVSDFTAFFWLGKLIELDLTERVFTNPAQKLTEDYITGRFG

SEQ ID NO: 104981 - protein, 175 aa, Unknown
  Obtained from environmental sample
  DOMAIN (1)...(172): Cys/Met metabolism PLP-dependent enzyme
  misc_feature (1)..(175): Xaa is any amino acid
VAGNLAYVIKARTTLLRDTGAAISPFNAFLLLQGLETLSLRVERHVANALKVIEFLKSHPQVEAVNHPSLQGHRDHKLYARYFPNGAGSIFTFLLKGGAEKAKRFSEELKLFSLLANVADVKSLVIHPASTTHSQMSEEELLEGGIKPNTIRLSVGTEHIDDIIGDLKHGFEAVS

SEQ ID NO: 104982 - protein, 196 aa, Unknown
  Obtained from environmental sample
  misc_feature (1)..(196): Xaa is any amino acid
LGGHLDIISSNSLDARRQKNARIIVLDEVDGVPEQTTTGEGSYIDILKGHSMSWGARRKFCAFSSPTTYETSAIWKLYNEGDCRKFFVPCPICGEHIELKDADEANSGLKAETKAGQIIDVYYLCEHCGEPIHNGDKMIMYSDSPQCKKHPEKKIEPAHWRPTRAIADPYSRSYSLNSLYSPVGAVTFTDVYKAKI

SEQ ID NO: 104983 - protein, 201 aa, Unknown
  Obtained from environmental sample
  misc_feature (1)..(201): Xaa is any amino acid
MKLSVKISLLVGIVLLASTVALLFVVGLKVSGAMEESCLNFLASEADTDAKFLKSMVDGQLDILGEVAGRARTRTMDPNTVPTTLKPDVPRLKALDMAMVTPEGNTYFVRGNPLNVKDQSYFKRAMAGERNIEMVVIDGKLVAIFAVPIKKNDEANAPVIGVLLAHKDGASAISNLVTELKSLYKSGFPFLIDQEGTIIAH

SEQ ID NO: 104984 - protein, 134 aa, Unknown
  Obtained from environmental sample
  misc_feature (1)..(134): Xaa is any amino acid
LAGGAVPKYDLIILGAGPAGLSAAIYGRRAGLETLVLEREGSGGQIKNTALVENWPGIPAISGWDLGESFRAHAAGLGAEFQAAEAHGLAASQKGLSVRANTGNLEAGAVIVATGTRPGRLGVPGETEFHRPGR

SEQ ID NO: 104985 - protein, 240 aa, Unknown
  Obtained from environmental sample
  misc_feature (1)..(240): Xaa is any amino acid
AAVLALFWGLSAITAWPAGPSGLALGLVLAAAYVRHSLKTPSPILDLRLFAQSRRFAFSSLAAFISYSSSSGLGFVLSLYLQYNQGLPAEKAGLILMTQPVCQALLTPFAGRLSDRLDPGILASLGLAVVGASIAALALVLTPTTPLSVFAALLVPLGLGFATFSAPNSNAIIGSLPPERVGQASGTITATRLCGQVSSLALTTLIFSLVVGPGKITPSHYPDFMRAATVCFAIFAPICL

SEQ ID NO: 104986 - protein, 72 aa, Unknown
  Obtained from environmental sample
  misc_feature (1)..(72): Xaa is any amino acid
MDRAADAVPHLDRYLQINSRDITGMFVLARAYYMTGENDRAIDVYNRIISRTKDPKVKTEAQNNIEIVRNSL

SEQ ID NO: 104987 - protein, 194 aa, Unknown
  Obtained from environmental sample
  DOMAIN (1)...(185): DEAD/H associated
  misc_feature (1)..(194): Xaa is any amino acid
MQLVIHSPFGSRINRAWGLSLRKRFCRNFNFELQAAATEDAIVLSLTTAHSFELESVARYLHSGTVRPLLVQALCAAPMFPVRWRWTAGIALALPRFRGGRKVPAPLARMNSEDLLASVFPDQVACAENLSGELEIPEHPLVQQAIHDCLHEAMDIEGFEALLRKLESGEIQVVARDLTEPSPLALEVLTARPY

SEQ ID NO: 104988 - protein, 274 aa, Unknown
  Obtained from environmental sample
  DOMAIN (4)...(249): PHP domain
  misc_feature (1)..(274): Xaa is any amino acid
MRYTCLHTHTDFCDGKGDVKSFCQKAWEKGFHSLGFSSHAPIEKKTGFESSWNMREDLLEKYIETVNAAKRRWEGRLTVFLGLEVDFIPGLMGPADKDYQEMGLDYIIGAVHYVVPSKGTPFTVDASPEEVDEGIKISYEGDPLALAEAYWDSLEGLIRSGGFDILGHADLIKRNNAQNRLFSEDAESYQKRINRAAALAGEYGVTIEVNTGGMNRRLTDSPYPSLPLLKLFREHNVPVIINADAHKPEDLDGHYPDARNALLAAGYRTTMLFE

SEQ ID NO: 104989 - protein, 138 aa, Unknown
  Obtained from environmental sample
  misc_feature (1)..(138): Xaa is any amino acid
FKNPPPAFEKITPDFIIDGAHTPESLALAIETFCHLYGEGGILIFGCAADKDAAAMAKTAHSHFAKIFITTPGTFKASNPPQVYEAFTSQAGQEKTRLIADTRKAVREAREFAAKNGLPVLGTGSFYLVSEIRKIILP

SEQ ID NO: 104990 - protein, 229 aa, Unknown
  Obtained from environmental sample
  DOMAIN (95)...(130): Sel1 repeat
  misc_feature (1)..(229): Xaa is any amino acid
DGVTKNWRESAEWFLKAAKQGDAAAQRSIGIMYSRGHGVPRDLAKALEWYVKAAKQGDVQALGLIRDLYRSGTCAPQDSAKPAGLHLSAEDWASAEFLLTLGMMYFNGHGVSQDRAKAAELYLKAEVAADAKTLISLGNMYFRGDGVSQDRAKAAELYLRAEVTADAKTLISLGKMFFNGDCAMQDRAKAMECYQRAEELGGAKARFLIGTMYFDGNGVYQDIAKALEY

SEQ ID NO: 104991 - protein, 138 aa, Unknown
  Obtained from environmental sample
  DOMAIN (55)...(90): Sel1 repeat
  misc_feature (1)..(138): Xaa is any amino acid
MTDHKQNTESGEAAVPLKAPSHESCNATQKEPEQQREQERVFFNETLEAAKQGDVDAQRRVGWLFHYGKGTSRDLAKAQEWWNKATFQNMEQSKTLSVEILAAAERGDVDAQYKLGEHYHGSYCTSLSRNRARAAEWW

SEQ ID NO: 104992 - protein, 66 aa, Unknown
  Obtained from environmental sample
  DOMAIN (4)...(62): Ribosomal protein L35
  misc_feature (1)..(66): Xaa is any amino acid
MPKMKTKKSAAKRYSFTGTGKVKYKKQNLRHILTKKPSKRKRNLRKGGILSSDNTGSIKKQLLPYG

SEQ ID NO: 104993 - protein, 64 aa, Unknown
  Obtained from environmental sample
  misc_feature (1)..(64): Xaa is any amino acid
MVSLEQVKLLESRVTNVIDYVKNKNAENAKLKEKLDSYQKRIDELEVLVHQFKENQGRIEDGIL

SEQ ID NO: 104994 - protein, 266 aa, Unknown
  Obtained from environmental sample
  DOMAIN (1)...(137): FtsK/SpoIIIE family
  misc_feature (1)..(266): Xaa is any amino acid
MILSILYTLHPSECRLILIDPKIVELQLYNDIPHLLTPVITEPKKAFQALQYCIYEMERRYACLASVEVRDILNYNKRIKERNIAQEHMPYIVIIIDEYGDLMMATGKELESTVARLAAKSRSVGIHLVLATQRPSIDVITGLIKANIPSRIAFMVASKTDSRIIIDMTGAEKLLGKGDMLYAGAVDPFPVRIQGAFVSDEEVVRVVNHVKTFGEPDYIDDEMFYEEEEDAEPSLFSDGDDPLYEKALEIVYQQGKASASYIQRRL

SEQ ID NO: 104995 - protein, 134 aa, Unknown
  Obtained from environmental sample
  DOMAIN (14)...(134): Glycosyl hydrolase family 3 N terminal domain
  misc_feature (1)..(134): Xaa is any amino acid
MTLEEKVSQLSHESAAVDRLGIPEYNWWNECLHGVARAGVATVFPQAIALAATFDDELVKQVMDAVSDEARAKNNEAIKQNNRGQYWGLTFWTPNINIFRDPRWGRGQETYGEDPCLTARMGTAVVRRLQGPDP

SEQ ID NO: 104996 - protein, 157 aa, Unknown
  Obtained from environmental sample
  misc_feature (1)..(157): Xaa is any amino acid
VRYASENTLYLTLKSLKIDLSGAPGIGDILNGLKGAELEILTPTTIKGRIMGVEYRQSPASQQYPYSMPANEAWLSLFTSQGIRVIAIKDIISFRFSDEKINADLERALDLIMASRDESARNLLVTLNGTGSRSVSLSYVIPTPVWKVSYRLDISGK

SEQ ID NO: 104997 - protein, 201 aa, Unknown
  Obtained from environmental sample
  misc_feature (1)..(201): Xaa is any amino acid
KEYAASLPSEQKPYGILISDFINFDHYAVEDNFDLTTFTLSELSEKLELFAYLLERKDIKYQAISPVDIEAAERMGELYDALKENRYPEHDLELYLVRLLFILFADDSGIFEEKKVFLNYIKENTKDDGSDLALHLDLIFQMLNKHPDNRQLNRDEAFKKFPFVDGGLFEKRLDTAAFNSTMRRTLLKCCTLDWSKIKPEI

SEQ ID NO: 104998 - protein, 248 aa, Unknown
  Obtained from environmental sample
  misc_feature (1)..(248): Xaa is any amino acid
CIKYINEAKNLAECKQALIKRLEDDYSLSTSKSAEMLDMLILILRGERVETTATVEPVRKDASRIETQKEKLKTATVQPQQPIFKNGATPKIGSTITFGNYKWRVLDIQGDEALIITEDIIENRRYDDVNYTGVTWETCDLRKYLNNEFLRKSTKEQQGRIAEKRISNPDNLWYGTKGGSDTRDKVFLLSLEEADRYFGDSGDYVNKRRKKYDGGKWIADSGGYGFSNIHDKDRSANYGGEACWWWLR

SEQ ID NO: 104999 - protein, 137 aa, Unknown
  Obtained from environmental sample
  DOMAIN (5)...(86): YGGT family
  misc_feature (1)..(137): Xaa is any amino acid
MEGTMRVIMGLLAMLISLYSLLIIIRIMLTWFSTQYGRPVQILAAITDPYLDWWRRNFSLRAGVLDLSPIAALVFLSIVQTVCSAISAQGRVSLGIILAVCLSAVWSAVSFIIGFSFIVLVLRFIGYISNSNMYSTF

SEQ ID NO: 105000 - protein, 254 aa, Unknown
  Obtained from environmental sample
  DOMAIN (14)...(249): Putative esterase
  misc_feature (1)..(254): Xaa is any amino acid
DQKYYDEVADVAEYIQEMSVYDEELENTYIIHITLPPDYDKNKSYPMYMMTDGIWRLSDHAELRPLMVNGEIEDIIMVSIGYNYGINAEKTETRLVELVQKSDLFLNFITDNLAPYLGELYHIDYKRSALMGHSLGGLFVYYAVFNHDKYKNIPFNHYVMASPSFFMTDNPSNWKYGDIEKDYFKRNKKLKKGIYLTVGDKERGHMSSNINNFLQRAQKYKITTLDYEVFDGGHSSYVKPMLRKSLLKFYNKSR

SEQ ID NO: 105001 - protein, 250 aa, Unknown
  Obtained from environmental sample
  DOMAIN (12)...(126): Dynamin family
  misc_feature (1)..(250): Xaa is any amino acid
MKETPRSIRTHIGIFGRANVGKSSFLNMVTSQDVSIVSPLPGTTADVVEKAMELGTLGPVVFLDTAGVDDATELSESRIKRTTAAFSRADVFVVVTEAGQWGEYEEGLCTAARNNGASVVVVVNKTDLHGLTEGFRQKISAATPHVMGCSCVDGSREAVLAEFKKLLSDAGVEGGGQRALVNDLVPAGGLAVLVVPIDSGAPKGRLILPQAQALRDLLDGGAAAVVVRDTEYATALSMFNRKPDLVVCDS

SEQ ID NO: 105002 - protein, 191 aa, Unknown
  Obtained from environmental sample
  DOMAIN (1)...(100): Biotin and Thiamin Synthesis associated domain
  misc_feature (1)..(191): Xaa is any amino acid
KQSKYLVSNADLRRAITVIRLSIPYTGMILTARENPELRKSLTSLGIITQTDASSNVGLGAYHRSMGAEVQESARQQFILGDTRSLDAVVREFAKMGCITSFCTAGYRCGRTGECIMDLLRTGAEGKFCKLNAVITFREWLDDFASEETKAAGEVVIAKEIEELKTVVPKVYDTFLDYYRRTVGGERDLYF

SEQ ID NO: 105003 - protein, 262 aa, Unknown
  Obtained from environmental sample
  DOMAIN (1)...(262): DegT/DnrJ/EryC1/StrS aminotransferase family
  misc_feature (1)..(262): Xaa is any amino acid
VTTGKETLAFEKDFGEFLQNRDGLDLPFCMAVNSATSGLHLAMEAVGIGKGDLVLIPSMTFTSTAEVVRYLGAEVVFIDVIKDGYHMDPAALERTLEKLEKDKKAKAVVPVHYGGLPCDMDAIVPIARKYGLKIIEDAAHSFPSFVESIGDKNDSAKGRWAGLSGDVGVFSFYATKTITTGEGGMVVTRDKAIADRVRIMRSHGIDRSVWDRYSNVKASWYYQVVEPGYKYNIPDILSALGRAQLRRAYDLLTMREKIAAVT

SEQ ID NO: 105004 - protein, 211 aa, Unknown
  Obtained from environmental sample
  DOMAIN (113)...(211): Glyceraldehyde 3-phosphate dehydrogenase, C-terminal domain
  misc_feature (1)..(211): Xaa is any amino acid
MLKYDSTHGRFNGTAEAKDGKLVVNGKAIRVTAEKDPANLKWGDVGAEYVVESTGLFLTKDKAEAHIKAGAKRVVMSAPSKDDTPMFVVGVNHKTYKKEMTIVSNASCTTNCLAPVAKVLNDNWGIEMGLMSTIHATTATQKTVDGPSHKDWRGGRGAGQNIIPSSTGAAKAVGKVIPELNGKLTGMAFRVPTPDVSVVDLTALLKKPAKY

SEQ ID NO: 105005 - protein, 39 aa, Unknown
  Obtained from environmental sample
  misc_feature (1)..(39): Xaa is any amino acid
TLAKKNPNVIFCGRLGEYKYYDMDDTVELALKFAEGERG

SEQ ID NO: 105006 - protein, 269 aa, Unknown
  Obtained from environmental sample
  misc_feature (1)..(269): Xaa is any amino acid
LLSNDHTNVAGVYPFALKYVCADTGCSREEVNAAITKFEKDGKAFFYREYMIIPKWLKHQKIKERSGLFLGAVKVLKSLPDDIKDFISDRRHYDYDISLYIGRSSTPPQDLPKTSPPKMGDPPPENVETPLGGTQDLPPNSAHDLDLDLDLDSDSEFNIQASSEKTEKSKPSPKPKKLPLREREPENNMERVEKIYILNWDTLYSQGKVKTENPIVNWNQTRALLKNHFKSLVPEQIIRAVNNGMADDFILKGGYSLATMLSSSVLNRL

SEQ ID NO: 105007 - protein, 202 aa, Unknown
  Obtained from environmental sample
  DOMAIN (4)...(197): Ham1 family
  misc_feature (1)..(202): Xaa is any amino acid
MKPVLIATKNPHKAGELAALTAGLAGALALSDWEARSGRPLPEPEENGRSLASNALLKARAYAQATGLVALADDSGLAVPALGGAPGVYSARFGGRGLSDGERGRLILRLMRARRDRRAFFITVLALVRPDGRHLLWRGRLEGRLTRAPAGHNGFGYDPIFRPRGSALTLAQMSPAQKNAVSHRARAARAFLADEPLVRSFL

SEQ ID NO: 105008 - protein, 258 aa, Unknown
  Obtained from environmental sample
  DOMAIN (62)...(252): Radical SAM superfamily
  misc_feature (1)..(258): Xaa is any amino acid
MGQDLHEKISILSGAAKYDASCATSGSDGFKGKGGKKFGTSLPMGVCHSWTQDGRCVSLLKVLYSNVCKYDCAYCVNRASADIKRSSFTVQELVDLTCEFYRRNYIEGLFLSSGIFADPDIVMEKLIETAKTLRTVSGYGGYIHLKLIPGTGEKMIREAGKWADRLSVNIELPTEKSLKCLAPEKSGKVILGAMNDFSGISREVEEDRFSPKFLQQGKTKAPYFAPAGQSTQLIVGATGEDDRQIINLTSSLYNKFSL

SEQ ID NO: 105009 - protein, 267 aa, Unknown
  Obtained from environmental sample
  misc_feature (1)..(267): Xaa is any amino acid
ESIVQILPDMNTEFLVFKEGRLESYGGRPEDLDELIGGQSRSQEAGKKRGKNSGDYTVFNAEGSLGASLWSFNQNPRNKDKPFYEWFIQKEFRQAMSCILNRDRVVSQVYRGLADPKIDFFPPPNPYYDPDIRLEYLYSPQKAIELLASIGMKRDSGGVMRDREGRVVEFDLSIPSDVTIHSDTASIITDEASKIGIKITVRPTDFQKLVEQLTATYDWASIFIGLGSNFWPTQGSNVWPSNGNLHLWNPLQKEPATAWEARVDYLY

SEQ ID NO: 105010 - protein, 247 aa, Unknown
  Obtained from environmental sample
  misc_feature (1)..(247): Xaa is any amino acid
VFSGKLNFSAGTSFADGVIKLKLQTTQQPVTIDEAYVRAYFGGLEIEGGLRKLTWGKADSFGPLDVINPLDYSELTDLGNIMNLKIARPLIHASYRIGSFSKIEGLFVPTFEPLRFAEEGRWVPAQMEQLNQINDQLKEAGNSLGTKLPEVSINVPDISTVKYAQAGARFTTTIGPADIGLQYYYGYLTRPAVTVTITDTIINPIPIPIPLPTAINFDYNPYHQIGVDWAQVLFGFNVRAEFAANIT

SEQ ID NO: 105011 - protein, 119 aa, Unknown
  Obtained from environmental sample
  misc_feature (1)..(119): Xaa is any amino acid
MDAIEKLHADRDLPDAQLKEVIEGEVCEEALFARAAGVCGEYYGKDIYIRGLIEFTNYCKNNCYYCGIRRDNHAVERYRLGKDEILACCAQGHELGYRTFVLQGGEDPACTDEMMCAIV

SEQ ID NO: 105012 - protein, 218 aa, Unknown
  Obtained from environmental sample
  misc_feature (1)..(218): Xaa is any amino acid
MAGGDLGKAKKQKADEFYTQLADIEKELIHYAKHFRGKTVLCNCDDPEISNFFYYFVINFDELGLTKLVAAHFEPDKPGSALEYKGGADAQGDKEIVVHRAIQVGKKITLEQNSDQRGQGATPVRFFGGDFRSLENIALLKASDIVVTNPPFSLFREYIALLIAHAKKFIIIGNINIISYKEIFPLIKENKIWLGASIRSGDREFQVPPHYPLNAAGC

SEQ ID NO: 105013 - protein, 72 aa, Unknown
  Obtained from environmental sample
  misc_feature (1)..(72): Xaa is any amino acid
MAGVLRTFEPGGWEGGASLRRLLLGGAALAPRTELLLFLTDRSGHLDTTILPALRRGQWVICERYTDSTFAY

SEQ ID NO: 105014 - protein, 241 aa, Unknown
  Obtained from environmental sample
  DOMAIN (76)...(163): PSP1 C-terminal conserved region
  misc_feature (1)..(241): Xaa is any amino acid
LSLYLAVFGKPRYLGLVYIEEPVPKAGCWIVVRTVRGLEMALLGGSLSQEQEMKYRSACFDEASDEHTRGPEPMLQEVEFIGPADGAQIEEYYLRRSDEEWVLVRSRQLLRDHKLQMKLVDVEYMVDRKKLFFYFTSEQRIDFRAYVRDLAKEFRIRIEMRQIGVRDEAKTVRGIAPCGRPCCCSYWLHRFTPINIRMVKEQNLALNPTKISGICGRLMCCMVYEHSNYNELWRSLPSPGS

SEQ ID NO: 105015 - protein, 54 aa, Unknown
  Obtained from environmental sample
  misc_feature (1)..(54): Xaa is any amino acid
MHILLTGAAGFIGFHLAQRLLSEGRGVVGLDNLNDYYSVRLKRDRLALLEQHAA

SEQ ID NO: 105016 - protein, 266 aa, Unknown
  Obtained from environmental sample
  misc_feature (1)..(266): Xaa is any amino acid
ALCWCVSGRCYWSSFLGGKSGLRGRCVQPCRRNYSQGTAGKKHHGGRWFSCLDLSLDVLAKTLLQIPRLCSWKIEGRKKGPHYVYHVVGAYRLLRDNPNDAQAKKSALDFLEMALGRSPTRARFLPQRQTTPTAPDGLTSSGLPAGRVAISAEGMPVLKARLELLPKDYLRVGVEDERWHATLPVSRRIPKGGTLLLKLAKHKTPKAGTPVFLIDRREPELTALLRQWEQRLAACAGVKAAAAEAVLCLPAPVKTRRLPDMLLRAG

SEQ ID NO: 105017 - protein, 274 aa, Unknown
  Obtained from environmental sample
  misc_feature (1)..(274): Xaa is any amino acid
GQYLNYLEKNAYRKIADLEFEMYEAAPEEPLRSPPVNVEWKKIQTPAPWGKEWACFWFRAAYSAPLSDIPVFLSVTPNADSLAFIDGKPAGAFNMYHNKFRIDADGKEHTLHVEAYSGHLHGGCGPFEGASIVINIGKTLTGFPNTFSGGCLLERRLAIHSLFYDIRALYETAKIADSNSLRRAQILKGLSFALNRISLNADGKELEKQAVAAAQTLAPLLALKNGPSTPAVHLVGHAHIDHAWLWHIAETERKVARTFVNMLRFIKEYPEFIF

SEQ ID NO: 105018 - protein, 267 aa, Unknown
  Obtained from environmental sample
  DOMAIN (33)...(151): PEP-utilising enzyme, N-terminal
  misc_feature (1)..(267): Xaa is any amino acid
VRFIDSDSVQPTQAELTAHPLPRSLSRLNPDLLYGNVLASGVGVGTLTLLQSDSLDSYRAIPASAQDSTRLEHSLATLAEQLNQQLRERDGESKTILSAHLSLIQDDEFAGNIRRLMTEQHQGLGAAIISNMEQVCAKLSASASDYLRERVSDIRDISEQLLHITWPELKPRNKLVLEKPTILVAEDLTPSQFLSLDLKNLAGMILEKTGRTSHTLILARASAIPVLSGLPLDAIARYAGQPAVLDAQCGVLAINPNDAVSGYYQVA

SEQ ID NO: 105019 - protein, 233 aa, Unknown
  Obtained from environmental sample
  DOMAIN (50)...(157): Toprim domain
  misc_feature (1)..(233): Xaa is any amino acid
KKVIEKIVEAATAREAARKARELTRRKSALDISSLPGKLADCQERDPAKSEIFIVEGDSAGGSAKQGRNRANQAILPLRGKILNVERARFDRVIGSEMIGTLIMALGCGIGETEFDLEKIRYHKIIIMTDADVDGAHIRTLLLTFFYRQMPEVINRGYLYIAQPPLYKVKRGQSEAYMKDDAALENYLVDIIAGEAVLETNTGTRVAHADLRELINSARKILKLSEPLLKFAP

SEQ ID NO: 105020 - protein, 244 aa, Unknown
  Obtained from environmental sample
  DOMAIN (30)...(216): ABC transporter
  misc_feature (1)..(244): Xaa is any amino acid
MVNPLEARNLSFSYGSHDILKNVSFSMEQGELLGLLGPNGSGKTTLFRCILGLDNNYKGEVFLEGENIRNKNPGAISRLAAYVPQAHHPSFNYTVMDMVLMGTSPGKREWALPGPCQKAAAEEALAKINFLDFRNRNFRELSGGEQQMVLIARALAQQTQVLVMDEPTANLDYGNQLRLLMNISDLSRQGYSIILSTHNPDHAFLFAHRVLALHNNELAAIGPPADVLSSELIHTLYGVKVRCE

SEQ ID NO: 105021 - protein, 253 aa, Unknown
  Obtained from environmental sample
  misc_feature (1)..(253): Xaa is any amino acid
MGKFARFGLTLLLTTATIVGAVAGEPSFGIFTDTRDGQTYRMVKIGEQTWMAKNLNYQTDSGSWCYEDKTDNCKKYGKLYDWKTATTVCPKGWKLPSREEWDSLVATAGGKEVAGKTLKAKSGLNNRVWWYAYNHNSTDDFGFSALPGGRGSDGGRFAADARASGYWWTATEYSDATEYSSGNAYFRTMSYNGDGVYENIPFKDNGYSVRCVAVEISDNNDRSKLKNKPSDINPNEDGGIIMLGARKKDRQKC

SEQ ID NO: 105022 - protein, 150 aa, Unknown
  Obtained from environmental sample
  misc_feature (1)..(150): Xaa is any amino acid
MTEGKGGNRRIEKHNLIVCEGKDDKEFLVCFLKSFKPESVVDIQVIYAEGERKIRDLLKNLHDQPNFEMLKSLVVIRDADNNPSGASQSIRSALETAGFAVPEGPCLVAGGNGTKATAKNIKVAYALFPKFNQIGANASGAIENLCMDIL

SEQ ID NO: 105023 - protein, 92 aa, Unknown
  Obtained from environmental sample
  misc_feature (1)..(92): Xaa is any amino acid
MSAPVIELRGIKREYRMESKGASPTDAVVVRALRGVDFSAEAGEFVSVMGPSGSGKSTLMNILGCLDKPTAGTYTLDGIETSKSDSDTFAYI

SEQ ID NO: 105024 - protein, 100 aa, Unknown
  Obtained from environmental sample
  misc_feature (1)..(100): Xaa is any amino acid
DRTDMDLLYGCLLEWGLPLTISHTREEVDGFIVHTCQSGDAIDLIACFGEHISEKAVREIARRSPLRAVFRDSSFTNSQEKINVSEILKLLAPKTEMKVI

SEQ ID NO: 105025 - protein, 265 aa, Unknown
  Obtained from environmental sample
  misc_feature (1)..(265): Xaa is any amino acid
GTLKRSGSDIRKRQEVGRGLRLSVNQGGERMDENMLGREGVHNTNVLTVIASECYEAFAKGLQREIAEAVADRPRKVSSELFAKIFNDDEAVSIYESLIKNEYLEGGKLTEKYYEGKKNGAITVPPQVADRADAIIAILDTIYDPNATRIEDARKNTIVATLDRGKMNSKTFQELWSRINTKSYYIVRFDETELIDKSVAALNDRLRVPKIYLTVETGVQVKDIESKEQLETGAAFIRQESSREETDPRVTIKASSSIRYDLIGK

SEQ ID NO: 105026 - protein, 254 aa, Unknown
  Obtained from environmental sample
  misc_feature (1)..(254): Xaa is any amino acid
EYEVTAGVEDDVPGKRPPEFGPIHVAKPGGPGLYEPPRGQLTLAADPPPQTPADEAPGQLSLPPNVRPYIPPRLSRPAEQPFAAPPPAQSAQPAAPQPRFAPKRTPDEIAAIKADIRELTELVKNVLTPASARIMSAPKDGSGVTTAGDMEWDAFVKRLTDAEVKPDIARKLVNSIRGGSQITDAELEEKLFTALSEQFPVSGALKLKKESPLVVAFVGPTGSGKTTTLAKLAAYCCMNKSKRVSIITADTYRI

SEQ ID NO: 105027 - protein, 161 aa, Unknown
  Obtained from environmental sample
  misc_feature (1)..(161): Xaa is any amino acid
MTETSEVFTKALLLGMEPERNNFADDEPVEILPFEEALAYMRKRVPVDKETYYALNDKMRYRAFTVGRLADGDAVKQVQEMLAGALEDGSGLQKFLQMTEGELANAAGMGRGAGWYYETVYRTNTSTAYNVGRAIGFEEIPPIALELIGIDDMRQTEICHA

SEQ ID NO: 105028 - protein, 51 aa, Unknown
  Obtained from environmental sample
  misc_feature (1)..(51): Xaa is any amino acid
LFHEIWGDEYFNKSNNTITVHIRHLREKMDDTTDNPKYIKTVWGVGYKIEK

SEQ ID NO: 105029 - protein, 227 aa, Unknown
  Obtained from environmental sample
  misc_feature (1)..(227): Xaa is any amino acid
DVKPEEIFLSTFTEKAATQLKDGFRSLLGMVTNRTGKPYDISGMALGTVHSICRKLITDRRFSKDASRRHPPVLLDDLSQYFKIYGRTFWTYLCLGAGFADLETAIADINAFFGNATKSGPSQSRHLAVTSVIAFFNRLSEESLDPGQCKLSMKLAEECGIHTETFDKLVEMYRLYLEGLKKPPEHVDFSLLQRAAFDQIQTYNGATKIYKHVIIDEYQDTNAIQEK

SEQ ID NO: 105030 - protein, 269 aa, Unknown
  Obtained from environmental sample
  DOMAIN (1)...(202): Tetrapyrrole (Corrin/Porphyrin) Methylases
  misc_feature (1)..(269): Xaa is any amino acid
VGLLTVRGLETLQSADVVLYDRIVSDDILAVIPDSAEKIDVGKHAGNHPVPQDIINNLLLEKARQGKNVVRLKGGDPFVFARGGEELELLAANGIPFEVVPGVTSAVAAAAYAGIPITHRDYASSFHVITAHAKNNEPPNIDYDALVKLNGTLVFLMGSAAIDDICGKCAAAGMDKEMPAAVVENAAANSQRKFLGTIADLPRIARINNVKSPAVIIIGEVCRFSTRYDWFDKKPLRGKRVVVASIKHEMSNAVNTVRQNSTSKLSDFL

SEQ ID NO: 105031 - protein, 175 aa, Unknown
  Obtained from environmental sample
  DOMAIN (2)...(175): Family 4 glycosyl hydrolase
  misc_feature (1)..(175): Xaa is any amino acid
MKIAFIGAGSTIFAKNVLGDCILTPEFGKFEIALYDIDAGRLDDSFKLISAINTKYKGKADIKAYGAADAEKAFKNADYIVNAIQVGGYDPCTITDFEVPKKYGLRQVIGDTVGIGGIFRGLRTIPVIENYAKIIERVAPKALFLNYTNPMAILTGYMQKHTNINTVGLCHSVQA

SEQ ID NO: 105032 - protein, 74 aa, Unknown
  Obtained from environmental sample
  misc_feature (1)..(74): Xaa is any amino acid
CYVGNLPEQLAALNRSHINVHLAAIHASRTKKREDVYMAAYLDPHTAAELSMDDIKSMCDDLIAAHGSWLPKYN

SEQ ID NO: 105033 - protein, 76 aa, Unknown
  Obtained from environmental sample
  misc_feature (1)..(76): Xaa is any amino acid
MNQEAVKEKLEQIHKSPVEYTVIFSGKRTGKVNGLYKPFTREIIIHNKNFNDDSGQNEMLLMFTAIHELAHHVLMT

SEQ ID NO: 105034 - protein, 280 aa, Unknown
  Obtained from environmental sample
  misc_feature (1)..(280): Xaa is any amino acid
GKTLTWNHLYCELPSKFVTHSTKTLDTIRGQYRDTRNVFKRSLDELTIDSVDTVLELVAQGSLYRGEEWTPLLKQFREYQKEYAKIEPLQVHRKEDYCWEKSVKVGQAVGRIRNHSIGVLLTDISRGVDLDEAVKKYEAIVAPANYKRPKAIYTKKMIEAAQKEIEALGYADSLERRFATLDDITVNNILFSNKDAAKRIAGNVFEQMADTLPVNPKSFGKIEEIPAETFIKDVLPTVQSMEAMLEGRHSGNLVSLIAPKNREAKSPFKWGNAFSWAYAG

SEQ ID NO: 105035 - protein, 227 aa, Unknown
  Obtained from environmental sample
  misc_feature (1)..(227): Xaa is any amino acid
LVEVKRSRIWGVAVEIKAESAVAGKVRLKEIIDIKEGHWADSNRSLLKLYEWIARYYQCPVGRVFRPVVGKAIINKKAKTVTVYRYVGAEDNGNGIDTDNARPVLKDNHRIALEKIRGCPEPLSAAQIGARFGVTASALASLCKKGYLSKEIKTVLRDADELSYPSVDGEKIALSPGQRDCVERVAASFSAPDKPFLLYGITGSGKTHVYTELAKLALAAGRGVIIL

SEQ ID NO: 105036 - protein, 253 aa, Unknown
  Obtained from environmental sample
  misc_feature (1)..(253): Xaa is any amino acid
KIGGGVTVIGEKAFTKNQLTSLTIPNGVTTIGEEAFWENQLASVTIPGSVTTIEAWAFQNNKLTSLNIPNGVIEIGAGAFFDNQLTNVTIPDSVTTIGAEAFAGNPLTELTLSPGNASFTTKASYLLSKDEQQVIFYFGAEKDAAIPDGITLIGPGALSKNQLTGVTIPESVTTIEYRAFRQNQLTSVTIPGSVTMIGDMAFAGNQIASITIGANVTLGRASLDDNGYFNYTYSNYGRRAGTYILRNGYWSRQ

SEQ ID NO: 105037 - protein, 74 aa, Unknown
  Obtained from environmental sample
  misc_feature (1)..(74): Xaa is any amino acid
GARQLAEELLQRVRGLNLPHSESQAAPYLTVSLGVTTGQVAYPQTWEAYLKRADEALYLSKQNGRNRYTFLAFT

SEQ ID NO: 105038 - protein, 174 aa, Unknown
  Obtained from environmental sample
  DOMAIN (5)...(174): Triosephosphate isomerase
  misc_feature (1)..(174): Xaa is any amino acid
MHRKPFLAGNWKMYKTSRQALEFFQDLLARLKPFPVDREVAFGVPFTSLEAAARAVRGTPIIIAAQNVHWEAEGAFTGEISAPMAAAAGAGAVIIGHSERRQFFGETGETVNKKAKAVLATGLRPIICLGETLAERESGQTFEVLAGQLAEALDGLDQALDLAYEPVWAIGTGR

SEQ ID NO: 105039 - protein, 241 aa, Unknown
  Obtained from environmental sample
  DOMAIN (169)...(234): His Kinase A (phosphoacceptor) domain
  misc_feature (1)..(241): Xaa is any amino acid
GARHRGGQVVLGYAYDLRNIKKLEQSVIEAEERIKLVLDTSPMCCELWDRDCNIIACNEAAVKLYGLETKRYYMDNFFTLSPEYQPDGRRSQEKAAICLDKAFTEGSYSFEWTHQRPDGTPMPTEVFLSRFNYKDDYIVAAYTLDRREHKRMLSEIEMALFEAQDANRAKREFLARMSHEMLTPMNGIMGLTQLIKMESWNEGIKEYLDELDLSSRHLLRLIQDLLDMSGLEDKTFSFTES

SEQ ID NO: 105040 - protein, 194 aa, Unknown
  Obtained from environmental sample
  misc_feature (1)..(194): Xaa is any amino acid
MNKKLFVGITGILIAAALIAGCTLGDSSTAAKLIVKPYISIQPRGASFFTNAYTAPTLSIDIFDWDPKDGKLSYQWYSFTNIESYCTNGGGTEISGANEMSYTPSLTATADAITYFYVVVTNSNPEAQGEKKAVTQSEVVAISFSAPGAPLYPIVTANPTNATYGWGALLNPLKVAAILPANANGTLSYQWFQT

SEQ ID NO: 105041 - protein, 281 aa, Unknown
  Obtained from environmental sample
  misc_feature (1)..(281): Xaa is any amino acid
GTGVLNTNTFGSLATNDSVTYITLTAQWMAKGNITVTFMANGGGTPSFPTRNVTFNQPYGTLATISRAGYNFDGWYTEATSGTKVEATTTVSNTSAHPLYAHWTLKNVTITLDAKGGTPTNTTISGKPYGGNIGSDLPTKASPSAPSLSGKTFQGWSKDSAATTVNFDENTALTTANGVDDSSNPATLTLYAVWGNTYTVTFALNDGSGNNYTTVDNVPHNTSLGGRFPSSYPTRSGYTCNGWKDGTNTEFNSSTLVTGNITVNAQWLKNLTLSVSEPVPV

SEQ ID NO: 105042 - protein, 124 aa, Unknown
  Obtained from environmental sample
  misc_feature (1)..(124): Xaa is any amino acid
MLSNGSSKTALIIGAGPAGLTAALEFLKRGGVHPIVVEQENFVGGISRTSEHNGNRMDIGGHRFFSKSDWVMNWWKDIDGDMMTRPRLSRILYMRKFFDYPVSLNMNTIKGLGLGRMAKIGVSY

SEQ ID NO: 105043 - protein, 244 aa, Unknown
  Obtained from environmental sample
  DOMAIN (10)...(178): ABC transporter
  misc_feature (1)..(244): Xaa is any amino acid
SDAGFQVGKNERMGVVGRNGSGKSTLFKIILGEEGYDGGSINIPKNYSIGYLSQHLNFTHATVFEEACSALKPNEDGWVESYKVESILSGLGFDKETVEKKSPAMLSGGFQIRLNLAKALAAEPNMLLLDEPTNYLDIVSVRWLQKFLRSWQGELMLITHDRRFMDSVCTHTLGIHRQKMRKMQGNVAKLQDAILADEEVHLRTMENDASKREHLQKFIERFRYKSSKAKAVQSKVKAWSGTSH

SEQ ID NO: 105044 - protein, 73 aa, Unknown
  Obtained from environmental sample
  misc_feature (1)..(73): Xaa is any amino acid
MEIAEFREIVFANYRQAGRKLPWHFADPWGVMVSEFMLQQTQVERVVPYWENWMKLWPQPKALADDSMENDPA

SEQ ID NO: 105045 - protein, 250 aa, Unknown
  Obtained from environmental sample
  misc_feature (1)..(250): Xaa is any amino acid
MLERNPAPDDLRIKTVRSAPVAYKTGTSIGFKDAWSIAIFDRYVLCVWLGNFSGEGNSAFIGRLSAAPLSFSIIDAMLAEIPNEKLFARRPRPPEVKEVQVCAVSGDIPSDDCPQLKETLFIPGVSPISRCRIHRKVYIDTRTGYRTNETEGPYIRGEVREFWPSDILEIFEAAGLPRFSPPPYPPNSAEGGPASSGFPPSIISPLANTTYIIRPGLQADSKFNQMVLLAATDQDASELFWFANASFLGR

SEQ ID NO: 105046 - protein, 84 aa, Unknown
  Obtained from environmental sample
  DOMAIN (1)...(84): Ribosomal protein S9/S16
  misc_feature (1)..(84): Xaa is any amino acid
MVRQPLMVTSNENKYDILINVYGGGCNGQAGACRHGLARALCQVDHTNYTSLRSNGYLTRDPRMVERKKYGRPGARRRFQFSKR

SEQ ID NO: 105047 - protein, 93 aa, Unknown
  Obtained from environmental sample
  DOMAIN (20)...(88): Ribosomal protein S17
  misc_feature (1)..(93): Xaa is any amino acid
VAQEAAEKVRRAGGKKEFVGIVKSDKMDKTIVVAIETLTLHQLYKKYVKRVKKVKAHDEKNQAKIGDRVRVIECRPLSKEKCWKLVEILERAK

SEQ ID NO: 105048 - protein, 249 aa, Unknown
  Obtained from environmental sample
  DOMAIN (24)...(208): ABC transporter
  misc_feature (1)..(249): Xaa is any amino acid
MKVITITNVSVNNLKNVSLTIPLNKYVAFVGRSGSGKSTLAEEVIMAGYIKQKPEVSVPVKPALFKQRSSGYTQKHTLYRYITGKEERDGVSDISLSEYLKKKENDLRLPSSELISIAKQLGLSSVEMNKYICDMSLCEYNKFRFMKLIINSDAELFIVDEMAAGLSHSEALEAANVLKRLVSLGLSVIAVDHSMPFISSSDFIVELGPFAGESGGEIMFSGTTAKFKKTESWETMNNALMKSSISNSS

SEQ ID NO: 105049 - protein, 73 aa, Unknown
  Obtained from environmental sample
  misc_feature (1)..(73): Xaa is any amino acid
MEIRSAGACKDGPTISDSGNIIADAKLGLIKEPEILCKELDSIPGLVGHGLFAGLAKGAFIAGEAGVERIGLL

SEQ ID NO: 105050 - protein, 249 aa, Unknown
  Obtained from environmental sample
  misc_feature (1)..(249): Xaa is any amino acid
MRTTEKIKLYKPKNLAQSIVLLIFVVLLVSIGLFLFFGFTRLKEDVIGWKLEEMHTLVLTYSKMLDGDSIELDFQRKEKNVYYDKWSDISDSLIKETGMKYLYVMNIHYNDSIELYLEGRHLNGKSNFLRKLPTQDYDVELIDRLKNKSEMHICKMGNYPEYGGWLAYTYQSIKNSKGEVVAFVGADQEITNIESNIKDVRNRLFFLTFLFFIVVFLLITYLIRKIFISPISKIIEAANNFHLLNVSFR

SEQ ID NO: 105051 - protein, 75 aa, Unknown
  Obtained from environmental sample
  misc_feature (1)..(75): Xaa is any amino acid
MKFLSWNINGLRAGFDCFFDYIAGAGADFIAVQETRVTEPITDLDGLGYSVAWSISERRLGYAGIAILYKLPPLG

SEQ ID NO: 105052 - protein, 264 aa, Unknown
  Obtained from environmental sample
  misc_feature (1)..(264): Xaa is any amino acid
MTITANFRPIAYGMLSDKRDGRTYKTVKMPDGMVWMAENLNYAPSEGNGWIYRNNTAYSDKYGRLYDWPTARTACPEGWRLPTRQDWNRLGAAVGGKRRVDSDGNITWRGAGRRLKAVSGWGKYNNKGSGDWNGTDDYGFSALSGGYLCGAECYGGGYYGAGDDYTLSSTESGNWWADSPAPKTKRGGKQAYYRRIFYNSVDLKENNTYMSDGRSVRCVTGADGFVASTGAASYSLTVKAANGGSVTVNPVKTAYTSGEKVSIT

SEQ ID NO: 105053 - protein, 268 aa, Unknown
  Obtained from environmental sample
  misc_feature (1)..(268): Xaa is any amino acid
EDEKRDDRAHYRKMDVNRTEIKLGYYGENKGHGLSVRCVIDEAAPYKLTLTAATGGSVSADPAKASYRAGETVSITAVPERGYLFAKWTGGKAADSAYVTTTVKMNSDMAITAVFNKSAAPPVAYDTLTDSRDGKKYKTTVIGGKTWMAENLNYQTPGGSWCYDRKTDNCAKYGRLYNWGMAREACPAGWHLPTRYEWNELVKAAGGGKAADKNLKSTSGWKRAGNGSDVYGFSALPGGSYDDHNIKFEDIGDDGYWWTATEEKRIVP

SEQ ID NO: 105054 - protein, 183 aa, Unknown
  Obtained from environmental sample
  misc_feature (1)..(183): Xaa is any amino acid
MRREVIGNCELTCEDCMELMSRYPDKYFDLAIVDPPYGIGEDWIRRKGNRNIPFPETSYKNESVNEDYFNRLFRVSKNKIIWGYNYYTNILGPTNYLIVWNKICGENQAIKYSQGEIAYTSFHVPIRIMSIPWDGCRMGSETGIKKIHPHQKPIELYRKLLKNYAKPGWKILDTHLGSGSHAI

SEQ ID NO: 105055 - protein, 113 aa, Unknown
  Obtained from environmental sample
  DOMAIN (5)...(113): Histidine kinase-, DNA gyrase B-, and HSP90-like ATPase
  misc_feature (1)..(113): Xaa is any amino acid
VSVKANRNLLQRVLSNVMANAVQNTQEGETIRVEAAEGKTLRLSITNTGARIPEEVITRLFDPFFRLDTARTRHGAQSGLGLAIVKKALDRMGFPFALENSNDGVVFWVELPV
